United States Patent Application Publication US 2004/0029129 A1 - sequence listing, part 9

SEQ ID NO: 24148 - DNA, 1674 bp, Klebsiella pneumoniae
atgcaccacgcaacaccgcttatcaccaccattgtcggcggcctcgtgctcgcctttattctcggcatgattgccaataagctacgtatttctcctctggtgggatatctcttagcgggcgtgctggccggacctttcacccctggctttgttgctgacaccaaactggctccggaactggcggaacttggcgtcattctgctgatgttcggcgtcgggctgcatttctcacttaaagacctgatggcggtaaaatcgatcgccatccccggggctatcgcccagatagccgtggcgacgctgctgggtatggcgctctccgccgccctcggctggtcgctgatgaccggcattgtctttggcctgtgcctctccaccgccagtaccgtagtgctgctgcgcgcgctggaggaacgacaactgatagacagccagcgcgggcaaatcgccatcggctggctgattgtggaagacctggtgatggtcctgacgctggtcctgctgccggcgattgccggtatggcggagaaaggcaacgtcggcttcgcgtccctggccctcgacctcgggatcaccattggcaaagtggtggcctttatcgccattatgatgctggtcggccgccggctggtgccgtggatcatgtcgcgcagcgccgccaccggctcacgcgagctgttcactctgtcggtgctggccctagcgctgggcatcgccttcggcgccgtggagctgtttgatgtctcttttgccctcggcgccttctttgccggcatggtgcttaacgaatccgagctcagccaccgcgccgcccatgacaccctgccgctgcgcgacgccttcgcggtgctgttcttcgtctccgtcggcatgctatttgacccgatggtgctggtccaacagccgctggcggtgctggcgacgctggcgattattatctttggtaaatccgcagccgcctttttccttgtgcggatgtttggtcactcgccgcgcaccgcgctgaccatcgccgccagcctggcgcagattggcgagtttgcctttattctcgccggcctgggaatggcacttaacctgctgccgcaggccggacaaaatctggtgctggccggggcgatcatctcaattatgctcaacccggtgctgtttaccctgctggaaaaatatctcgataaaaccgaaaccctcgacgagcagacgctggaagaggtcctggaagacgagaagcaggtgccggtcgatatctgcaaccacgcgctgttggtcggcttcggccgcgtcggcagcctgctgggcgagaagctgatggcccaggggatcccgctggtggtggttgaaacctcgcgcacccgcgtggatgagctacgcgagcgcgggatcagcgcggtgctcggcaatgccgccaatgaagagatcatggagctggcgcatctcgattgcgcccgctggctgctgctgacaatccctaacggctacgaggccggagagattgtcgcttccgcacgggaaaaatgtccgaatatcgagattatcgcccgcgcccattatgatgacgaagtggactacattatcgatcgcggagccaatcaggtggtgatgggcgaacgggaaattgcccgcgccatgctgcggcttctggaaacgccaccggccggcgaagtggtcaccggc

SEQ ID NO: 24149 - DNA, 1146 bp, Listeria monocytogenes
atgaaatttgttattgagcgtgatcgtcttgtccaagcagtcaatgaagttactcgtgccatctctgcaagaacaacgattccaattttaacggggataaaaatagtcgtaaatgatgaaggtgtaacactaactggtagtgattccgatatttccatcgaagcatttattccattaattgaaaatgatgaagtaattgtagaagtagagagttttggtggaattgtacttcaatcaaaatactttggcgatattgtccgtcgtttaccagaagaaaatgtagaaattgaagtaacgtctaattaccaaaccaacattagttctggtcaagcctcctttacactaaacggcttagatccaatggaatatcctaaattacctgaagtaacagatggaaaaacaattaaaattccaattaatgtactaaaaaatattgttagacaaactgtttttgctgtttctgctattgaagttcgtccagtacttactggtgtaaactggattatcaaagaaaataaactaagcgcagttgcaaccgatagtcatcgtctagctttacgtgaaattccacttgaaacagacattgatgaagaatacaatattgttattcctggaaaaagtttatctgaattaaataaacttttagatgacgcaagcgaatctattgaaatgacccttgccaacaaccaaattctttttaaattaaaagatttattattttactctcgtttacttgaaggtagttacccagatacatctcgattaattccaactgatactaaatcagaattagtcattaattccaaagcatttttacaagcaattgaccgtgcgtcgctacttgctcgcgaaaatcgtaataacgttattaaattaatgacgctggaaaatggccaagtagaagtatcctccaattctccggaagttgggaatgtttctgaaaatgtcttcagccaaagttttactggcgaagaaatcaaaatatcttttaacggtaaatacatgatggatgccctacgtgcttttgaaggtgatgatattcaaatttccttctcaggtactatgagaccatttgtacttcgaccaaaagatgcagccaatccaaatgaaattttacaattaatcacgccggttagaacttactaa

SEQ ID NO: 24150 - DNA, 627 bp, Listeria monocytogenes
atgaaagcaatttttattacactcgaaggcccagatggctctggtaaaacaacagtaggaacactacttaatcaaaaaatgacggaagctggcatcgattttattaaaacgcgcgaaccaggtggcagcccgatttcagaaaaagtaagaaatatcgtgctcggaattggcaatgaagaaatggacccaaaaacagaagtactacttattgcgggagcgcgccgtcaacatgtcgttgaaacaatccgtccagctctagcggcagggaaatcggtactttgtgaccgtttcatggatagctctcttgcgtatcaaggtgccggacgtgacatgaatatggaacaagttttacaagtgaatttatatgcgattgaggatacattgcctgaccggacgtattatctcgatgtgcctgccgaagtcggtttagcaagaatcgccgctaataagggccgtgaagtcaatcgcttggataaagaagatattacctaccacgaaaaagtccaagctggctacgaaaaagtcatcaacatgttcccggaacgttttatgcgagtggatgctacaaagacaccagaagaaatcacagaaactattttagccgacattttacgacaattagcctaa

SEQ ID NO: 24151 - DNA, 873 bp, Listeria monocytogenes
atgaaagttaaaaaagcagtcatcccggcagcaggacttggtacaagatttcttcctgcaacaaaagcgatgccaaaagaaatacttccaattgtagacaaaccaacgattcaatttatcgttgaagaagcagttgcgtctggaattgaagatattctaattgttacagggaaaggaaaaagagccatagaagaccatttcgactctgtacctgaacttgaaaataatttacgtgaaaaaaacaaattagatttattacatttagtggaagaaaccactaatattaacttacattttattcgtcagtcaaaacctaagggacttggagacgcaattttacaagctaaaggtttcattggtaacgaaccatttgtagtaatgcttggggatgacatcgttcaatctaaaaccccttgtgctaaacaattaatcgatcaatacgaaaagactcatagttctgttatcggtgtacaaaatgttcctcgcgaagaaacatatcgttacggcattattgatcctgacaaagaagtaagtgatcgtttgtataatgtaactggttttgttgaaaagcctaatgtagaagatgctccttccaacttagcgattttaggaagatatttattaactccagaaatttttaagtatctagaaacacaagaagctggttctggtggagaaattcaattaactgatgcaattaaccgtttaaatgaaattcaacctgttttcgcctatgattttgaaggagaacgttttgatgttggtgataaattcggctttattgaaactactttaaaatttgcgctaaaacatcccgaaattaaagacgatgtccgcgacctaattatccgtctcggcgatgaacttaaataa

SEQ ID NO: 24152 - DNA, 903 bp, Listeria monocytogenes
ttgcatatcttacttacaggcgcaacaggttttattggtgatcatttagtacatgaattagaaaaatctgatcacgagctttatattttaacaagacaaaagctaaaaaaccgcgcgaatgtacactatattgaatggttgaatgaagataaattgccgaatttagaagatttaccagtggatgtttgtattaatttggcaggtgctggtttgatggatgaaaaatggacttatgatagaaagaaagtgattgtaaatagccgcatcgaagctacttcagcgcttctatcaattgtgaaaaaaatgaaatcaaaaccaaaattgtggattaatgcgagtgcaattggggcttatacttcttctaagtcaacgatttatctagatacagaagaaaatacttatgcagataacttcttaggaaaaacagtttatgaatgggaaaaaacagctagtgcagcaagtgatttgggtattcgtgtcgtgtatgctcgctttggtcttgtactcgggactaacgggggctcgttccctgtttttgaaaaattattccaaacctatacagggggtcgctttggtaatggcagacaatggtattcttggattcatgtggatgatgttgtagcggcaatcttatttatttttgaccacgaacaaataaacggtgtcgttaattttacagcccctcaccctgttcaagaaaagaaatttgctgaacgccttggaaaaaaaatgcataaaccgtataaaacacctgtacctaaaaaaataattaaattcattctcggtgaacgtgcaatgactattttggacagtcaacgtgcttatccggaaaagctgatgagtaaccattttgagtttcgctttgaaactttgcaagaagctttagatgacttgttagattga

SEQ ID NO: 24153 - DNA, 1743 bp, Listeria monocytogenes
ttggtggagaatttaaaacaactgcaagaacgagttgcagtaagtgatggacgagcaaaagcagatttagtgataaaaaatggacgaataataaatgtcttttcaggagaaataatggacggagatattgccatcaaaaacggttatattgctggtattggtagttttccagatgcagaaaagataatagatgctgccggtgcctttattgcacctggttttattgatgcacatgtccacgtggagagtgcgatggtcacacctgctgagtttgcccgtgtcttactcccaaatggtgttacaacgattgttacagacccgcatgaaattgccaatgttgctggagaaaaaggaatcgagtttatgctagaagatgccaaaggggctccactagatatgtttgtaatgcttccttcaagcgttcccgcaacggaaggggagcataatggagaaacactacacgccgagaaactccacccactttatagacacgaaaaagtaatcggccttgcagaagtaatggactttccgtccgtagcaaagggcagcgatgatattttaaggaaaataatcgatgctaaaaaagaaggcggtcgaattgatggccacggtgccggcctaactagcgctgatttgaataattatttggcagttggcattcggacagaccacgagagcaccacggcgaaagaggcgacagaccgcttacgtgctgggatgtttgttatgttgcgtgagggaactgtaggtcgtgatttacttcaaacaattcctgccgtatctgaaaaaaatagccatcgtttttgcttttgcacagatgataaactaattaatgatttaattacagaaggatcgattaactataacattaaactggctatcaaaaatggaatagacccaattaccgctatccaaatggcaaccattaatgctgctaattgtcataatttgccataccttggtgcagttgctgcaggataccaagcggatattgtttttctaacagatatagaaacagtagaaattagtaaagttttgaaaaatggagaagtagtcgtggataatggtgttcgtaacgaagcagcttttaagcaacaagcagcagtaccatttgtatctccaccaattaatcatcatgtacatttacaagatttagcgttacctttgaccaaagaaacgtgttatgtaatcggaatgcaacccaatagcttatttacagaaaaacgtatcgaacaagtgactattcaaggcggtaagtttgttccaaccgtggaaaacgatttactcaaaatggcagttgtagagcgtcaccatgatactggttgtgtcggagtgggtatcgtaaaaggctttggtttaacagaaggcgcaattgctacgactgtcgcgcacgattctcataatattgttgctgttggcgttagtgatgaagcaatgaaagcggctattgatcatattactcaaacaggtggcgggattgctgtagtaaacggagctggtcaggtacttcatgatttagcccttcctatcgctggattgcttagtgataaatcatacgaagaagtggaaaacgatttagcgggtcttttaaatgcctttaaacagattagtacagctaacggttttgatccatttttaacattgtcattcttaacattaccagttattccagaattaaaattaaccgatcaagggttgtttgattttgctacgtttcaaattatttcaaatgaagtaaactaa

SEQ ID NO: 24154 - DNA, 2196 bp, Listeria monocytogenes
ttgaatgcaaaagaattagtggacggattgaatccggaacaacgaagagcagtagaaagtacagaaggacctttattgattatggctggtgccggaagtggtaaaactcgagttttgacccatcggatagcttatttagtgagagaacgtggcgtaaatccgtataacattttagcgattacgtttacgaataaagcagctcgcgaaatgaagtcgcggattggcaatttaatgggcggagaagcagaatctatttggatatctacttttcactcgatgtgcgtacgaattttacgccgtgatattgaccgcattggctatgaacgtaattttactattttagatggcagtgaccaattatcggttattaaaggtattttgaaagaaaagaatgtcgatcccaagaagtttgagccaaggggtattttggcttctataagtaatgcaaaaaatgaactgataacagcaagcgaatatattaaagaagcaagtggtttttatgacaaaatggtcggcgaagtctacgagaaatacgagaagaaacttaagaaaaatcaagcactcgattttgatgatttaattatggtcaccattcaattatttgaacgtgtgccagatgttttagaatattatcagcgtaaattccagtatattcacgtggatgagtaccaagataccaaccacgcgcagtatttacttgtgaaacagcttgcttctcgtttcaaaaacttatgcgtcgtaggtgactcggatcaatctatttatggttggcgcggggcggacattagtaacatcatgtccttcgaaaaagattacccaaatgcgaaaaccattttgctagaagaaaattatcgttcaaccaaacgtattttagaagcggcgaaccgtgtgattgaaaacaatggtaaccgtaaaccaaaaaatctttggacaagtaatgcagaagggaagaagattttttatcataaagcattaacggaaaaagaagaagcggcctatgtagttatgaaaattcaagaagaagtaaataactcgaatcgaccactttctgactttgcgattctttatagaactaatgcacagtcccgtgtaatggaagaatatttcatgaagtcgaatatggcgtacacgatggtcggcggtacaaagttctatgacagaaaagaaattaaagacattttggcgtatttacgtcttattagcaataatgaagatgatattagtttgacccgtattgttaatgttccaaaacgtggtgttggaccaggcacattagacaaactaaacaatgttgcaacaacctatgatctcagtctgttcgaagtgcttaaccgcatcgaattagcgggaatttcgcctaaaataagcaaagatttagttgctttccatgatttgattcgtggttttacgcaaatgcaagattttttatccgtaaccgaactcgtagaagaaatccttgaaaaaacaggttaccgagcaatgctaaaaaacgaacggacaattgaagcgcagacacgtttagaaaatatcgacgagtttttatctgtaacacaaaactttgaaaaggaaaatgacgataaaacgttaattgcctttttaactgatttagcactcgttgctgacgtcgataagttagaagaagacaatgaagaacaaaatggggctgtcacattgatgacacttcactctgccaaaggactagaatttccagttgtctttttagttgggatggaagaagggattttcccacattccagagcgatttatgaggaagatgaaatggaagaggagcgtcgtcttgcttacgttggtatcactcgagcggaagaagaacttttcctaacgagcgcttactcacggatgctttatggacgcccatcatctaatcaggaatctcgttttattggagaaatccctcgagatttactggaattaggtaatgaaaacaaactaaaagctgataaaccatatgctaaacctcgtattccacaaaaaacaacaaccgcctacaaatcttcaggcgcagaaacacttggttggacagtcggcgacaaggctagtcataaaaaatggggcgtaggaacagtcgtcagtgtcaaaggggaaggtagcggaatggaactagatattgcattcccgagcccaactggcgtcaaacgattgctcgcagaatttgcgccaattgaaaaagtataa

SEQ ID NO: 24155 - DNA, 1107 bp, Listeria monocytogenes
atggcagaaacactcaaagaaaccttagaagaaacaaatgctgaattagaaactgtcgaagtagtagaaacggaagaaaaaactactacttcagcagattcaggtatttcaagacgtgaaaaagccgcgcttattatttggagccttgatgaacaaatcgcgaccgaagtggttgatttgctccctgatgcatccaaacaacgccttgcacgagaaatggccaaaatgaaagaaatggacggcggcgcagtggaagaagcgactagagaatttttaggagaactagaacttctttctggaggaattgctaaactcgaccgcgaacatttacaacgcttgttcccagacatgacgacggaagaactaaatcaactcatttacggggtagaagcagaatcacgtatcggcgaaaccgcgctagatattctacgcgaaattgatgatgttgactccttgtttacaattattagcgacgaatcgccacaaaccatcgcgatgatagcctcttacatgaaaccagaagaagcatcgaaactactagcattactaccggaagaaaaaatgattaacaccgtcattggtatcgcgagcctagaacaattcgatagcgaagtcatgcaaaacgtttctaacttactaagaattaagctcgacacaatgtcgaatagctcactgaacaaaacagacggcattaaaaatgtcgcaaatatcttaaacaacgttacccgcggtttagaacgaacaattttcgaacatctcgacgccgaacaagcagaactttccgaacgcatcaaagagaaaatgtttatgtttgaagatattattctgcttgataacatgaccttgcaacaagttctggccgaaattcaagacaacaataaaatcgctcgagcacttaaaaatgaaaaagaagaactcaaagaaaaaatcctatcttgcgtatcgaaaaaccgtcgcgatatgattaccgaagaactagaagtccttggcccaatcagactttccgatgttgagcaagcccaacaagatatcgccaatgtcgttaaaaatctagaaaaagacggcaaaatagttatccaacggggggaacaggatgtccttatctaa

SEQ ID NO: 24156 - DNA, 579 bp, Listeria monocytogenes
atgaatttacctaataaattgacggttatccgaatttttatgataccaatttttgttattctttgtgtagtaccatttgactggggaagcgttacttggcttgattcaactatcccagtgacaagtttagttgcaaccattattttcatcgtagcggcccttacagattggtttgatggacatttagcacgtaaatataatttaataactaacttcggtaaatttgccgatccgatggctgataaactacttgtagcagctgcatttattattcttgtagaaatgcatatcgcgccatcttgggtagttattcttattattagtcgtgaactagctgttactggtctacgcttacttttagttgaaggcggagaagtgcttgcagctggtcaacttggtaaaattaaaacattcacacaaatgattgctattccgcttatgttattaaataactttccatttgcttggacgggtattcgtgtagatttagtgttcttgtatgtatgtgcattctttgcagtatggtcaggaatcgattatttctacaaaaatcgtggtgttttcaaaggatctatgtaa

SEQ ID NO: 24157 - DNA, 426 bp, Listeria monocytogenes
gtggcaaaaaaagtgattaaagaagttaaacttcaaattccagcaggtaaagcaaatcctgcacctccagttggacctgcattaggtcaagctggcgtaaacatcatgggattctgtaaagagtttaatgctcgcacagccgatcaagctggtcttattattcctgttgtgatcactgtatttgaagaccgttcgtttacgttcatcactaaaactccaccagcagctgtattacttaaaaaagcagctaaagtggaaaaaggatccggtgaaccaaacaaaacaaaagttgcatctgtaactcgcgctcaagtacaggaaattgctgaaacaaaaatgccagaccttaacgctgcaaatgttgaatctgcaatgctaatggttgaaggtactgcacgttctatgggtatcactatccaagactaa

SEQ ID NO: 24158 - DNA, 711 bp, Listeria monocytogenes
atgatttatgcagagatattagctggcggtaaaggtacgcgcatgggaaatgtcaatatgccgaagcagtacttgccattaaaaggaaaaccaattattgttcatacaattgagaaattcattttaaatgaccgttttgaaaaaattattattgcaacacctaaagattggattaatcacacacaagatattattaaaaaatatatatttgattcgcgtgtaattgttattgaaggcggaacagatcgaaatgaaacaattatgaacggtatccgttatgtagaaaaagaattcggcttaaatgaagatgatattattgtaacgcatgatgccgttagaccatttatcacacatcgtattattgaagaaaatattgatatggcattagaatttggctctgtagataccgttatccctgcagttgatactattgtagaatctactaaccatgactttatcacagatattccagttcgtggcaatatctatcaaggtcaaacgccacaaagctttaacatgaaaacgattcaaaaacattataataatttaacagatgatgaaaaacaaatcttaacagatgcttgtaaaatttgtttgcttgccggtgaaaaagttaaacttgtaaacggtggaatttcaaacataaaaattaccactccatatgatttaaaagtggcaaatgcgattgtacaggagaggattaactcatga

SEQ ID NO: 24159 - DNA, 426 bp, Listeria monocytogenes
atgggacttacagcaactgaagcactcatgaaaatgaaggaaaaaggctataaacacacagataaacgtgaatttctaattaacttactagctcggaaaaataaatatttgacggcaaaagatgtcttagaaaatatgaaagatgatttcccgggaataagttttgatacgatttaccgcaatctctctttatttgtagaattaggtatttttgaagaaactgatctttctggtgaacgcaatttccgtttagcttgtacacacgaacatcatcatcatcactttatctgcatgaaatgtggtaaaacaaaagaaattatgatgtgcccaatggattttttaaccgaagctttacctggttaccaaattgacgggcacaaattcgaagtttacggcgaatgtccagaatgtttacaagcctcttaa

SEQ ID NO: 24160 - DNA, 537 bp, Listeria monocytogenes
atgaaccaaaataaaatcacggctggcggactggaatttctagtccgctttgctttgccaacggatcgcctcaaaataaatggcttaatgatggatacagctcgctggttaaaagaatcgggttcaacccagtggagcgacattttgcatggttttgatgtccataatatcgaacaacgtattgaacttggtgaagttgccctttttgaaacggaagcgggtaaacttgctgggacaatgataattcggaaaacgcctagtgattgggatacagatttgtgggataatttggcaattgataaagcctattatttgcaccgtattatggtttctcgagagttttccggaatttcattaagtaagcaaatgatttattttgcggaaaaactagggattgaaatgtccgtgccgttcattcggttagattgcattgaaagtaataaaacgctcaatcaaatgtatctccgttatggttttcagtttttgggcacgaaaaacgggtttcatttatatcaaaaaaagctgccacaaaagtga

SEQ ID NO: 24161 - DNA, 1224 bp, Listeria monocytogenes
atgattgaaaaaagaaataccattagaatggaacaagcgagagaagtattatgtaaccaaataacgcatcttccagtagaaaagaaacatgtgacagaggcgttaaatcaagttttacaagaacctattttcgcgccgtttcctgctccatattttaggcgttctggttatgatggctttgcgattactgaggtggatgacgggaattatcctatcaccttgcgcgttgtagcagaagttccgtgtggagaaacatacgataaaccgctaaaacctggtgaaaccgtccgaataatgactggggcaaaagtgccagataatgcctcgaaaattattatgcttgaacaatcaagagaagcggataacgagaatgaaatcatacttataaatacacaaaaatctagtaacattacagaaatcggtacggagtttgccaaaggagatttgctgttagatcgtggacacattttaaatgccggttcgataagtttactgtcatcctttggaattcaagaagtacaagtcatcagaaagccaaaagtagctattttatccacaggtagtgaacttgttcctgctggaaatccacttccagatggcaaaatttttaatagtaatcaaccgttactggagaatttactaaaagtacatcatgccgagatttgcgctgccgaacaattacctgataattatgaggacacgaaaaaccgtttactagaattgactaagatagcggacttaatagttactacgggaggtgtttctgtaggtgattttgactacatggctgatattgcaaaacaagaagcagaattactttttaataaaattcaaatgcgaccaggcagtccaacaacagggatgtggttggataaaacgcttatcatcgcgctttctggcaatccaggggcatgctttacaggtttttacttattagtagaaccagtattaactaccttaatggggaaagatacaactgagacgactcaagtccgtgcaaaaatggcgagcgattacaccaaaaataatggctatgatcgttttttacgaggaacctatcgtttgtctgacgaaggggaatatttggttgagttggttggtagcgacatgtcgagtgcgctcggtaatcttcatttaacaacctgtttattcaaaatcccacgagggcaagtagggaaattaaaaggagaagaggtcgaagcatggctgctatactccaaataa

SEQ ID NO: 24162 - DNA, 3561 bp, Listeria monocytogenes
atgttattaaaacgattagaaatgaatggctttaaatcctttgctgacaaagttgcgatagatttcgtgcccggcatgactgcagttgtaggaccaaatggcagcgggaaaagtaatattacagaagcaatccgctgggtacttggtgagcagtccgctaaatcgctccgtggtggccgaatgggtgatgttatttttgctggaagtgatacacgtaaaccaattaattttgcggaagtatcgcttatcctcgaaaatgaagaccattttttaccacttgattatagcgaagtagctgttactagacggatttaccgtaatggtgatagtgaatttttaattaataaagagaattgtcgactgaaagatattgtcgatttatttatggattctggacttgggagagagtctttttcgattatttcgcaagggaaaatcgatgaaattctgaacagtaaaccagaagaacgtcgctccatttttgaagaagcagccggcgtattaaaatataaacaccgtaaaaaacaagcagaaaataaattatttgaaaccgaagaaaatttaaaccgtgtacaagatattttgtatgaattagaaggacaattagaaccacttgaaatgcaagcttctattgccaaggattacttattccaacaagaagaactagaaaaatacgaagtgacgctacttgcgagtgaaatcagttccttaacagaaaaactagccgaagtacgtaaagaatttggcgaaaaccaaactgttttaatcaagttgcgcgaagaattacacgccgaagaagcagttatttcacgtgaaaaacaagcactgaatgaaacagatatcgcgctagataaattacaagaacgccttttagtcgaaacggaaaagctcgaacaactagaaggagagcgaaatcttcaattagaacgtaaaaagcacagtagcgaaaatgaacaagtttatgcagaaacactggcggtaattacggaaaaaattactgcattggaagagcaaaaagaagttctaagcagctcaaaactcgaaaaagaaacggcacttgaaattgctatcaaatcgaaaaaagtgctagaagcgacacttgccaaatacgatgatttatccgaagaagcaatcgaaaaccgcaaaagtgattatattgatctgcgccatacgcaaacgacaatcaataatgatttaggttatattgagcgccaaatcggtcaaatcacgagccgaattgacaaattagatttagaaaatagtcatcatgtcgatgatagaaaagatatgctcgctcaaatcgaaacaaccaaaacacatttaacaaaaatccaaagtgagcttacggaacaaatggaaatttaccgtgaagtacagcaaactttagcaaaacaagaagctgtttttggaacgcaagaacgtgcgctttataaacattatgaaacagtgcaacaaatgaaatcgcgaaaggaaactttagaggagttggcggacgattatgctggctttttccaaggagtccgggaagttttaaaagcaaaaaaggaaattccaggaattttaggtgcgctagtagaacttgttgaaattcccgcgaaataccaacaagccatggaaacagcgctcggggccagtgcgcagaacgttgttgtagaagatgaccgcgttgctcgtgaagccatcagtttcttgaaaaaaacgaaaagtggtcgtgcaaccttcttgccactttcgacaattcaaccacgcgaactaccggcagcaacgaaaaatgctttaagtaaccaacctgcttttatcgcacttgctagtgaggtcatttcttttgatgaaaaagtttctccggtcattttgaatgcactaggtacaacgattttagcgaaagatttaaaaggcgcaaatacgcttgctcgtttagtcaactttaggtatcgtattgtgacactggaaggtgacgtcgtgaatgcgggcggctcgatgacaggtggagcaactaaaggcggaaaatcatctattttaacgagaaaacatgaacttggtcaattagcagagaagattgctgaactaaatgaatccactcgtgaaatggaatccgcggttcaactggctaaagatagcatggcgaaaaaacgtgaagaactcgaagaaacacgagttattggtgaaaatttacgtttacaagaaaaggaattacttggaaaactagaccgagaaaccgagaatctagagcgctttaataaacaattacaactatatgatattgaaaaagcggatggtagcgaagaattaaacaaactactagagcgaaaagaaactttactgcaagaacaagttgaaatcgcaaaacaaattgaagtaactgatgaagaaatcaaagcaatgacaagttcgagtaaagctttagaaagcaaacgtgcagcagatctagaaagtctgtcgtccttaaaagcgcaaatcgctgctaaacgagagcaacttcaatctgctacagaagcagtcgagcgagtaacaacaacgctacatgaaaattacgaacaaaaagaagccgccgaacaaaaactagcttccttaaaaaccaacttaactagtgtccatacaagcgaagaaacagctagaaaatccattgaagaactacgaaaagataagactgaaacaagcgagaagctcacgcaaacaagacaaactcgcgcagaactccaagaaaaactggaactactagaagcggagctaacacaaaaaaataatcaaatcagtttttatatggagcaaaaaaataatgcggaaattagtatcggtcgtttagaagtagatatcgctaaccgaattgatcgtctgcaagaagcttatttactaacaccagagcaagccgaagaaaaaatcttgtcagaagtaaataccgaacaagcgcgttcgaaagttcgtttgctaaaacgctctattgatgaactcggcattgttaacattggtgctatcgaagaattcgagcgtatccaagaacgttttgatttcttaacaggacaacaagcggatttacttgccgcaaaagaaactctctttaaagtcatggacgaaatggacgaagaaatgaaaattcgttttagtgaaagttttgaagccattaaaaccgaatttgcgattgttttcccagagctatttggtggcggaagcgcagaactggttctactcgatccagaaaatctcttaacaaccggaattgatatcgtcgttcaacctccaggcaaaaaactgcaaaacttatcgcttcgttctggtggcgaacgtgctttaacggcgattgctttactattcgctatcattcgcgttcgtccagtaccattctgtattttggatgaagtagaggcagcactagatgaagccaacgttacgcgattcagccgttacttgaagcaatttgaatcaggcacccagttcatcgttatcacacaccgtaaaggaacaatggaagaagccgacgtattatacggtgttactatgcaagagtccggcgtttccaaactagtttcggttcgcttagaagaaacagccgaactcattaaataa

SEQ ID NO: 24163 - DNA, 180 bp, Listeria monocytogenes
atggcgaagttagaaattactctaaaacgtagcttaatcggacgccctcaaccacaacgcaaaactgttcaagcattaggtcttggtaaaacaaattctgtagtggttaaagaagataatcctgcaattcgtgggatgatcactaaagtaagtcatttagtggacgtcaaagaagtttaa

SEQ ID NO: 24164 - DNA, 594 bp, Listeria monocytogenes
atgaagaagttgctttttttaggggatagtgtgacagatgcagggcgcgattttgaaaatgaccgcgaattaggacatggttatgtgaaaatgattgcagaacagcttgagaaagaagatgtaacggttataaatcgtggcgttagtgcgaaccgggtggcggatttgcatcgtcgtattgaggcggatgcaatttcatttcaaccagatgtagttacgattatgattgggataaatgatacttggtttagttttagcagatgggaagatacttcggtgacggcatttaaagaagtatatcgtgtgattttgagccggattaaagaagaaacaaatgcggaacttgttttgatggagccgtttgtattaccttatccggaagatcggaaagagtggcgtggtgatttggatccaaaaattggagctgtgcgcgaacttgcggcagaatttggtgcaacgcttattccgcttgatgggctaatgaacgcgctcgctatcaaacatgggccgacctttttagctgaggacggggtgcacccgaccaaagcaggacatgaagcaattgcctctacttggttagaatttacaaaataa

SEQ ID NO: 24165 - DNA, 1278 bp, Listeria monocytogenes
atggcaattcaacctttagcttaccggatgcgcccgaaagcattagatgaaatcgtgggacaaacgcatttagtcggtaaagataaaattattaatcggatggtcaaagcaaaacaattatcttctatgatattatacggaccgcctggaattggaaaaacctcgatcgcaagtgcgattgctggaagtacaaaatatgcattccgtacattaaatgcagttaccaataataaaaaagatatggaagtagtagcagctgaggcaaaaatgagcggcacggttattcttcttttagatgaagtacatcggttggataaagcaaaacaagattttttactaccattacttgaaagtggcgcgattatcttaataggtgcaacgacaagtaatccatacatcgcgattaatccggcgattcgaagccggacacaaatttttgagttaaaacctttaacgatagaagatattatgataactatggaccgggcgctttcagataaagagcggggacttgggaattatgatgtagaaatagatgaggttgcgaaaaaacattttgcaacggcgagtaatggggatgtgcgtagtgcgctgaatgccttagagttagctgtcatttcttctgaaccaaatgaagatggtgtgattcatattacactcgatgtggcagaggagtgtttacaaaagaaaagtttagctcatgacaaagacggcgatgcccattatgacgtattaagtgcttttcaaaaatctgttcgtggtagcgatgtgaatgcagcgctccattatatgggacgtttaattgaagcaggagatttagtcagtatcagccggagaatgctcgttatggcatatgaggatattggtcttgcgagtccacaagccggggcgcatacactcgcagccatccaaaccgcagaaaaagtcgggtttcctgaagcgcgaattccgctcgctaatgctgtcatcgagctttgcctttcgcctaaatccaattctgctattatggcgattgatgcggcactagcagatattcgccaaggaaaaagtggagaagtgccagatcatttacgagatggacattactctgttgcagaaaaacttggacgagcaattgattataaatatccgcataattatgataatgcttgggttgaccaacaatatttgccagatcgccttaaaaataaattatattatgagccgaaattcacttcgaaattcgagcaaacaatcgctggcgtataccaaaaaattaatgaaaacaaggcaaaataa

SEQ ID NO: 24166 - DNA, 999 bp, Listeria monocytogenes
atgaaagctgtaggattaacgaaagcgtcaacggattttgtggatatagaaatcgacaagccagtaccagaaaaccatgatttactagttaaaatcaaagcgatttccatcaatccggtagatactaaacaacgtgaagcagctaagctatcaggagaggaagttcggattttaggttgggatgcagttggagaagtagtagatactgggagtgaagttacattatttcaaactggacaagacgtttatttcgcaggtgacgtcacaagaccaggagtgtacgcagaatacactttaattgatgagcggttagttggtttgaaaccacataacttgaacgtagaggaagctgctgcgatgccactgacaactattacagcttgggaagcactgtttgaccgtttaactattactgaaaatgataaaggtaaatcaattttaatcattaatggggctggtggtgttggttctattgcgactcaactagctgcaaacactggtcttgaagtcatcgccactgcctcacgctcagaaacagtagaatggactaagagccacggcgcaaactatgtcatcaatcaccgagaaaacatcccggaacaactggaagaacttggatttaaaaaaggggttgattttattttatgtttgcataacacaagtgctcactgggatgagatgcaagaagcgattcgcccacaagggaaaatttgctcgattgtggaacttactgaaccggtggaaatgactcttttaaaagataagagtgctactttcagctatgaattcatgtttactcgctcgaaatatgatacagcagataaaatcagacagcatgaaattttaacagaagcagctcatatgctagataagggtaatttaacgacaactctaaatcaagtgttatcacccgtgaacgcggcgacaatagaagaagctcacaaaattatctcatccggaaaaatgattggaaaattagtagtgaaaggatttgagtaa

SEQ ID NO: 24167 - DNA, 639 bp, Listeria monocytogenes
atgaaaaaaattactgcgccgcggattcctgatggggatttgacggtttatccgaatgatacatattttattgaagatattggagaagttagtgagcaaatctttagaaaaacgacgctaaccggggaaattttcgagcattttcatttagaaacgattatttttgatgggtgtgtgttcgattctgtttctcttgtaagcgcgaatttgactgatgttgtatttaaaaattgtgatttgtcgaatttagatttaatgggcgcaattattcaccgagttcgttttgaaaattgtaaattaattggtatgaatttcagtgatgctacgcttagaaattgcgtttttgttgattgttatgcggattatgttgcctttcgttatgctaacttgaaatgggtggcgtttgaggcgggcgcgtatacgaacagtgatttcagtggagctcaacttgtcgatacgtatttggaacgacttgatttgaataaagcgcagtttttaaattgcgcgctaaatgggattgatcttagctcttgcatttttgagtctatcactgcaatgccgcaagatttgaagggcatgagcattgatttttctcatgctcctgccttgatgccgttgtttgggatacgggttaaataa

SEQ ID NO: 24168 - DNA, 417 bp, Listeria monocytogenes
atggtaaaaaaagaagaaaggctaggggttttgctttggtttcgatttagtcgtttttataatcgaaatatgaagctgaccaatcagaatttgcgagcagcagggatttcaacggcgcagtttgattgcattgcccaaattggcttagacaaagagattacacagcaacaacttgccgaaaaattagtcgtaacaaagggaaatgtcacccaactcctcgcaaaattagagcaattaggttatattacgcgaacaaaaacaggacgcgagaagcatattaccctcacagaaaaaggtcaagcatgttaccgagaaaatgtcccaaaacaagaagcttttcagcaagctcaatttgataaattaacaagagacgaacaaaaagaactacttaagctattaaaaaaattaggagagtga

SEQ ID NO: 24169 - DNA, 606 bp, Listeria monocytogenes
ttgactaacaatcattactacacaaacgacgaaacaattaaacacaaccgaaaaacatggcaagtgatgttaaaaggttttaatatgagttttacaagtgacaatggcgtgttttccaaaaacacagtcgattttggttcgaaattattgattgagtcttttgagttagaaacgaaaataggaaaaatcttggatgttggttgtggttatggtccgatggggttaacggtagcgaaagcgttccctgatagccaaattgaaatggtggacgttaatttgcgcgcactagaacttgcgaaagaaaatgcggaaatcaataaaattacgaatacgcatatctatgaaagttcggtttatgataacgtaactgcgaacgactaccaagcgattattagtaatccgccaattcgtgcagggaaaaagatagttcacgcgattttagaaggtgcttacgatcacttgcaagaaaccggagaactttggattgttattcaaaagaaacaaggtggcccatctgctgaaaagaaaatggaagaagttttcggcaacgttgaaacagtcgcaaaagataagggctattttattttcaaaagtgttaaaaattaa

SEQ ID NO: 24170 - DNA, 726 bp, Listeria monocytogenes
gtgattaatattaaaaatttacacaaacattttggcaaattagaagtcttaaaaggtattgaccttgaaatcgcatctggagaagtggtcgtagttatcggcccttccggaagtggaaaaagtactttcttacgttgcctgaacttattagaacaaccaacaactggtacgattcttttcgaaaacaaagacctaatggcgaaacaaaccaacgtcaacgaacttcgtcaaaaaatgggcatggttttccaaaatttcaacttgtttccacataaaaacgttcttgaaaacctaatgttagcgcctatgaaagtgaaaaatgaagatagtgcagctgcgaaaaaacacgccctttctctccttgaaaaagtcggtctagctgataaagcaactagctatccttcccaactttctggtggacaacaacaacgggtagccattgcccgagcactcgcaatgaatcctgacgtaatgctattcgatgaaccaacttccgcactcgaccccgaaatggttggtgaagtattaagtgttatgaagtcacttgctaaagaaggtatgacaatggttgtcgtaacgcacgaaatggggttcgcaagagaagttgccgaccgtgttgtcttcatggatgctggcgtgattcaagaacaaggcactcccgaagaagtattcggaaacccgcaaaacgatcgtacaaaagactttttaggaaaagttttagcataa

SEQ ID NO: 24171 - DNA, 1335 bp, Listeria monocytogenes
atgaaaaaacaaaaaacagttcgtgcgattgcattagaactcatcattaaaatcgaaaataatcaatcatacagccacttattaattaatgacgcattaaaaaaacaaaagctaaatccgcttgataaaggccttttgactgaactagtatacggtacaacgcaacgtaaaattacacttgattactacttagcaccatttttaaataaagaacccgacaactgggtgaaaaacctactaagaatgtccgtctatcaattaacctatttagataaagttcctgaacacgcgattttaaatgaagcaggggatattgcgaaaaatatggggcaccaaggtgtaactaaattcgtcaacggggtgctgcgtaatgttatccgaaaaggagtaccaagtatagatgcaatcaaagaccctgtgcaaaaaatcgctgttgagacaagtctgccagaatggttagcaaaaaggtgggcagatcaatatggcatcgaacaactgcgcgaaattggtctcgctttcttagtcgcaccgcaccaaagtatccgcgtcaaccaaacagaaattcctactgaacaacttattaaagagctaaatgaccaaggaattaccgtgacacgtaatgaatttattgaggaagcattacttgttgaaaaagggtctgtagcagaaaccaaagcatataaagacggtaaatgtagcatccaagacgaaagctcaatgcttgcagcttatgcgcttcaactagaagacaatttgaccgtattagatgcttgtgcggctccgggcgggaaaacaacccatatcgcggagaaaatgcatggcacgggtatggttcatgcgcttgatattcacgaaaagaaaaccaaactaattgatgaggccgccaaacgattgcagctactcaatattcgtacggcacatttagatgcaagaacagcgagtactatgtttgagccagaaacatttgaccgtattttagtggatgctccgtgctccggctttggtgttcttcgcagaaaaccagacatcaaatatgcgaaaacagaaaaagatatccacaaattagcagaaattcaattagcgattttagatgatgttagccaattagtaaaagaaaatggtatattagtttatagtacttgtaccattgacaaggaagaaaatgaaacggttcttcgcgctttcttagaaaaacatccagattttacactagaaccagtagtactccctgaaaaattggcgcaaatcaagaaggacgattttattcaacttttaccaacagatattggaagcgatggtttcttcgtttctagccttagaaaagtgaagtcctga

SEQ ID NO: 24172 - DNA, 1092 bp, Listeria monocytogenes
atgacaaagcgaattttaatgctagaagatggcaattattttatcggtgatgcgattggtagtgaaaaagaaaccattggtgaggttgtcttcaatacgggaatgacaggctaccaagaaactatcacagacccttcctattatggtcaaattattacttttacgtatcctctcgttggaaattatggggtaaaccgtgatgattttgaatctattaatcctgctgtgaaaggggttgtggtacgtgaagctgcagaattcgcttccaactggcgcaaccaaattacattaaatgaatttttgaaagaaaaaggcattccaggtatcgcgggaattgatacacgtaaattaacgaaactaattcgtaaagaaggcacactaaaaggtattttagcagcagaaacagcagacaaagaggaactgctacaccacctccgttctgttcgtttgccggtcgatcaagtacacgaagtttcctccgctaaagcatttgcaagcccaggagatggtaaacgggttgtacttgtcgattatggtgtgaaaagttcgattttgcgagaattaaataaacgtaattgctatgtgacggtcgttccttacaacacatccgccgaagaaattcttgcaatgcacccagatggcgtgatgttatccaatggacctggggacccgaaagatgttccagaagcattagaaatgattcgcggcattcaaggcaaactgccactattcggaatttgcttagggcaccaattgtttgcacttgcgaacggagcagatacatttaaactgaaattcgggcatcgtggcgcgaatcatccggtgaaagaactagccactggacgtgttgatttcactgcacaaaaccacggttacgcagtagaaaaagattcacttattggaacagatttaaaagtaacacacattgaattaaatgatgaaacggtagaagggctggcacataaagaatatccagcctatacagtacaatatcacccagaagcaaacccagggccaagtgacgtcaactacttatttgatgaatttatggaaatgatgaatgggaaagaggagggtgaactacatgcctaa

SEQ ID NO: 24173 - DNA, 1842 bp, Listeria monocytogenes
atgagcaaaattatcggaattgacttaggaacaacaaactctgcagtagcagtattagaaggcggagaagctaaaattatccctaacccagaaggcgcacgtacaacaccttctgtagttggtttcaaaaatggcgaacgccaagtaggtgaagtagcgaaacgtgctgcaatcactaacccaaatacaattagttccattaaacgtcatatgggtactaactataaagaaacaatcgaaggaaaagattattctccacaagaaattagtgcaatcattttgcaatacctaaaaagttatgcagaagactaccttggcgaaactgtagataaagcagttatcacagtaccagcttacttcaatgatgcacaacgtcaagcaacaaaagacgctggtaaaatcgctggtcttgaagtagaacgtattattaacgaaccaactgcagcagcacttgcttacggtatggataaaacagaaacagaccaaacaattctagtatttgaccttggtggtggtacgtttgacgtatccatccttgaattaggtgacggcgtatttgaagtacactcaactgctggtgacaatgaattaggtggagatgacttcgataaaaaaatcatcgactatctagtagcagaattcaaaaaagacaatggtattgacttaagccaagataaaatggcacttcaacgtttgaaagatgcagctgaaaaagcgaaaaaagatctttctggtgtaacaagcacacaaatctccttaccatttatcacagctggagaagctggtccacttcacttagaagtaacccttactcgtgctaaatttgatgaactaacacatgacttagttgaacgtactattgcgccaactcgtcaagcattaaaagatgcaaacctatctgcaagcgatattgaccaagtaattctagttggtggatctactcgtattcctgcagttcaagaaacaatcaaaaaagaattaggcaaagaacctcataaaggtgtaaacccagatgaagttgtagcaatgggtgctgcaattcaaggtggcgtaatcactggtgatgtaaaagacgttgtactacttgacgtaactccattatcccttggtattgaaacaatgggtggcgttatgactacacttatcgaacgtaatacaactatcccaacatctaaatcacaaactttctctacagcagctgataaccaaccagccgtagatattcatgtacttcaaggtgaacgtccaatggcaaaagacaacaaaacattaggtcgtttccaattagcggatatcccgccagcaccacgcggaatccctcaaatcgaagtatcatttgatatcgacaaaaatggtatcgtaacagttcgcgcgaaagaccttggaactggtaaagaacaaaacattgttattaaatcttcttcaggtttaacagacgaagaaattgaaaaaatggttcaagatgctgaagctaatgctgaagaagataaaaagaacaaagaaaacgctgaacttcgcaacaatgcagaccaattagtattcactgtagataaaactttgaaagaattagaaggcaaagttgaagaagaagaagtgaaaaaagcagaagcagctcgcgatgagctacaagaagcgcttaaaggtgaagatttcgatgctattaaagaaaaaacagaaagcttaaacgaaatcgttcaaaatctatctgttaaattatacgaacaagctgcagcagaacaacaagcggcaggcggcgcagaaggtcaagaagctcctcaaaatgacgacgtagtagacgctgaatttgaagaagtaaatgacgacgacaaagaaaacaaataa

SEQ ID NO: 24174 - DNA, 966 bp, Listeria monocytogenes
atgaaacttaactttttatatgcaaatatgcaaaaagacattgactcagttgaaaaagaacttaaaaaggctctttctggcgcagctgctgacactacttccgctgcggcacttcatttattagaggctggtggaaaacgaattagaccgatgttcgtttgtttatccgcacgtcttgctgctaatgctgattttaacgcagtgaaaaacgccagtgtggcgattgaattaattcatatggcatcgattgtgcatgatgatgtggtggatgatgcggatttaagacgcggacgcgagacgattaaatcaaagtggggcaaccatattgcaatgtatacgggtgactttttgtttgccaagtcgctagagtatatgacggaaattaaagatgttgcagcgcataaaatgttatcacatgttacggtggagctttcgacgggtgaaatcgaacaattaaaagataaatataattttgaccaaagtgtgcgtaattatttacgccgaattaaacggaaaacagctttactgatagcagctagttgcggactcggtggtgttgtttctggtcaaagtgaagccgattatcagaagttatatcgttttggttattatgttggcatggcgtttcaaattacggatgatgtacttgattttgttggaacagaaaaagaacttggtaagccagctggagaagatttaagacaagggaatgtcacgttgccagtattttttgcaatggaagatccttttcttaaaaaacgcatcagccagattacagaggaaactccagcagaagagatcgctgttttagtggaagaagtcaaaaaaacaggagcaaaacaggccgaagatgtcgcaacaacctacttaaaaaaagcagtagaaatattagattctttgccgcaagttcctgaattaaaaccattaaaacaaatcgttcgtgttttagataaaagaaattattaa

SEQ ID NO: 24175 - DNA, 1419 bp, Listeria monocytogenes
atggcaaaacaagaaattggcgttataggaatgggcgttatgggtcgtaacttggctctaaacattgaaagccgcggtcatacagtatctatctttaaccgctcgactgaaaaaacgaaagcagttatggaagagaatgcggacaaaaaattagtaccaacttatagtttagaggaatttgtcgaatctcttgaagtgcctcgccgtatccttattatggtaaaagctggcgatgctacagatatgatgattgaagcagttaaacctttcttaaacgaaggcgatattttaattgatggcggtaatgctttcttcaaagatacgattcgtcgtaataaagaactaagtgaagaaggatttaatttcatcggaactggtgtatcaggcggagaagagggcgcgctgaaaggtccttctatcatgccaggtggtcaacgcaaggcatatgaccttgtagcccctattttacgtgaaattgctgcagtagcagacggagagccatgtgtgacttacattggtccagacggtgccggacattacgttaaaatggtgcataatggtatcgaatacggcgatatgcaattaatcgcagaagcttacactattttgaaagaaatcggcggattaagccatgatgaacttgctgacgtatttgaagaatggaataacggggaacttgatagctatttaatcgagatcactaaaaacatcctaaaagtaaaagacgaagaaacaggcaaaccaattgtcgatgttattctggataaagctggtcaaaaaggaactggtaaatggactagccaaagcgcacttgacttaggtgttccgctttccttaattacagaatctgtatttgctcgttacatttctgcactcaaagaagaacgcgtttatgcaagtactgttttaactgggccatcgaattatcgttttgaaggcgacaaaaaagcatttgttgaatctgttcgtcgcgcactttactttagcaaaatcgcatcttatgcacaaggttttgctcaaatgagagctgctagcgaagagtacaattgggatttacaatacggcgaaatcgcgaaaattttccgcgctggctgtattatccgtgctcgtttcctacaaaaaattacagatgcttataaccaagataaaaatcttaaaaacttactacttgatccatatttcaaagatattgcacataactaccaaggcgaccttcgtacagttgttgcagaagcagtaaaagctggaattccagtaccaacattcactgcggcaattagctactacgatagctatcgttcagaagtattatctgcaaatctaatccaagcacaacgcgactactttggcgctcatacgtatgaaagagtcgacaaacctggtgtattccatacagaatggccacaagtagaagattga

SEQ ID NO: 24176 - DNA, 1575 bp, Listeria monocytogenes
atgaagaaatttttattagtagcggttatctcggtttttgccttggtgttaacggcttgcggaggttctggcgctagttcagacaaagcaaacggttcaggcaaagcgaaagacggcggctctcttattatcggagttacaggagatccagaagttatcaatccgaactacgcttctgaccgtgtaacattaacgattcaacaagctgtatacgcaccgctattttgggaagttgacgggaaaccggcacttgcaaaaagcttagatatttcagatgacaacttaacttacactgtgaaactaaaagatggtttaacttggcacgacggcaaacctttaactgcagacgatgtagtatttactgtaaattctattttagatacaaaacaaaacagtccgaaccgcggcaactttgtttttgacgataaacctgtaaaagtagaagcagtagacgacacaacggtgaaattcactttaccaactgttgctccagcctttgaaaatacaattaaaactttcttcccaattccaaaacacatttttgaaggggtagaaaacatcgagaaaagtgataaaaacaaaaatccaatcggctcaggtccgtacaaatttgttgaatacaaaacaggcgaatacgtttccttagaaagattcaacgactactttgacggcaaaccaaaattggataaagttactttccgaatcacaaaagaccaaaacgcagctaatttagccctgcaaaatggtgaaatcaacttaaaatccattcaaccttctgatagaaacaaagtagagaaagcgagcgcggtaaacattatcacttacccagaaaatcgcttaagctatgcgacattcaacgaaaaccaaccagcacttaaatcaaaagaacttcgccaagccctttcttatgcgcttgaccgtgaagaaatcattgatgcggcttacggttcagatgaatacgcaaaaccagcttcctcgttcctgacagaaaacacaaaatacttcacggataaagtagaaacatacgatcaagacattgccaaagcgaaaaaattagtaaaagaaagtggttttgatacaagtcaaaaactaactgtttactatttaaacaacagtaaatcacaagaaagtatcgcgctttacttgcaacaacaatacaaagaaatcggcgtgacacttgacttgaaaccaacagatccaaatgcactaagcaacatcacacttgaccgtaaaaacgcagactactctatcgcactaaatggttatatcatggggaacgatcctgatgcgtataaatccctatacctaagcgatgcgccatacaactactcgaactaccacaacaaagatctagatgcactttgggaaaaaggtgctgtaacagctgacgacaaagaacgtcaagaaatctatgaaaaaatccaaaacacaattgctgatgacgctgtaatttatccaatttcttatgataatgcagtgctagctcttgatagccgttacggtggacaaaaagctgcaacaccacaaccagtaacaatgttccgtgatctttctaaattatatttaacggaataa

SEQ ID NO: 24177 - DNA, 1119 bp, Listeria monocytogenes
atgagcacagaattattagatgctcttcatgtgttagaacatgataaaggtatttcaagagaggttttagtggaagcaattgaagctgctcttacatctgcatataaaagaaacttcaaagatgcacaaaacgtacgcgtagatttaaatatggaaaacggttctatccgtgttttagctagaaaagaagcggtagaacaagtatttgactctcgccttgaaatctcgatggaagaagcacataaactgaaccctgtttatcaaccgggcgatgtggtagagcttgaagtaactccaaaagatttcggacgtattgctgctcaaacagcgaaacaagttgtaactcaacgtgttcgtgaagcagaacgtggcatcatttacgatgagtttatcgaccgtgaagatgacattatgactggtatcgttgaacgtcaagattctcgtttcatctatgtgaatctaggtaaaatcgaagcaattttgtcgcaaaatgagcaaatgccaaacgaaacttaccatgcacatgaccgcatcaaagtctatttgacaaaagtagaaaagacgacaaaagggccacaaatctttgtatcccgtacacaccctggcttacttaaacgtctttttgaaatggaagtaccggaaatctatgacggtgttgtagaaatcaagtctgttgcacgtgaagcaggagaccgctctaaaatctccgtctacactgcaaatgaagaagtggatcctgttggcgcatgtgtcggaccaaaaggtgcacgtgtccaaacaatcgtcaatgaacttaaaggtgaaaaaatcgatatcgttgaatggtcagaagatcctttcacattcgttgctaatgcacttagcccttctaaagtgttagatgttattgttaacgaagcagaccaagcgacaactgtaatcgtaccagactatcagttatcactagcaattggtaaacgtggtcaaaatgcccgtttagcagcgaaattaactggttggaaaattgatattaaaagtgaaacagttgcaactgaactaggcatctatcctcgtaatggtgtagaagcgcccgaagtagaagaagcagagagcgaaacttttacagaagatgaagagtaa

SEQ ID NO: 24178 - DNA, 1053 bp, Listeria monocytogenes
ttgctaatatggagtatattgattagctttgcagtaggtatcattatggtgccgataatcaggaagtttgctttccgaattaatgcggttgatacaccgcgtgaaagacacaaacatacaaaaactacagccactttaggtggattagctatttttataagtttttcggtagggatgattttagccccaatagataaatcaggtttcttgccaatttatttcggagcattaattattattgcgacaggctttatagatgatatatttgatttatcaccaaaatggaaaatgttaggacagattttagctgctctttgcgtaactgtctggggagacattactattaattttattaacgtcccattttacggacaagtagattttgggtattttgcgattccattatcgattatttggatagttgcaattgtgaatgcgttaaacttaattgatggattagacggtctcgcgggtggtatttctattattgctttaatgactattgcaggtatggctttgcttttgaaagatgtttttgttgctccggttgcattaattcttgtagcagcagttgcggctttcttgatttataatttcccgcctgctagtatttttatgggagacacgggagcgttattcctcggttatatgattgctgttttatcacttatgggttttaaaaacgttactttcatctcattgttagtaccacttattattttaggtgtacctttgtcagatactttttttgctattgtaagaaggctaaaagagcggatgccgatatcttcagcagatagatctcatattcaccataggttgatggcgctaggatttacagagaagcagacggtgttactaatctactgtatggcattactattttctatgactggatttgtattttcgttctccactacttggggagcaatgttattactgttattattaatttttagtattgaaattattgttgaatttattgggttaattggtgaggattaccggccgatcttaaatttacttcaaaaaatacatcgaaaacgaaaataa

SEQ ID NO: 24179 - DNA, 309 bp, Listeria monocytogenes
atggcaaaacaaaaaattcgtattcgtttaaaagcttatgatcaccgtattttggatcaatcagcagaaaagattgtagaaacagcgaaacgctcaggtgcttccgtatctggtccgattccacttccaacagagaagtcaatctacacagtcttgcgtgcggtccacaaatataaagactctcgtgagcaattcgaaatgcgtacacacaaacgtttaatcgacatcgttaatccaacaccacaaacagttgatagcttgatgcgtttagacttgccaagcggtgtggacatcgaaatcaaactataa

SEQ ID NO: 24180 - DNA, 1599 bp, Listeria monocytogenes
atgacaaagtatattttcgttacaggtggcgtagtttcgtcaatcggaaaaggaattacagcagcatcactaggacgtttgctgaaaaatcgtggacttagtgtaaccattcaaaaatttgatccatacatcaacgtggatccaggaacaatgagcccataccaacacggggaagtttatgtgacagatgacggcgcggaaacggacctagaccttggccattacgaacgttttatcgatattaacttaaataaatacagcaacgtgacaactggtaaagtttactcagaagttattaaaaaagaacgtcgcggggattacttaggtggaacagtgcaagttattccacacattacaaacgaattgaaagatcgtgttttccgtgcagcgcgcatgaccaattcagatattatcatcactgaaattggtggaacagttggggatatcgaatctttaccattcttagaagcaattcgtcaaattaaaggggatgttggtgcggaaaacgtactttatatccacacaactttaattccttacatcaaagcagcaggcgaaatgaaaacaaaaccaacacaacatagtgtaaaagaacttcgcagcttaggaattcaaccaaacattatcgttgttcgtacagagcaaccagtttcacaagaaatgaaagacaagattgcgctattttgtgatattaaagcttctgaggttattgaatctcgtgatgaagaaacactttataacgtaccactttctttacaaaaacaaaaaatggatgatatcgtccttgaacacttgcaattagaagcaccacaagcggaaatgactgattggaaaaacctggtacaccgtgtgaaaaacctttccaaaaaagttcgtatcggtttagttggtaaatatgtttccttgcaagatgcttacctttctgtagcagaagcacttcgtcatgcaggatatgatcatgatgcagaaatcgaaatcgactggattgattccgaaaaagtaacaaaagaaaacgttgctgaaatcatgaaagatgtcgacggtatcttagttcctggtggtttcggtgatcgtgccattgaaggtaaaattgctgctatcgagtatgcacgcgtaaataaagtaccttatttcggtatttgtttaggtatgcaactagcaactgttgaatttgcccgcaatgttcttggtcttgaaggagctcattctgcagaaatcgaaccagaaacaaatcataatatcattgacttattaccagaacaaaaaaatatcgaaaacatgggtggaacgcttcgtttaggtctttatccagcgcgtattaagcaaggaaccaaagcggaggctgcttatggtacaacacttgtagaagagcgtcatcgtcatcgttatgagtttaataatgaatatagagaacaaatggaagaagctggcatgattgtttctgcaacgagcccagatggtcgtttagttgaagtagttgaactgattgatcacccttggtttgtcgcttgtcaatatcacccagaattcatttctcgtccaaaccgtccacaaagcttgtttaaagattttgttggcgcagcacttaaaaataaataa

SEQ ID NO: 24181 - DNA, 609 bp, Listeria monocytogenes
ttgttttatcatttcgcaaaaaacctcgttcattttattttaattattattggtggacgatttcaagtacaaaacaaagacaaaatcattgaagcaccatatgttgttgtgtccacgcatacgtcatggattgaaatcttataccttggtttcgccctatcgccaacaccagtccattatatggccaaacaagagctattcaaaggtaaatttcttaactggctaatgacacaccttaacgcctttccagtcaatcgtgataaccctggaccgagtgccattaaagcacccatccggatgctaaaatctggtaaagtagttgggattttcccaagtggtactagaaaaacaaccaatcttcatttaaaacgcggtgctgtaactatcgctcataaagcaaaagttcccatgctacctgccgtttatgatggaccaaaaacatttggagaaattttaaaacgcaaaaaaatcattattcgttttggcgatccggtactattcaatgataccgaacttgaccaaaaagagctactagaagttaagtctcaagaattaatggcgacatttgaacaacttcaaaatgaaattaatcaaacaaaaaataaataa

SEQ ID NO: 24182 - DNA, 1731 bp, Listeria monocytogenes
atgaaaaaagtaaaagcaagtgaaacactcgtacaaacattaaaaaattggggtatcgaccacgtatatggcttgcccggcgattcgattgacaccgtagttgacgctttacgaaaagaacaagaagcaatcgaatttattcacgttcggcacgaagaagtggcgacactagccgcagcagcatataccaaattaacaggcaaaattggtgtcgcattatctatcggtggtcctggagcaatccatcttctaaacggaatgtatgacgcgaaaatggaccacgtgccaatgctcgtgctcgctggacaagtgacaaccgacgtcttaaacaccggctttttccaagaagtcaatttaccagcgattttcgaagatgttgccgtgtataataaacaaattgataatgccgaaacactcgcggatgtggttgatgaagcaattcgcaccgcttataaagaaaaaggcgtcgccgtcttaacgattccaaacgatattccgtcgcaagtaattaaagcgagcctcgaagcaaaaccagtgaaatttgaacaagaaaatccaaaactagatgaagcggcaatacaggaagccgtaacactgattgagaaagcggaaaaaccagttatcttagcagggttagggactaaacacgctggaccagaattaatcgccttctcggaaaaattgaaaatcccgattattcattccttaccagcaaaaacgattgttccagatgaccatccaaatgcactcggaaaccttggtaaaatcggaaccaaacctgcatatgaagccatgcaagaaaccgacttactattaatgtttgggaatgattacccttatagcgactatttaccaaaaaaaacagactgtatccaaatcgatattgacccagccaaaatcagcaaacgtttccccgcaatagttggtttagtaggcgatgccgcagaaataattagcgatttaacagccaaaatagcacctgtagaagaacgtaaattccttcaagcatgccaagaaaacatgcaagaatggtggaaatggttagaagaagacatcgcacaaacaagcgatccaatcgctccagaagtcgtgatggcgaatatccaaaaaatcgcggacaaagatgccgttttctctatcgacgtaggaactgcgactgtttggagcactcgttatttacatttaacgccagaaaatgactttatcgtttccgcatggcttggtactatgggctgcggtttgccaggagctatcgctgccaaaaaagcattcccagaccgccaagcaatcgccatcgttggtgatggaggattttccatggtcatgcaagatttcgtcacagcagtaggcctaaacatgccaatgattgtcgttgtgctaaacaaccaacaactttcattcattaaatacgaacaacaatcagctggtgaactaaactacgccatcgacctaccagatattaattacgcaaaatttgccgaaagttgcggaggaattggtttccgggtagaaaaaatggcagacctagaagctgctttcgaaaatgctaaactagcaactaaaccagtaatcatcgacgtttccgtagatagcgcagccgctccactacctggtaaaatcgtgatggacgaagcactcggttatactaaatttgaaatccaatcagtcttagaagaccatcgtttcgcaaaaatgccaccacttaaaaccattttgcgcagatttttataa

SEQ ID NO: 24183 - DNA, 957 bp, Listeria monocytogenes
atggcgaatgagatggaatttgagaaaccgattttagaattaaaaagtaagatcgctgacttaaaagagtacaatgaaacttctgatgtggatttaaccaatgaaattgaaaagctagaaaaacgcttagctaagttagaatcaagcatttatagcaatatgactgcttgggataaatttcaagtagctcgccatccggagagacctacgacacttgattatatttcgcttttattcgaagacttcatggaacttcacggggatcgtacatttggtgacgatgctgcgattgtcggaggtatcgcaactttcaagggtattccagtgacggttatcggtcaccaacgtggtaaagatacaaaagataatttgcaccgtaattttggcatgcctcatcctgaaggtttccgtaaggcgctacgtttgatgaaacaagcagataagtttggccgaccaattatttgtttcatcgatacgaaaggtgcctatccaggtcgtgctgcggaagaacgcggtcaaagtgaagccattgctagaaatctttatgaaatgagcgatatgaaagtaccaattatttctattgtaatcggtgaaggtggaagtggtggtgcgcttgctcttggtgttggaaatcaaattttcatgcttgaaaatgcggttttctctgttatttcaccagagggagcagcagccattttatggaaagatgctagtctagcgaaaaaagcagcggagtccatgcggattacagctggtgatttatttgaacttggcattacagatggaattattccagaagtaaaaggtggtgcgcaccgagatttaacagcgcaagccgaagaaattaacaaaactatcacgaagtctttacatgcactaatggcattttctgaagaacaattaataaaacaacgttatgaaaaattcaagaaaatcggtgtatatgagactatataa

SEQ ID NO: 24184 - DNA, 1443 bp, Listeria monocytogenes
atgaagaaattttcacgcttcatactaatgatggcaattgcttgtgttgccgcatttattttcacaggaaacgggttaaatgcaaaagctgcggaagaaatttacttgattggtacagacacaacctttgcaccttttgaatttgagaaagatggagaacatgtcggcattgatatggacatcctaaaagcaattgcaaaagaccaaaattttaaatacgaaattaaagcaatgggattcaatgcagcggtacaagcactagaagctaaccaagtagacggtgttatcgctgggatgagtattacagacgaacgtaagcaaaagttcgatttctctgacccatactttgattctggtgtcgttatggggattttgaaagataacgacgaaatcaagacatatgacgacttaaaaggaaaaaaagtagctgttaaaacaggtacagaaggttacgccttcgcagaaaaaatcaaagataaatatgactttgatatcgttgtgtttgacgactcagctcaaatgtatgacgatgttaaaacaagaaattctgtagcatgttttgatgattatcccgtactagcttacggcgttcaaacaggaaacggcttaaaaattgttactgagaaagaaaaaggaaactcctatggttttgctgtcaacaaaggcaaaaatcaagaacttttagagaaattcaatgctggattagttaatattaaagcaagcggcgaatatgaaaaaattttaaaaaactatttaggtaaaaatgcgattaaagaaaacacaactgaaaaaggctttatggggattattaaatcttcatggccagcactattgtccggtttatggttgacgattagattagccgtagtttcgctaattatcgccttcattattggtattacattcggatttatgaaagtgagcaatagcaaaatcttgcgtgggattgcgactgtttatgtagatattttccgaggaaccccattaattgtacaagcattcttcttttactttgggattccggcagcacttgatttcaggatgcctgtattcttagctggagttatcgcgctaagcttgaacgctggtgcctatatggttgaaatcgttcgtggtgggattcaatcagtcgacaaaggacaaatggaagcagcaagaagtcttggtttaccgcataaaaaagctatgatgaaagttgttctaccgcaagctattcgaatgatgattccatcctttattaatcaattcgttatcacgctcaaagatacatcgattatgtcggcaattggactcgtcgaactaacgcaatcaggtaaaattattatggcgcgtacattcgaaagtacttggacatggctaatcatcggaattatgtatcttatcgttattaccattttaacgaaaatatccgatcgtttagaaaggagattacgaaatgactaa

SEQ ID NO: 24185 - DNA, 759 bp, Listeria monocytogenes
atgaataaagtagtcgtaaagaatgttacgtttggtgaaggtgcgccaaaaatttgtgtaccaatggtcggtaaaacggttgctgcgcttaaagaagaagcagaaatgttacaaacaattgatttggacgttgtcgaatggcgcgttgacttttttgaggacgtaaaagatttagctaaagtggaagctgcacttggcgaaattcgcgcaattttaccagaaacaccgattttattcactttccgcagtgcaaaagagggcggcgagttagctgtcagtgacgaattttattttgaattaaatgaaacactagctggcactggcaaaattgatttagtagatgtggaacttttcaatgaagaagcggacgttttacgcttaattgaaacagctcacaagaacaatgtaaaagtagtgatgtcgaatcatgattttgataaaacacctgcgaaggaagaaatcgtttctcgcttaactcgcatggaagcacttggcgcggaccttccgaaaatcgccgtcatgccaaaatctgctggagacgtactaactttactagatgcaacgaatactgtatttgaaaaagctaatcaaccaatcattacgatgtcgatggctggaactggtgtcatcagtcgtcttgctggcgaagtatttggctccgcaatgacatttggcgctgcgaaaaaagcatcggctcctgggcaaattgatgttaatgagttacgtcacgttcttgatttactgcataaacaattttaa

SEQ ID NO: 24186 - DNA, 909 bp, Listeria monocytogenes
atgacagaagaaaaaggaattttactacaaagtggaacaaatgaacttgaaattgttacatttactgttggcgaaaacttattttgtattaacgttttaaaagtgaaagaaattattcatccgcttgaagtgacgcctgtaccagattcgaatccggcaattgaaggcgtttcccaagttcgtggcgagattatgccagtcgtgaaccttgctcgtgtgatgaaattacccgaaatcgaaccagaaaacacgaaatttattatcacagaactaaaccaaatgaaaatcgttttccgtgtagatgaggttcatcgtatccaacgtatttcgtgggaacaaattgaagaaccagaaaaactatcgattggtttagaagaattagcagttggtatcgtgaaactagacggcaatctagtgctattgcttgattatgaaaaaatcatttatgaaatcagcggaaatgccgatttcgctgtgactggcgaagatcgtatagcacgaaaagtaaaccgtgaagagaagacgatttttattgccgaagactcgcaaatgctgcgtcaactgcttgaagatacgcttcatgaggccggttatacaaatctgcagttctttgcaaatggtcgcgaagcccaagaacatattttcaaattgctcaaagaacaaaaagagcaaacgtttgaaaatgtcaacttgttaatcacggatatcgaaatgccgcaaatggacggacaccatttaacaaaagtaatcaaagaagatgaaattggtcgtgaattgccagtggttattttctcttcgttaattacagaagatctggaacataaaggtgctggtgtcggagccgacgcacaagtaagtaagccgaatattcatcaactcattaatattttagatgagctagttttataa

SEQ ID NO: 24187 - DNA, 1947 bp, Listeria monocytogenes
atggatgacaccgaaaaacgagtacataagtatatcgagaaacatgacctaatccgatccgatgacaaattgcttgtggcagtttctggcggtccggattctttggcgttattgcattttttatggaattcaaatttagtccccaaagaagcaatttccgtcgcgcatttaaatcaccaattaagagagaatgcagcaaaagaacaacgcgtcgtcgaaactttttgcgagaggcagggcattcctttttacatagaagaagtagacataaaaagtcgagcccaaagcttgcagaaaggccttgaagaaacagctcgcattgtcaggtatgatttctttgagaaagtaatggctgagaaaaacataaacaaactagtgctcgcacaccatgcagatgaccaaatcgaaacaatcttaatgcgactagttcgtggaagtgctagcatcggatggtcaggtatacagccgaagcgcgagttaaaaggagggcaagcaatccgtccttttttaccaattacaaaagcagaaattattgattacgcccagaaacatgaattagcatacgaaattgatgaatcaaatactagtcaagaatacacaagaaatcgttacagagcacaacttttaccatttttaaagcaagaaaatccagcagtctattcgcacttcgaaagattttcagaagaaacaagcgaagacttccaatttttggaggcacttgcgagtgatttattgaagaaaaacctcatcaaaaacggcaaacagacaacacttttacttagtagctttaaaaatgaagcgaatcctttacaacgccgcgcaattcatttactattgagatatctgtacaatgaagatgccagttttattacggtaaatcacatatatcagattatccaaatgattcaaagcgacaatccatctagttcgattgatttaccaaataaactcattgcaaacagagcatacgataaactccattttcaatttggagaaagagaagctccttccgagttttatcatcaattagaactgaatgaccgcattgaattagataataaagcaagtatccgtttaaagttaaagagttccgttgttcaaacaaatgggctaaatggaatgctactggatgctgaagagataacacttcctttaattgttcgaaaccgtgtgaacggcgacaggatgacgatgaaaggacaagcaggtagtaagaaactcaaagatattttcatcgatgccaagataccaaggcaagaacgcgacaaactccctgtgataacggactatactggaaaaatcctttgggttcccggtgtgaagaagtctgcatatgaccgagaatttagtcgtagcaaaaagcaatacattattaggtacactcgaaatataggaggaaacgagagcatgcataatgatattcagaaagtgctgatatcggaggacgaattacaagagaaaattcgtgaactaggtcgtgagttaacaacagaatatgaaggacgtaacccattagtagttggggtattaaaaggtgcaactccttttatgactgatttacttaaaagagtagacacatacttagaaatggacttcatggacgtatccagttatggaaatggtactgtatcatcgggtgaagtaaaaatcattaaagaccttaatgcgtcagtagaaggtcgcgatgtacttgtaattgaagatatcattgatagcggacgtacacttagttatctagtagacctaatcaaataccgcaaagcaaaatcagttaagttggttactttacttgataaaccagctgggcgaaatgtagaaattgaagcggattatgtaggctttgtcgtaccaaatgaattcgtcgttggatatggtttggattatgcagaacgttaccgcaatctaccgtatattggtattttaaaaccagaaatttacagcgagtga

SEQ ID NO: 24188 - DNA, 438 bp, Listeria monocytogenes
atgcgtacaacttatatggcgaaacccggcgaagtagaacgtaaatggtacgttatcgacgctactggtgtttctttaggacgtttatccagtgaagttgcttcaattcttcgcggaaaaaacaaaccacaatttactccacatatcgacactggagactttgtaatcatcatcaacgctggtaagattggtcttactggtaaaaaagctactgacaaaatttactaccgtcactctcaatatccaggcggtttgaaatctcgtactgcaggcgaaatgcgtacaaacaatcctgagaaattattagaactatctatcaaaggtatgcttccaaaaaattctcttgggcgtcaattattcaaaaaattacacgtatatggtggatctgagcacgaacacgcagctcaacaaccagaagtatacgaattacgcggttaa

SEQ ID NO: 24189 - DNA, 408 bp, Listeria monocytogenes
atgtttaatcaagcgaaacgaatctccacatttttcacttttaatgggaatggcgaggaagcgtttaatttttatttagatacttttcctgacgcgaaaaaagtcggcctaacttacttcacgaaaccagagcaaggtggcgatatcggtaaagtgctgaatgctacttttgagatgaaaggggcatctttcatgattatggatatgactaacaatgcctccccgaactttagctgggccacaacaaccctttattttgcagatacggaagatgaattcgacaccctttttgaaaaactggctaaagaaggcacggttatgatgggaccagaagcagtagaagcgcttcgaaaagtggcttgggtcacggataaatatggcattacttggcaactcgcattcgtatag

SEQ ID NO: 24190 - DNA, 1113 bp, Listeria monocytogenes
atgttagtcggcgtaccaaaagaaataaaaaataacgagaatagggtggcaatgaccccggcaagtgttttttcttacgtgaatgcaggacatactgtatacgtggaaaaagatgcgggtattggctctaattatcaagacgctgattttgtgcaagcgggagcaaaaattgtagagacagctaaagaagcttgggatgtagatatggttgtaaaagtaaaagaaccgattgcatcagagtatacatattttaaagaagggttactacttttcacttatttacatttggcaaatgaaccaacgcttgcgaaagctttgatggagagtaaagtaaatagtgtggcttatgaaacagtagaactagcagaccatacgttgccactactttcaccaatgagtgaagttgcaggacgaatggcggctcagattggtgcacaatttttacaaagaacgaatggtggtatgggtgtcttgctaggtggtgtacctggtgtagagagaagtgaagtggttatcattggtggtggaatcgctggaacaaatgcagccaaaattgcagctggtttaggtgccaatgtgaccatcctagatatgaatctgaaacgattgcgtgagctggatgatatttttggtaatcaagtccaaacgttaatgtcgaatgattttaatattgaaacagctgtgaaaaaagctgatttggttattggagcagtattaattccaggagcaaaagcaccgaaactcgtcaaagagcatgtggtcaaacaaatgattccaggttctgtccttgtggatattgcgattgaccaaggtgggatttttgaaactacagatcatgtttccacgcacgacaatccaacctatgaaaaatatggtgtgcttcattatgctgttgcaaatatgccaggagcagtaccgcggacgtccactttggcgctcactaacgcaactttaccatttggcttgaaactggctaatcaaggcttagaagcagcagtgcaaaatgacccattcttacttcgtgggttaaatacttatcaagggcatattacgtataaagctgttgcagattctctcgatttaccttatacggacagcaaagaattaatttaa

SEQ ID NO: 24191 - DNA, 699 bp, Listeria monocytogenes
ttgacggaaatttttgcccatcgaggcagtagtggaacgcatccggaaaatacactaccagcaatgaaagcagcgattttatctggcgcagacggtatcgaacttgacattcatgttcttaaaagtggtgaactaatcgtcatgcacgatgaacgcgtcgataggactacaaatgggactggttttttaaaagattacacactttcagaagtaaaaaaattagtgattggtaaacggcttttccgtaaaatccgtgtgccaactttggaagaaatttttaagttggtgagtggcactgatatgatactaaatattgagttgaaaacggatgtctttgaatatgaaggaatcgaacaaaaagttttagcattagcggataaatttcctgaagtcaaacgaatgtactcttcgtttaacccagatacactcattcggctgagagatttaaatcctaccgccaaactagctttaattacacacgaaaacttagatgaagtattgccattacatgaaaaaattcagcttgatgcagtgcatccaccagtaaaagcaatgaaaaacccaattttaaaacaaatcgcagcacgctattggacggtgaacaaggaggaaactatcacgcattttatagatgccaatgttaaaggaatgatgactgattttcctgaaagggcagcggcactaagaaataataaataa

SEQ ID NO: 24192 - DNA, 996 bp, Listeria monocytogenes
atgtttaaaataggtaacgtagaaattaagaaccaagtagttgtggcgccgatggcaggtatatccaattccgcatttcgtctaacagtcaaagaattcggagcaggcctcgtttgctgtgaaatgattagcgacaaaggaatagcataccgcaatgctaaaacacttgatatgctatatattgatgaaaaagaaaaaccactgagtctgcaaattttcggcggcgagaaagaaacgcttgtagaagctgcgaaattcgtagctgaaaacacaacggcagatattattgatattaatatgggctgcccggtaaacaaaattatcaaatgtgaagctggagcaaaatggctacttgatccaaataaagtgtatgacatggtagctgctgtagtggacgctgttgataaaccagttacggtaaaaatgcgtattggctgggacgaagaacatgtctttgctatcgaaaatgcacttgctgctgaacgtgccggagctgcagctgttgcaatgcacggccgtactcgtgtgcaaatgtacgaaggtagtgcgaactgggatgtactaagagacgtaaaacgcgaactgaaaatcccgttcatggcaaatggggacgtgagaaccccagaagatgccaaacgaattttagaacatactggagcagatggagtaatgattggtcgagctgcacttggaaatccgtggatgatttatcgcacggtgaaattcctagaaacaggcgaacttctcctagaaccagaaccacgcgaaaaaatgcaaactgccatgctacacctaaaccgcttagtcgagttaaaaggagaaaacattgcagttcgtgaatttagacaacacgcagcttattatctaaaaggagctcgcggaagcactcgcgcgaaagtggctgctaaccaagcgacaaaacaatcagagatggaagcaattttaaatgaatttgttcttcaatatgaagaaaaagcattagcgaaacaagactaa

SEQ ID NO: 24193 - DNA, 1374 bp, Listeria monocytogenes
atggctaaagcaaaaaggacaaccaaatttgtgtgtcaggcatgtggatatgaatcggcaaaatggatgggaaaatgtccgaattgcaacgagtggaatcagatggtagaagccttagaaccgtcaaaaaaatcacgctcagctttcaatcatacaggagagccttcaaaagcgactccaattactcaaatagcaagtgaaacagaaaaacgagttgaaacaaatatgcccgagttaaatagagttcttggtggcggtgtggttcctgggtctatggtacttgtcggaggagaccctggtattggtaaatcaacattgttattacaagtatcagcgcaactcacacttacaaataaaaaagtattgtatatctcaggagaagaatcaatcaaacaaacgaagctacgggcagaacgcttgcaagtttcgggagataatttatatgtgtatgcagaaacaaatttagaagcagttcaagaaacgattgattttgtaaaacctgattttgtagtcattgactctattcagactgtttatcattctgatgttacaagtgcagcagggagtgtttctcaagttagggaatgtacagcgacattgatgcgaattgctaaaatgcaaaacatcgctatctttattgttgggcatgtaactaaggaaggtgctattgcgggaccgcgcctattagaacatatggttgatactgtactctattttgaaggggagcgtcaccatgcttaccggattttgcgtgcagtgaaaaaccgttttggttccactaacgaaatgggtatatttgaaatgcgagatgtaggacttgttgaagttgctaatccttccgaggtattcttggaagaacgtcttgaaggcgcttcaggctcaacggttgtagcttctatggaaggaactcgccccgtccttgtggaaatacaagcgcttgtttcgccaacgatgttcggtaatgctaagcgaatggcgacgggaatagactacaacaaagtttcgctaattatggctgttttagaaaagcgagtaggtttaatgttgcaaaaccaagatgcttatttgaaagcggcgggcggggttaaattggatgagcctgcagtggatttggcggttgcagtcagtgttgcatctagttatcgtgataaaccaacaagaagtacggactgctttattggggaacttggacttacaggtgaaattcgtcgtgtagcaagaattgaacaacgcgtacaagaagcagcaaaacttggctttaagcgaatttttattcctaaaaataacgaaggtaattggaaaataccgaaagacgtgcaagtggttggggtggaaacgattggagaagctttgaagaaagctttaccagattaa

SEQ ID NO: 24194 - DNA, 1353 bp, Listeria monocytogenes
atggcatttgaaggactagctggaagactccaagaaacaatgaacaaaattcgcggtaaagggaaagtaaacgaagctgacgtaaaagaaatgatgcgtgaagttcgccttgctctactagaagccgatgttaactttaaagtcgttaaacaatttattaaaacagtaagcgaacgtgctgtcggcgcggacgttatgaaaagcctaacacccggccaacaagttatcaaaatcgttcaagaagaactaacaagcttaatgggcggagaagaaagcaaaatcggaacagcggaccgcccgccaaccgtgattatgatggtaggtttacaaggggctggtaaaacaacgacttccggcaaacttgctaatttattacgcaaaaaatataaccgtaaaccattacttgtcgcagcagatatttatcgacctgccgcaatcaaacaattagaaacccttggcaagcaattagatatgccggtattttccctaggagaccaagtaagcccggtcgaaatcgccaaacaagctattgctaaagcaaaagaagaacatttagattatgtcattatcgatacagccggtcgtcttcatattgacgaaacgctaatggatgagttaaaacaagtgaaagaaattgcaacgccaaccgaaatcttacttgtagtcgattccatgaccgggcaagatgctgtcaacgtggcgcaaagcttcaacgaacaattagaaattacaggtgtcgtattaacgaaactagatggtgatacacgtggtggtgccgcgctttcgattcgttccgtcactggtaaaccaattaaatttatcgcgactggcgaaaaaatggaagcccttgaaaccttccatccagatcgtatggcttccagaattctcggcatgggggatgtgctttccctgattgaaaaagcgcaaaccgatgtagatacagaaaaaatgaaagctatggaacaaaaaatgaaagacaacagcatgacgctagatgacttcttagaacaattacaacaagtaaaacaaatgggaccactagacgaactacttaaaatgatgccaggggcaaacaaaatgaaaggcctcgacaacatgaacgtcgatgataaacaactaggtcatattgaagcaattatcaaatcaatgaccaaaaatgaaaaagacaacccagatatcatcaatgcaagtagaagaaaacggattgcacgtggtagcggacgtccggttcaagaaattaaccgtctcctaaaacaatttgctgaaatgaaaaaaatgatgaagcaaatgactggtggcggcaaaggcaaaaaaggcaaaaacccattcggcaatttcaagatgccattttaa

SEQ ID NO: 24195 - DNA, 246 bp, Listeria monocytogenes
atgaaaactggaattcatcctgagtaccgtccagtggtatttgttgatactagtactgatttcaaatttttgtcaggttctactaagagctcaagcgaaacaattaaatgggaagatggcaacgagtatccattactacgtgtcgaaatctcttctgattcgcacccgttctatactggtaaacaaaaacatgcgactgcagacggccgtgtggaccgcttcaacaaaaaatacggtctcaaataa

SEQ ID NO: 24196 - DNA, 996 bp, Listeria monocytogenes
atgacaaaagtttattatgaagatgcagtaaaaaacaacgcactagaaggtaaaacagtagcagtaatcgggtacggttcgcaaggtcacgcacattctcaaaatctacgtgacaatggcaataacgttattatcggcattcgcgaaggaaaatctgccgaatctgctagaaacgatggctttgatgtttattctgttagcgaagccgctgataaagctgatgtcatcatgattcttttgccagatgaaacacaaggcgaaacatacgaaaatgaaattaaacctaacctaaaagctggtaattcacttgttttcgctcacggttttaacattcattttgacgtaattaatcctccaagcgatgtagatgtttttctagtagctccaaaaggtcctggtcacttagttcgccgcacatttgttgaaggtggcgctgttccttccctattcgctatctatcaagatgccactggaaacgcacgcgacacagccctttcctatgcaaaaggtattggcgcaactcgtgctggcgttatcgaaaccactttcaaagaagaaaccgaaaccgatctatttggcgaacaagcagttctttgtgggggtgcgactcaccttatccaagctggtttcgaaacacttgtagaggctggctaccaaccagaacttgcttattttgaagtattacatgaaatgaaactaattgttgatttgatgtatgaaggtggtatggaaaaaatgcgccactcgatctccaatacagcagaatatggtgattatgtttccggtcctcgagttgttacagccgatacgaaaaaagcaatgaaagaagtacttaccgacattcaaaatggtaactttgctaaatctttcatcaatgacaacaaaaatggttttaaagaattccatagaatgcgtaaagaacaacaaggtcatcaaatcgaaaaagttggtgcagaacttcgcgaaatgatgccatttgtcaaaccacaacattaa

SEQ ID NO: 24197 - DNA, 468 bp, Listeria monocytogenes
atgttatcaatagatgaaattaaacagctaatcgagctgattgacgagtcaaccctagatgaatttgagttagaaacgaaagatagtaagattttgcttaaaaagcataaaacagttgttgctacagcggtacaagaagctccaattgctgtcacaccagcacaaacagcgccagtaacaccagcagccgctcctcaagtagaagcaagtacagctgaagatgtgaacctggaagtaattacatctccaatggtcgggactttttatgcatccgcttcaccagaagatgctaattttgttagcgttggctctaaagtatccgcgcaatccgttgtatgtattgtagaagcaatgaaattattcaacgaaattactgctgatatcgatggagaaattgcagaaattcttgtttcgagtggtgaattagtcgaatttggacaaccacttttcaaagttagaaaaaaataa

SEQ ID NO: 24198 - DNA, 1872 bp, Listeria monocytogenes
atgagaaatttaaaagatagagtactcaattcattaaaaggtaataaaaaagatattaaaattagtgttgttgtacctacatataatacagaattagaaggtcttaaaaacttaatggcgtcaattgataagcaaacaatgaatccagatgagtatgagcttgtttttgtagatgatggatctacaacagatacatacgaacgtttgcaagagtttgctgaaacacgtccaaatatgaccgttaaacaaattgaaaactctggttggggaagcagaccaagaaatattgcaactaaaatggctaaaggagaatatatcctttatttagaccatgatgacacagttttccctgaaacatttgaacgcgtatataatttcggaaaagaaaacaatttagatgtagtgagcgggaaagaagtaagaacaaatggttggtcatggggatggaagcaattctctgagaacaatccgcatgcagaagaaatgggtattgaatgtttacttccaatgactccacacaaattttataaaagagaattcttgttagagaatgatattacatttgatgatggagctcgagttctttgggaagatgtatattttaactctaaggcgttcattcacggtgcaaaagttggtattttagccgattatcctacgtactattggattgcaactggtgcaaataattccagtagtttcggacgtgatccgcatgaaaaatggaaccaaattaataaattatttaatttctttaaagacaatatcaaagagcaacgtgacttagattttatgctaactcattggtatcgctcacgagttcttgggattttagggcaatggctactaaaaaacaacaatgaacgtattgatattgaatttaactatgcaaaaaaacttgccgaagaattaataccagcctatattagcgaaaacttagataaaaacaatcaagtaaaagattatttattaagacaaggtgatttagattcattaaaaaaacttgctcaaatcgatgctggaattacagcgcttagctatgtggaagatgcttactttaaagaagacaaactattcttcaaaacaagtacaaaaatgacatatgaagacaaagaagatttctttattgaaaaaacagcagatcgaatggaacgtattttaccagaagaaatcaaatcgaaattgccaaaagaattctttgattatagtgatgatttagctgaatttacgtatgagccaagtattaaaggacgtaattcaagagctacctggaaaatcgacggttctactagtaatgtagaagttgttaataaaaaagcaaatttgtataaaatagaaggtgaaatgtctttttctgttcaaattaatgattatatattagatgcagctgataaaaaacaaccatgggatattgccacacgctttaccggccttgggtatacaagtcaccgagcattaaccattggtaaaattcttatcaaaacagcgttaataaataacaaaacaatgattgtttataaaaatgcatctggtttaataagtctggatgttggaagtagcgttcgttcaatcgtggaagattctggtgtgaaacgtgaacaaattcttattgataaaacatctggaaaagtaactattccattaaatgaaattcatgtgtttggtgaaagccttattgaaggtaatgcagaattaaaaccggtgggaattagtgatgcggatccaattaatgtaaaagctaaattgattggtgaagctaataaagcaagagtagaagttcttttgggtgatgaaaaactatctggtgaatatcatttagtaactaatatccaaggtaaaaaagataaacagcaaattaaaataacgctttaa

SEQ ID NO: 24199 - DNA, 1614 bp, Listeria monocytogenes
atgagttcaaaattaatgcgagggacggctgtacttactgcaggaacattgttgtcaaagattttaggaatattatatgtcattccattttactggattgccggcggggaacaagcaaccattctctatcaatatgggtatgttccttaccaaattttcttaaatattgcgacagctggagtgccattagcagttgccaaatatatttcgaagtataattcgttaaatgaatatgctttaagtcaaagattgtatagatcaagtacctatttaatgatatttacaggaattgctagttttttaattatgtatatttttgctccgatactcgccggaatgcaagaggttagtggtgggacgagtattgaagatattacaaccgttattcgtgcggtgagttttgcgttactgattattccagtaatgagcttgctacgaggttattttcaggggtttcattcgatgggaccttctgccgtgtcgcaagtaattgaacaaatagcgagaattgtatttttactagctagtacgtatattgttcttcatttaattggtggaagccttgtaacagcaatgagtttagctacattcgcggcttttgtaggcgcatttttcagcttaatttgtctcatttggtattaccggaaacggaagccgggcattcaaaaaatgattgatggcagtgacaataagttgcgcgtttcgacttttcatctattaaaagaaatttcaatatctgcggtgccatttattattgttggaatggcgatgtcactttatcaacaaattgatttatttacgtttgctcgaattttaacctacgatggtatggacgggaaaacagcggaagatttgctttctattttcaacttttccgttcaaaaaattattatgataccgggaactttagctttggcgttttcgatgactcttgtgcctttagtggcggcatctttccataaaggacgaatccgtgaagttcatcatcatttgacagccgttttccaagtgttactatttttggtggtgccagcttgtttaggaattgcccttttagctgttccgctttatacaattttttatggttataatacagatggttcgatgttactacagttttttgcaccatttgccatattcttttcgttatttagtgtaacagcagctattttgcaaggaattgatgagcaacgatatacggttctcagtttgctactcggtttactgacaaaatcggttttgcaaatgccattaattttactttttggggcaaaaggtggggcattagctacgggacttggatatattgtttccgtagtattcaccatttttattattaaaaaatatgcgaagtactcctttaaatatttatttagacgacttattcttattttaggaattagcgcggtgatgcttcttagtgtttggttgatatatcatgggctgattttatttttaaatccgcatgcaagattatcagcactagtcattgtttttgtttcagctggatttggtgcctatatttatgcgtttttagctgcaaaagcaggactgttaaactatattttaggggaccgaatgtataaaattcgtaaaaaacttcatttgatttaa

SEQ ID NO: 24200 - DNA, 918 bp, Listeria monocytogenes
atggaaaagaaaataagaacggttcttggtgacatctcgaaagaaagccttggtttcacatactcacatgaacatttgtggtgttgtccaccttcagtacagaaagaccgtgattttgaattaacagattatgagtcctccttagaagaattaaaaacatttcaatctattggaggtcaaacactcgtagatgcttcgacgctggattatggtcgtgatggaaataaactaaaaactatgtctgaagaatctggcgtgaatgttcttggtgttacaggatttaataaacatatttatttcccggattgggtacaggaggaaagcatcgaacaaattacagatcgattaatttatgatattgaaaaaggaatggatggttccgatgctcgtgcagggattttgaagtcaggttcatggtacaacctcattcatccattagagaacaaagtaacacgagctgttgcatgggctcaaaaagagactggtgcaccaatttggttgcatacagaagctggcacaatggggcaggaaatgcttgctatcttagaagaagaaggcgtgaatatggagctggtagctgttggacatagcgatcgcaatgcagatccgtactatcatctgaaattagctgaaaaaggggcttatgttcagtttgatggttgtggaaaagtaaaatactatcctgatagtacaagagttgaactagtgaaaaatatgcttgaaaatggttttggggataaattactcatctcgggagatatgggaagaaaaagttatctgcacgcatatggtggcggtccaggatttcgttttataaaaacaaaatttattccaaggcttttagaagaaggcgtaacggagcaacaaatacaaactatattttatgataatccagccaactggctagccaaattttag

SEQ ID NO: 24201 - DNA, 1995 bp, Listeria monocytogenes
ttgcctgaagagaaaaatacgttttatattacaacaccaatctattatccaagcggaaaagcgcatatcggccatgcttatacgactgtcgcgggggacgcgatggctcgttataaacgcttaaaaggatatgatgtgttttacttaactggaacagatgagcacggtcaaaaaatccaagcgaaagcgaaagaacgcggaatttctgaacaagaatacgtggatgaaatcgcagaaggcttccaagaactttggaaaaaactagaaatttctaatacggattttattcgtacaacacaagaccgtcataaaacatcggttgaaaaaatctttgaacaacttttagagcaaggcgacatttacttaggtgaatacgaaggttggtactctgtttctgatgaagaatactttacagaaacacagttagaagaagtatataaagatgaaaatggcaaagtaatcggcggaaaagctccaagtggcaatgaagtcgaacttgttaaagaagaatcctacttcttccgtatgagcaaatatgcggaccgtttagtagaatattataattcccatccagaatttatccttcctgaatccagaaaaaatgaaatgattaataatttcattaaacctggtttggaagatttagcagtatctagaacaacttttgattggggtattaaagttcctggtaatccaaaacatgttgtttatgtatggattgatgcgctttctaactatattactgcgcttggatataatacggacaatgatacgaaattccaaaaatactggcctgctgatgtacaaatcgttgggaaagaaatcgttcgtttccacacaatttattggccaattatgctgatggcactagacttaccacttcccaaaatggtattcggccatggctggattttaatgaaagatggtaaaatgtcgaaatccaaaggtaacgtagtagatccttatatgctgattgaccgctacggcctagatgcgcttcgttattacttattacgcgaagttccatttggctcagatggtttatttacaccagaagactttgttgatcgtgtgaactttgatcttgccaacgatttaggaaacttgcttaatcgtacagtagcaatgattaacaaatactttgatggtgaaattccggcttatcaaggtaatgtaacagaatttgatcaaattttagtagattttaaaaacaatgtggtgaaggaatacgaaggtagcatggatcacatgcaattctctgtagctttaaaccaactgtggtcactaatttctcgtacaaataaatatatcgatgaaactgctccatgggcacttgccaaggacgaagataaacgcacagaacttgcaagcgtaatgactcatttagcggaaaacctacgtattatcgcagtgcttttacaaccattcttaacaagaactccgggcgaaatcttcttacaactaggtttacaagaagaaaacttgaaaaaatgggatagcatttatggatatggtgaaattccagcaggcaccactgtggtgaaaaaaggtacgccaattttcccgagacttgatgcagaagtggaagttacctatattcaagatgaaatgaaaggctctgcaccagcgcctgccgaagaagtggcggaagttgaagcacttgaaacaccgcaaatcggcattgaagacttcgacaaaatcgatcttcgtgttgcagaagtaaaacaagtagataaagtgaaaaaagcagataaacttctttgtttccaattagatttaggagaaggaaaactacgccaagtgctttcaggcattgccgaattctatcaaccagaagaactaatcggcaaaaaagttatcgtcgtttctaacttaaaacctgtgaaacttcgcggactaatgagcgaaggaatgattctctcaggcgaaaaagatggcaagctaagcgtaattgaagcaagtagcgcacttccaaatggtgcgaaagtaaaatag

SEQ ID NO: 24202 - DNA, 1449 bp, Listeria monocytogenes
atgagtcatcggcttttaggtcgagttatgttgctattaggtgcattaggggtaattttgactatgagttttagttatgtagctgctgctgagaagccgaatattgataaacctgtcaaaggattagagcaaaccgaaaaggctattgtagctgatgattataataaagccaaagatgcttttcaagaagataaattatggtggtcagaaaataaacaagttgttaaagaaaaatcgtacgacttggccggccagatagatcggcaaattgctgaaatatcgcttgggattttaaataatgataaacagcaagcgatggatgggattacttcacttcataatttgctcaagacctatcaagatggtacatatacggataatgaaggaaataccaatattactttatcaagctacattgctaaactaactgcgacgaaaaaactggtagatgagaaagaatgggcaaaagcggcgacgcaaattcaggatttaaaaacagaatggctcgcggtggaaggtgatgtggtcagccaatcgcaagcggcttacgacaataccgagcgcgatttaatgctgcttgatgcttatattaatgatcctgcgaaacaagctaaaacagcagatgttctggacgggatgacggaggagttaaagccttttgcggatgtgacttacacgtggttcgatgctgcgttaatcccgtttcgcgaaggactggaggcacttttgattatcgcgacgctccttacttatacaaagagaacgaagacacgcacggcgaaaagatggattattggtgggacggcagctggtttggtggttagtttggcgctcggcatgattgtggcgttttggctatcggcgcttgcctttggagataataacaatttgattaacggttgggctgggctgattgcaagtattatgatgctttatgttagctactggttgcaccgaaattcggatattactcgttggaataattacatggaaggtaagagtaaccaagcactttcgaatgggaaaatgatttcttttgcctttttagcgtttttagcgattttgcgagaaggtttagaaactgttgtcttcttaattggtatggttgggcggatgtcgaattttgaattattgatggggattttggcggggcttggcgtgttattaatcatcgcttttgtgatgttgcgatatagcgtacatattcctgtgaagccattctttatgatttcgagcgcgattgtgttttatctgtgctttaaatttatgggatcaggaattcatagcctgcaacttgctggggtcattccaacatcggtagaagattacttgccatccattccagcgctaagtatttacccatcatggtatagctttttgccacaagtattactcgttatttttggattaactattctaataaaacaacaaattaaaaaaaagagctga

SEQ ID NO: 24203 - DNA, 456 bp, Listeria monocytogenes
atggaatatgaacagctgttacaaaacgaacttggtgaacttgaaataattcaggaagaactacaaaacaaagaatatcgaggaatgattgtaaagacggctaaagatggcacaacgattcgtacgcgtttggcgaagaaaacggataaaaaagcagggtactttgttgctttttgggagaaagatgaatttgggaagaattgtccttttgatgagaatgattgcgctgattttttatgtattgttgttattgatggtgatttgaacggtttatttgtttttccaagacaatgtttaattgataaaggaattttaactagtgaagctagtattggaaaaatggctgctagattttatccaacgtggtgtcaggatttaaataaaacagcgaaaaaaacgcaagcttggcaacaggtgtattttaaaaattattctataagaaaagaagaccattaa

SEQ ID NO: 24204 - DNA, 1431 bp, Listeria monocytogenes
atgaattttgaaacagttattggacttgaggttcacgtagagttaaaaaccaattcaaaaatattttcttctgcgccagctcattttggagcagaaccaaatacaaatacaaccgtggtagacttaggtatgccaggtgttttaccagttttaaataaacgtgctgtagaattcggtatgaaagcagcgatggcaatcaactgtgaaattgctgaacatacaaaattcgaccgcaaaaactatttctatccagataatcccaaagcatatcaaatttcccaatttgataaaccaatcggcgaacatggctggattgaaatcgaagttggcggcaaaaagaaaaaaatcggcatcactcgtcttcatttagaagaagatgctgggaaaaacacgcatacttctcatggttattcgttagtagatattaaccgtcaaggaacgccactaatcgaaatcgtttctgaaccagacattcgttctgcagaagaagcttatgcgtacctagaaaaattaaaatctattattcaatacactggcgtatccgatgtgaaaatggaagaaggttcgatgcgctgtgatgccaatatctctatccgtccaatcggccaagaagaatttggtgtgaaaacagaactaaaaaacctgaactcattcaacaatgtgcgtaaaggtatcgaatatgaagaaaaacgccaagcagaagtgcttaagtctggcggcattatcgaacaagaaactcgtcgttttgaagaagcaactggaaaaacttccttgatgcgtatcaaagaaggttctgacgattatcgttatttcccagagccagatttagtagatttatttattgatgacgcttggaaagaacgtattcgtgcagaaattcctgaacttccagataaacgtcaaattcgttacattaacgatcttggtttaccggcatatgacgcaatggttcttacgcttacgaaagaaatgtctgacttttttgaagcaactcttgtagctggagcagatgcaaaacaagcatctaactggttaatgggcgaagtttctgcctacttaaacgcagaacaaaaagagcttcatgaaacaggactaactcctgaaaaccttgctggcatgattaaattaatcgaagccggtactatttcctctaaaattgctaaaaaagttttccgcgaattagcgcaaaatggtggcgatgcagagcaagtagtaaaagacaaaggacttgttcaaatttccgatgaaggagctttacgcactatcatcagcgaaattctagataacaatgagcaatccattgtcgatttcaaaaatggtaaggatcgtgctgttggattcttagttggccaagtaatgaaagcaaccaaagggcaagcaaatccgccaatggttaataaattattactagaagaaatgaacaaacgttaa

SEQ ID NO: 24205 - DNA, 741 bp, Listeria monocytogenes
gtgaaaataaaatcgtttttggggaaaagtttgaccttggttgtgttaggggtttttcttttttctggatggaaaattggtatggaactgtatgaaaataagcataaccagacgattctagatgatgcgaaagctgtttacacaaaggatgccgctactacaaatgtgaatggtgaagtacgagatgaacttagagatttgcaaaagttaaataaagatatggttgggtggctgacgattatagatacggaaatagattatccgattttgcaaagtaaggataatgattactatttacaccacaattataaaaatgaaaaggcgcgcgcgggcagtatttttaaagattatcggaatacgaatgagtttttggataaaaatacgattatttatggtcataatatgaaggacggatccatgtttgcggatttacgtaaatacttggacaaagattttttggtggcacatccaacgttttcctatgaatcgggcttaacgaattatgaagtggaaatctttgctgtgtatgaaacgacgacggatttttactacattgaaacagaatttccggaaacaacggattttgaggattatttgcaaaaagtaaaacaacaatctgtgtatacatcaaatgtaaaagtcagtggaaaggaccgaattataacactttcaacttgcgatacagaaaaagattatgaaaaaggacgtatggttattcaaggaaaattagtaacaaaatga

SEQ ID NO: 24206 - DNA, 663 bp, Listeria monocytogenes
atgagtttgttttttgaagaatggggcccgatactttggcaaggatttctagaaacgctgacgatgactgggattacactcgtgatttcacttgcgattggtttaccacttggcgtatttttaacattaacgcgtaaaggtggtcaatcagaaaacctggttgcctatagtattttaaactgggttattaatattttacgttcgttaccgtttattattttgttattcttaatgattcccgtaacacggtttgttgttgggactactattgggattcaaggtgtgattatgccacttgtcgtatttacggcaccttatatcgcccgtttaatggagtctgcccttttggaagtggatcgtggagttgtggaagcttatcaagcaatgggtatttctacaccgaaaatcatttggagtgtcgttattcgcgaagctcggtctggtatcgttcttggcttaactatcgccacaatcggtctaatcggtgcgactgcaatggctggactagttggtgctggcggactcggaacaattgcataccaatatggtttccaacgttttgagccgacagtcatgtatacaaccatcatcattttaattattatggttcaagcactacaatcattcggaaatttcttatctagacgtcttaaaaaagattaa

SEQ ID NO: 24207 - DNA, 675 bp, Listeria monocytogenes
atgagcaaattacaagaattatttccaaatgttgattttcaaatgatgtgggtcgcaacacaagaaacactatatatgacacttgtttcactatttgcagtctttttactcgggattgtgttaggattattgctatttttaactaacaataaaaaacatgctggagcgcgcattctttactgggttacagccattttagtcaacgtgttccgctcaattccttttattattttaattgtactactattaccgatgacgaaatcacttgtcggaactgtaattggaccaaaagcagcactcccagctttaattatctctgctgctccgttctatggacggatggtagaaattgcctttcgtgaagtggacaaaggggttatcgaagcagcaaaatccatgggggcgaatatgttcacgattattggtaaagtactcatcccagaagcacttccagcgattatttctggtatcacagtgacagcaatttcccttgttggttttacagcgatggctggtgtcattggcgcaggcggtcttgggaatactgcatatcttgaaggattccaacgtggacaacctgatgtaacggtacttgcgacaattattatcttaattatcgtctttattttccagtttatcggcgactttttaacaaaacgaaccgacaaacgctaa

SEQ ID NO: 24208 - DNA, 696 bp, Listeria monocytogenes
atgaatacaaatcgtaaaaaagcaacaccgctattcgttatcggcggattttgccttattttatttattaccatcgcttccgctattgcgacagaaagtaactgggtagcacgttttgacctaagttggattgaaaaaatccgtagtggcatccaaccggataaaacagccatcgttaaatttctaactaccctaggaagcgcagaaacaacaatcattttgaccattgtagtcgttcttattttattctttttacgaaaatttgttgtcggactttggtttggtggaacgatgctcgtttgtggcgtagtactaaatcttgttttgaaaagtttggttggtcggacgcgtccggcaagtgtgaattggttagtgagcgagtcaggctttagtttcccaagtggacatgcaacggcaacggcggttttttatggccttgcagcgatgttcttgattttcactgtaccaaaaatgtggcaaaaaatcgttatcggcattatcggttatggtttcatcctgtttgtcatgtatacacgcgtttatcttggtgtgcatttcccgactgatgtacttggcggatttttcctgggtacagcatcggtgtttatctcgctaggtgtttatttcttagtacgaaaaccattacataatttacttgtgaaatggcggattaaagataaaagtattacagaataa

SEQ ID NO: 24209 - DNA, 279 bp, Listeria monocytogenes
atgggtcgtagtttgaaaaaaggaccttttgttgatgaccacttgatgaagaaagtggaagcagcagcagaaagcgaaaagaaacaagtaattaaaacttggtctcgtcgctccacgattttcccaacttttgttggacaaacaatcgcagtatatgatggacgtaaacacgttcctgtttatgttcaagaagatatggtaggacacaaactgggcgaattcgcaccaactcgtacgtaccgcggtcatgcgggcgacgataaaaaaactaaacgctaa

SEQ ID NO: 24210 - DNA, 1191 bp, Listeria monocytogenes
atggctaaaaaagttgtaactgatttagatttaaaagacaaaaaagttttagttcgtgttgactttaacgtgccaatgaaagacggcaaaatcactaacgacaaccgtattgttgctgcacttccaacaattgagtacatcttagaacaaaacggtaaagcaattctattttctcaccttggaaaagtaaaaacagaagaagataaagaaggaaaatctcttcgtccagtagcggttcgtttaagcgaattacttggaaaagaagtgaaattcgttccaactactcgtggtccagaacttgaaaaagcaattgacgagttaaaagacggcgaagtacttctttttgaaaatacacgttttgaagatattgatggtaaaaaagaaagcaaaaatgatccagaacttggaaaatactgggctagccttggcgatgttttcgtaaatgacgctttcggtactgctcaccgtgcgcacgcgtctaacgttggaatcgcttctaacctagaatcagcggccggatttttgatggaaaaagaaattaaattcatcggcggtgtagttgataatccagcacgtccactagtagcaatcctaggtggtgcaaaagtttctgacaaaatcggtgttatcgaaaacttacttacaaaagcagacaaagtacttgtcggcggcggaatgactttcactttcatggcagctcaaggtcaagaaattggtaaatctcttttagaagcagataaagttgaacttgctaaaggcttacttgaaaaagctggcgataaattagtattaccagttgatgcagttgtatctaaagaattcagtaacgatgctcctttccatacagtgagtgcagatagcattccagctgatgaaatgggactagatattggtcaagctacaattgacttattcacaaaagaacttcaaggcgctaaaacagttgtatggaatggtccaatgggcgtattcgaacttagcaactttgctaaaggtacaattggcgtttgtgaagctattgcaaacttaacggatgcaacaacaatcatcggtggtggggattccgcagcagcagctatggacttaggctttgctgacaaattcacacatatttccactggtggcggcgcatctttagagtatcttgaaggtaaagagcttcctggtgttgcttctattagcgacaaataa

SEQ ID NO: 24211 - DNA, 1023 bp, Listeria monocytogenes
atgaatgtatttgaaccgcggcttagttcttggttagaaaatgctggtgatgacgatgatgtcgttttaagctcacgtattaggcttgctaggaatttgaaggatgaacagtttccgatttatgagcagaaggaagagattgtcgataatattgccgaagtttttgatgataattttattttgattaaaatgaatcaaatttctttgttacaaaaggctcttttggtggaaaaacatttaattagtccttatatgatgaataagagtgaatatggtgcggttcttttaaatgaggaagaaaatgtgagtattatgttgaatgaagaagatcatttgcggatacagtgtatgacgcctggcttgagattattcgatgcgttagaggcagcgttgcaaattgatggttatgtggaagagaagcttagttatgcttttgataaagagtttggatatttgacgagttgtgtgactaatattgggactgggatgcgcgcttctgtgatggtacatttaccgggacttgtaacaacaaaaaggattaaaagtgtgattgaagcgattaggagcctaggttttgtggtaagaggtatatacggagaaggtagcatgcctgcaagtaatattttccaggtctcaaatcaagtaactctgggcaaaacggaagcagaaattgtggaagatttaactcaagtcatggaacaaattatcatgcaagagcgtgtcgctagaactacattgaagcaaaaatttcatattgcacttgaagatagagtttttagatcatatggtttattgatgaattgtcgaattatttctatgaaagaagctgcggatgctatttcggatatacgatttggtgtagaattaggatttttcgagcatatttctcgccaaaaaatgaatgaattggtactattctcgcaaccagcttttttgagaagagaagcaggacgagatatggatgaattagaagagaaagtaatacgggccaaagtgattcgcgagattttgggcgataaatga

SEQ ID NO: 24212 - DNA, 2340 bp, Listeria monocytogenes
atgagtaaagttcgtgtatatgaatatgcaaaagaacatcaagtatcaagcaaaaaagtcattgaagcattgaaagacttaggtattgaagtggccaatcacatgtccactattaatgaaaatgcattaagacaattagataatgccgttgatggcacaaataaaaaagccgaagcaccaaagaaagaaactactagcaacgaaaatggaaatagtaaggggccaaacaaaccaaatatgacaaatagtaatgaaaagtcgaataaaccaaataaaccagcaggacaagctaataaaccagccactgcaaacaaaagccaaggtgcaaaaccagcgacaaacaaaccagcaaacacaagtaaccaaacacaatcaagtggtacccaacaacaagctggtggacaaaaacgtaacaacagcaatcgtccaggtggcggcaattcaaaccgtccaggcggaaacaatcgtccgaatcgcggcggcaattttaacaataaaggccgtaacacgaagaaaaaaggtaaactaaaccatagtacggtaccaccaactccgccaaaaccaaaagaacttcctgaaaaaatcgttttcagtgaatctttaacagtagcggaattagcgaaaaaattatacagagaaccatctgaactaatcaaaaaattatttatgcttggcgttgttgctacaatcaaccaatcattagataaagatgcaatcgaactaatttgtgacgactacggtgtgcaagttgaagaagaaattaaagtcgatgtaacagatttagatgtgtactttgaaaatgaactaaatgaagcagttgacgagtctaaacttgttgaacgcccaccagttgttactatcatgggacacgttgaccatggtaaaacaacattactagattcccttcgtaatacaaaagttactttaggagaagctggtggtatcacccaacatatcggtgcttaccaactagaaattcatgacaaaaaaatcactttccttgatacaccgggacatgctgcctttacagcaatgcgtgctcgtggtgcgcaaatcacggatattacgattttagttgttgcagcagatgatggagttatgccacaaacaattgaagcaatcaaccacgcgaaagcagcgggaatgccgattattgttgctgttaataaaattgataaaccacaagcaaacccagatcgtgtaatgcaagaattgactgagtatgaattagttcctgaagcatggggcggcgataccattttcgcaccaatctcagctaaattcggtgaaggtcttgaaaacttgttagatatgattttacttgtttctgaagtagaagaattaaaagcgaaccctgaccgtcgtgctatcggttctgtcatcgaagcagaacttgataaaggccgtggcccagttgcgacgttactagtacaagatggaacgcttaatatcggagacccaattgttgttggtaacacatttggtcgtgtccgcgcaatggtcaatgatttaggccgtcgcgtgaaaaaagttggcccaagtacaccagttgaaatcactggattaaatgatgtaccgcaagctggcgatcgctttgttgtttttgaagatgaaaaaacagcaagaaatatcggtgaaactcgtgcaagccgtgcactagtagcacaacgttccgcaacaaaccgagtaagtttagacaacttatttgaacatatgaaggctggcgaaatgaaagaagttaacgttattattaaagctgacgttcaaggttctgtagaggctcttgccgcatctcttcgtaaaattgatgtagaaggcgttaacgtaaaaatcattcatactgccgttggtgcaatcaatgaatcagatattactttagcagcagcttctaatgcaattgttattggatttaacgttcgtccaacagctcaagcgcgtgaagcagcagaaaacgaaagtgtagacattcgtttacaccgtgttatctataaagccattgatgaaattgaagcagcgatgaaagggatgcttgatccagaatttcaagaaaaaattattggtcaagcgcaagttcgtcaaacaatcaatgtttctaaagtgggtacaattgcaggctgttacgtaacagatggtaaaattactcgtgatagcggcgttcgtattatccgtgacggaatcgttgtttttgaaggcgaaattgctacacttaaacgctttaaagatgatgcgaaagaagttgccaaaggttacgaatgtggtatcacagtacaaaacttcaacgatatcaaagaagacgatgtcattgaagcttacgttatggaagaaatcgaaagaaaatga

SEQ ID NO: 24213 - DNA, 927 bp, Listeria monocytogenes
atgacaattgcaaattcaatcactgatttaattggaaagacacctattgtgaaacttaatcgtttgccagaagcaggaagcgcggatgtatacgtaaaattagaatttcaaaatccgggtggtagcgtaaaagaccgtattgctaatgcaatgatcgaaagcgctgaaaaatctggtgcattaaaaccgggtgacacaattattgagccaactagcggaaatacaggtatcggcctagcaatggtagcagcagccaaaggttaccaagcaattttcgtaatgccagaaacaatgagcttagaacgtcgtaaattacttcaagcttacggtgcgaaattagttttaacaccgggaccagatggcatgaaaggtgcaattgctaaagcggaggaacttgcaaaagaaaacaactattttgttccacaacaattccacaacccagcaaacccagctgttcatgaagaaacaactggaccagaaatcgttgaagctttcggtaaagatggcttagatgctttcatcgcgggagtgggaacaggcggaacagtaactggtgtaggacacgtacttaaaaagaactacccagacgttaaaatctatgcccttgaaccagaagaatccccagtacttagtggcggttctccatctccacataaaattcaaggtatcggtgctggcttcgttccagatacgttagatacaaaagtatatgacggcattctaaaagtttcaagcgaagatgccctagaaacagcgcgtgaagtagcgaaaaaagaaggtattttagtgggtatttcttccggagcaactattaaagcagctctagaccttgcgaaagaacttggtgctggcaaaaaagtactcgcaatcgttgcaagtaatggcgaacgctacttaagcacgccgctttataattttgaagattaa

SEQ ID NO: 24214 - DNA, 1395 bp, Listeria monocytogenes
atgacttataaatttccagagaatttttggtggggaagtgcggcatccggcccacaaacagaaggcgcagcagatgtagacggcagaaaaccaagtatttgggatcactggtataaaatcgaaccaggtcgtttctttaacgatgtgggacctacaaacacatctaatttttactatcaatataaagaagatattgctttaatgaaacaaacagggcataattctttccgtacatcgattcagtggtcacgtcttattccagatggtattggtgaagtgaacccgaaagcagttgatttttacaatcgggttattgatgaaatgcttgcaaatgacgtggaaccatttatgaatttatatcattttgatatgccaatgtcgatgcaagaaaaaggtggctttgaaagccgtgaagtagtggacgcatatgctacatttgcgaaaacttgttttgaattatttggtgatcgtgtgaaacattggtttacttttaatgaaccaattgttcctgttgaagcgggctatttatacgatatgcactatccaaatgtggttgattttaaacgtgcgactcaagttgcttaccatactactttggcacatgcgcttgctgttaaagaattccacgcacttgaaattccagaaggccaaatcggaatcattttaaacttaacaccgtcgtatccaagaagccaaaatccagctgatttaaaagcggctcatattgcggatctaattttcaaccgaagtttccttgatccggttacaaaaggggaattcccgactgatcttgtagaaattatccgcgaacatgacgcgcttccagaatatacggaagaggatttagcgataattaaaaacaacattattgatattcttggtgtgaactactaccaaccgcgtcgtgtgaaagcgaaagaatacgcggctcacccggatgcgccgtttatgccagaacacctttttgataattatgaaatgccttaccgtaaaatgaatccgtatcgtggctgggaaatttttgaaagagcgatttatgatattgcgattaatctgcgcgacaactacgataatatcccgttctttatttccgaaaatggtatgggtgtggaaggcgaaagtcgttatcgtaacgcagacggaatgattgaagatacgtaccgaattgacttcattaagagtcatttgaaatggcttcataaagcaattgaagaaggcgctaactgccatggttaccacctttggacgttcatggattgctggagctgggcgaatgcttacaaaaaccgttatggcttagtggaagttgatttggacaatgacttcaaacgtaccgtgaaagcatctgggcattggtacaaagaacttgcagaaaacaatggttttgaagactaa

SEQ ID NO: 24215 - DNA, 1170 bp, Listeria monocytogenes
atgaaagaagtagttataatagatgcagttagaacaccaattggaaaattcggtggtagtttgaaagacatcagtgcagtagatcttggtgctaccgctctaaaaggtgttttagaaagagccaatattgctccagaacgtgtggatcaagtaatttttggtaatgtattacaagctggacttggccaaaatgtagctagacaaatcgctattaaagcaggaattccttataaagtacccggagtcacaatcaatgaagtgtgtggatctggcttaaaatcggttatgcttggcagacaagcaattcaactaggggaagctgacatcgtagcagtaggagggaccgaaaatatgtcccaagcaccacttttacttaatcccgagctagccggtgaagaaatcaatccaaaaaaactaagaaatagcatgttaattgatggtttaacagatgtttacggcgaatatcacatgggaattactgcagaaaatgttgcggaaaaattctccgtaacccgagaagaacaagatgaatttgctcataactctcaaatgaaggccgcaagtgcacaagaaaaaaaactttttgaagaagaaattattcctgtaaaacttccagacggttcattttttgaagccgatgaaacgattcgcgcgaattcaactctagaaaaattagctacgttgaaaagcgtattcaaagaaggtggaactgttacagccggtaatgcttccggtatcaatgatggagcttccgcaattattttaatgtcgaaagaaaaggcagtcgcggaaaacattccttatatcgcaacaatcaaagtaacctctgaggttggtgtcgatccagcacttatgggttacgcgccatactatgcagtaaatgaagctttaactaaaggtggatattctatcgatgaaattgatttattccatttaaacgaagcttttgcatcgcagtctgttgcagtggctcgtgatttgaaaattcccgaagagaaacttaatatttacggtggagcaattgcgctaggtcatccaatcggagcttccggcgcacgcattattgcctctttgttaaatgaattaaaacatgaaaacaagcatatcggggtagcttccttgtgcgttggtggtggtattggcattgcaattatccttgaaagagcatga

SEQ ID NO: 24216 - DNA, 3474 bp, Listeria monocytogenes
atgacacttcaaataattgcaggtagatcaggcacaggcaaaacaactcatttaatggatgaggttggagagaaaattaaacaaaattctaaaacgtatatctttattgtcccagatcaaatgacgtttcagatggagacaagctttttaaataaggaaaatttagcaggtatgcttgggacacaaatatttagttttagccgtttagcgtggaaaattcttcaagaaacaggtggattatctaaaactttcttaagtcagacaggtatagaaatggttatcagaaaagcagcccttgatcaaaaagataaattaaaaatcttttcaagagctacttctagaaagggtttttattcagagttagcgaatttatttaaagaaatgaaacaagaagaggtttccattgaagacatggtcaagagcgctacgaatctgtctacaagtgtgaataataaagtgcatgatatctcgctaatctatcaaaagtatgaggaattattagcggataaattccttgaaaatgaagactatttgagattgcttgcagaaaaaattgccgatagtgattatttaaatcagactgaaatagtcattgatggttttacttctttctcaaaacaagagctgacagtcattggagaattaatgcggaaatgtgataaagtaacgatttctttgacgcttaatgttcctgaaattcagcatggactagatgaatacagtatgttcaaagcaagtacagaagcgtattatgctctattagagttggctaaattaaatggcactcaagtcgaggaaaacaagttcttcttagagaataagcgagcaaaaacagaatcactagcctttttagctaatacttgggggcataacaaatttatgtctttcaaaaacgaacctcaaaatttaaaaatccatcaagcgaataacagacgtgcagaaatagaagggattgctcgtgagattcgtcaacaagcattaaatggatatagataccgcgacatagctattttgacaagaaatcttggagattatgacgttttatgtgaaacggtgatggaagcatataacattcctacctttattgataaaaagagagctatggctaaacacccttttatcgagtttattcgttctagcttagatgctattctatttaactggaagtacgaaccaatctttcaagcagttaagacagagtttttctttgatattaccgaaaaatcaagccttaacagacgtaaagcagatattcttgaaaactatgtattagaaaatggtattcaaaataaatggaaatgggaaaaagaaggagattggatttaccggaaaatccgcggactatccaccaatgtattgcctcaaacagatgaggagattcatatgcaatctatcattaatgagatgaggaatcttatagtgaatccactttctactttagaattaaatctaaggaaggcaaaaacagggatggagtttgctttagctctttatcattatttggagcaagtaaatgctgtagaacgattggagtcatggagacaaagagcagaagagcaaggctatttagaacttgcacgagaacatgaacaagcatggagctccatttccgcacttttggatgaatttgtagaagttttaggagaggaaacgttagatctagacagttttactgaaattattggaacgggtcttgatgcacttgaattttcgcttttgccaccttccttagaccaagtagttttatctgatatggagaatgcgaaattgctagatatgaaagtgatttttgctattgggatgaatgacggtgttatgccgctacgtcaaaaggataaagggattttttcggatcaggatagagatgcattgcgtgctgaagacagtaaattgaaaccatctgctaaaaataatattggtgaagaagacttattagcatataaaataataagtctccctagtgacaaattatttcttagttatcctgccgctgatgaagaaggaaaagtattaagcgaatccaattatttaaggaaaataaaaggacagtttaatgaactaaatgaatcagtttatttaacagacccgagcttattaagtgatgctgaacaaagtagttacattcgctctaagcaagcaacattaggattgttgacaagtcaattacaaatgtataaacgaggttacacgctgtctagtgtatggtgggatgcctacaatagttattttgaaaatgaaaaagaatcaataatggctaagcaagtgctatcgagtctatattatgaaaataaaacaaaaccattacaagaaacaactgctaaaaacttatttggagaaactattcatgcaagtgtttcaagaatggagaaatttttcagttgtgagttccaacattatgctcaatatggcttgaaattagaagagcgagggcattttcagttgcaagccgttgatatgggagagattttccatggagcaatggaatggatctcagcagaattaaaaagaaataatctggattggggtaatttaacagaagaagaatgtaagcaaatggcgaaacttgcaatgacattcctagctcctaaaatccagcatgaaattttgcttagctctaaaagaatggaatatattcagtataaattactccaaatcataacgagggcaacaactgttttaaatgaacaagcaaaaagcagtgcgtttcgtcctgttgggttagaagttgattttggtttgaaaggagatattccgccattaaaaatacctcttcaatcagatagcgaacttcttttgcaggggcgaattgatagaattgatatggcagaacaagatgatcgaacgttcctacgcattatagattataaatcaagttcgcatgatttggcgctcacagaagtctattatggtttagcgcttcaaatgcttacctacctggatattgtagtaacaaatgcacaaaaaatgattggcaaaactgccgaaccagctggggtgctgtatttccatatgcacaatcaatatgtacaagcagagaaagagttaagtgatgaggctatcgcaaaagaattacaaaaaagctccaaaatgaagggattgattttatccgatcccgtggctgtttcattaatggatatgacccttgaaaaaggaaaagcatctactattattccggcagaaataaaacaaaatggagagttgagtgcgagatcaagaactgcgacaagagcagaatttgataaaatgcgacaatttgtccgtcataaatatcaagaagctgggaataaaatacttgatggagcagtttcaattaatccatataaactaaaagaaagaacgccttgtcaattttgcagtttccgttcattttgcggatttgatccatctttaacaagtaatcaatatagacatttagctaatgaaaaagcagaaacaattttaacaaaaatggatattgaaggagggacgcagtag

SEQ ID NO: 24217 - DNA, 801 bp, Listeria monocytogenes
ttggatgtggaaagtagtccattaatgcagaaaattgattatagtacgcgcaaaaaaattgatttagtaaataatagtattcttcgttatatcgtgcgcgcgatgttagcatgtttattcttaactctaggaactgcggttgctgtaatgattggtgataaagtcgatcatttcgctccaggacttggtaaaatcacctatgcatttatgtttagttggtcgctcgttatgattatttatatgaatgctgagcttggtacttctaacatgatgtatatgacaactggtgtttatcaaaaaattgttaaaccaggaaaagcattacaaattttgcttttatgtattgtttgtaatttattgggtggaattcttgcagggtacttagtttctctgacatctgttttccataatttacctgctgatcatttcctatttactgctgttagcggtaaacttgaaaaagcacccctacaaatttttgtagaaggtattttcgccaatattgttgtaaatacggccgtgctttgtacactccgaatgaaagatgatgctggtaaagtcattgcgatgattttcattattttcatctttgcattcttaggatttgaacacgttatcgccaacttttcttcattctcattagcatttttcgcttctggtggaacacttgctgcaatgacagcgggcaatgtgaccgtcaatttagtccttgctttactggggaattttgtaggtggagggcttgttatcggactcggctatgcttggcttaaccgaacgaaatcaatttataaagactaa

SEQ ID NO: 24218 - DNA, 978 bp, Listeria monocytogenes
atggcgcaaaaaacaatgattcaagcgattacagatgcgcttgcagtagaacttgaaaaagacgaaaacgtattagtttttggggaagacgttggtaaaaacggcggcgtattccgtgcaacagaaggattacaagaaaaatttggcgaagatcgtgtatttgatactcctctagcagaatctggtatcggtggtcttgctatcggtcttgcacttgaaggtttccgtccagttccagaaattcaattcttcggtttcgtatttgaagtaatggattctgttgctggtcaaatggctcgtatgcgttaccgtacaggcggaactcgtaatgctccaatcacaattcgcgcaccatttggtggcggcgttcatacaccagaaatgcacgcggataacttagaaggattaatggctcaatcacctggtttaaaagtggtaattccatccactccatacgatgcaaaaggtcttttaatctcagcaattcgtgataacgatcctgttattttcttagagcatatgaaattatatcgttctttccgtgaagaagttccagaaggcgaatacacagtagaaattggtaaagcagctgttcgtcgtgaaggtacggatgtttctatcatcacttacggtgcgatggtgcaagaatcaatgaaagcagcagaagctcttgaaaaagatggcgtatctgtagaggttatcgatttacgtacaattagcccaattgatgtggaaacaatcattgcttccgttaagaaaacaaaccgtgctgttgtagttcaagaagcgcaaaaacaagcaggtattgcagctaatatcgttgcagaaattaacgatcatgcaatcctttctctagaagctccagttatgcgagttgctgctccagatagcgtattcccgttctctcaagcagaaacagtttggttaccaaatcataacgatattatcgaacgtgtaaaagaagttattgcattttaa

SEQ ID NO: 24219 - DNA, 2292 bp, Listeria monocytogenes
atgaaatggggattgcaaatgacaacttacatagtaaaagacgggggaaacagaaagctaccttttgacaaaagccgattggatggatatttagagaaaatccatgaagaatttccgaaacttgatttagaggattacaaacgtaaggtttttaattttgtagagaagaaggaagattacgcggctgacgaattagtcgattatttaattagggaagcagaagctcgtacagatattcatattcctgaatgggaacatttcgcagcacgcctttatttaaataaattatataaaaaagcaagtaaaaatcgtttctataatgatgatgataaatatggttcgtacgttggactacaagagagcctaggcgaacgtggtatttattctggcaatattctaaaaaattattctaaagaagatttgattgcagcagggaaattaattgaccctgagaaagataaattatttacgtataatggtttgtatttacttgcgacgcgttacttagcgactgactctgaacgtaatgtgtatgagttgccacaagaacgttggttaactatcgcactttatttaatgcaaaatgaaccaaaagaaaaacggatgaaactagtagaagaagcttactgggctttaagtaatttatatatgaccgttgcaacaccgacacttgcaaatgctggaaaagttggcggtcaattgtctagctgtttcattgatacagtagatgatagcttacaaggtatttatgacagcaatacagacgtcgctagagtttctaagcacggtggcggtgttggtgcatatcttggttacgttcgttcaacaggagctgctatccgtggcgtaaaaggtgcaagtggtggtgttattccttggattaaacaattaaacaatacggcagtgagcgtggaccaactaggtcaacgtaaaggcgcaattgcagtttatttagatgttttccataaagatatcgagtctttccttgatttacgtttaaacaatggagatcaacgtttacgcgcacatgatgtatttacggctgtttgtattcctgatattttcatggaagctgtagagcgtcgtggcgagtggtatttattcgatccacatgaagtaaaagcgaaaaaaggctggtacctacaagatttctacgatgaatcaaaaggcgaaggtactttccgtgaaaaatatgaagaattagttgcagatgaaacaattagcaaaaaaattgttaaagctattgatatcatgaaacgtattatgatgagtcaattagaaacagggaatccattcatgttttaccgtgatgaagtaaacagaatgaaccctaataaacatgaaggcatggtatattctagtaacttatgtacagaaatcatgcaaaatatgagcccaacaaaaatgatccaagaaattatttctggagatcaaatcgtcattacaaaacaagcgggagattttgttgtatgtaacttatcttctgtaaacttaggtcgtgcggttgttgcggaagaaggtactttagaacgtttaatcgaagtagaagtacgtatgttagataacgttatcgacttaaacgaactcccagtaccacaagcaactattacaaaccaaaaataccgttctatcggtcttggaacatttggttggcatcacctgcttgctcttaaaaatatcgcttgggactcagaagaagcggagaaatatgccgatgaattatatgaacaaattaactatttagctattcgcgctagtaacaaattagcgcaagaaaaaggtgcttacaaagtcttcaaaggcagtgactggaatacaggagaatatttcgcgcgtcgcaactataattcacctgaatggcaagaattagcgaaagaagtagcagaaaaaggcttacgtaatgcgtaccttgttgctgtagcgccaaatatgagtacagctcaaattgctggatccactgcttcaatcgacccaatttacagtgctttctactatgaagagaaaaaagactatcgtcgtccagtaattgcaccagacttaaacttaagcacatacccgtactacgaaaaaggtgcttacaaagtagaccaattcgcaagcgttcgtcaaaacggtcgtcgtcaacgtcacgtagaccaatcactaagctttaacttctatgtgccaagtggtatcaaagcaagtaaattacttgaactacacatgactgcttggaatgaaggactaaaaacaacttactatgtccgctccaacgatatcgatgtagaagagtgcgaatggtgctcaagctga

SEQ ID NO: 24220 - DNA, 906 bp, Listeria monocytogenes
atgacggagcgagcacttcaagtaactaatctgcataaaaaaattcgtaaacgagaaattattaaagggatatcatttgaagtaatgcccggagaagtttttggctttcttggaccgaatggcgctgggaaaacgacgacgattcgaatgattgtcggcttaatcaaaccaacgtctggaacgattttaattggaggcaaagatattcgcaaaaatttcaccgaagcgatgcgcggtcttggttctatcgtggagaatccggaattttatacatttttaacaggacaagaaaatttggcgtattttgcccgaatggattcttcgattaaaaaagaacgtattcaagaagtaaccgaactagttgggctagaaaagcggataaatgaccgagtttctacttattcacttggtatgcggcaacgtttagggattgctcaagcattactttcgaatccgaaattattaattcttgatgaaccaacaaacggtcttgatccatctggaattcacgaaatgcgcgactttatccgtgctctggctagaaatgaaggtattagcgtgctcgtgtcttctcatttattaagtgaaattgaacttttatgtgatcgggtggcgattatgacagacgggacgattattaaaaccgaccaagttgcgcacctgctcagttctcgtgcgcaattacgctggcgggtgactccaatagaacaagccaaagcctttttggaaagtgtgaccgaagtggaagtggacggggagtacctagtgacagctatgaatgaggaaagtgcagagtggaacgaacaactcgttgcaaaaggcatcaaagtccatgaaatcgacaagcgaaaaccatcccttgaagatctattccttgagttaacgggaggtcagtctattgattaa

SEQ ID NO: 24221 - DNA, 186 bp, Listeria monocytogenes
atgagcgaagataaaggtatgaaggacaaagcaaaaggattgaaagataaagtagtaggtgacgcaaaagacaaattcgggaaagcaacagatgacaaaggcaaacaagttgaaggtaaagctcaaaaagctaaaggcgaagtagaagataaaaccggtgacgctaaaaagaaattatccgaataa

SEQ ID NO: 24222 - DNA, 255 bp, Listeria monocytogenes
atgccaaatattaaatctgcaattaaacgtgtaaaaactgctgaaactcgcaacagccgtaatgcatctcaacgttctgcaatgcgtactgctatcaagaaatttgatgaagcagctgcaaacaacgcggacaacgcgaaagatctttacgtagaagcatcgaaaaaattagatagcgctgtgagcaaaggattgattcacaaaaacaatgctgctcgcaacaaatctcgcttagctgctaaattagctaaataa

SEQ ID NO: 24223 - DNA, 1392 bp, Listeria monocytogenes
ttgatgaaacatttaactttatggcatacaaatgatgttcatagtcacttggaacattggccacgcatttttaatttcttaaaagagaaaagaacggctgcagataaagaaaatcagtcggcgctcttttttgatattggtgattttttggaccgggtccatccgcttactgaaggaacgaacgggcttgcgaatacggacttacttaaccaactgccgtatgatgtggtgacttttggcaataatgaaggaacgactttggctcatgaagatctggacaaattatatgaacatgcggtcttcccagtagtgtgctgtaatttttacacgaataaagagtgcacggagcagccggactgggtgaaatcaattgtttataaagaaatagagcaagtgaaaatagctattattggtgcgacggcgccgtttcgggattactacgaagaaatgggctggggaatagaagaaccaattagctcgattaaaaagcaagttgctggcttagatgaagatacggatgtagttattttgctcagccatctaggtttaccaagcgatgaacgcattgcactcgaaattcctgaagtagatgtaattttgggcggacacacgcaccatttacttgaaacggggaaaatagaagggaatgcattacttgctgcagcaggtagatggggtgaatatatcgggaaagtggatatagagttagatgaaaataatcagatactgactaaaaccgccatgacttttaaaacagaggatttaccggctgctccaaatgaagcgaatgaaattcaaggtttcttcgataaagggcgcgcagaactctctgaaaaagtagttgcgattcccggaaagttagcgcataattggtttgatgactcggaaattgcgcacattttgaatgaagcggtttgtgaatggactggggcagaaacgtttgtgatgaacgctggaatttttatgacagactttgaagcgggaatcgtgacggattttgatatccaccaaatgttaccgcatccgctcaacgcgattgctttaacgatgtctggtgaggagcttgaaatacttatagacggaatctaccgaaagaaagcagaactgcaagatattccgcttcgaggttttggtttccgtggcgagtattttgggactgttttgatggaacgagctggttttgatgcggaaaatcaagtggcactttttgataataaaccaattgataaaacgagggaataccggattgcgacgcatgatacgtttgtgttcgcgccatttttcccgattgtaaaacaaattaaacgaaaagaagtatatacaccggaactactccgagatattttaaaatggaaactcaaaaaaatgtacggacaggaggaagacaagtga

SEQ ID NO: 24224 - DNA, 408 bp, Listeria monocytogenes
atgggttacagaaaattaggtcgtacaagctcacaacgtaaagcattactacgtgatcttgcaacggatttaatcgtatttgaacgtattgaaacaacagaagctcgcgctaaagagattcgtaaagttgttgaaaaactaatcacttctgggaaaaaaggagacttgcacgctcgtcgtcaagcagctgctttcatccgtcatgaagttgtagaagtagtacaagtagatgctaaaggtaaagatggttctactgtgaagaaaaaccgtcctgtatacgctctacaaaaactatttgatgatgttgctccacgttacgcggaacgtcaaggtggttacactcgtatcttgaaaaaaggtccacgtcgcggtgacggcgcaccaatggttattattgaattagtttaa

SEQ ID NO: 24225 - DNA, 381 bp, Listeria monocytogenes
gtgattagttggattatagcaattatcattctggttattcttttaggatacgaaatttaccagtttgtaatgcgacgcaaagcagtaaaagttttaacagaagaagaatttaaaaaaggttatcgtaaagcacaattaattgatgttcgcgagccaaatgaattcgatgctggacatattcttggagctagaaatatcccagttacacaaatgaaaaaccggacaacagaaattcgtcaagatttaccagtttacttatactgccaaacagcacaacgtagtaaccgtgcagcaattatgctttataaacgcggctacaaacaagtgtatcagcttaaaggcggctaccgtaaatggacaggaaaaactaaatctaaataa

SEQ ID NO: 24226 - DNA, 927 bp, Listeria monocytogenes
atgagagtaattgatacccactgtgatgcgctttacaagttgcaggctggaaaaggaaaatacactttccaagatgcggaagaacttgatgtgaattttgaacggcttatagaggctaaaatgttactacaaggattcgctatttttcttgatgaagatatcccggttgaacataaatggaagaaagcggttgagcaagttaatatttttaaacaacacgtactgcacaaaggtggaatcattcatcatgtgaaaaaatggtgtgatttagaaaatctacctgaagataaaattggcgcgatgttgacgttagaaggcattgaaccaattggacgtgatttagataaattaacgcaattacttgatggtggcgtattatctgtcggactaacgtggaacaacgccaacttggcagcggatggcattatggaagaacgcggtgcaggactaactcgcttcggaaaagacattatccatcttttaaatgaaagaaaagtattcacggatgtttctcacttgagtgtaaaagctttttgggaaacgttggaacaagctgagtttgttattgccagtcattcaagcgccaaagcaatttgtgcccatcctagaaacttagatgacgaacaaatcaaagcgatgattgagcatgacgcaatgattcatgtaatcttccatccacttttcacaaccaatgatggcgtggctgatatagaagatgttattcgtcatattgatcacatttgcgagcttggcgggatgaaaaacattggtttcggttcagattttgatggtatcccagatcatgtcaaaggcctcgaacacgccggtaaataccaaaatttccttgaaacactgggaaaacattatacaaaagaagaggtagaaggatttgcatcgcgcaactttttaaaccatttaccaaaataa

SEQ ID NO: 24227 - DNA, 231 bp, Listeria monocytogenes
atggaagaactcattctctcaatcgtgaaaccccttgttgaccacccggaagacgttgttatcacgccggaagaaacggatacatcgttaacctacaaattgtctgtcagtaaagaagacatgggacgcgtgattggtaagcaaggtcgtattgcgaaagcgattcgtactcttgtctacgcagttggctccaaaaacgataagaagattcgtcttgaaattatcgaataa

SEQ ID NO: 24228 - DNA, 276 bp, Listeria monocytogenes
atggcaaataaaactgatttagtaaatagcgttgctgaactagctgatctttctaaaaaagacgcagcgaaagcagtagaagctgtattcgaaactattcaaacttctttatctaaaggtgaaaaagttcaattaatcggatttggtaactttgaagtacgtgaacgtgctgcccgtaaaggccgtaaccctcgtactaaagaagaaatcgacatccctgcaagtaaagtaccagctttcaaacctggtaaagcgcttaaagaagctgttaaataa

SEQ ID NO: 24229 - DNA, 1470 bp, Listeria monocytogenes
atgggaaaagcaactggatttatggaatatgaccgaattccctctccaggacgtgatccgaaaagccggacacgtgactggaacgaatatagtttaccaatgccggtagcagatttaacaatacaagccgctcgatgtatggattgtggtgtgccgttttgtagcgtagggatggaaattaaaaatggcgtatcaggttgtccattgcataatttaattcctgagtggaacgacgccgtataccggggtgactggtatgaagcgttacaactacttttaaaaacaaataattttccagagtttactggtcgtatttgtccggcgccgtgtgaaggtggctgtacggtggctatttcggaacctgctgtagggattaaatccattgaaaaagcgattattgaccgaggttttgaagaaggctggattaaaccggctcctcctaaaaaacgtaccggtaaacgaattgctgtgattggatcaggaccggctggacttgcctgcgcggatcaattaaataaagctggccatagcgtaacggtcattgaaaaaagtgatcgcattggtgggttattaatgtacggtattccaacgatgaaactggaaaaagaacaagtaacgcgccgagtgaacttgatggcggaagaaggaatcgaattcgtcacaggtgttgcagcagggacagatgttacttttgcagaactacgcgaagagtatgattctatcgttcttgcgacaggagcaggaaatgcgcgcgatatcccacttgctggacgtgacgcagctggtattcacttcgctgttccgtatttatctcaaagtacgcgtgataatctggataacggcgggatacaaacactttctgctaaaggtaagaatgttgtgattatcggtggtggagatacaggtgctgactgtgtggcaactgcgctcagacaaggcgcaaaaagtatttatcaatttggtattcaagataaactacctgaattgcgtgatggcgaaaacccttggccgcaatatccacgtgttttcaaaatggattatgcgcacgaagaagcggaagcagtgtatggaagagatccacgtgagtaccttattaatacaacttcttttgaaaaagatgaagcaggaaatcttattggattgcatactgtagaagtagaagaaaataaggcagaaagaaaatatacacctgtagaaggaagcgaaaaatactttgaagtagatatggttttaatcgcgattggttttgcaggaacaactgaagatatttttacaaactttggtgtaggaaaaacagatcgtcatacgattgatgcagccaaaggattttaccgtactagtgaagagggcgtattcgcttgcggagatgcgcgtcacggtcaaagtttagttgtaaccgcgattgcagaaggacgagaagcagctcgtgaagtagacttttacttgatgggtgaaacatttttaccataa

SEQ ID NO: 24230 - DNA, 135 bp, Listeria monocytogenes
atgaaaagaacatatcaaccaagtaaacgtaaaagaaaaaaagtgcatggtttccgtacgcgtatgagtactaaaaacggacgtagagttttagcaagtcgtcgtcgtaaaggaagaaaagttttatctgcgtag

SEQ ID NO: 24231 - DNA, 960 bp, Listeria monocytogenes
atgagtgactatcaagtgttgttatattacaaatacacaacgattgatgatccagaaacttttgcaaaagagcatcttgcagcttgcaaagaaatggaattgaaaggccgaattttggtggctactgaggggattaatggcaccgtttcgggtacagtagaagcaacaaacaaatatatggattatatggcaaacgacgctcgcttcgctgatatggtatttaaaattgacgcggctgatgctcatgcttttaagaaaatgcatgtacggcctcgtgctgaaattgttagtttaagtttagaagaagatgttaatcctttagaagttacagggacttatttagaaccttctgagtttcgtgaagcactgttggatgaagatacagttattttagacgctcgaaatgattatgaatttgatattggtcatttccgcggcgctgttcgtccagatattcaaaatttccgtgagctaccaggatggattgaagataatcgcgagcaacttgctgataaaaaaatcgtcacttactgtactggtggtattcgttgtgagaaattttccggttggttaaaaactgctggttttgatgatgtaagtcaacttcatggcgggattgcgacttatggtaaaaacgaagaaaccaaaggggaactttgggacggccaaatgtatgttttcgatgaaagaattgcggttccgattaaccaagtaaaccctactattgttgggaaagattactttgacggcacgccttgcgaacgttacatcaattgtgctaacccgtattgcaataagcaaatcctggcttctgtcgaaaatgagaaaaagtatttgcgtagttgttcgcatgattgtcgtgttcatccagcaaatctttatacgaaaaatttatctaaagaagaattcactgaacgccttcaagcaattaatgaatcttcaccagaaatggttcaataa

SEQ ID NO: 24232 - DNA, 960 bp, Listeria monocytogenes
atgaaacgaattgcaattttaacaagtggaggagacgctccaggaatgaatgcagccactcgcgctgttgtacggaaagcaatctatgaaggacttgaagtttacggtattaactatggctttttagggctagtcaatggcgatattcgtaaactagaattaggttctgttggtgatttacttcaccgcggaggtacattcctttattccgcaagatatcctgaattcgctacagaagaaggacaacttaaaggaattgaacaattgaaaaaacatcaaatcgatggcctagttgttattggtggagatggttcttaccacggagcggaagcacttacaaaacgtggattcccaaccattggtatcccaggaactattgataatgatatttctggaactgattttactattggttttgatacagcgttaaatactgttcttgatgcacttgataaaatccgcgatacagctacaagtcacgaacgtactttcattattgaagttatgggtcgcgacgctggtgatatcgctctttggtctggtcttgctggtggcgctgaagctatcatcgttccagaagaaagttttaatatggatgatgtcgtggatcgtttgaacaaaggtcgcgaacgtggcaaaaaacatagtattatcgtcgtagctgaaggcgtaatgtctggtaatgaatttgctaaacaattagctgaatatggcgattatcatgcacgtgtaactgttcttggacacgttcaacgtggtggtagcccgactgcatttgaccgtgtacttgcaagtcgtcttggtgcacgttcagtagaattattgctagaaaaccgcggaggattagctgttggaatccgtgaaaatagaattgtcgaaaatgacattagtgagattttgaaagaaaaacacactcttgatcaaaaattatttgatcttgcatcaattttgtcgatttaa

SEQ ID NO: 24233 - DNA, 1806 bp, Listeria monocytogenes
atggctaaacatattgtcgaattaaccgatgctctatccaataaaattgctgccggagaagttgtagaacgccctgcttcagtcgttaaagaattagtagaaaatgcaattgatgcagggagcaccgtcatcgatattttagtggaagaagcgggattaaataaaattaccattattgataacggtagtggcattgaagaagaagatgtcgcaacagcttttttacgccatgccacaagtaaaatcaaaaacgaagcagatttattccgtgtgcatacactagggttccgcggcgaggcacttccaagtattgcctctgtgtcccatttggcaatggaaacttctactggtgaaacaaaaggaacatctatttccttagaaggcggaaaaatcattgaacaaaaaagcggtcatgccagaaaagggacgcaaatcgaagtatcccagttgttctttaatacaccagcacgcctaaaatatttaaaaagtttaccaaccgaacttggtaatattaccgatattctaaatcgcttagctttagcgcatccagatatcagtttccgcttttcgcacaacgggaaacctttattacaaaccaatgggaacggggatttacgccaagtgattgcagcaatctacggtatttcgattgcgaaaaaatcaataccagttaaagcagagtcacttgattttaaaatttctggatatgctgtattaccagaagtgaatcgctccaaccgtaattatatttcgaccatcattaacggtcgttttattaaaaatttcgcattagtaaaagctattcaagaaggataccacacgctcttaccaattggccgtttcccgattatcgttctccaaatcgaaatggacccaattattgtagatgtcaacgttcatcctgctaaattagaagtccgtttaagcaaagaaaaagaactggggcaactaattagccaaatgattaaagaggctttccacaaattgcaactaattccagaaggagagatttctaaaaaacaaaaagaagtccaaaaatccgaacaaattcaaatgtcttttgaagaaaataaacccgcaaaagaaataccaactcttttttcaaaaccgactatccctgaatatgttccttctgatgaagatgctccgcgggaagatgattttattttggaaacaatgccaccttatgaacctcaagcggagcaggaagagcattcgaaagaacgtattccgaaaatgtatccaattggtcaaatgcacgcaacttatatttttgcgcaaaatgaaaatggtttatatatcattgatcaacatgcggctcaggaacgaattaaatacgaattttaccgtgaaaaaattggggaagttagtcgcgaactgcaagaattacttgtaccaattgtgcttgaatttccagcggatgagtatgttcgtttagaggaacaaaaagcaaaattagaagaggtcggcgttttcctagagaacttcgggcaaaatagttttatcattcgtgcgcatccaacttggtttccgaaagaccaagaagaggagatgctccgtgaaattattgatgaagcgttatccgcaccaagcataagtattcataaattaagggaagatactgctattatgatgagttgtaaaaaatcaattaaagcaaatcattatttaacaacacaggacatggaagcattactcgatacactgagagaagcaagcgacccgttcacttgtcctcatggtcgtccggtgattatccaatactcgacatatgaactagaaaaaatgtttaaacgtgtgatgtaa

SEQ ID NO: 24234 - DNA, 1563 bp, Listeria monocytogenes
ttgacaaaattttcggagttcggactggacgaaaaaattgtaaaatcagtaaatcggatggggtttgaagaagcaacaccaatccaagaaaagacaattccactaggattagaaggtaaagacttaatcgggcaagcacaaacaggtactggtaaaacagccgcttttggtcttccaatgattcacaaaattgaccaaaagagtaacaacgtacaagctttaattattgctccaacacgtgaacttgcaatccaagtttcagaagagctttataaacttagctatgataaacatgtacgtgtgctagcggtttacggtggtagtgatatcagccgtcaaatccgttcacttaagaaaaacccacaaatcgtagttggtacgccaggacgtattttggatcatattaaccgtcgcacactgaaactagatcacgtggaaacacttgtactagatgaagcagacgaaatgctaaacatgggcttcattgatgatatcgaaactattctaaaagaagtaccagcagaacgtcaaactttactattttctgcaacaatgcctgatccaattcgccgtatcggtgaacgtttcatgcatagcccagaacttattcgtattaaagcaaaagaaatgactgcactattaatcgaacaattcttcgtaaaagtgcatgaaaaagaaaaatttgacgtattatctcgtttattagatgttcaagcaccagaattagcaattgtttttggtcgtacaaaacgtcgtgtagacgaactatctcgcgcgcttgatatgcgtggttacgtggctgaaggtatccacggtgacttaacgcaagcaaaacgtatgagcgtactacgcaaatttaaagaaggaaaaattgatgttctagttgcaacagacgtagcagcacgtggacttgatatttccggtgtaacacatgtatataactatgatattccacaagatccagaaagctatgttcaccgtattggtcgtactggtcgtgctggtaaagaaggtatggcgattacattcgtacaacctcgtgaaatgggttatttacgtattgtggaagaaactacgaaaaaacgtatgcaaccacttcaagctcctacatgggacgaagcatttgcaggccaattacgcgtagcaactgaaaaaattcaagaagcaattacagaagaaaacttagctgactacaaaacgtttgctaacgaacttcttgaaaaatacgatgcaactgacatcgcagcagcaatgcttaaaatgttagcgaaagaaccagataaaactcctgtccatattactgaagagcgtccattaccatcccgtggtggcggtggctacaaaggtaaaaatggtaaaggcggcaaaggtggcggctatcgcggcggaagcggcaaaggcggaagctaccgtgatcgtaacaacagcggtaaaggtcgtcgtagcggcggcggttccggtggtggaagcggctctggcggtggcggcaatcgtgatcgtcgtggcggcggagaacaacgcagcggcggcaacaaaggcaactactcacaaaaatctaaataa

SEQ ID NO: 24235 - DNA, 1353 bp, Listeria monocytogenes
atgggtaaatatttcggtacggatggagttagaggtgttgcaaactctgaattaacaccagaacttgcattcagattaggtagaatgggtgggtatgttttaacccgtcatgtaggggaacatccacgtgtacttgtagctcgggatacacgtatatctggagaaatgcttgaatccgctttaattgcaggacttgtttctgtagggattgaagtaatgcgtctaggagttatctccacaccaggtgtagcttatttaacaaaagcacaaggcgcttctgccagcgtaatgatctccgccagccataatccagtagatgataacggtattaaattttttggttctgatggctttaaattgtccgatgatcaggaagaagaaattgaacaacttcttgatacagcagaagatacgctacctcgaccaagtggtgaagggcttgggacggttagcgattattttgaaggtaaacaaaaatatattcaatacttaaaacaaacaatcgaaaatgattttaatggctatcacattgcacttgattgtgcgaatggtgcaacttcaggtcttgcaacgcatttatttgcagatttagatgcggatattagttcgatgggagcttctccaaacggtttaaatatcaatgatggcgttggatctacacatccagaagcactagcggcctttgttttagataaaaaagcagatgttggtttagcttttgatggcgacggcgaccgtgttattgcgattgacgaaattggtcaaattgtcgatggagataaaattatgtttatttgcgcgaaatatttacgtgaacaaggcttattaaataacaacacgattgtatccactgtcatgagtaatctaggtttctacaaaggcttgaaagagcttgaaattgaagatgtacaaactgctgttggtgaccgttatgtagttgaagctatgcgtgaaggtaattataatcttggcggagaacaatctggccacattattttcttagatcataatacaactggtgatggacttctttcaggaatccaattaatcaacgtgatgaaagcaactgggaaaaaattatctgagcttgcggctgaaatgaaaacattcccgcaaaaattagaaaatattcgtgtaagtgataaaaaccatgtaacggataatccgaaagtaagtaaagtaatcgatgaagtagaagctgaaatggctggtaatggtcgagttcttgttcgcccatctggtacagaaccattagtgagagtgatggtagaagctgctacgaaagaagaaacagacgaatattgtgaacgtatttcagcggttgttcgttcagaaatggcacttaacgattaa

SEQ ID NO: 24236 - DNA, 1242 bp, Listeria monocytogenes
atggataagagaagagtagttgttactggtgttggagctgttacacctattggaaacgatgcggaaacttcttgggaaaacgcaaaaaaaggtgttaatggtgttgcaaaaatgacaagacttaatccggatgactttccggttaaaattgcagcagagttaaaagattttgatgtagaaaaatatctagagaaaaaagaagctcgtaaaatggaccgttttacgcattatgcaattgcaagtgctgaaatggctgtacaagactctggtttagttattgatgattccaatgcaaaccgcgttggtgtttggattggttcaggaattggcggaatggaaactttcgaaacacaatatgaaattttcttaaatcgtggacatcgtcgagttagtccgtttttcgtacctatgatgattccagatatgggttcaggccaagtttctattcgttttggagctaaaggcattaactctacaacagttacagcttgtgcaacagcaacaaactcaatcggcgacgcgtttaaagttattgagcgtggggatgctgatgcaatgattactggtggagcagaagcaccaatcactaaaatgtcacttgcaggatttactgctaataaagctttgtcattaaatccagatccagaaactgcttgtcgtccatttgataaagaccgtgatggttttattattggcgaaggagcaggtatcgttattttagaagaatacgaacatgcaaaagcacgtggggcaaaaatttacgctgaaatcgttggttacggtgcaacaggagatgcttaccacattactgctccagcaccaaacggcgaaggtgctgctcgcgcaatgaaaatggcgattgatgatgctgggcttactcctgataaagtagattacattaatgcccacggaacaagtacaccatacaatgatgaatacgaaacacaagctattaaaactgtctttggagagcatgcgaaaaaattagcgattagttctactaagtcaatgacaggacatactttaggtgcgtctggcgggatagaagctattttcgcgcttttgactattcgtgataatattattgcaccaacgattcatttgaaaaaccaagatgaagtttgtgacttggattatgttccaaatgaagcacgtgaagcaaatgtaaatgttgtaatttctaactcttttggctttggtggtcataatgcgactttagtatttaaaagaatagaagactaa

SEQ ID NO: 24237 - DNA, 1347 bp, Listeria monocytogenes
atgaaaaaagataaaacagaacgtacaaaacaaagctggagaaaagcacagaatgctcccagcttaagtgaagtaaataattccgtagctattcctaaaaacgcgaaatttttccgtaaattatttgcctttatggggccaggtgcacttattgcggtcggctatgtcgatccagggaactgggcaacttctattgccggtgggtcagagtttggctacacgttattatcagttattttaatttctaatattttagccgttttactacaatcacttgcatccaaattaggcattgtcaccggtcgcgatttagcccaagcctctagtgatcacttttctaaaccatttggattcgtcctttggattttagctgaattagcgattattgcaacggatatcgcagaagtcatcggtagtgcgattgcgcttaatttactatttggtattccgttaatctggggcgtttgtattacagcattagatatttttctcgtattatttttacaacataaaggtttccgctacatagaagttattgttattactttaatggttacgattcttgtatgttttggggcggaaatggtaatgtcacatccagatatgcaagcaattgcaaagggatttattccacaatcagaaattgttactaatccagctatgctttatatcgcacttggtatccttggggcaacagttatgccacataatttgtatttgcattcatctatcgtgcaaaccagacaatatgcccgaacaaaagaagggaagaaagaggcaattcgtttttcatttatcgattccactttttccttaacgattgctttattaattaatgcatcgattttaattttagctgctgctgccttttatacgaccggtcaacataacgtcgctggtattgaggatgcttacaaattacttaatccaacgcttggaagcagtatcgccagcaccgtttttgcagtagcattacttgcatcagggcagaactctactttaacaggaacattggctggccaaatcgttatggaaggtttcttaaacatccgtttaaaaccagtggtacgtcgtttgttaacgcgtgtactagcaatcgttccagctgtaataatcacagcactctacggagcaaacggtatcaatgaactactaatttttagtcaagttattctgtctatgcaattatcattcgcggttatcccattagtaatgtttacaagtgacaaacaaaagatgggcgaattcgtcaacccaacatggttaaaaatcatttcttgggctgttgccattttcattgcagtcttaaacatctacttgttattttatactttgacctcattataa

SEQ ID NO: 24238 - DNA, 846 bp, Listeria monocytogenes
atgaatttactcaaaaagtggttcagttctattgactgggaccaattttggaatcatattatttctgtcggaataaaaattgccattttaattgctctttattttattttccgtgtgattggtaataaaattattcgtagtttcttccgcaaatatcggcaacaacaagcagtttctgttgggcgcgcggacacgttagaaagcttaatttctaatttttatggatatgttttattcttcacttttgcgattttattattacagaactttatggatgttacggcaattattgcaagtgctggggtggccagtttggcaattgcctttggtgcgcaaggtcttgttagtgacgttgtaactggattttttattcttcttgaacgccaactcgatgttggtgatacgattactattggactagttaatggaacagtggaagcacttggacttagaacaacacaggtacgtgattttgatggcacgcttcatttcattcctaacagacaaattatggtcgttagtaatcattcgcgcggtaatatgcgtgtgatggtggacattcaaattagtccacatgaagatccagaaaaagcaattaaaattattggtgaggtttgtgacgtagctgcaaaagagaataaaaatatcgttgagccccctgttgtattaggcgtgcaaaacatagacgcaacaaatatgattatccgcgtagtcggtaaagcagtgaacggcgagcagtattctgttcaacgtgacttactcaaagatattcgcgaggcactcgcagaaaacaagattgaactaccactcaattttgttagcacattcggaccaaataataattaa

SEQ ID NO: 24239 - DNA, 690 bp, Listeria monocytogenes
atggctaagaaaggcaaaaagtatcaagatgctttaaaacaaattgatgcaaacaaagtttacactgcagaagaagcagttgaacttgctaaaaaaattgacttcgctaaattcgatgcaactgttgaagtagcattccgtcttggcgttgaccctaaaaaagcggaccaacaaatccgtggtgctgttgtattaccaaacggtactggtaaaactcaacgcgtattagtattcgcaaaaggtgaaaaagctaaagaagctgaggctgctggagctgattacgttggtgaatctgaattcgttgaaaaaatcaaccaaggttggtttgactttgacgttatcgttgctacacctgacatgatgggtgaagttggtaaattaggccgtgtccttggaccaaaaggtttaatgccaaaccctaaaactggtacagtaactatggacgtaactaaagcagttaacgaaattaaagctggtaaagtagaataccgtgttgataaagctggtaatgtccatgctgcaatcggtaaagtatcttttgatgctgctaaactagtagaaaacttccgtactgtgaatgacgttctacaaaaagcaaaacctgctgctgcgaaaggtacttacgtgaaaaatctttccgtaacaactactttcggacctggaatcaaagtcgacccagcaagcttataa

SEQ ID NO: 24240 - DNA, 888 bp, Listeria monocytogenes
atgagtaaagatattgcaactcccggaagaacgacagaaatcctaaagaagtatggtttcttatttaaaaaaagtcttggtcaaaactttttaatcgacagtaatattttgacgcggattacagatacagccgaaataacaaaagaaacaaacgtcatcgaaatcggaccgggtatcggcgcgctaacagaacaattagccaaaacagcgaatgaagtcgttgcttttgaaattgatcaacgtttactgccaattcttgatgatacactgagtgcttacaataatgtcaaagtagtccacggagacgtgctaaaagcagatgtagaagaagtcatcgcagagcaattcgcgaagccagaactaccactaaaaatcgtagcaaaccttccgtattacgtaaccacaccaattattttaaaacttctacacgataatatcccggcagattcgatgacatttatgcttcaaaaagaagttgcggaccggataagtgcagttccaagtacgaaaagctacggaagcctaacaatcgctatccaattttacatggaagcagaactagcctttatcgtgccaaaaaccgtctttatgccacaaccaaatgttgattccgcagtaattcatctgaagcgtcgcaaagaaccattagctgaagtgaacgacgaagaatttttctttgaagtaacaagagcttcgtttgctcaaagaagaaaaacgctttggaataacttagcttcaaaatttccagctttaaaaccgcgcaaagacgagttggtagaaggtttaaatgccattggtatagacttaatccgtcgtggagaaacgttggatattccggaatttgctaaattaagcaactttttaggtgattttttaaaggaaaaataa

SEQ ID NO: 24241 - DNA, 1689 bp, Listeria monocytogenes
atgagcaacagtaaatttattattacagaattatactgggaaagaattcaactacatgtaaagggtaaaatagaaaatatttcgttagagaactatacgttttcatttaggactttaacagatgaatttcatttttcaccaacgggaatcaaattggaaggaaacacatttgatcttcgtttcaatattgctattttaaatgatgggaattatttaccaagtggggattatctcttatccttatataacagtgaaacagcggatgaaattgttgcccaaccggctgctgaactatataaatttccagaagatgaagatcttttagaagaactaaacgaagctaaaaccgaaaacgaaaaaaacaatgtgcttttagcaggtttaagaaaagaatttaaacgcggtggggcgaatctcaagtatacgtataaagtcaccccaatgatttctgcagatgtaaatgaatttgttttctctgtttcatttacaatccctgtaccaaaaccaacaaagtggcaagtattcaaaaataaaattaaagaaatgtatcatactttcagttttaattttagaactggtttgtttaaatctattttctatacctcacaagccctagtacctaaaaacggaaaacgaattcttttttcttcagattcccgtgcagaaattggtggtaattttgagttcgttctaaataaaatgaaagagatgggtattgataaagattataaaatcaaaatgacctttaaacccaacattcgtttgagaagagcttttattgagaaatttagatttccatttttgctagggagttcagatattatttttattgatgattatcatccgatgatttatacaattgacttcagcgaaaaaacacaagtaattcaattatggcatgcatgtggggcttttaaaacagttggattcagtcgttcaggtaagcaaggcgggccgttctttgatgatagagcacatcgtaattatacacgtgctattgttgcttcagatacagacataccattttatgcagaagcttttgggataaaagaatcttctattttaccaactggtgtaccaagaacagatattttctttgatccagagtacaaaagaaatattgttactacgatggagcagttgttcccagaaactcaaggcaaacaagttattttatttgctccaactttccgtggaaatggtgcgaatcaagctcattacccatattttaaaattaatctggctaagtttgctgaatactgtcgaaaaaataattcggtcgtaatctttaaaatgcatccgtttattaaaaatgaatttattattccagaacaatatgcagatgttttcattgatgctagttcttatcgtgaagtaaatgatattctattcattacggatatattgattacggattattcatctgttattttcgaattctctaccttacaacgcaaaatgctgttctatgcatttgacttggaagattatgtttctacgcgtgacttttatgaagaatatgaaggttttgtgccagggaaaattgtatatgatttcgaagcattaattaaggcgcttgaaatgaatgattttgaacaagaaaaggtaaaaccatttttagataagcactttaaatatcaagatactaattctgcaaaacgaattgtggaagaaatctttaaaaaataa

SEQ ID NO: 24242 - DNA, 795 bp, Listeria monocytogenes
atgacacattttaatgctttattagcaaaagaatggctggaacaacgtcgaagtttaaaaattatctggcttccgattgtattcgcacttcttgggctcacacaaccactaatgatgtattttttaccagaaattctaaaagcagttggcacaggggcggaaacggagcaggtagttgcactaatggggaatcaatcagctcaggaagtgatggcacaaacactaggctcccagtttgatcaaattggtattatcattatcatcgttgttgcgatggcttgtattcaaaatgaccgaacaagaggtatgttggcatttattatgacaaggccagtgagcgctgtggaatacgtgttatcgaaatgggtaatgcaatgtgtggtggggttaagttcgcttttaatcggctatgtcttggctgcttactatacgtactttctatttggagaattagcgattaattcattagttgagggattttttgtgtatgccgtttggtttatttttgttattagtttggtggtttttgcgagctcaatttttgatagtaatgccgttgttgcaatgattagtgtctttatagcgattgttttaggactaatcagtggacttggtggctggattcaaatatttaatccggcgtatttaagtaaaaatgcgactatgcttattatgtccggtaagacgatggattattttattcccacaattttgattactgcagcctggattatcttacttgtaggcttgactgttctaatgattaaaataaaagcacttccaaaaacggaatag

SEQ ID NO: 24243 - DNA, 1212 bp, Listeria monocytogenes
atgagtaaaccaaaaattgtcattctcggagcaggatacgggggactaaaaactttacgtaagttacaacaaagaaacttggaagccgaaatcgttctagtgaataagaatgactatcaccacgaaacgacttggttacatgaagcagcagctggaacaattgaaccagaaaaattaatgtatccattagacaaagtcgttaacgatacgaaaacgacatttatccaagatacagtagtaaaaattaataaagatgaaaaaacagtcacactagatgcaaatggcgatatcagctatgactatttattaattgctcttgggtcagaagcagaaacatttggaatcagtggtttgaaagaatatgccttcactattacaagtgtagaatccgttaaaaaaatccgtgcgcacattgaagcgcaatttgctaaatggaaaacagacccacgcgatgaattattaacaattatcgttggtggcgctggttttactggaattgagtttcttggggaattaactaatcgtattccagaattagtgaaacaatatgatgtaccacgcgaaaaagttcgcatttactgtatggaagcagctccaaaagtattaccacaatttgatgcgaaactcgttgattatggtgttggtgtactggaagatcgcggcgtagaattccatgtcggtaaaccagtcaaagaggctacagctgacggcgtaaaatatgccgaaagtgaaaatgaagttcgtgaaatcaaagcagcaacgattatttgggctgccggtgttcgtggcaatagcgttatcgaagcatctggttttgaagctggccgtggtcgtgtgaaagtaaacaacaatttaaccgttccaggtaacgaggaaattttaattgttggtgactgctcactaatcatcaacccagcaaacgaccgtccattcccgccaactgcccaaattgcaatgcaacaagcagatgtggctgcagtgaacttagctaaattagttaaaggcgaaacggacctacaagactttgtttatcatgaaaaaggaacggtatgctctctaggcgataacgatgcaattggtgtcgttttcggtaaaaacttgaaaggctatccagcttccgttatgaagaaagttattgatgaccgtgccctactacttattggtggttcaggcgtcttggcaagtaaaggtaaattcaaattctataaataa

SEQ ID NO: 24244 - DNA, 789 bp, Listeria monocytogenes
ttgaaaacgagaattattactgcagttgttgcgcttatattttttattccatttgttgtttacgggggaattccatttgaattattaagtattttacttgcaactattgcattatatgaagtgcttgtaatgacaaaacaacgaattttttcgatgaatggaataattaccttactattaatgtggttagttgtcgtgccagatagatatttggattttttagatacactgcatattacagaaatggaagttatttttattttaatggctttattactggctaatacggtattttcacgaaataaattccattttgatcaagtgggtatttgtatggttgccgctttttatacaggatttggtttccattacttggcgttaactcgtgaagctgggttaatgtatgtactttttgctttatttattgtttggtcaactgatacaggggcttattttattggaaaagcgattggaaaacacaaattagctccgaatgttagcccgaacaaaacagtggaaggctttattggcgggattgtatgcgcacttgtcattgctgggggtttttattattttgcggagttaccaggaaatattgcatttgtactagcgcttttagtctttctttctatttttggacagcttggcgatttggtcgagtcagctttaaaacgcttctatggtgtaaaagattctgggaaaatcttacctggacacggtggtattttagaccgttttgatagcttgttattcgttttacctctgctacatatacttcaaattatttaa

SEQ ID NO: 24245 - DNA, 474 bp, Listeria monocytogenes
atgattagaattggccaaggttatgatgtacataaacttgcttatgaccgagaccttattattggtggggttaaaatcccttatgagaaaggattactaggtcacagtgatgcggatgtacttctgcatgctattactgatgctatcataggcgcaattggtgctggtgatattggtcattttttcccggacacagatatggtttttaaagatgcggattcagctgagctacttgcagaaatttggcagaaggtagaggcggatggttttcgtcttggtaatctagatgctactattattgctgaaaagccaaaaatggcgccatatgttgagcaaatgaagcttcgaattgcggagttgctacatgcggattcagcccaagttaatgtaaaggcgactacgacagagaaattagggtttactggtcgggaagaaggcatcgcaagtctagccgttgtcttacttgaaaaataa

SEQ ID NO: 24246 - DNA, 1287 bp, Listeria monocytogenes
atggaaaaaatcacatttgagcaagtaaaagaagcagtctttcatgaaaaaatggcaaatggcttacaagtatatcttcttccaaaacaaggatttagtaagacttatgctgtgttcacaacaaattacggtgcaatcgataataacttcgtcccaattggcgaaacagaatttactaaagtaccagatggtattgcccatttcttagaacataaaatgtttgaaaaagaagacggcgatgtattcttcaaatttggcgaaaaaggtgcttttacgaatgcatttacctcgtttacgaaaacagcctaccttttctcaagtacttctcgagtggaagaaaacttggaaacgttaattgactttgtacaagagccatatttcacagaagaaactgttgaaaaagaaaaaggcattatcggacaagaaatcagaatgtatgatgatgaccctgatttccgtgcttattttggcgtaatcgaaaacatgtatcataatcacccagtaaaaatcgatattgctggaaccgtagagtccattgccgaaatcaacaaagatttactttatctttgctataacacgttctatcatccgagcaatatggtgctttttgttgtagggaacttagaaccagaacaaatgatggaccagattcgtgccaaccaagcaaaaaaagaattcgctgaagctgcgccaatcaaacgtcatttccctgaagaaccaaagacggttgccgtaaaagaacgcaaaattcatttccctgttcaaattgctaagaaccttgtagggattaaagaagatattggctccttagaaggccaagctgctataaaacaagaaattattggagatgtagccttggaaatgctttttggcacaacatctgccacttacttgaagttatacaacgaaggaatcattgacgatacatttggctatgattacaccttgcaagatagcttctcgttcgtattagttggtggagacgccaaagatccagataaacaaactgcaaaaatcaaagatgcaattaaagaagctgccaaaaacggcttaaatgaatcagatttagcactagtaaaacgcaaacgaattggtcagtttttgcgctcgctaaattctcctgagtttattgcgaaccaatttagccaatacgtcatgaaatcagcttctttattcgatattttacctttaatggagaaagttacattagaagaagtaaatgcatttgttaaaaatttggataaagaagagcgaacaacaagtttccaattacttccagaagaataa

SEQ ID NO: 24247 - DNA, 1446 bp, Listeria monocytogenes
atgtggcgactaactggaaattcgagtttaccgatttacttacaaattgttgatttaatcgaaacgaaaattatgaatggtgaacttttgccagaagaaaaattgcctccagaaagacagttggcggagatgtttggtgtgaatcgttcgacggttgtgcgagcgctcgatgaactgacggcgcgggctgttatcattcgcaaacaaggtagtggaacaacggttaatgcggaaaaatggggactttttgcggggcagtcaaccaattggcggcattatttaacgcaaggtggttttacgccagcagttccttatattcgccaagcgggagtaatggaacgtgccaattcggataacgtgattgatgctgcaagcggggaattaccgcttgaaatgacgccgaaaatggaaacaccgagtctttcctggcagtcttttattgctgaagaacaacaggaggacgaagctggctacaaaccactgcgtgaaacgattcaaaagcagatgaaagaagcttatggcttacaaacgcgatctgaacaaattttcattacatcgggtgcacaacaagcgctctttttaattacacaatgtttattaaaaccgggggatgctgtggcaattgagtcaccgtcatacttttattcgctatcgttgtttcagtcagccggcttgcggatttttgcgttaccaatggatgaagacggcgtggttatttcggaattacgtgatttatatcataaacatcgcgtaaaaatggtctttgttaatccaacatttcaaaatccaactggactagtgatgagtttgaaacgacgaaaagaactcgtgaaaatttgtgctcatttgcaaatccctattgtagaggatgatccattttcagaactgggtgcgctggataaccaaattccggcaccgctgaaacgattggatacagataatgttttatatattggatcgctctcaaagatcatgggatctactacacgaattggttggctgattggtccgacagcagttattgaacggcttgcacttgccagacaagagatggattttggtttaagcattttcccgcaagtactagcaaatagtgttttaaatacggccggttacaaggcacatttgctgcaattgcaccacgtattggaacagcgtcgagatgatctaatcgaagcattcgaagccattttaccgagtgaagtaacatttattaagccaaaaggtggttttcatttatgggtgaaattgccagtcgaatttcgttcggttcgtgatttcgatatatttttagcgaatgatctgctcgtgatgccgggatttttatttggtgtaaaagaagctgttattcgcgtaacttatgcacgtcttgaaaagaaggaagcgagacgtgtagctgaaataataaaacaaatattagtatcaaaaaagtgcgaggaagcgtga

SEQ ID NO: 24248 - DNA, 546 bp, Listeria monocytogenes
gtggcagaacgtttagtaggcacacaagctccaagatttgaaatggaagcagttatgccaaatcagacttttggtaaagtgagtctagaaaaaaatatagaagacgacaaatggacgattctctttttctatccaatggactttacatttgtttgtccgacagaaatcgttgctatttccgctcggtcagatgaatttgatgcattaaatgcacgcataattggtgcttctacagatacgattcattcgcatcttgcatggacgaacacaccaattaaagaaggtggtattggtaaattaaactacccgcttgctgctgatacgaatcatcaagtagctagtgattatggtgtattaattgaggaagaaggcgtagcattgcgcggtcttttcattatcaatccaaaaggtgaaatccagtacgaagtggtgcaccataataatattggccgtgaagtggatgaagttttaagagttttacaagctcttcaaactggtggactatgcccgattaactggcaacccggtgaaaaaacaattgtttaa

SEQ ID NO: 24249 - DNA, 819 bp, Listeria monocytogenes
atgattgacacaagtttagcaacacaatttctaggtgaagtcattggtacggctatactaattattttaggtgctggtgtcgtagcaggtgtttcactgaaaagatccaaagcagagaatggcggctgggtcgttattactttagcttgggggctgggtgttacaatgggtgtgtatgtctcagggtatatgagtatggcccatcttaaccccgcagtaactatcggtatggcacttgctggtgctttcccgtggaattacgtattgccatatattcttgctcagtttattggggcatttatcggggctacgctaatttggttgcattactatccacactggaaacaaacagaagacaaaccaacaaaactaggtgtttttgcaacggcgccagctattcgccattttacatctaacttttttggtgaagcattaggtacttttatattagtatttggattactatcactaggtgcaaattccttttcagatggattaaatccacttgtagtcggtgcattaatcgtagctatcgggatgtctcttggtggaactacgggttatgccatcaacccagctcgtgaccttggaccaagaattgcgcattttgtttggccgatttctggcaaaggtggatctgattggggctactcatgggttccagttattggaccaatcatgggcggtgcattaggtgctttagggtataatgccattattaacggcgaactaggaatgtggttctgggtgttcgcagtattatttgttttaattcttattttaactatgcaactcgacaagaaaaaagatttagcataa

SEQ ID NO: 24250 - DNA, 393 bp, Listeria monocytogenes
gtggctcaagtacaatattacggaactggtcgtcgtaaaagctctgtagctcgcgtacgtttagtaccaggcgacggcaaaatcgttattaacaatagagactgggaagattacatcccatttgcagctcttcgtgaagttatcaaacaacctttagtagctacagaaactttaggtaactatgatgtactagtaaacgttcacggtggtggttacactggtcaagccggtgctatccgtcatggtgtagctcgtgcactattacaagtggctcctgagtaccgcccagcacttaaatctgctggcctacttactcgtgattcacgtatgaaagaacgtaaaaaaccaggacttaaaggcgcgcgtcgtgcacctcagttctcaaaacgttaa

SEQ ID NO: 24251 - DNA, 750 bp, Listeria monocytogenes
atgcctgttatttcaatgaaacaattactcgaagcaggagttcacttcggtcaccaaactcgccgttggaacccaaaaatgaagaaatatatcttcacagaaagaaatggtatttatatcattgacctacaaaaaacagtgaaaaaagtagacgaagctttcaacttcatgcgtgaagtagctagcgacaacggaactatcctgttcgtaggaactaaaaaacaagctcaagaatccgttcgcgacgaagctatccgttctggacaatatttcgtgaatcatcgttggttaggtggtactttaactaactttgaaactattcaaaaacgtattcaacaccttaaaaaaatcgaaagaatggaagcagatggaacttttgaagtccttcctaaaaaagaagttgtccttcttaaaaaagaacaagaaaaattagaacgcttcttaggcggaatcaaagacatgaaaggtcttcctgatgcattattcatcgttgacccacgcaaagaacgtattgcggttgcagaagctcgtaaacttcatattcctatcatcggtattgttgatacaaactgtgatccggatgaaatcgactacgtaatccctgcaaatgatgacgctatccgcgcggttaaacttttaactgctaaaatggctgacgctatcattgaagtgaaccaaggggaagagttaacggaagcggaagttgctcctgtagaagaaaaagctacagaagaaactactgaagcataa

SEQ ID NO: 24252 - DNA, 1107 bp, Listeria monocytogenes
atggtgacaggctggcatcgtcctacatggattgaaatagaccgcgcagcaattcgcgaaaatataaaaaatgaacaaaataaactcccggaaagtgtcgacttatgggcagtagtcaaagctaatgcatatggtcacggaattatcgaagttgctaggacggcgaaagaagctggagcaaaaggtttctgcgtagccattttagatgaggctctggctcttagagaagctggatttcaagatgactttattcttgtgcttggtgcaaccagaaaagaagatgctaatctggcagccaaaaaccacatttcacttactgtttttagagaagattggctagagaatctaacgctagaagcaacacttcgaattcatttaaaagtagatagcggtatggggcgtctcggtattcgtacgactgaagaagcacggcgaattgaagcaaccagtactaatgatcaccaattacaactggaaggtatctacacgcattttgcaacagccgaccagcttgaaactagttatttcgaacaacaactagctaagttccaaacaattttaacgagtttaaaaaatcgtccaacgtatgttcatacagccaattcggctgcttccttattacagccacaaatcgggtttgatgcgattcgctttggtatatcgatgtatggattgaccccttccacagaaatcaaaactagcttaccatttgaacttaagccagcacttgcgctctataccgaaatggttcatgtgaaagaactcgcaccaggggatagtgtcagctacggagcaacctacacagcaacagaacgagaatgggttgcaacgttaccaattggctatgcagacggattgattcgtcattacagcggttttcatgttttagtaggcggggaacttgccccaattatagggcgcgtttgtatggatcaaaccatcataaaactaccacgtgaatttcaaactggttcaaaagtaacgataattggcaaagatcatggtaacacgataacagcagatgatgccgctcaatatttagatacaattaattatgaggtaacttgtttgttaaatgagcgcatacctagaaaatacatccattag

SEQ ID NO: 24253 - DNA, 1086 bp, Listeria monocytogenes
atggttaatacaaatttagaggaacttagaacacaggtggatcaattaaatattgatttgctagaattaattagcaaacgtgctaatttggtacaagaaattggcaaaattaaaggaactcaaggttctcttcgttttgatccattacgtgaaagagaaatgcttaacacgattcttgcagcaaatgaaggaccttttgaagatagtacggttcaaaaattatttaaagaaatttttaaagcgggattagagcttcaagaagaagatcactctaaagcattactcgtttctagaaaaaataaaaaagaagatacgatagttacagtaaaaggcttgccaattgggaatggcgaaccagtatttgttttcggtccatgttcagtggaatcttatgaacaagttgctgcggttgctgaatccattaaagcgaaaggcttaaaacttattcgtggtggcgcatttaaacctcgtactagcccatatgacttccaaggattaggtttagaaggactgaaaattttaaaacgtgtatctgatgaatacggtttaggtgttattagtgaaatcgttacgccggctgatattgaagttgcacttgattatgtagatgttattcaaattggcgcaagaaacatgcaaaacttcgaattactaaaagcagctggccgtgtggacaaaccaatcttactaaaacgtggtttatctgctacgattgaagaattcattggtgctgctgaatatatcatgtcacaaggaaatggcaaaatcatcttatgcgaacgtggtatccgcacatatgaaaaagcgacaagaaatacacttgatatttctgccgttccaattttgaaaaaagaaacccatttaccagttatggttgacgtgacgcattctactggccgaaaagatttattacttccatgtgcgaaagctgctctagctatcgaagcagacggtgtaatggctgaagttcatccagaccctgcagttgcattatcggattctgcacaacaaatggatattcctgaatttgaagaattctggaatgcaattttagcaagtaacttagtaccacataaaataaagtaa

SEQ ID NO: 24254 - DNA, 2220 bp, Listeria monocytogenes
atgcctaacatggagccaacgacaaaagaaattaaagaacaaaagatttatcaagaaatgggcttaactgatagtgaatatgagcttgtttgttcgattcttggacgcgagcctaattatacagaaactggacttttctccgttatgtggtccgaacattgtagctataaaaattctaaaccagtacttcggaaatttcctacagaaggaaaacaagttttgcaaggaccgggtgaaggtgctgggattgttgatattggcgatggtctaggtgttgcttttaaagtggagagtcataatcatccatcctacgtggagccgtatcaaggtgctgcaactggggtcggtgggattatccgtgatgtgttttcgatgggagctagaccgattgcaatgcttaactcgcttcgtttcggcgaattagatacacctcatgcgaaatacttagttagtgaagtcgtggcgggaatcgcaggatacggtaactccattgggattccaacggttggtggcgaaatccaatttgatccttgttatacgaaaaatccattagttaatgcaatgtgtgtaggcttaattgaagcgaaagacattcaaaaagggcaagcaaaaggaattggcaacccggtgatgtatgttggtgctaaaactggtcgtgacggtattcacggtgctacttttgcttctgtagagtttagtgaagaaggcgagcaacaacgttctgctgtacaagtgggcgatccttttatggagaaattgttgcttgaagcttgtttagatgtgattcgtgatcattcggatattttagtgggaattcaagatatgggagctgctggactcgttagctcaagttctgaaatggcttcaaaagcgggcgctgggctagaattaattatggatgatgtgccgcaacgggaactacacatgacgccatatgaaatgttgctttctgaatcgcaagaacggatgcttctatgtgtgaaaaaagggcatgtggaagaaatccaagcgttatttgaacgttatggtttagaggctgttgtgattggtcaagtaacggatgataaaatgtacaaaattattcatcatggtgaagtagttgccaatgtgcctgttgatgcacttgcggaagacgcgccagtttatcataagccttcaaaagaaccaactcgttatcaagcattccaagaagaggaagcgtttgtgccagctatggatgatgtggtgggagtttggaaagaactgcttgctcagccaacgattgctagtaagcgccatatttatgagcaatatgattaccaagttcggacggatacagctgttgtacctggttcagatgcggcgattgttcgtgtgcgtggaacagagaaggcaattgcaatgacgacagattgtaactcacgctatttgtatcttgatccagaagtaggcggagcgatagcggttgcggaagcggcgcgcaatatcgtttgttctggcgggaaaccactagcgattacagatggactgaattttggtaatcctgaaaaaccagaaattttttgggaaattgaaaaagcggctgacggtattagtgcagcttgtttagaacttgatacgccagttatctcagggaatgtatcgctttataatgaaacagatggtaccggaatttatccaacgccagttatcggaatggttggtttagtagaagatttggcacatattacgacgcaagattttaaaaatagtggcgatgtgattttcttaattggtgaaacaaaagctgaatatagtggttcggaattgcagaaattacaacaagggaaaattagcggacgtgcgccggaattagatttagtgacagagaaaaaataccaacaattacttctaacggcgattcaggaaggtctagttgcttctagtcatgatttggcagaaggcggatttggtgttgcccttgcggaagcgacttttaaagcagggcttggtgcggaagtagaagtaccgtttgcgttgaatcaactattcagtgaatcgcaatcacgtttcttagtatcggtaaaaccggaaaacgaagcagcttttgcgcaattaatggaactggaaaaagtataccgccttggtgtagtaaccgaggatgatacgattcgtgtgaaacataaggaagatcaagttacagcgaaaacaacggaattacgatccatttgggaaggggctattccatgcttgctgaagtaa

SEQ ID NO: 24255 - DNA, 576 bp, Listeria monocytogenes
atggaaagaaatgaagtgctaaaaaaagtagaagcagctatgcctaatgctcgatttaaacatactttaggcgtagaaaaagcagctgtagaacttgcagaacattatcatatggatgtagaaaaagcacgaataaccgctttgttacatgattatgccaagtactatgacgatgataaagcgagaaaaatcatcgaggacgagggttatgatccgcgtttgctttcttttcatcattcgctgtggcacgctccagttggcgcatatctggcagaaaaagaatttggtatcacggatacagaaatactagaagcgattcgtctgcatacgacaggaagcgcaacgatgtctgatttcgataaacttatttacttagccgactacaccgaacaaggaagaacatttcctggcgtgtataaggcgcgtagactagcacttaaatcactggacgaagcaatgttattcgctttatcgaatacgattacgcacttggttaaaaaacaacaattggtttttccagatacactggatgcctataattattttgttaatttaaatttggaaggagactattaa

SEQ ID NO: 24256 - DNA, 567 bp, Listeria monocytogenes
atgaaaaaaattggtgtccttgcaattcaaggtgcagtggatgaacatatccaaatgattgaatcagccggtgctcttgcttttaaagtaaaacattcaaatgatttagctgggcttgacggacttgttttgcctggtggggaaagcacaacgatgcgcaagattatgaaacgttatgatttaatggaaccagttaaagcatttgcaagtaaagggaaagctatttttggaacttgtgctgggcttgtccttttgtcaaaagaaattgaaggtggcgaagagagcctaggcttgattgaagctaccgcgatccgtaatggttttggtaggcagaaagagagttttgaagccgaattaaacgtcgaagcatttggtgaacctgcgtttgaagctatatttatccgcgcaccatacttaattgaaccgagtaatgaggtagctgtgttagcaacagttgaaaatcgaatcgtagcagctaaacaagctaatattttagttaccgcattccatcctgaacttactaacgacaatcgctggatgaattacttcctcgaaaaaatggtataa

SEQ ID NO: 24257 - DNA, 1359 bp, Listeria monocytogenes
atggatcgaattttaaataataaatggtcgattcgaattatagccttactactcgcagccatcctttttacatcagttaatgcaaataataataacgccacgactttttctacgacgtcttctagtgattcagaagtcatcgagaatgtcccagtcaaagtatattatgataaaacgaatttatatatttcgggtattccagaaaccgttactgtaacgctttcagggcctcgaagcatcgttcaatctgctaaagctcaacaagactttaccgtatacgcagatttgaaaaatgcctccattggcacgcaagaagtaaaactacaagtgaaagatgtatctgaccgcctaaaagtaaaagtgaatccagcaacagtcaacgtaaatgtacaagaaaaagtaacgaaaaaattctctgttgatgtagaattgagcaaatcagtcgttgcagatggttatcaagctggaacaccaatcattgatcctaaaaaagtctctattactggtgcaaaagatactatcgaacaaattgcttatgtaaaagcaacactcgaaagtgatggcaaacataaatccgaatttaccgataaggccaccgtctctgtttttgatagcaatttgaacaagctagatgtagaagtaaatccgcaagaagtggaagtgaccgtgccagttgaaaaagtcggcaagtcagttccagtgaaaattaagcaagaaggcacgccggaaagtgatattgaaatttctagcatgactcccgataagtcagaagtggtagttgtcggtgatgatgcggtccttgaaaaaattaaagaaattgaaattccaattgatgtttctaaaatcaaagcagataccgtcaaagaagtgactgtcccagttccaactggagccaaatcagtccaaccaacgacgatagaggtgaagattaagaccgtaaaaaagtctgaagcaaataacaatccaacaacctcagatagtaataaccaagacacagatacaacggataacaacactgatgattcaggagataacaatacaaaaatatccaagtcgttttctaatatgcaagtgtacatgagtgggttgaaaaatacttttgatgcacaaatgataactcctgcaaatggaaaagtatctgtgacgataactggagagaagaaaacagtagacggaattgcggcgaaagacttgagtgtgattgccaatctgagtaaaagcaaagcaggaagttacagtattccactagaattgaatggcttaccggacaatgttgcctatgttattaaccctagacaagctgatttcattattacggataaagaggcatccattgaagtaccttccaaaagcacataa

SEQ ID NO: 24258 - DNA, 1710 bp, Listeria monocytogenes
atgaagaaattatggaaaaaaggcttagtagctttcttagctttgacacttatttttcaattgatacctggatttgccagcgcggctgattctcgtctgaaagatggcggggaataccaagttcaagtgaatttttataaagataatactggtaagacaacgaaagaatcttcagaagcagataaatatattgaccatacagcaacgattaaagtggaaaatggtcaaccttatatgtacttaacaattacaaatagtacttggtggcaaacaatggcggtttcaaaaaatggaactcgtcctgaaaaacccgcacaagcggatgtttaccaagaccgttatgaagatgttcaaacagtgagcactgatgcagcaaaagatacgcgtgtagagaaattcaagcttagttctttagatgatgttattttctcctatatgcatattaaggtagatgcaattagttatgatcactggtatcaagtggatttaactattgatccaagtactttcaaagtcatctcagaacctgctgttacaacacctgtgactctttcggatggaatttatacgattccgtttgtagcgaaaaaagcaaatgatgatagcaattcaagcatgcaaaattattttaacaatcctgcttggttgaaagtgaaaaatggtaagaaaatggtagcaatgacagttaatgataataaaacagtaacagctttaaaaacaactcttgctggaactttacaagatgtaaaagttgtttctgaagataaagatgctaatacacgtattgtggagtttgaagtggaggacttaaatcaaccacttgcggctcatgttaattatgaagcgcctttcaatggttctgtatacaaaggacaagcagacttccgttatgtttttgacacagcgaaagcaactgcagcaagttcatacccaggtagtgacgaaacgcctcctgtagtaaatcctggtgaaacaaacccaccagtgacaaagcctgatccaggtacaacgaatccacctgtgacaacaccgccaacaacaccaagtaaaccggcagtagttgatccgaaaaatctactgaacaaccatacgtactcgattgattttgatgtatttaaagatggaacaacagaaacttccatgatggaaagctatgtgatgaagccagctttaatcaaagttgaaaataaccaaccctatgtttatttaactttaacaaacagtagttggattaaaaccttccagtataaagtaaatggtgtttggaaagatatggaagttgtttccggagatatcaacaaaaatacgagaaccgtcaagtatcctgtgaaagatggtacggctaatacagatgtaaaaacgcatgtattaattgaagatatgccaggtttttcttatgaccatgagtatactgttcaagtaaaactaaatgcagcaacgattaaagacattacagggaaagatgtaacgttaaaggaacctgtgaaaaaagatattttaaatactggtaatgtagcgagtaacaataatgctggaccaaaattggcaaaaccggattttgatgatacaaattctgttcaaaaaacagcaagtaagacagaaaaaaatgcaaagacgaatgattcatcaagtatggtatggtatattacattatttggagcatccttcctttatttagcttatcgattaaaacgtaaaagattgagttaa

SEQ ID NO: 24259 - DNA, 1047 bp, Listeria monocytogenes
gtgaatgatcgtcaagcggcattagaccaagctttaaaacaaattgaaaaacaattcggtaaaggctccattatgaaattaggggaacattcagatcaaaatatatctactatttctagtggttcattagcgttagatattgctttaggagttggcggataccctcgtggacgtattatcgaagtatacggaccagagagttccggtaaaacaactgttgcgcttcatgcaattgcggaagtacaagcacaaggcggaacagcagcatttatcgatgctgagcatgcgttggatccggcttatgctaaaaacctaggtgtaaatattgatgaattattactatctcaaccagatacaggagaacaagctttagagattgctgaagctttagttagaagtggtgcagttgatatgttagtaattgactccgttgcagcacttgtaccacgtgctgaaatcgaaggcgagatgggcgatgctcatgttggattacaagcacgtttaatgtcccaagcattgcgtaaactttctggtgttattaataaatcaaaaaccattgctattttcattaaccaaattcgtgaaaaagttggtgttatgtttggtaacccagaaatcacaccaggtggacgtgcgcttaaattctattctactgtacgtttagaagtaagacgtgcggaacaactgaagcaaggtacagatgtaatgggtaacaaaacaaaaatcaaagttgtaaaaaataaagtagcgccaccattccgtattgccgaagtagatattatgtatggtgaaggtatttcgcgtgaaggtgagcttgttgatatggctgctgaagtggatgtaatcaataagagtggttcgtggtattcttataaagaagaacgcatcggtcaaggccgtgagaatgcaaaacaatatctgaaagaacacacagatattcgtgatgagatttctaagcgcgttcgtgaagaatatgaaattgatggaagcagcaaagagcctcttgacgaaaaagaagaaacattaagtttactagatgatgaataa

SEQ ID NO: 24260 - DNA, 972 bp, Listeria monocytogenes
atgaaagcgacagccatcgcacacacgaatgtggcgctaattaaatactggggaaaacgcgatgaacacttgattctacctgcaaacagtagtttatccttcacggtagataaattttatacaaagacaacggtagaatgggacgaaaaattaacccaagatacatttattttaaataatgaacaaaaaacggatgcaaaagtagctcgttttatagataaaatgcgggaggaattcggtatttctgcaaaagcaaaaataacttccgaaaatcacgttccaactgcagcaggacttgcttcatctgcttctgcatttgcagctcttgcgcttgctggatctaatgcagctggtagaaaagacacaaaagaatatatttccagactggctcgtttcgggtctggttctgcttctcgttccgttttcggtgattttgtcatttgggaaaaaggtgagctcgcggatggtagtgattcttttgccgttccattcacgaataaattatgtgacaaaatgtcccttgtagtcgcagtcgtttcagacaaagaaaagaaagtttccagtcgtgatggaatgcgtctaaccgttgaaacatctccttttttcgaaaactgggtttctgctgctgaaatagacttggaagaaatgaaacaagccattttagacgaagatttcatcaaagttggcgaaattacagaacgaaacggaatgaaaatgcatgcgacaacacttggtgcagagccgccatttacttattttcaaccacagtcactcgaaataatggatgctgttagagaactacgcgaaaatggtataccggcctattttacaatggatgctggaccaaatgttaaagttatttgtgagcgtgcaaatgaaaatatcgtagcagagaagttgtcaggtttggctaaaaacgttctaatttgccacgctggtaaggaagcgagtgttgtatcagatgaaaaataa

SEQ ID NO: 24261 - DNA, 1356 bp, Listeria monocytogenes
gtgcaatcaattgaagacatctggcaggaaacactgcaaattgttaaaaaaaatatgagtaaacctagttacgatacatggatgaaatcaacaaccgctcattcacttgaaggtaacacgtttattatttcagcgcccaataattttgttcgcgattggttagagaaaagctacactcaatttatcgctaacattttgcaagaaataactggtcgcttatttgatgtccgctttattgatggcgagcaggaagaaaactttgaatacactgtgattaaaccaaatccagcattagatgaagatggcattgaaattggaaaacatatgcttaatccacgttatgtttttgatacctttgtcattggttcagggaacagatttgcccacgcagcatcacttgcagtagccgaagcaccagcgaaagcatataatccactcttcatttatggaggagttggcctcggtaaaacacatttaatgcacgcagttggccactatgttcaacaacataaagataatgcgaaagtaatgtacctttccagcgaaaaattcaccaatgagtttattagctctattcgtgataataaaaccgaagaatttcgcacaaaatatcggaatgttgatgtcttacttattgatgatattcaatttttagccggtaaagaaggaacacaagaggaatttttccatacatttaacacactttatgatgaacaaaagcaaattattatttccagtgaccgaccaccaaaagaaattcctacactggaagatcgactgagatcccgctttgaatggggcttaattactgatattacgccaccagacttagaaacccggatcgccattttacgtaaaaaagcaaaagcagacggattagatattccaaatgaagttatgctttatatcgcaaaccaaattgattcgaatattcgcgagctagaaggcgctctcatccgagtagttgcttattcttccctcgttaataaagatataacagctggtcttgcagcagaagcactaaaagatattatcccctcttctaaatcacaagttattactattagtggtattcaagaagcagtcggtgaatatttccacgttcgtttagaagattttaaagcaaaaaaacggacgaaaagtatagcattcccgcgccaaatcgccatgtatctctcaagagagcttacagatgcctcattaccaaaaatcggtgatgaatttggtggtcgagatcatacaacagttattcatgcacatgaaaaaatatcgcaactactaaaaaccgatcaagtgttgaaaaatgaccttgccgaaattgaaaaaaatttaagaaaagcacaaaatatgttttaa

SEQ ID NO: 24262 - DNA, 957 bp, Listeria monocytogenes
atgacagaagcattatttttaaaccctgtttttcaagaccgaatttggggtggaacgaaattacatgattattttggttacgatatcccgtctaatactacgggggaagactgggcgatttccgctcatccgaatggtccttccgtaatcaaaaacggcgaatataaaggcaaaacattagctgaattatggcaagaaaatcctgcactttttggtaatccgaaagaagcagttttcccgctattaacgaaaattttggatgcgaatacggacctttctgtacaagttcatccaaatgacgaatatgcgaaagtacatgaaaacggcgaacttggcaaaacggaatgctggtatattattgactgtgctcctggtgcggaattaatatatggtcacaaagcagctagcagagaagagttcgctacttgggcaaaaaacggcgaatgggataaattgcttcgtaaagtggcaattaaaccaggtgaattttattatgttccaagcggtacaattcatgcgttaggtacggggacgttagtgcttgaaacacaacaaagctctgatactacttatcgtgtatatgactatgatcgtaaagacgcagaaggaaacttgcgcgaacttcatttagataaagctattgacgttacgactgccccgcatgtggatgcgaagttagatattcatactgaaactcgtggcggtttgacagaaacgacttttgtttcgaatgacttctttagcgtttataaatgggatgtggatggcaaggctgaattcgtagccaaagcgccttacacgttagtgagtattttagatggggaagcggttcttacgattgatggcgacgaacaggctattaaaaaaggggatcatttcgttttaccaaatgaagtgaaatcttgggaaataactggccaaatcacagcgattgtttctacgccacctgtaaaataa

SEQ ID NO: 24263 - DNA, 1428 bp, Listeria monocytogenes
gtggcaaaagaatatgatgtagttattcttggcggaggaactggcggttacgtcgcagcaattcaagcagctaagaatggccagaaagtagccgtcgttgaaaaagggaaagttggaggaacgtgtcttcaccgtgggtgtattccaacgaaagcgttattacgttcagcggaagttctacaaacggtaaaaaaagcaagtgaatttggtatttctgtagaaggaactgccggaatcaattttttacaagcacaagaacgaaaacaagcaatagtagatcaattagaaaaaggtattcaccaattatttaaacaagggaaaattgacttgtttgttggaacgggaactattttgggaccatcaattttttcaccaacagctggaacaatttcagttgaattcgaagatggttctgaaaatgaaatgctaattcctaaaaacttaattatcgcaactgggtccaaaccgcgcacattaagcggtttaacaatcgatgaggaacatgttttatcatctgacggcgcgcttaacctagaaactttaccaaaatcaattattattgttggcggtggggttatcggaatggaatgggcttcgatgatgcatgatttcggtgtagaagttacggtgctagaatatgcagaccgaattttgccaacagaagataaagaagtggccaaagaattagcaagactttataaaaagaaaaaattaaacatgcatacatctgctgaagttcaagcagctagttataaaaaaacagatactggtgtggaaattaaagcaatcattaaaggcgaagagcagactttcacagcagataaaattcttgtttcagttggtcgttctgctaatacagaaaacatcggcttacaaaatacagatatcgcgaccgaaaacggctttatccaagtaaatgatttttaccaaacaaaagaaagtcacatctatgcgattggagactgcattccaacgattcaactcgcgcacgttgcaatggaagaaggaacaattgcagccaactatattgccggaaaagcagccgaaaaacttgactacgacttagttccccgctgtatttatacttctacagaaatcgcaagtgtcggtatcacagaagaacaagctaaagaacggggtcatgaagtgaaaaaaggcaaattcttcttccgtggtatcgggaaagcgctcgtttacggagaatcagatggcttcattaaaattattgcagataaaaaaacagacgatatcttaggcgtgagcatgattggaccgcacgttacggacatgattagcgaagccgctttagcacaagttttaaatgcaacgccgtgggaagtgggcaacacgattcacccgcacccaactttatcagaaagttttagagaagctgcccttgctgtggatggcaatgcaattcacggttaa

SEQ ID NO: 24264 - DNA, 186 bp, Listeria monocytogenes
gtggctaagaaatccatgatcgcgaagcaaaaacgtacacctaaatacgctgttcaagcatatactcgttgtgaacgttgtggtcgtccacattccgttattcgcaaatttaaattatgccgtatttgtttccgtgaacttgcctataaaggtcaaattcccggcgtgaaaaaagcaagctggtaa

SEQ ID NO: 24265 - DNA, 1125 bp, Listeria monocytogenes
atggcaaagctgaaacaagagacgatagcagcgcaaattggaaatagaaaatgtgaaagaacgggtgctgtcaatatgccagtctacttctctacagcttaccagcatgccgatcttggagtatcaacggggtatgattatactagaactggaaatccgacgcgagatgctttacaggaagcactcgcggaactagaaaatgggacgcatgcttttgcaacgagttcagggatgagtgcgattcaacttgttttccaactttttaaaactggtgaacatattattagttcgcaggatttgtacggggggacttttagatattttgaacagtttggtgcgcaatatcagattggattttcttattgggacggggcggagattgctgatttggaaaaattgattcgtccagaaacgaaggcgatttttattgaaacgccaacgaatccattgatgcaggaaacggatattgcgactgtcgcaaaatgggcccatgcgcatgatttacttgtgattgtggataatactttttatacacctgttttacagcagccgctatctttgggagcggatattgtgattcatagtgcgacgaagtatctcggtggtcataatgatgtgctagctggtgcggttatagtaaaagaggaaaaactcggaaaattcttctttgatcaattgaatgcgacggggacggtcctatcaccatttgatagttggttattgattcgcgggcttaagacactggttttacgagtgagacaacatcaagctaatgctcaaaaaatcgcggcgtttttggaagagcacaagctagtggaggaagtgcgctatccaggacgtggtgggatgattagtttctttattcgagatgcggcgctcgtatcgccacttttgaaagaactagaattgtttacttttgcggaaagtttaggcggtgtggagagtttgattacttatccaacgactcaaacacatgcggatattccggtggagttgcggaattcttacgggctgacagataaattgttgcgcatctcagttgggattgaagcgagtgaggatttgattgctgacttgtctaaggcgctcgatgcggttttggaagaggtgagtgctcgtggctaa

SEQ ID NO: 24266 - DNA, 1017 bp, Listeria monocytogenes
atggtacaaataacaaaaggtaaatttgatggtttacaaagactctccaacgataaaggtgtcattgcagcgcttgccattgaccaacgtggctcactcaaaaaaatgatccaacaagctaaaggaacagaaaataaaaaggatgtagaggacttcaaacaacttgtttctgaagaactaactccttatgcttctgcaattttgcttgatttagaatatggtactccagcaatcaaagctcgccacgaaggtagcggacttttaacttcttatgaaaaaacaggatatgacgcaactactcctggtaaacttcctgatttaattgaagatttatcagcacttcgtattaaagaaaatggtggagatgcagttaaaattcttgtttattatgatccagatgagcctgctgaaattaatgaaatcaaatatgcctttttagaaagaattggtgctgaatgtcgcgcagttgatattccatttttcttagagccaattacttatgatgcaacagttactgattctggttctctagaatatgctaaattgaaaccagcaaaagtaaaagcttctattaaagaattctctaaacctcgttatggtgtagatgtacttaaacttgaagttccagttaactttaaatatgtggaaggttttgctgaaggtgaagtagcttatacgcaagacgaggcagctcgtcattttgaagagtgctctgacttaagcccacttccatttatttatctaagtgctggtgtaacttctgaaatgttccataaaacaatccaattcgcgaaccaacataatgtgcaatatagtggtgtactttgcggtcgtgcaacttgggctgatggtatcgaagtttatggtaaacaaggcgatgacgctttacgcgaatggcttcgtactcaagggaaagaaaatattacttctcttgataaattacttgatgaaggtgccgttccttggtggacaaaatatggttctttcgaagatgtacatgtagtagaaaaacaatag

SEQ ID NO: 24267 - DNA, 357 bp, Listeria monocytogenes
atggcaagtgaagttacaagcgcaaaagccgttgccaaaacggttcgtattgctcctcgcaaagctagaatcgtcattgatttaattcgaggcaagcaagttggcgaagcaattgcaatcttgaagtatactccaagatcggcttccccaattattgaaaaagtattaaaatctgctattgctaacgcagagcataactatgatttagacattaacaaccttgtagtagaggaagcatttgttgacgaaggtccaacacttaaacgtttccgtccacgtgcacaaggtcgtgcaagtgcaatcaacaaacgtactagccacattacagttgtggtatctgaagtgaaggagggataa

SEQ ID NO: 24268 - DNA, 348 bp, Listeria monocytogenes
ctgatggtgaagcgtggtgacgtatactacgcggacctttcccccgtggtcggaagcgagcaagggggaatacggcctgttctcatcattcaaaatgatattggtaatagattcagtccaactgtgatcgtggcagcaataactgcaaaaattcaaaaagcaaaattgccaacgcacgtggaagctactcgtaaagatggctttgagaaagattctgtcattcttttagaacagattagaacgattgataaacagcgcctgacagataaaattacgcatttggacgaagatttaatggccaaggtaaacaaggcacttgaagtcagtctaggagtagtagaattttaa

SEQ ID NO: 24269 - DNA, 1053 bp, Listeria monocytogenes
ttgtcatacgaaccaaatacaaaagaaaccatgcaaaaaattaaagaattaacatctatcccaagcccaacaggcaacacagggaaaatcatcgaaaaactggcaaaagatttagatgcttcaaaaatcccataccgcttaaacaataaaggcggattaattgtaacgcttcctgggaaagacgaaacgaaacatcgtatgctaaccgcccatgtggatacgcttggagcaatggttaaagaaattaaagcagacggacgattacttttaacgttaattggcggctatcgttttaatgcaattgaaggcgaatattgtaccattgagacaagcgctggagatttgtatagtggaactatcttgatgcaccaaacttctgtccatgtgtataaagatgcagggactgctgagcgtaatgacaaaaatatggaagttcgcttagatgtaaaagcattagatgcagacaaagttcgtgctcttggaatagaagtaggcgatttcgtttcctttgatccgcgcgtgcaaattattaatgatgaatatattaaatctcgacatttggatgataaagcaagtgtcgcgattttattacaactaatcaatcatattcacgaaaacaacctggagcttcctcatacaacccatttcctaatctctaataatgaagaaattggctatggtggtaattctaatattccggctgaaacagtggaatatttagctgtcgacatgggggcgcttggtgatggtcaaacgtctgatgaatacactgtttctatttgtgcaaaagacggaagtggcccatatcaccttggtttgcgcaaacatttagtggagcttgctaaaaagaataatattgattataaagtggatatttatccgttttatgcatctgatgcgagtgcggcgattaatgctgggaacgatattatccacggtttgattggaccaggaattgatgctagtcatgcatatgaacgcacacaccgcgattcactttatcatacagaaaaattagtttatgcatatttattttcgaatatattgaaatag

SEQ ID NO: 24270 - DNA, 945 bp, Listeria monocytogenes
atgaagacgatatacttacatcatccgattacaacggacgagtggactgacataaacaaagtaatggcacttggtttttttgatggcgtccatttgggacatcaagcagttattaaacaagcgaaacagattgccggacaaaaaggacttcaaactgcagtgttaacctttgatccgcatccatctgtggttttaagcaatatacgaaaacaagtaaaatatctcacaccacttgaagataaagcagaaaaaatggctaaacttggcgtagatattatgtatgtagttcgctttacaacacagttttccgagctatctccgcaagcctttgtggataactatttagtcgctttacatgtagaacatgtggtagctggtttcgactattcttacggtaaaaaaggtgaaggtaaaatgaccgatttggctaaatatgctgatggtcgctttgaggttacgattgtcgataaacaaactgccgcaagcgacaaaataagttcaacaaacattagacgtgccatcacagaaggcgaactagaagaagcaaatcaattactgggctatccttatacaacgaaaggaaccgtgattcatggggacaaacgcggcagaacaattgggtttccaacagcgaacatccgcgtaaatgaagattatttgattccgaagcttggtgtttatgcagtgaaattccgtgtgaatggggaaactcacttgggtatggcgagtattggctataacatcacgtttaaagatgaccaagcactctctattgaggtgtatattctagattttcaccgcgaaatttacggagaagaagcagaaattaaatggtatcaatttttccgcccagaacttaaatttaatggtgtagaaggtttgattgctcagttagaaaaagacgaacaagatacaagagctttttttgctaaattagaagattaa

SEQ ID NO: 24271 - DNA, 1473 bp, Listeria monocytogenes
ttgaatttggatagtaaaaagaaaattgccattattggagctggacctggtggtttggcggccggtatgctattaagtcaactaggctatcaagtaaacatctatgaaaaaaatgatcggattggtggaagaacggcgttacacagaatgggtaaatactcatttgatgtagggccttccgcactcacaatgacgcatgttttgacttctctttttatggattgtaatcgtaatattttggattatgtttcgcttttaccaatcaatccaattcataccctttattttaaagatatcacctttccactttatagtgatcaatctgagacaaaagcggttatccaaacttactttcctggcgaagaagatggttttgaccgttttatgaaagaaaacacgaaaaaaatgctatatatttcgccgctcaatcaatttaattatagttctttatttgattttttccgtcctacaactttgcgcgctattcctagtttgacacttggacgatcgttgatggatgatttatcaagatattttaatagtaagtaccttcgcctcgctttttccttacagatgcggtatttaggcatgtctccgtgggatattccagctgcttatagtattattccattttccgaatattattatggaacttttcatccaattggcgggcaaaataaaattgtcgaagcgatgcaacaagtagttacagaaaataaagggaagtttttcttcaattccgaagtgacagagtttgaatcgaacggcaaagaaataactggcgctgttcttgccaacggaaaaactattgaagcagattattatttcaccaatttagatttcatttattctttaacaaatgagcatccagataaattggacactaaagaatactcctcttctgcctttatcctttatcttggtttaaaaacagtgttacctttttcgcatcaatcaattattttccctgaaaattaccgagaatttgcgcataatacaatgcataaaaaaatcctctctaaggatatcgctatacatttgactaatccttctgcaactgataatacaatggcgccaattaatcattctagtattcgaattatggttcctgtgcctaacaatacgagtaatattgattggaaaaaagaaacacctgcttttcgtcaattagttctagaaacagtcaaagaacgtttagaaataccagatttagaatcgcaaattgaagaagaatatattatcacaccgatagactgggaaaagaaatatcatgttaagcacggtgcgatctttggtttacagcatttgtggcgccagcacggctacttacacccttccaaaaaatcgcctaaattcaaaaacttatttgtaattggtgcaggcgcaatgtcgggtagctctcttccatttattattgaaaatgcgcaaatcgcaacccagaaatttttacaaaaagaaaagaaatccgagtaa

SEQ ID NO: 24272 - DNA, 1818 bp, Listeria monocytogenes
atgagtggtccaggtccaggtggtggcatgagaatgcaaacagccgccaaaccaaagaactttaaacaaacactattccggcttcttggctatatgaaacctcgttctgtcgcaatcattgttgtatttatctttgcgattttatctacgatttttaacattttcagcccgaaagaactcgggaaagcaacaacagaaatttttaaaggtgttatgagccaagatggaattaataacgataagatttttaatatattaatgattgttttagtcttatatcttggtagttccttatttagctttattcaacaatatgtgatgtcgagtgttgcgcaacgaactgtttatgacatgcggaaagatttaaaggcgaaaatggcccggcttccgctgaaatattatgatacgcgctcaaatggtgatattctaagtcgttctgttaatgacatggataacatcgcgaacacgctacaacaatcactaacgcaagccattacagcgattgttcaaatgattggtgtcttaatcatgatgctaacaatcagctggcaaatgacgctaatcgtgcttgttactgttccaattagtattattctagtagcaattattgccggaagatcacaacgctatttcggcgcacaacaacgtaatcttggtattttaaatgatactgtagaagaaacttacggcggccaaacaatcattaaagcctttggtcaagaaaagaaaacgttagtaaaatttgatgaagtaaatgaagattattttaaagcagctaaaaaagcgcaatttatttccgggattatgatgccggtaatgcaattcgttgggaacttaggttatgtaggtgtctgtgtggccggtggtatttttgttactaacggaacacttcaagttggggatattcaatcatttacgcaatatgtccaattatttacgcaaccaatttccagcgtagcaaacatcgcgaacatcattcaatccactattgcatccgcagaacgtgtatttgaaatgatggatgaagaagaagaaaaagacgaaattccagcaaatgttaatcaagttgctggcgaagaacatagcattgtattcgaccacgtgaaattcggttacactccagataaaccgctaatgacagacttgaatattcatgtggaagaaggtcaaatggtggcgattgttggtccaactggtgctggtaaaacgactattatcaacttgctgatgcgtttttatgacgtagatggtggtcagatccgtatgaaaggtattgatacacgcgatatgaccaaagatgctgtccgcgaaaaattcggcatggtactgcaagatacttggttgtttaacggaacaattgccgacaatatcgcatacggtcgtgaaggcgcaacgaaagatgaagttatcggggcagcaaaagcagcttatgcagatgatttcattcgtagacttccaaatggctatgatactatcttgaatgaagaaggttctaatatttcgcaaggtcaaaaacaattactaacaattgctcgggcgattttatccgatccatctattttgattttagatgaagcgacttcaagcgtagatactcgtacagaattaaatattcaacttgcgatgggtaatctgatggaagggcgcacaagctttgtgattgcgcatagactttcaaccattcgtgatgcggacttaattctcgttatgaatcacggtagtgtaatcgaacaaggtacgcaccaagaactacttgatgcaaaaggcttctacgctgacctttataacagtcagttcaccggagctcaagcagtttaa

SEQ ID NO: 24273 - DNA, 1695 bp, Listeria monocytogenes
atgcgtagtgacaaaataaaaaaaggtgtcgaacaagctccagcaagaagtttgctgcatgctacaggtcaaattaaaagtccaggtgatatggacaaaccatttatcgctatttgtaactcttacattgatattgttcccggtcacgttcatttgcgagaacttgcggatgtagccaaagaagcaattagagaagctggcggtatcccatttgaatttaatacgattggtgtagatgacggcattgccatgggacatattggtatgcgttattcccttccctctcgtgaagttatcgcggatgcagcggaaacagtaatcaacgcgcactggtttgacggggttttctacatcccaaactgtgacaaaattacaccaggtatgctacttgcgtcggttcgtaccaacgtccctgctatcttctgttcaggtggtccaatgaaagctggattgtcagctcacggaaaagcgctcactctttcttctgtttttgaagcggttggtgcctttaaagatggcagcatgtcgcaggaagatttccttgatatggaagctaatgcgtgtccaacttgtggatcttgtgcaggaatgtttacagcaaactcaatgaactgtttaatggaaattctaggtatggctgttccgggaaatggtacaacacttgccgtttctgacgcacgccgtgatcttattagagaatctgcttttcatttaatggatttagtcaaaaaagatattcgtcctcgtgacattattacaaaagatgcgattgatgatgctttcgcgcttgatatggcaatgggcggctctacaaataccgtattacatactcttgcccttgcaaatgaagctggtattgaagactacgatttggaacgcattaatgatatcgccaaacgtgtcccctacctttccaaaattgcaccatcctcttcttactcaatgcatgatgttcatgaggctggcggcgtttctgccatcgttaaagaattggttgatcttggcggcgcaattcatccagaccgaattaccgttactggaaaaacgattcgtgaaaacgtagctgatgccaaaattaataataccgatgttattcatccaaaagaaaatccgtatagcccagttggcggactttcgatgttgtttggtaacatcgcaccaaaaggagctgctatcaaagttggtggcgtagatccttccgtacaagttttcaaaggagaagcgatttgctttagttctcatgatgaggcggtggaagcaattgataatcatacggttcgtgagggccatgtagttgttattcgctacgaaggtccaaaaggcggacccggaatgccggagatgctggcgccaacttctagtattgttggacgtggattaggaaaagatgttgctttgattacagatggtcgcttttctggagctactcgcggtatcgcagttgggcatatttctccagaagctgcggctggtggtccgattgcactcgttcatgatggtgatatcatcacgattgatttgccaaaccggacgttaaacgtggatgttcctgatgaggttttggaagaacgaagaaaagaattaccgaaatttaaagctaaagtaaaaactggttaccttgcaagatatactgcgcttgtaactagcgcccacactggtggtattttgcaaattccagaagatttaatcgactaa

SEQ ID NO: 24274 - DNA, 759 bp, Listeria monocytogenes
atggaacagattcaatcagtaaaaaacgaccgtgtcaaaacatggaaaaaactacaaacgagaaaaggccgcgataaaaccggaacttatttggtggaaggcttccatttagtggaagaagcattacgtcaagatggtttagtactggagctgcttgtttcaagtggtgtttctgttccggaagagtggttaaaaggcgattatgatgtatttgaaattagtacagaaatcagccacttaattagcgaaacaatgacagagcaaggcgtttttgcagtagtcgcaacatctgaaccagatatgatgcttttatacgggaaaaaattactgctagtagatgcagttcaagatccaggtaatgtaggcacgttaattcgtacggctgatgctgctggatatgattgtgtcgtgcttggcaagggaagtgcagacctttataatcctaaagtaattcgtagtacacaaggtagtcactttcatattcctgttattcaagcagatttatttgattggattgcgaatttagaagaagagggcgttccagttattggcgcagttctcgatgaccaagcgaaatcattaaacgacatgacaaaacgtgacacgttagcgttaatggtcggaaatgaaggaaatggtatttctccggaactacaagatcgtctttctgaaaaagtatatattccaatttatggtgacagtgaatcattaaatgtcgcggttgccgctggaattctactgtatggcttaagaaaataa

SEQ ID NO: 24275 - DNA, 984 bp, Listeria monocytogenes
atgaaacttggaattatgggaacgaactggattacggattcttttattgaaggtgctattaattcaggcgaatggaatcttactgcggtatattcacgaacagaagaaaaagcacgcgcatttggagaaaaatatggagagttgacttatttcacagatatagaagaaatgggcaaatcagatgcacttgatgctgtctacattgcttctcctaatgcgctccattatcaacatgcggttagcttactgaaaaataaaaaacatgttatcgtagaaaaaccgattttttctaccgtagccgaattagagcatgcgcatcaaattgctcgcgaaaacaatgtctttttatttgaagcagcacgccacattcaagagccaaacttcaaacggctacaagaaaacatcgaaaaagtaggtactattcatggggcaacactagcgtacatgaagtattcttccagatacgatcaagttttaaacggggaagaaccaaatattttctccttgaaattttctggcggatctatcgttgatttgggcgtttatccactttactcagcgattacactatttggtgaacctgtaaaagcaacttattttgccactaaattaccaactggtgtagacggacttggaccaataattctcgaatacccaacattcaatattactatcattcaagggaaaaattcgcagtccttcctgccaagcgaaatttatggtcaaaaaggaacgctaattgttgatcctctaactggaattgaaaaaattactttttacgataatgcgacaaaagaagaaactgaactcgctggcccagttgtagccaatgatatgcaatttgaagcagcagagtttgctagaattatcgaacaaagcgaccgagatacatatgaatacttagcagacctaagcttaaaagtattgcgtgtctccaacgaacttcgtcaccaaaatgatatttggtttgacgcagaaaaataa

SEQ ID NO: 24276 - DNA, 957 bp, Listeria monocytogenes
atgtcaaacgagtattttgatccaaagttgaagattttctcgctaaattctaatcgtgaactagctgaagagattgcgaaagaagtaggtattgagttagggaaatcaagtgttactcattttagtgatggagaaatccaaattaacattgaagaaagtatccgtggttgtcatgtatatgttattcaatcaacgagtaatcctgtaaaccagaatttaatggaacttttgatcatgattgatgcgttgaaacgcgcttccgcagcaacaattaatattgttatgccttattatggttatgcacgtcaagaccgtaaagcaagaagtcgtgaaccaatcacagcgaaattagtagcaaacttaatcgaaactgctggtgcaactagaatgattacacttgatatgcatgcaccgcaaatccaaggtttctttgatattccaattgatcacttgaacgcagtacgccttctaagtgactatttcagcgaacgtcatttaggcgacgatttagtagtggtttcacctgaccatggtggagttactcgtgcccgtaaaatggctgatcgtttgaaagcgccgattgctattattgataaacgtcgtccgcgtccaaacgtggctgaagtaatgaacatcgttggtaatgtagaaggaaaagtttgtattattattgatgatatcattgatacagctggaacaatcacacttgctgctaaagcattgcgtgaagctggcgcaacaaaagtttacgcatgttgttcgcacccagttctttcaggtccggctatgaaacgtattgaagaatcgccaatcgaaaaattagttgttacaaactccatcgctcttccagaagaaaaatggattgacaaaatggaacaactatctgttgcagctcttcttggtgaagcaatcgtacgcgttcatgaaaatgcttctgtaagttctttattcgaataa

SEQ ID NO: 24277 - DNA, 1590 bp, Listeria monocytogenes
gtgtcagaacgttccatgaagcgactaatgaaaggagcggcttggctaaccgcggcctctcttatttctaaaatacttagtgcaatttaccgagtaccctttcaaaatatggtgggggatgtagggttttatattttccaacaagtatatccgatatacggaattgcaatgacactcgcactcggagggttcccagttgttatttctaaaatgttagcggaggcagaaggtgatgtaagacgacaacaaataattatgcgcgcagtctcacggatgctccgaatcgtaagtattgtgattttcgcctttttattcctatttgccaacctgattgccatcatgatgggcgacccagctttatctgaattaattcgggtcatcagtttcgtatttttacttatgccgcagcttgcttttatgcgtggctttttccaaggagaaggagacatgattccgaccgcaatctcgcaaacagtcgaacaaattattcgagtagcgattattttgataggtgcgggacttgcacttcattttaactttgatttatatgatgcaggttcaatggcgatgagtggtgcctttttcggtggggtttcaggaattttcattttgcgtcatttttataataaaaaggtaaggctcggggaagggattcaaccagctgtatttacaaataaagaagaaaaagtaggtattggccgcaccttcttgcggcaaagtgttgcaatttgtgtagttagctccatgcttattttattccaattagttgattccttccaagtatatcgtttaatgagtgactcagggattccggatttcatcgctaagtcgctaaaaggggtatacgaccgcggacagccaatcttgcaattaggtttagtcatctcaactggacttgcgctcgcgcttgtcccaatgattactgccgcgagagttcaaggtcaacaaaaagaactaaaacgctccgtgctattggcgattaagattacgttaattttgtcaggtgcagaaacaattggactcatagttattatgcgcccgctaaaccaaatgcttttccaaacgccagacggcacattcgttttacaattatttatgccagctgttttcctgagctcactaatcatcatgttaagcagtattttacaaggcttcggaaaaattgctgtacccgcagttggcgttggaattggacttattgtaaaatgggtaacagggggcattcttattccgagacttgcgacagtgggtgcatccgtttcgacgtgtgttggcttacttgtaatcctcctcatttgttacgtatcactaaaacaaacaatccgcgtgcctttcgttgaaaaaacaatgttgttcaggctagttgccgctttagtactaatggctgtattcccgtgcttattcgaatggttagcgccactcgacacaagactcggtagtgcattccaagcaattgttagtgcactagtgggtggcgggattttccttgtttttgcactaagatataaattactcggtccaaaagattttgttttccttccgtttggttccaaattattagcactaagtaagcttgttgcacggaaataa

SEQ ID NO: 24278 - DNA, 1335 bp, Listeria monocytogenes
ttggcacgcatgacgcctgttcaagtgattattgcgtattattttctggcagtgacgatttctactatcgtattaagcttgccatttacgttacaaaaaggggtaaaggtatcgtttattgatacactttttacggcggcgagttcagtgagtgtaacaggattaacgacagtagatgtaagtcagacatatagcacggccggcatttgggtattgatggcgattttccaaattggtggactcggtgttatgatgattagtacgtttttctatttaattttaaaaagacgaattggattgaaacaacgccaattaattatgacagatactaaccaatttacaatgagcgggatggttcggatgcttcgtgagattctagtgcttattttcggtattgagttaatcggggccttgattttagggatttactttattcctctgtatccgaatttttgggatgctatgttccaaggattatataattctgtttcactcgtaaccaatgcaggcgttgatatcaccggtaaatcgctaatgccatttgcaaatgattattttgttcaatttatttcgattctgttgattattgcaggtgcgattggtttcccagtgttgcttgaaacgcggagatttttatttgagaaaaatacgttaattccgtttcgcttttcccttttcgtgaaagtaacgacgctaacttattttgtgcttttaattgttggtggtttacttatttggctatttgaatatcatcatttctttagtgggaaaagttgggatttcggtttctttaattcgatgttcttatcagcgacatcacgaagcgcggggttacaaacgattgatagtggggcattatcgatatctacgttgttacttgtctcattcttaatgtttattggagcatctccaagttctgttggtggtggtattcgaacgacaacatttgcgattacgattttatttatttattcggttatccgaggtcggaagcatgtgtacatttttggtcgtgagcttcatcaagaggacgtgcggaagtcgcttgcggtaacgttagtagcaggatttttgagtatttcggctatagtggttttaatgcagacagagactgcctcgttaattgccgtcattttcgaagtgttttcggcatttggtactacaggactttctgtagggttgacacctgatttatctacgccaggtaaaattattattattgcattaatgtttattgggcgcgttggtattatgtactcgatgctaagtttaagaaataaaaaccaacctaaaaatgcgattcgtttaccaaaagagaaaattattactggttaa

SEQ ID NO: 24279 - DNA, 2172 bp, Listeria monocytogenes
atgaaacaagaaaaagtacaggatttagtcaatcaaatgacattagatgaaaaaatcgctcaatgtcttcaactttccccttttctttttaaaggtacaaacaaaaatgcagaactaacagggccgcttcttcaagaaatgaaattaacggatgcgcatacggaaaatgcgggttcggtgcttggatcaagttcggcacttgatatgattggaattcaagaagcttatttaaaaacaaatcgactaggaattccgcttgtttttatggcggatgtcatacacggttataaaacggtatttccaatcccacttgcacttggttgttcttttgaccgggaaacggtgcgcgtgatggcggaagtttcggcgcttgaagcaacagcggacggtcatcatgttactttttcgccaatgcttgatttagttagggacccaagatggggtcgtgtaatggaatcaactggtgaagatccatttttaaatagtgaacttggaaaagcgatggtagatggctatcaaggtgatgcaagtaaattagatggaaattttgatcggatggcagcatgcgtgaaacattttgcggcatacggggcggcggaggctggtctggaatataatacggtcaatatgtcaacacgcgaattatatcagaattatttacctgcttatcacgcggcaattcaagcaggagctaagttagtcatgactgcatttaatgtggtagacggggttccagctacgatgaataaatggttaaatcgtgatgttctgcgaggtgagatggactttgacggagttcttatttcagactggggagcggttgccgaagtaattaatcacggaacagcaagaaatcctaaagaagccgcacagttttcgatggaagcaggcgttgatttagaaatgatgactacttgttatatccatgaattaaaaggtttaattgaagaaggaaaattatccgagagccttctcgatgaagctgttctacgtatgttacatttgaaaaatgatttaggactatttgaagatccatatcgcggattaaaaaataacgaccgcacaaaagatattttaaccgatgatagccgcgggaaagcgcgtgcagcaggcgttgaatccgctgtgttattagaaaataaaaatcgattacttccactggctaaagaaacaaaaattgccttggtcggtccgcttgcatcgtcgccagatattctcggtggttggaatgtatacggcgaagaaaaagatggcatcaatgttgaaacaggtttgcgtgaagtatttgaaacagtagaggtcatttcaacagagtacactgaattttcggatgaagacaaagtggcagttaaagcggcagtacagaatatggacgttgtcgtgcttgcgctaggtgaaaaaaatgaatggggcggagaagcaggaagtcttgctactatacgcttgccggaagcgcaatatgaattagcgaaattcgtccaaacattagaaaaaccagttgttattacattatttaatggtagaccactcgaagtgaaagagttagctgaatctagtgatgctcttcttgaattatggttcccaggaacagaagcaggccgtgtcactgcagatttattaagtggtgcaagtaatccttcagggaaattatccatgtcattcccgcaaacaactggtcaaattccggtttattataatcacttacgcactggacgaccacaaacaccggaaaataaaggcgaacgctatgtgtcgcattatcttgatattccaaatgaaccattttatccatttggttacggaaaaagttatagcgaattcgagttaaaaacaagcagccttccgaaagaattaaatctaggcgaaccactacatgtggaagtaaccattaaaaacattagtgatattgctggaaaagaagtaatccaagtgtatttacaagatgtaacagcgagcatttcacgacctgtcaaagaattaaaagcttttgaaaaagtggcgcttcaagctggcgaagaaaaaacagttacatttgaattaacaagcgaggcattttcattctataaccatcaacttgaaaaagtgcaggaaccgggacttcaccgtatttttgttggaactagtagtgaagatgtagacgcttttgaactggaagtgggtggatatgtgtga

SEQ ID NO: 24280 - DNA, 996 bp, Listeria monocytogenes
atgaaatatgttaaatttggtaacactggcatggatgtttcgaaaatctgtttaggaacaatgggcttcggtgataaagacaaatggattcataaatgggttttggacgaagcaaacagtcgccctatcataaaaaaagcactcgatttaggcataaatttctttgatacggcgaatatttattcctacggagaaagtgaaaaaatcgtcggccgcgcactgaaagactacgccaaccgtgatgatattgttctagcaaccaaagtgcaacaaacaatgcgcccagatcgtccgaatagtggcggtttatcaagaaaaaccattttaagtgaaattgaccatagtttaaaacgactagaaacggattatgtagatttatatatcattcaccgttttgatgaaaatacgccaatcgaagaaacaatggaagcattacatgatgtcgttaagtccggaaaagcacgctacatcggtgcgagcgcgatgtatgcctggcagttccaaaaagcacaacgcgtcgcagaaagaaatggttggacaaaattcgtctccatgcaaaatcattacaacatgatataccgggaagaagaacgagaaatgattccgttttgtcgcgatgaaaaaatagcgattacgccatatagtccactagcatcaggtcggttaacacgtgatttgaatgaaacaacagatcgttccgaaacggacccagttcaaaaatctaaatacgatgacatgatgaatgcggataaaggcattattgaacgtgtagctgaacttgcagaaacacatcaagtatctcgagataaaattgccttagcatggttattaaacaaagatgaaattacttcaccaatcatcggtgcgcaaaaagaaagtcacctagaaagcgcggtagaggcgctaaatattaaactaaccacttcggaagttaactatctagaagaactatacatcccgcacccagtagttggagcactgcctacaactaaataa

SEQ ID NO: 24281 - DNA, 720 bp, Listeria monocytogenes
atgattgcagaaatcaatggaattaacttgttttatcaaataatcggtaaaggcgaaccgatcctgcttattcacgggaatggtcaaaatcatcgttctttaaagcgtatgattgatgatctctctactaatcatcaagtaatcgccgtagatagccgcgcacacgggaaaagtgaagctggaaatacgccgcttgattttgaagtaatggcgctagatatgctttcgttactcgattatttgaaaattgataaatataaagttatcggatatagcgacggcggtattgttgctctcgtaatgggcaaaatgcagccaaatcgtcaaatcgcatccgttgttattggaacaaactatcatgtaaatcaaattcgatttttaccagacttgttttgccgagttgcttacggggctgcatttcttttagcgccatttagtcgcttttttgagcgaatgaaacgacaacttgctttaacgatttatcatccacatatgtcagaagcggatttacaaaaaataagcgcaccacttttagctgttgtgggggaatatgatttaatatcttccaaagatactaggaaaatggtgcattctgttcaacacggggaaatggtcattgtaaggaatggacttcattatttaccgcggcaaaaaccgaaacaattgttacaattaattcatagtttcttttctaatttaagcgcagaaattcacaaatga

SEQ ID NO: 24282 - DNA, 834 bp, Listeria monocytogenes
atggcgatcaaaaagtataaacctaccactaacgggcgccggcacatgactagttctgatttcgctgagattactacaagtactccagaaaaatctttactacgtcctcttaaaaagaaagccggacgcaataaccaaggtaagttaactgttcgtcatcacggcggtggccataaacgccaataccgcgtgattgatttcaaacgtaacaaagatggtattcctggacgcgttgcaacgatcgagtacgatccaaaccgttctgctaatattgctctaatcaactatgctgatggagaaaaacgctacatcatcgcagcaaaaggccttgaagtaggtcaaacaatttattcaggagcagaagctgacattaaagtcggtaatgcactagaattaaaagatattccagtgggtactgttatccacaatatcgaaatgaaacctggtaaaggtggacaattagtacgttctgctggaacaagtgctcaagtacttggtaaagaaggcaaatacgtattaatccgcttaaactctggtgaagttcgcatgatccttgctacttgccgtgctacaatcggtcaagttggtaacgaacaacacgaacttatcaacatcggtaaagcaggtcgttcacgttggatgggtaaacgcccaactgttcgtggatctgtaatgaacccgaacgatcacccacacggtggtggtgaaggtaaagctccaatcggccgtaaatcgccaatgtctccatggggtaaaccaactcttggatacaaaacacgtaagaaaaacaacaactccgataaatttatcgtacgtcgtcgtaagaaaaaataa

SEQ ID NO: 24283 - DNA, 519 bp, Listeria monocytogenes
atggaaaaaagacaaacaaaattttgtaaagaatcactagtaattaaaacgagccgggttttcccctcggacacgaataatcataataccctttttggtgggagattgatgacctatattgatgatacggcttccattagcgcctcgcgtcattgccgtacggaaattgtcactgcatcgacagactcagtggatttcctaaaaccgattaaaaatgatcattctgtttgcttagagtcttatgtagcttcaactggtagaagttcaatggaaatcttcgttaaaattattgcggagaatttgaaaacaggagaacgttatttggctgcaacttcctttttaacgtttgtggcattgggtgcggatggtaaaactgtagaagttccgctcgttgaaccagaaacagaagaacaaaaaagaatccacgcgggtgctgaggcaaggagcattgctcgtaaaattcgtttaaaagaaaaccaatcattagcggaatcattatcaacagatattccgtggtga

SEQ ID NO: 24284 - DNA, 180 bp, Listeria monocytogenes
atgtctgcaatagcaaaattctttcggaatgtttcatccgaaatgcacaaagttacgtggccaactagaaaagaacttttaacctacacagtaacagtagttattacagtagttttatttgctttattctttatgttaattgatttcggtatcgaacaaattattaaacttatcgtgtag

SEQ ID NO: 24285 - DNA, 735 bp, Listeria monocytogenes
atgaaaaagcaggaaatttcaattttaaatatacctttctataatacgacgcaagcaggatttgtggaggagctttacatggccgcgaagaacggggaacgtcgatttgttgtgacggctaatccagaaattgttatgcatgctcgcacggataaggagttcgaagcaatattagggcaagctgattatattgtacccgatggtattgggataataatggcctcagaaaaacttggagagcctttaaaagaacgagttactggttatgacacgatggttggtctattaaataagccactaaattgttattttttaggagcaaaaccggaaattagtgaggttgtagaggccaaagtgcgggaaaaattcccacaggcagttgtttgtggtgttcatcatggttactttgatgtattagaaagtgaaggaattgctaaggaaatactcgtctcacaaccagatgtgatttttgttgctttaggttcccctgctcaagaaaaatggattttgtctcagattgctaattttactaaaggcatttttattggtgtgggtggaagctttgatgttttaacagatagtgtaaagcgcgcaccaaaaatatggataaaattaaggttagaatgggtatacaggcttctttctaatccctcaagatggaaacgtttttttgcaatacctcaatttatgcttgccattcgaaaagagcgcaagcgtttgaaaaagggtgagtag

SEQ ID NO: 24286 - DNA, 552 bp, Listeria monocytogenes
gtgaataatccaaaaccgtgtgaatggaagtcgaatgaattatccagagggtatatcgctgactataaagcattcaattttgtcgacggggagggcgttcggtgcagtttatatgtatctggatgccctttccactgcgaaggctgctacaacaaagccgcgcaatcatttaaatacggcaaaccttacacaaaagaactagaagacgatatcctaaaagacatcggccatgaaagcgtccaaggcctaacgttacttggcggagaaccatttctaaacaccgccacatgcctatctatcgtaaaacgaatccgtgcgacatacggcgaaacaaaagatatctggtcatggacaggctacacttgggacgaaatgatgcaagaaaccgccgacaaactagaacttctatccttaatagatgtcctagtagacggccgcttcgaacaaaaactattcgaccccaacctagcattccgcggttccagcaaccaaagaattattgatgtgcagaaatcacttgctgcgggtgaagtggttttgtatgagttgtga

SEQ ID NO: 24287 - DNA, 2412 bp, Listeria monocytogenes
gtgacatttaatcataaaaaaatggaaccgaaatggcaacaatattggagtgaacacaacactttcaaaacaaccgaagataaaaataaagaaaatttctatgcacttgatatgtttccttacccgtctggagcaggtcttcacgtaggacatccagaaggttatacagcaactgatattttgtctcgtatgaaacggatgcaagggaaaaacgtccttcatccaattggttgggatgcctttggacttcctgcagagcaatatgcgattgatactgggaatgacccagaagaattcaccgcgctgaatattgcgaactttactcgccaaattaaatcacttggtttttcctacgattgggatcgtgaaatcaatacaacggatcctgaatattataaatggacacagtggatttttgaaaaactatatgaaaatggcctagcttatgaagccgaaatcgctgtaaactggtgtccggcacttggtacagttttagccaatgaagaagttatcgatggcaaaagtgaacgcggtggcttcccggttttccgtaaaccaatgcgtcaatggatgcttaaaattaccgcgtacgcagatcgtttgctagatgatcttgatctagtggattggcctgaaaatattaaagatatgcaacgtaactggattggtcgttcagaaggagcagaagttacttttaaaattaaagatagcgatgaaacgtttaacgtctttacaacacgtccggatacactttttggggcaacctatacagtttttgcaccagaacacgaacttatcgaaaaaatcacaacacctgaacaaaaagaagcagttgaagcatataaaaaacaagtagaactaaaaagcgaactagaaagaaccgaccttgcaaaagataaaacaggtgtcttcacaggagcttacgcaattaatccaatcaatggcgaagaagtgccaatttggattgcggactacgtgttgattcaatatggaacgggcgcaattatggccgtaccagcccatgatgaacgcgactttgaatttgcgcaacaatttggtttgaatattcgtcctgttcttgaaggcggcgacgttacaaaagaagcattcactggcgatggaccacatattaactccgatttcttgaacggactagctaaagccgaagcgattaccgctgcaattgattggctagaaaaagaaggcatcggtagccgtaaaatcacgtatcgtttgcgcgactggttgttcagtagacaacgttattggggtgaaccaattccagttatccactgggaagacggggaaacaacgcttgtaccagaagaagaactaccactacttctgccaaaagcaacagaaatcaaaccatcaggaacaggcgaatcaccacttgccaacttgcatgattgggtaaacgtaacagacgaaaatggacgtaaaggtcgtcgtgaaacaaataccatgccacaatgggctggctcaagctggtatttcttgcgctatatcgatccaaaaaacagcgaagcaattgctgacaaagaaaaactagcagaatggcttccagttgacgtttatatcggcggggcagagcatgctgtgcttcatcttctttacgcacgtttctggcataaattcttgtacgatatcggtgtagttccaacaaaagaacctttccaaaaactgtttaaccaaggaatgattcttggtgaaaataacgaaaaaatgtccaaatcaagaggcaatgtcgttaaccctgatgaagtagtagaaaaatacggcgcagacacacttcgcttgtatgaaatgttcatgggaccactcgaagcttcgattgcttggaatgaaaatggactagaaggtgcgcgtaaattcttagaccgtatttggcgtttgctagtaactgaagaaggcacactcgctgaaaaagtgacaactgatgcgaatgctaatttagaaaaagcgtatcatcatatggtgaaaacagttacgaatcattacgaaaacctgcgtttcaataccgggatttcgcaactgatgattttcatcaatgaagcatataaacaagatacaattccaaaacaatatgtcgaaggtttcgttcaactcttgtcaccaatcgcaccacaccttgcagaagaattatgggaaatcctaggtcacaccgaaacaatcagctatgtagcttggccaacatacgacgaaacaaaactagtagaagatgaagtagaaatcgtacttcaagtaaacggcaaagtaaaaagcaaaatcactgttgccaaatctctaggaaaagaagaactagaaaaaattgcacaagaagacaacaaaatgaaagaaaacctagaaggcaaaacaatccgtaaagtgattgtcgttccagggaaacttgtaaatattgttgcgaactaa

SEQ ID NO: 24288 - DNA, 1776 bp, Listeria monocytogenes
atggaaaaagcagggatttaccatcaaccggcgagtagctatgcatatagttatgacgctaaaacactacatattcggattagaactaaacgcttggatattagcaaggttactctaattgctgccgacccttacttatggaaagatggaaaatggcaaagtgaatcgtatacaatgcgcaaaatcgcagaaacagaagagcatgattattggttttttgcaattacaccagaacatagacgccttcaatatggatttttattaaccgatactgaaggagaaacaacattttatggcggacgtggtttttttgagccgaccgaggcgaatttagctacgatggattattactttaaatttccgtttatccatgcagtagatacatttgaggcacctgaatgggttagaaataccatttggtaccaaattttcccagaacgttttgcgaatggtaatccagctatttctccggaaaataccttgccgtgggggagtaaagatccgaatacaacagacttttttggtggagatattgaagggattatcgagcacttagattatttagcagagcttggtatcaatggggtttatttaacgcctgtttttgaagcaccgaccaaccacaaatacgacacaattgattataaaaaaattgatccgcactttggagacaaggaaacttttagaaaattagttaaagaagcgcataaacgtggtattcgcattatgctagatgcggtgttcaatcatattggggatacttctccagagtggcaagatgttgttgaaaaagaagaaaaatcagcgtatcgcgactggttccatattcatagtttcccagttcgtcaaaatgaaaatggcaatatcgaaggagaaccaacactttcttatgatacatttgctttcacaacgcatatgccaaaattaaatacggctaacccagaagttcagaagtatttactggatattgcgacttactggattcgtgagtttgatattgacggttggcgtttagacgttgctaatgaagtggatcacgctttttggaaagagtttaagaaggcggctcaagcggaaaaagaagacatttatattcttggtgaaatttggcatgattcatggatttggctacttggagatgaattccacgccgtaatgaattatccatttacacaaacgattattgagaactttattgaagaaaaaattaccccagagcaaatggtttctggcattaatgaacaatatatgcgctacccaaatcaagtgaatgaagtgatgtttaacatgcttgatagccatgatacagcgcgtattttaacacgtgctaataacgatgaggataaagtgaaacaagcgcttgccttcatgttcgcgcacactggttcgccgtgtatttattatggaacagaaatcggcatggacggcggaaatgacccaggttgccgtaagtgtatggaatgggacgaagcaaaacaaaatcaagatatgctagcatttacaaaacaactaatcgctctaagaaaagataatcaagctattatcacatccggtgagttaacttggttagaggcaagcagcgaaacgggcattactgcattttctaaagaattaaatggtgaaaaactacatttccttttcaatcaaacgaaaaaagatcaggatttcacaatttcatttgctaataccgcgatagatatttggaataaccaagctgtatctgataatctaactatcccggcaaaaggatttcttgttattaaagaaaacagctaa

SEQ ID NO: 24289 - DNA, 1260 bp, Listeria monocytogenes
atgaatattattgatgaattagagtggcgcggagctatttaccagcaaacagatgaagaaggattacgcaaatgggtagaagaaaaacagatttctttgtactgcgggattgatccatctggagactcgatgcatatcggtcatttaattccatttatgattttacgccgtttccaaaacgctgggcaccgtccgattattttagttggtggagcgacaggaactattggtgacccgagtggtaaaaaggaagagcggaagttacaatcaatggaacaaattagtaaaaatgtggaaagtttgcgcgtgcaacttggaaagatttttgattttgaaggtaattctgcagcgagcatggtgaacaactatgattggacaaaagatgtgagtatccttgatttcttgcgtgactatggaaaagaattcaacgtgaatacgatgctttcaaaagatatcgttgctagtcgtttagaagtagggatttcattcacggagttcgcttaccaaattttacaagcgatggactttaatcacttatatgaatttaatgattgccgtttgcaaattggtggtagtgaccagtgggggaatattactgctggacttgatttgattcgtaaaaaacaaggcgaaaatgccaaagctttcggtttaacaattcctcttttaacaaaagctgatggaacgaaatttgggaaatcagaaggcggggcaatttggttaaatccagaaaaaacaacgccatatgagttttatcaattctggattaacacagatgatcgtgatgttgtaaaatatttgaagtactttacattcctaacagaagcagaaattgatgagttagcgaaacaagttgaaacagaaccgcatttacgagctgcgcaaaaaacattagcagcagaaatgaccaaatttgtgcatagtgaagaagctttagaacaagctttgaaaatttcaaaagcactatttagtggtgatgtaaaagcacttacggcggatgaaattgaacaaggattcaaagacgttccgacatttgttgcagaagattcagaagcgaacttggtcgattggttagtaacacttggtatcgaaccttccaaacgtcaagcgcgtgaagatgtaggcaacggggctatttacattaacggcgaacgtcagcaagatttggaaaaaatcatggatgcaagtgaccggattgaaaataaatttacgattgtaagacgcgggaagaaaaaatacttcttagtttcttataaataa

SEQ ID NO: 24290 - DNA, 1707 bp, Listeria monocytogenes
atgcgtcaaacgatgacatttataccaacattaaaagaagttccagcagatgcggaagtaaagagtcaccagttacttcttcgcgctggttttataagacaaacagctagtgggatttatagttatttaccacttgcaacattgatgttaagaaaaatcgaaacaattattcgtgaagagctagaagcaattggcgctgcggaattattaatgcctgcacttcaacctgcggaactttggcaagagtctggtcgttggaacgattacggcccagaattaatgcgcctaaaagaccgagcttctcgcgactttgcgcttgggccaacacatgaagaagttattacagcgcttttacgcgatgaagttaaatcttacaaacgtttgccgcttactttataccaaattcaaacaaaattccgtgatgaaaaacgtccacgcttcgggttattacgtggtcgcgaattcattatgaaagatgcctattctttccatgcaaccagtgaaagtttggatgaagtgtataacttaatgcaccaagcttattcaaatatctttactcgttgtgggcttgaattccgttctgttattgcggattctggttctatcggtgggaatgaatcaaaagaatttatggcgttatctgatattggcgaagatacgattgcttatagtgacgcttctgattatgctgctaacacagagatggctccagttttatatatggagaaaaaatcgcatgagctagagaaagacctggaaaaagttgccactcctgaccaaaaatcgattactgatatcgttggatttttagaagttccaattgaaaaaacaatgaaatcgatgctttatcaagtcgatgatgaagttattatggttctcgttcgcggtgaccatgaagtaaatgatattaaaatcaaaaatgcattagatgcaaccaatgtagaattagtggatccagctgttgctgttgaactattaggagctaattttggttccctaggaccaatcaatgttcctgaaaacatgcgcgtgtttgcagataatgctgtgaaagatatcgttaatgcggtagttggtgcaaacgaagatggtttccattatattaatgtgaatccagatcgcgatttctccgttactagctattttgatttacggatgattcaagttggcgatttatctccagatggtcagggcgtaatcaagtttgctgaaggtatcgaagttggtcatattttcaaacttggaacgaagtatagtgaagcgatgaatgcaactattttagatgaaaatggtcgagcacagcctatcattatgggttgttacggaattggcgtatcacgtattttatctgccattgcggaacaatcgaatgatgaaaatggttttgtatgggacaaacaaattagtccatttgatttgcatttaattcctgttaatatgaagagcgaagagcaagttgcttttgcagaaacactttatacatccttacaagatgctggcttcagtgtcttaatcgatgatcgtgcggagcgggcgggcgttaagtttgcagatgccgatttaatcggtttaccaattcgtattacagtaggtaaaaaagcagcagaaggcgtagttgaagtgaaaatcagaaaaactggcgaaatgattgaagttcgtcaagatgagttactaaacacgctgcctatactctttggagataaataa

SEQ ID NO: 24291 - DNA, 1839 bp, Listeria monocytogenes
ttgaatttaagaaatgatattcgtaatgtagcaattattgcccacgttgaccatggtaaaacaactctagtagaccaattattacgccagtcaggcacattccgcgacaatgaaacagttgcagaacgcgcaatggacaacaatgatttagaaagagaacgcggtattacaattttagcgaaaaatacagcgattaagtatgaagatacacgtgtaaacatcatggatacacctggacacgccgatttcggtggagaagtagaacgtatcatgaaaatggttgatggtgttcttttagtagtggacgcgtatgaaggtacgatgcctcaaacacgttttgtactaaaaaaagcactagaacaaaacctaactccaatcgtagtagtaaacaaaattgaccgtgactttgctcgcccagaagaagttgttgatgaagtattagaattattcatcgaactaggcgcaaacgacgatcaattagaattcccagttgtttatgcttctgcaatcaacggaacttcaagctatgattccgatccagcagaacaaaaagaaacaatgaaaccacttttagacacaattatcgaacatatcccggctccagttgataatagcgacgaaccattacaattccaagtatcattacttgattataatgactatgttggtcgtatcggtattggccgcgtattccgtggaacaatgcacgtgggacaaacagttgctttaattaaacttgatggcacagtaaaacaattccgtgtaacgaaaatgttcggtttcttcggactaaaacgtgacgaaattaaagaagcaaaagctggtgatttagtagcattagcaggtatggaagacatcttcgttggtgaaacagtaacaccatttgaccaccaagaagcacttccgttattacgtattgatgagccaaccttgcaaatgactttcgtaacaaataacagtcctttcgctggtcgtgaaggtaaacacgtaacaagccgtaaaattgaagaacgtttacttgcagagcttcaaacggacgtatctttacgcgtagagccaacagcttcccctgacgcttgggtagtttctggtcgtggtgagcttcatttatccattttgatcgaaacaatgcgtcgcgaaggttatgaattacaagtttctaaaccagaagtaatcatccgtgaaattgatggcgtgaaatgtgaaccagtagaagatgttcaaattgatactccagaagaattcatgggttccgttattgaatctatcagccaacgtaaaggcgaaatgaaaaacatgattaacgatggcaacggacaagttcgtttacaattcatggttccagctcgtggcttaatcggttatacaactgatttcctttcaatgactcgtggttatggtattatcaaccacacattcgatagctaccaaccaatccaaaaaggacgcgttggcggacgtagtcgtggtgttcttgtatccatggaaacaggtaaatctactacttacggaacaatgcaagtagaagaccgtggtactattttcatcgaacctggtacggatatttacgaaggtatgatcgttggggaaaacaatcgtgaaggcgatatcgctgtaaacattgtaaaagcaaaacaaatgactaacattcgttctgctaacaaagaccaaacaaacgtaatcaaaaaacctcgtcacttatcactagaagaatcattagaattcctaaacgaagatgagtactgtgaagtaactccagaatccatccgtttacgtaaaaaaattctaaacaaaaacgaacgtgaaaaagcagcaaaacgttcaaaaactgctgaataa

SEQ ID NO: 24292 - DNA, 3327 bp, Listeria monocytogenes
gtggggtttgttcatttacaagttgcgagcgcttatgatttgctatctagtacagcgtccatcgataagctaatcgctaaagcaaaagaataccattatccagccttagcaattacggataaaaatgtactttacggagtagtcgagttttatcaaaagtgtttagcggcggatataaaaccaattatcgggatgacggtgacaatacaaggttacttaaatccaattaattcatatgagttgatattaattgcggaatcaaccgctggatatcaccagttattaaaaattgcgagtgctattcaaacgcgcgaagaaggaccggaattaccacaaagctggttacgagcttatagcagcgatttgattgttatttcacctggtgccaaaggagaaatcgaacgacttctgatggaggaggatcgcgagggagcactagaagtttatgcaaatttagtcgaaatttttggtaaagaatctgtttatttatctgcccaaaaagaaaatccacgtcttttcgcaaaaatagaaactttttcttcagaagaaaatgtaccggttgttgcgacgaaaaatgtacaatatttagagccaaaagatgcgcaagcgaaagaagttttaacggccattcgtgataatcgaacagttgactggacgactttgccacttgccggaccaaactactttacctcgcaagatgaaatggaacgtgactggcaaacagctttcgaaaagcaagcgtgtcttgaaacgggagaactcgcaaaccgttgtcatgtcgaaattgctctggatcaacatttattaccaagatttccgttaaatgaaggacaaaatgcatcagatgttttgcgtcaaacagcctttgcgggattaaaagaacgaaatttactagggatggaatatcaggaacgcttagaatatgaattgaaagttattacagagatggggtttgcagattactttctgatagtttgggatgttattcgttattcgcgtgaggcaggagttttaacaggtccaggtcggggttctgcggcggggtcccttgtttcctatgcacttagaattacggatgtagacccgattcgatacaatttgctgtttgagcgatttttaaacccagaacgtatcacgatgcccgatattgatttggattttccagataatcgccgggatgaagtgatttcgtatgtggtatctaaatacggagaagcacatgtggcgcaaattggcacatttggaacattggctgctaaagcggcgattcgtgatactgcacggagttttggcttgaattccgtactattatcagaatggtctaagttaattccgagtcaattaggcattacgctgcaaaaagcattgcaagaaagtccgcgtttagaaaatcatattaaaagttcaaaagaaaacgaaatgatttgggaagttgcttgtcagctggaaggcttgccgcgtcatatttcaacgcatgcagcggggatagtaattagtgataagccactcgtagaacaagttgcgctacaattgggtagtggagacgcacgtttgacccagtttgccatgggagaattagagaagattggcttacttaaaatggattttctaggacttagaaatcttagtttactcgatcgtgttttgaaatcagtcaattatactagagaaactccgttaacattagcagatatttctttagaggataaaaaaacattgaaactattccaaacaggcgacacgacaggggtattccaatttgagtcagatgggattcgccgcgtgctccgaaaattaaagccaacttcttttgaagatgttgtggcagtagatgcgctttatcgtccgggtccaatggaacaaattgatacgtttatcgctagaaaacacggaaaagaaaaaattcagtaccctcatccagatttagcgtctattttagaagtgacatacggcgttatcgtttaccaagaacaaattattcaagtggcaaaccaaatggctggattttctcttggagaagcagatttgttaagacgagctgttagcaagaagaaagcggatgtcctaaacgaggagcggattcactttgtagaaggcgctaagagtaaaggctattcagaagctagcgctaaccaagtatatgatatgattgtccaattcgcgaactacggtttcaacagaagtcacgcagcggcctattcaaaaatcgcttttcaattagcttacttaaaagcacattttccagccgcgttcatgtcatcacttctcagctcagttttcggaaacgatgacaaaatttcccaatacattacagaagcaaaaaactacggaattagcatgttagcgccaagcatcaaccatagtaactactacttccaaatggaaaatgagacatctattcgttatagtttccgtgttattcgtaaagtgccaaccaaatttattttagaaattattaacgaacgaaaaaaagcgcctttccgagatttctttgatttttgtgaaagaatgccacataaaatgctctcagaaactgttttagaagcactcgtattttctggttgttttgacgaatttggtgaagaccgggcaacgattttggcaacaattgatgcggtattacaatatatctcgttactcggtgaagattcgaaagggatgaatcttttcgcggaagatgacgaatttttgaagaagatgaaaccgagatatcggaaaaccgcacccatttcaattgatgaaaagctggagaaagaaaaattatacactgggcaatacgtttcagcgcatccagtatcgtactatcaaaataaattacaaaaccttgctattacaagacttgcaaatctttcttccggcaaaaattatcaagtggctgcttatgtacacgaagtcaaatcaattagaacaaaaaaaggcgaaacgatgtgctttttaacaattagtgatgattcaaaagaattgagcgccgttatgtttccggaatgttaccgtaaattcgctaactttgcacaaaaaggagagatcctctttttgcaagtgaaagcagatacgagaaacggggaactccaattaattattaataaagcagaagatttaaaagaaattaaagccccggtacgattattcctaaaattaacggaaccacagcaaatggaacaaattaagccgattttagcgcgttataaaggcgacagtaaggtcattgtgcatcaagcgataacgaaacaaactgctgaactgaaaaatattcaagtaacgccatcaaatgagctgcaagaagctttaggagagttgcttggtaaagagaatgtagttattaagtaa

SEQ ID NO: 24293 - DNA, 285 bp, Listeria monocytogenes
atggatgcacgcgacatcattaagcgcccagttgtaactgaagaatctacaagcattctcgacgataagaaatatacatttgaagtagatactcgcgcaactaaaacgcaagtaaaatacgcagttgaagaaattttcgacgtaaaagttgctaaagtaaacgtaatgaattacaaaggcaaacttaaacgtatgggccgttatgcaggttacactaacaaacgccgtaaagcgattgttactgttacagctgacagcaaagaaattcaattctttgaagtataa

SEQ ID NO: 24294 - DNA, 867 bp, Listeria monocytogenes
atggaaattaaactcgaacaactaggttattgttatcaaaaaaatagcccttttgaaaagcgagcattacttgatgtgaatgtttcttttgattctggtagctattctgcaattattggtcatactggctctgggaaatcaactttgctacaacacttgaatgcccttttaatgcctacagaagggaaaattacagttggtgatcgagaaatcgttgccggcgtgaagcaaaagaaactacgcgatttacgtaaaaaagtcgggattgtgttccaatttccagaagcacaactttttgaagaaacggttgaaaaggatatttgttttggaccgatgaactttggcgtttccgaggaagatgcgaaactgcgcgccaaaaaagtaatttatgaagtaggactgaccgaggaaattttgtcacgttcgccgtttgaactttctggtgggcaaatgcgccgggttgcaattgcaggtgttttggcgatggatccagaagtgcttgtgctagatgagccaacagcgggactagatcctcatggtcgcgaggaaatcatggaaatgttctacaatcttcataaagaaaaagggctcacgacggtccttgtaacacatagtatggaagatgctgctcgttatgcggaaaagattgtcttgatgaaggcggggacggttctacaaatcggtacgccacgtgaaattttcgcgaagccagacgaactggttgatcttgggttatctgtaccggatgtggtgagattccaaggactttttgagcgcaaatttgatgtgaaattaacaaaaacttgtttaaccattgatgaattaacaaccgaaatggcgccttatttagcgaagggcggggcataa

SEQ ID NO: 24295 - DNA, 1107 bp, Listeria monocytogenes
gtgtcaaaggtacttaaatctttgctgcttacggcactacttggggttaccggccttataagcggttgtggtgacttgacggtacttaatccaaaaggaccagttgctaaaggtcagtcggacttaattatttattcgattatatttatgctggttattgttttgacgatttttgtattgtttacgattatgttggttaaataccgcgaacggaaagacatttcaaactacgagccagatatgcacggtagtaaaaaactagaaattttttggacattgattccagttgctatcgttattgctctagctattccgacggtaaaaacaatttatgcaggggaagaagcaccaaaagtgacttcgcataaagatccaattattatttacgcaacaagtgcagattggaaatggatttttagttatccagatgagtcgattgaaacggtgaactacgtaaacattccaaccgaccgtcctgtattattcaaattaacttccgcagatacgatgacaagcttttgggttccgcaattaggtgggcaaaaatatgcgatgtctggcatgacgatgaatttatatttacaagcagatgaagttggtacatacaaaggtcgtaacgcaaacttcaacggcgaaggttttgcggatcaacgctttgatgtagtagctcaatctgaaaaagatttcaaaaaatgggcgaaagaaacaaaagcaagctcgccagttattacacaagacatatatgatcgtcttttaattcctggaagctctaagaaaaagacttattctggtacgcatttagcatttgttgatgtagcagctgatccagagtatgttttctatgcctacaaacgttttggttatgagatgacaaatccgcataatccaaacacaaaatcaaccatttctgatgaaccaatgcttccggttcgtcctgtgacagtaactaatccgcaatttgagcgtcatgatatgaagccacaaattattaaaaacggcgaaggttaccacgaggataaacaccgcgaagatgaaatgaagaaaatggaagaagacatccaaacaaatgaattcaataaaaaagaatcggatgacgcagggaagtaa

SEQ ID NO: 24296 - DNA, 1335 bp, Listeria monocytogenes
atgaaccctgaccccgagagtcagcagattatcttgcagttaattcttattgtggtgttgacgatgctcaacgcattctttgcctcagcagagatggcccttgtatcactgaacaaaaatcgtgtaaaaagccaggcagaaaccggtgataaaaaagcggttatgctagctaaactcgtagatgatccaagtaaatttctagctactattcaagttggtattacgcttgctggattcttctccagtgcgtcagccgccactagtattgcgactagacttgaatctgtttttggaggaagtagttttgcgaaagagttatccattatcgtcgtaactattgtgttatcatatatcacgttagttttcggtgaactttatccaaaacgtttagcacttcaaaaatcagaaaaaattgcccgtgtttctgtacgaccaatcatggcagttggtgttgtacttcgtccgttcgtaaaattcctatctttttcaactgatattcttgtgaaattaacgagaatggaaaaaaatacggataatgaaaaaatgacgcgagaggaaatgcagctattgattgaaaccggtcgacgtgacggtgtaattgaggtagaagaattacaaatgcttcgtggtgtatttgaaatggataataaatatgcacgtgaagtgatggtgccacgaacagatgcgtttatgattgatgccgaaacagaatcggaagaactttgtgacgcattattaagtgagaatttttcaagggttcccgtctatacaggcgatcaggactccgtgcggggtattctgcatatgaaagatttttttgcggaagcgagaaagtcaggttttgaaaacattgatgtgaaaggactcgttaaagacgcgtattttgcgcaagagacgatgtttattgacgatctacttaaaaacatgcaaagaactcgaaatcaaatggctattttaatggatgaatacggtggtgttgcaggtattgtcactgtagaagatttattagaagaaattgttggcgaaattgacgatgaaaacgatgtgttttcggatgaagtgaagaaagttgatgagacgacatttatcgtagaaggtcgtatgccactagatgatttcaacaaaatgtttcacgtggaacttccatcacgtggagtagatactgtggctggatttgtgcttactttaactgggacaattccagaagaagatgataaagtagtagtagaatacggtacacttcgatttacagtagaagaaatgaatgatgccagactggtttcggttcgtgttgaaaaagacatccaaacaagcgaacttggacagatggcttaa

SEQ ID NO: 24297 - DNA, 690 bp, Listeria monocytogenes
atggtagaaaaaattgaacgaaaatcgcttgcagagcaagtttatgatcaaataaaagcagaaattactaatggtacgtggaaaattggtgagcgtattccaaaagaagcggatttaatggctgaatttggcattagtcgtaatacgttacgtgaagctattcgcgccctagctcatatcggtttactggaaaccaaacaaggtgacgggacttttgttcgtaacaatagtgaactaaatgctatcatgcagaagcgtgtccgcgaatccacggttcaagaaatcttggaaattcggcatgcacttgacagagaagcggttattctggcctgcgaccgacgtacggaagaagatgtagaaacactagaaaaatatagacaacaatgccaactagcgactgaaaaaaatgatgtaggcgcttttgtgaaagctgattctgcccttcatttaacaattgtaaagacagcacataacgatttgttgttagatatgtatgtcaatattttagaagaaatacagttttcaatcacgagtacaaccgaaatgagcccagaagctaatcagcataaagggcatgctgcgcttgtcaaagcgattgaaaaacgaaataaagaacaagcagctcatgaagtaacagagtatattactcttttcaaacggattgctgctaagaatggagaaaagaaatga

SEQ ID NO: 24298 - DNA, 945 bp, Listeria monocytogenes
atgatcgaaattgaaaagccaaaaatcgagacgattgagatcagcgatgatgccaagtatggaaagtttgttgtagagccacttgagcgtggatatggtacaactttgggtaactccttacgtcgtattctattatcttctcttccaggtgcagcagtaacctctatccaaattgatggagctttacatgagttttctgtaattgaaggtgtagtagaagatgtaacaaccatgattttaaatattaaaaaacttgcgctaaaaatctattctgatgaagaaaaaacattagaaattgatatgcaaggtcctggtgtagtaactgcagctgacattaattatgacagcgacgttgagattttaaatcccgacttacacattgctacattaagtgataatgctaaatttcatgtgcgtttaaatgcgactcgtggtcgtggttacacacctgctgatcaaaataaacgcgaaaatatgccaattggtgtacttccagtcgattcaattttttcaccggttatccgtgtgaactatcaagtggaaaatacacgtgttggacaatcaactaattatgataagcttacgtttgatgtgttaactgacggaagtatcagcccagaagaagcagtttcacttggagctaaaattctttctgagcatttaagtatcttcgttaacttaacagatgaagcacaaaaagctgaaattatgattgaaaaagaagaaagccataaagagaaagtgcttgaaatgactattgaagaattagacttgtctgttcgttcatataattgtttgaaacgcgctggaatcaatacagtacaggaacttgctgacaaatccgaagacgatatgatgaaagtccgtaacttgggccgtaaatcgcttgaggaagttaaagtaaaactggctgaccttggcttatctctaagaaacgaaaactga

SEQ ID NO: 24299 - DNA, 2172 bp, Listeria monocytogenes
atgtctgaaaaacaagtattttcaacagagtgggcaggtaaaacattatctgttgaagtaggtcaattagcaaaacaagcaagtggggcagccttaattcgttacggcgatacggttgttttaacagccgcagtaggttctaaaaaaccacgtccaggcgactttttcccattaactgttaactatgaagaaaaaatgtattccgttggtaaagttcccggtggattcttaaaacgtgaaggacgtccaagcgaccgtgctacattaacagcgcgtcttattgaccgtccaatccgtccgctatttgcagaaggtttccgtaatgaagttcaaattacttctactgtattcagtgtggatcaagattgttcgccagaaatggcagcaatgcttggatcttctgttgcattagttatttccgatattccatttgaaggaccaatcgctggtgttgacgttggtcgtatcgatggaaaatacgttattaacccaacaatcgagcaagcagaaaaaagcgatattagcttaactgttgcaggaacttatgatgcaatcaacatggtagaggctggagcgaaagaagtttcagaagaagcaatgcttgaagcaattatgtttggtcatgaagaaattaaacgtctttgtgaattccaacaacaaattattgcggcagttggtaaagaaaaacgcgaaatcgaactttttgtaagcgatcctgaacttgaagcagaagtaaaagcagctagtgaaggtaaaatgaaaacagctatcaaaacagaagagaaaaaagcacgtgaagctgcaattgaagaagtaaaagaagaaattttagaaagctataaagcaaaagaattagaaaatgaatctgaaattcttagcgaagtagctcatattcttgaaatgattgaaaaagatgaaatgcgtcgtctaatttctcaagataaaatccgtccagatggtcgtaaagtaaacgaaattcgcccgctttcttctgaagttggcatgcttccacgtgtccatggttctggtttattcactcgtggccaaacacaagctctaagcgtgtgtacactggcaccgcttcgtgaacaccaaattattgatggtctaggaacagaagagtacaaacgctttatgcaccattataatttcccgcaatttagtgttggggaaactggccctcgtcgtgctccagggcgtcgtgaaatcggtcacggtgcattaggcgaacgtgcattacaatatgttattccttccgaagaggaattcccttacacaatccgtttagtatcagaagttcttgaatctaacggatctagctctcaagcaagtatttgtggttctacacttgcaatgcttgatgctggtgttccaattaaagcgccagttgcaggtatcgcgatgggccttgtaaaacttggagatgactacacaatcctttctgatatccaaggtatggaagatcactttggcgatatggactttaaagttgctggtacaaaagacggtattacagcacttcaaatggatatcaaaatcgatggcttgagccgtcaaattttggacgaagcattaacacaagcaaaagaaggacgcttacacattctagaacacttaactagcacaattagcgcacctcgtgaagaactttctgcttatgctccaaaaatcatcacactaaatatcaaaccagagaaaatcaaagatgtaatcggaccaggtggaaaacaaatcaatgcaattattgatgaaactggcgtgaaaattgatatcgaacaagatggtacagtgtacattgcttcccaagatcaagcaatgaaccgtaaagcaattgctatcatcgaagacatcgttcgtgaagtagaagtgggagaagtttatactggtaaagttcgtcgtatcgaaaaatttggcgcatttgttgaattattcaaaggtacagatggtttagttcatatttctgaattagcgcatgaacgcgttgggaaagtagaagatatcctaaaattaggtgatgaagttactgttaaagttatcgaagtagaccaacaaggccgcgttaacttatcacgtaaagctttgcttgagaaaaaagaacaaccagaaggcgataaaaaaccacaagcagagaaaaaattctatccaaaaacgaaaaaaccagaatctaaataa

SEQ ID NO: 24300 - DNA, 1074 bp, Listeria monocytogenes
gtgaaaaagcgtacatttgctttagcactatcaatgattattgcttctggcgttatcctaggtgcttgtggttcgagcagcgacgataaaaaaagtagcgatgataagagcagtaaagattttacagtagcaatggttacagatactggtggcgttgatgaccgttcgtttaaccaatcagcatgggaaggcttacaaaaatttggtaaagctaacgacatggaaaaaggtacagatggttacaactacttgcaatcagcttctgaagcagactacaaaacaaacttaaacactgctgttcgtagcgactatgatttaatttatggaattggttacaaactgaaagatgcaattgaagaagtttctaaacaaaaacctaaaaatcaattcgctattgttgatgacacaattgatgaccgtgataatgtagtaagtattggatttaaagataacgatggttcttatctagttggtgttgtagctggcttaacaacaaaaacaaataaagttggatttgttggtggagtaaaaggaactgttatcgaccgttttgaagctggtttcactgctggtgtaaaagctgttaatcctaatgcacaaattgatgtacaatatgcaaacgatttcgctaaagcagacaaaggacaacaaatcgcttcttccatgtattcaagtggagttgacgtaattttccatgctgctggtggtactggtaacggtgtctttgcagaagctaaaaacctgaagaaaaaagatcctagccgtgctgtttgggtaatcggtgttgaccgtgaccaatgggacgaaggaaaagttacagcaaacgatggcaaagattacaatgtaactcttacatctgaaatcaaacgcgttgatatcgctgtagaagaccttgcaactcgtgctaaagctggagatttcccaggcggaactaaaattgaatacggtcttgataaagatgctgtagggctttctgaacatcaagataatatttctaaagacgttcttgctaaagtagaagagtacaaacaaaaaatcgttgatggggacattaaagttccagaaaaaccttga

SEQ ID NO: 24301 - DNA, 279 bp, Listeria monocytogenes
atggctacaaccatgcgattagataaatatttaaaagtatctcgactaattaaaagacgtacagtagcaaaagaagtagcagaaaaaggacgcattgcggtaaacggagtaacagcgaaaccaggaaccaatgtaaaatctggagatgaactagttattcgctttggccctaaaatcgttacagcgaaaatcgaacgtctagaagaaaatgcgaaaaaagaacaagcaactgaaatgtatacgattattaaagaagaacgcacagacgaaagtagataa

SEQ ID NO: 24302 - DNA, 654 bp, Listeria monocytogenes
atgaaaaaaacaccatttattattagcggtatcggcctccttggatttattttctttatgacgggcgttatgactggggcaaagtggattcaacgttttgaccattattggaatagtgttatccgtgtaggtataacggatactaaaacaaccgtgatttcttatctaacggatattggtggagtagctaccatttgtattttaacggcaatcattatcattgtatttgtatttatgcgaaaagtagatacagcgatttggtttggcagcatcgttttaattggtggagcactcattccttcaattattaaaaatatcgttcaacgtccaagacctacctataaattaatcgaacaaggtggttttagttttccaagtggacattcgaccggttctacggtattttatggcatgcttgctttcttgttaattctatacgtgagccgcagttggcttcgatttacaattggtattctagctcttggtattgttatcttcgtcatgtattcgcgtgtttacttaggggttcattttccaagtgatgtggttgcagggttcttaattggtaacgcagcgcttttcagcggaatcggatgttacttcatttggaatgaaaaattagcattatgggctaataaatttaaaaaagcatag

SEQ ID NO: 24303 - DNA, 786 bp, Listeria monocytogenes
atggcaactttaaagattcaagatttacatgttgaaatagaaggaaaagaaattttgaagggtgttaacctggaaatttcaactggcgaaatccatgctatcatgggaccgaacggaacaggtaaatctacgttgtcctcagctattatggggcatccaaaatatgaagtaacacaaggaacaatcacacttgacggggaagatgtactcgaaatggaagtagacgaacgcgctcgtgctggtcttttcttagcgatgcaatatccaagtgaaattagtggtgttacaaacgctgaattcattcgtgcagccatcaacagccgccgtgaagaaggcgacgaaatcccagtaatgcaattcatccgcaaactagatgcgaaaatggatattttagatatggacgaagaaatggcggaacgttatttaaatgaaggattttcaggcggagagaaaaaacgcaatgaaattctgcaactattaatgatcgagccaaaattagcgattttagatgaaattgactccggtcttgatatcgatgcgcttaaagttgtctctaaaggtgtaaatgaaatgcgcggcgaaggtttcggttgcttaatcattacccattaccaacgtttactgaactacatcacaccagattttgtgcacgtaatgatgcaaggtaaagtagtaaaagaaggcgggcctgaacttgcgaaacgtttagaagctgaaggttatgactggattaaacaagagcttggtatcgaacttgaggaagaagaagcagtagaccaacaataa

SEQ ID NO: 24304 - DNA, 3441 bp, Listeria monocytogenes
atgaatcgaattaaaaaagtattagtagcaaaccgcggagaaattgctatccgtgttatgcgtgcgtgtactgaactcaaaatcaaaacagtggctatttattcacaagaagatactggaagttttcaccggtataaatcagatgaagcttatctggttggagcagggaaaaagcctattgatgcgtatctagatatcgaaaacataatagagattgctaaagaatctggtgcagacgcgattcatccgggatatggtttcttgtccgaaaacattgaatttgctcgtcgttgtgagcaagaaggcattattttcgttggtcctaaatcaaaacacctagatatgtttggtgacaaaattaaagcaaaagaacaagccctattagctgatattccagtaattccgggaagtaatggacccgtggctggtattaaagaagtagaagaatttggtgagaaaaacggttatccattaatgattaaagcttcccttggaggcggcggtcgtggtatgcgtgtcgtagaatcaaaagaacatgtcaaagaaagctttgaacgcgcatcttcagaagcaaaagctgcattcggaaatgatgaagtatatgtagaaaaatgtgtgatgaatccaaaacatattgaagtacaaattcttggtgacacccatggcaacatcgttcatttattcgaacgtgattgttcaatacaacgacgtcatcaaaaagtagtagaagtagctccgtgtaatgcgattacttctgaactacgtaaccgaatctgtgatgctgcagtaaaactaatgaaaaatgttgattatattaatgctggaacggttgaatttttagttgaaggtgacgatttctactttatcgaagtaaatcctcgtgtccaagtggagcatacaattacagaaatgattactggtattgatatcgttcaatcacaattattcattgcagatggttatgcacttcacgaccaactagtagctattcctaagcaagaggatatccatattcacggttctgctattcaaagccgtattacaacggaagatccacttaataactttatgccagatactggtcgagtagatacgtatcgttccacaggtggttttggtgttcggttggatgctggtaacggcttccaaggaacagtagtaacaccattttatgattcattactagtaaaattatgtacttggggaatgacatttgagcaagcaacgcgcaaaatgcgtcgtaacctgatcgaattccgtatccgcggtgtcaaaacgaacattcctttcttattgaatgtagttcgtcatccagattttgcgagtggtaattacaatacaagctttatcgatacaactccggaactatttaaatttccacatattcgcgaccgtggtacgaaaacgttgcgttatattggtaatgtaactgttaatggtttcccaggaattaagcaccgtgataaacctgtttatgcagaaccacgtttgccaaaaattccttatggttcgcaaatctctccaggaacaaaacaaattttggatgcaaaaggtccagaaggcgttgtcgactgggtgaaaaaacaagaagaagtacttttgacagatactacgcttcgagatgcacatcaatctctacttgcgacacgtgttcgttcaaaagatatttttcaagtggcagacgcaatggcacatttattaccaaatatgttctcatttgaaatgtggggaggggcgacttttgacgtggcatatcgtttcctaaatgaagatccatgggtgcgcctagaaacacttagaaaacaaattccaaatgtgatgttccaaatgttacttcgcggagctaatgcagttgggtataaaaactaccctgacaatgttatccgtgaattcgttaagcaatcagcacaatccggtgtcgatgtattccgcgtgtttgacagcttaaactggatcaaaggcatggaagtgtccattgatgctgttcgtgaagcagggaaggtcgtagaggctgctatctgctatacaggagatatcgatgatgacacaagaacgaaatatacgattgattactataaagatatggcgaaagagctcgttgctcaaggtacgcatattttaggcattaaagatatggctggacttttaaaaccacaagcagcttaccgtttaattggtgaattaaaagatacagtagatgttccaatccaccttcatacacatgacacaagcggcaacggtatttatacttacgcagcagcagtcagtgcaggagttgacattgtggatgttgcatcaagcgcgatgagtggggctacaagccaaccaagtatgactggtctttactacggattagtgaatggtaaccgtcaaacgaacttagacgctcaaaattcccaaatcattaatcattactgggaagatgtccgtcactattataaagactttgacaatgcgcttaattcacctcaaacagaagtatacattcatgaaatgccaggtggtcaatatactaaccttcaacaacaagccattgcagttggactaggcgatcgttgggacgaagtgaaagaaatgtatacagtggttaatcaaatgtttggtgatatcgttaaagtaacaccttcttccaaagttgttggagacttggcgctattcatggttcaaaatgaattatccgaagaagatgtatatgaaaaaggcgataccattgatttcccagattccgttatcgaattctttatgggggaaattggtcaaccatacggcggcttcccagaaaaacttcaaaaactagtactcaaaggacgtacaccacttacagatcgtccaggcgctttaatggagccagttaactttgttgatgtcaaagcagaattaaaagaaaaaatgggttatgaaccaactgaaaaagatgtcatttcctatattttatatccaaaagtgttcctagattatcaagatatgattaacaaatatggtgatgtaacagtccttgatacaccgacattctataaaggaatgcgtttaggggaaacaatcgaagtagaacttgaaaaaggaaaaatccttttaatcaagctaaattccattggtgaaccaattgcggatggcacacgtgttatctattttgaattgaatggacaaccacgtgagattaacatccaagatatgaacgttcaatctactgttattgcacgccgtaagattgatacaactaaccctgaacatgttggagcgacaatgacaggttcagtcattcaagttgttgtgaaaaaaggcgactctgtgaaaaaaggagatccactactaatcacagaagcaatgaaaatggaaacaacgattcaagcgcctttcgatggagaagttagcagcatttatgtttctgacggcgatactatcgaatctggtgatctattaattgaagtaaacagaatttaa

SEQ ID NO: 24305 - DNA, 603 bp, Listeria monocytogenes
atggctcgttatacaggtccaagctggaaagtttcccgtcgtttaggaatttcactttctggaacaggtaaagaattagagcgtcgtccgtatgctccaggtcaacacggcccaactcaacgtaagaaaatctcagaatatggtttgcaacaagctgaaaagcaaaaattgcgtcatatgtatggattaactgaacgtcaattcaaaaacacgttcaacaaagctggtaaattacgaggtaaacatggtgagaactttatgatcttactagaacaacgccttgataacatcgtttaccgtcttggacttgctcgcactcgtcgtgcagctcgtcaactagtaaaccatggccacatcactgtagatggcaaacgcgtagatatcccttcttaccaagtatctgttggtcaagtgatctctgttcgtgaaaaatctgctaaaaactctgcaatcgctgaaagcttagaagtttcaagcttcgtgcctgaatacgtaactttcgatgcagaaaaactaactggttctcttaaccgtctaccagaacgttctgaacttgctgctgaaatcaacgaagcatttatcgtagaattctacagccgttaa

SEQ ID NO: 24306 - DNA, 1269 bp, Listeria monocytogenes
atggctggatcgagtacaagtaaaaaaggaacgatagcagtatctttgacgaactatttagattctggatgtattgtagcgggagcaagtggactaactttgtgggcaacacaattcggacttagcagttttgcggtgggattacttggggctgtgagcgcgaatgcgtttggttctgcaattggcgcacttattggtggtcatttagcagataaatatggacgaaaatttatttatacgtataacatgttggtgtatatgcttggagttacaattattatgtttgcgatgaacttcccaatgttattaattgggtttttagttacaggcctttctgtaggggctggggttccggcttcatggacatatatttctgaaatggcggatcctagtatacgagctagaaatattggtatatctcaatttgcttggtcatgtgggccagcaattatctttactttaggaattattgtatctccacttggacttttaggtaaccgcttacttttcttatctttattgattgtagcatttgtagcttggcagttgcagcgcaaactagaggagtcgaaggactgggaagcggagcaagtgaaaatgaaagaaagtggtaatcgtttggaacatccttttaaaacagcattttctagtatggtaaatgtaaaatcagtacttttcttagtgggtgtgtacttattttggaatttagtagcgggtgcaatgggattctttatgccgtttgtatatgaaacggtgggtggtctttctaatacacaagcgaatttattgcaagctgtattatggatactcacagcagcttctacatactttggctttgctaaatttggtgatcgagtaagtcatcgtgggttgttttttgtaggggctttaatggcagttgcttcttgggttgtacttacttttgttggaatgtcttgggttggcttatggacatttgttattttatggggtatttcagcaggtattggtgcacaagctttttacgcactttggtccacagaacttttcccaacaaaatatcgtggtggggttcaaggcgtgatgtttttcttagttcgtggtagtacaggtgtctggtcgattgtcttcccagtaatcttggcaaatcttggctttactgtggcggggacaattatgattggtttacttacagtgtcgcttttaatcggtgtaatttgggcgccgaaaacacgtggcagatcacttgatgatattacgaaggaacgttacggaaatacaattgattaa

SEQ ID NO: 24307 - DNA, 969 bp, Listeria monocytogenes
atgactgaacaaagagaaaaattattagaaattcataatctaaagcaatactttaacaaaggtactgcaagtgaagtacgtgctgttgatgatatttcttttgatatttataaaggtgaaacacttggtttagtaggtgaatctggttgtggtaaatctacaactggacgtactatcattcgtttatacgatgcaactggtggagaagttatttataacggtaaagatgtgcacgcacgtaaaagccgtaaagaaatgcttgaattccgtcgtaaaatgcaaatgattttccaagatccatacgcgtctttaaatccacgtatgaaagttaaagatatcattgctgaaggtattcgtattcatggccttgctaaaacgcctgaagaaacgaataaacaagtatacgatttgttagaaacagttggattaagtaaagaacatgctggtcgttacccacatgagttttccggcggtcaacgtcaacgtattggtatcgctcgtgcgcttgctgttcaaccagaatttattattgccgatgagcctatttccgctctagatgtatctatccaagcgcaagtagtaaacttattacgtcaattacaaaaagaaaaaaatctaacttacctattcattgcccatgatttatcaatggttaagtacattagtgatcgtattggtgtaatgtacttcggtaaattagtagagttagcgcctgccaatgatttatatcatgcaccgctacacccttatacggaatcacttttatccgcgattcctttgccagatccaaattatgaacgtactcgtgtgcgtaaaacatatgatccgacgtctcataactataaagatggcgatgaaattaaaatgcgcgagattgctcctggacattttgtttattgttcagaagaagaagaagttatgtataaagaaaagcatgctaagttaactgctgaagctgctgcgaaataa

SEQ ID NO: 24308 - DNA, 1011 bp, Listeria monocytogenes
atgacagttaaagttggtattaatggttttggacgtatcggacgtctagcattccgtcgtattcaaaatgtggaaggaattgaagttgttgcaatcaatgacttaacagacgctaaaatgttagctcacctgttaaaatatgatacaactcaaggccgttttgacggtgaagtagaagtacatgatggtttcttcaaagtaaacggtaaagaagttaaagtattagctaaccgtaacccagaagaacttccatggggtgacctaggagtagacatcgttctagaatgtactggtttcttcacagcgcaagacaaagctgaattacacattaaagctggcgctaaaaaagttgttatctccgctccagcaactggcgatatgaaaacaatcgtttacaatgtaaaccatgaaacattagacggaactgaaacagttatctctggcgcaagctgtactactaactgtttagctcctatggctaaagttttagaagacaaatttggtgttgttgaaggtctaatgactacaattcacgcttacactggtgaccaaaatacattagatgctccacatccaaaaggtgacttccgtcgtgcacgtgctgctgccgaaaatattatccctaatacaactggtgctgctaaagctatcggtgaagtattaccaacacttaaaggtaaattagacggagctgctcaacgtgttccagttccaactggttcccttactgaattagtaacagttcttgacaaaaaagttactgttgacgaagtaaatgcagctatggaagcagcttctgatccagaaacattcggttacactagtgaccaagttgtttcttctgacatcaaaggtatgactttcggttcattatttgacgaaactcaaacaaaagttcttacagttggcgatcaacaattagttaaaactgtagcttggtacgataacgaaatgagctacactgctcaattagtacgtactttagaatactttgcaaaaatcgctaaataa

SEQ ID NO: 24309 - DNA, 1215 bp, Listeria monocytogenes
atggatatcttaagaaaagggaataaagatttaattaaagacataaaccgctatacagtactgaatttaatccgtgaaaaaggagaaatcacgcggactgagatagccaaaaaatgcgattttgggatgtctacattaacgtatattttagatgatttacagcaagaaggcattattttggaaggtgccgaaacatcatctactggaggcagacgtgccaagctagtcagatttaataaagattatggatttgttgttagtgtcaaagtagaagaggaacaacttctttttgcgttgactgatttaaatgcagaaatcattgaaaatacttctataccattttcttcagagaaaaaaccagaagaagcaattgagttgattgctaaaaatgtgaaaaagatgtgtggaaacagagatatgaaccatttgctaggagttggaattgcgatttccggtctagttaatcgtaaaaaaggaacagttatccgctctactatgttagggtgggaaaatgtcgctttagaagcaatgctacatgctcactttccagatattccagtgtatgtagataaaaatataaactgctacacacttgcagaactgtggttaggtgaagggaaacaatcaaataattttgccacagtttccgttggagctggacttggtttatctgttgttattaatcgccaaatttattacggtgcacaaggtggagctggtgaattcggacatacaacgattcagccaggtggatacaaatgtcactgtggtcaaaaaggatgcttagaaatgtacgcatccgaattttatttccgaaatcgtggcgaagaattaaaagaagcatatcccacatcagaattaaatgattttcattttgataaagtggcgaaaagtgctcgagctggagacgaaatggcgacggaacttatgggtaaaatgggtgaatatttaggatacgggattcgaaatatcatcaatactttcaacccagaaaaagttatcattgtcggtgaaggtttgcatcatagagacttattcttaactaaaattgatgaaattgcttcacaaaactttttttcaggggctggctttgaaacggaaattactacaacttctttagaggatcctgcatggttacaaggtgcggctttactagtcattcaccaattattccaagtgccaatctatgaagaagaacaaactttactacgttaa

SEQ ID NO: 24310 - DNA, 645 bp, Listeria monocytogenes
atgagagctgaactagctgtatattttatcgctggaacgcaagatattgtgcgcggaacgttgccaagtgtgctagaagaagcactgaaaggcggaattacgtgtttccaatatcgcgaaaaaggagctggctcactccaaactgcctccgaaagaaaagaaatggcgctagaatgccaaaaattatgcgcaaaataccaagttcccttcattattaacgatgatgtcgccttagccctcgaaatcggcgcggacggtatccatgtcgggcaaaccgacgaagcaattcgccaagttatcgcgagttgctccggcaaaatgaaaatcggtctttcggttcattcagttagtgaagcaaaagaagctgaacgacttggcgcggtggattacatcggcgtaggaccaatttttccaacgatatcaaaagcggatgcagagccagtgagtggaacggcaattttggaagaaattcgccgggctggaatcacaataccaattgtcggaattggcgggattaatgaaaccaattcagccgaggttctcacagcaggtgcggacggagtatcggtcatttcagcgattactcagtcggatgattgccactccgttatcaaacaattaaaaaacccaggctctccctcctaa

SEQ ID NO: 24311 - DNA, 369 bp, Listeria monocytogenes
atgattcaacaagaaagtcgtatgaaagtggctgataactctggtgctcgtgaagttttaactattaaagtactaggtggatcaggacgcaaaactgctaacattggcgatgttgtcgtgtgtaccgttaaacaagcaacaccaggcggcgttgtcaaaaaaggtgaagttgttaaagcagtaatcgttcgtactaagagtggagcacgtcgtcaagacggttcttacatcaagtttgatgaaaatgcatgtgtcattatccgtgacgataaaagtcctcgtggaacacgtatttttggacctgttgctcgcgaacttcgtgaaaacaactttatgaagatcgtttctttagctccagaagttctttaa

SEQ ID NO: 24312 - DNA, 357 bp, Listeria monocytogenes
atgattaaaggaattggtctagatatgattgatttagaacgtgtaaaacaagtcgtggaaaagaatccgcgctttatcgaacgtgttttaacagaaaaagaaattaagcaatttgaaaaatacgaaggtaatcgcaaaatcgaatttttagctgggcgttttgcagcaaaagaagcatatgctaaggcgaatggaactggttttggcaaacatttaagttttacggatgtcgaaattttgcaagtagaagatggtcgcccccatgttactttaccagtcaaatcaggcgaaaacgtttttgttagcatcacccacacagctagatcagccgcagctcaagtgataattgaaatttag

SEQ ID NO: 24313 - DNA, 1167 bp, Listeria monocytogenes
gtggatatgaaaaaagtgaatcctaatttgacacttttagcgctagcaattagtgcgtttgggattggttcaacagaatttattagtgtggggctacttccactgatttcttctagtatgggtgtgtcgattagcacggctggtttgacagtatcgatttatgcgcttggtgtaatggtcggagcgccggttttaacaaccgtgacggcgaagatgaatcgtaaaaatctgttattattagtaatgctcgtgtttctaataggtaatcttgtctctgcatttgctgtaagttttggaatgctccttactgggcgcgtagttgcggcgtttgcgcacggggtgtttatgtcgattgcttctgttatcgcagccgatgtggttcatccgagtaaacgggctagtgcaattgcggtgatgtttacagggctgactgtggcgactgtgacaggggtaccacttgggacgtttatcggtcaactatttggctggcggatgtcattcctgtttattgttgcgattggtgtgatagcaattattgctaattttttccttgtgccgaaaaacttatctaatggaaaaagtatttcgtttaaatcgattgggcaattgttagttaataaaaaaatcgtgatggtgttactcatgacggcgtttggttatggtggtacttttgtggtttatacgtatttatcgccgatgtttagcggaatgggctattcgacaagtatgatagttattttactgattgtttatggtgtgatggttgcgattgggaatacgattggtgggcattttgcgaatgagcgtcctgccaaagcacttttcattatgtttagcttacaaggtgtgacgttgttgttgcttcaattcacttcaggaaatgccattttaggtttaatgactattatgctaatgggatttttcgcgtttatgaatgtgtctggtttgcaactttatgtggtgcaattagcagaacggtatttgccagaaacggttagcatggcttctgcgcttaatatttctgcgtttaatattggaatcgcactcggagcatttatcggtggattagtagcagaatatattggtttaagttatacaccaattgttggatttttgatggttttcatcgcaattattttaactttctatatgaaaaaagataaatag

SEQ ID NO: 24314 - DNA, 1203 bp, Listeria monocytogenes
atgacttatcaagcacctgacgaaaatggcttttacggaaaatttggcggtagatttgtaccagaaacattaatgaaagcagtgaaagaattagatgaggcgtaccaagcttccaaaacagatcctgcttttcaaaaagaattaaactattatttaaaagaatatgtgggccgagaaacaccactttattttgccgaacaactaacagcacatgcgggcggagcaaaaatttatttaaaacgcgaagatttaaatcatactggcgcacataaaatcaacaatactattggtcaagccttactcgcacgtcaaatgggcaaacaaaaagtagtggcagaaactggtgcgggtcaacacggcgtggcaacagcaactgttgcagcactttttaatatgaaatgtactatttttatgggagaagaagatgtaaaacgtcaatcactcaatgtatttagaatggaacttcttggtgcaaaagtagtgagcgtgaaagcaggaagcagaacattaaaagatgcagtaaatgaagcgcttaggttctgggttgcaaatgtggaagatacgcattacattatgggatctgttcttggaccacacccatttccagaaatcgttcgtgattaccaaagtgtaataggaatagaagcacgcaaacaacacttggaaaaagaaggtaagcttcctgatgcaattgtagcttgtgttggaggcgggagtaatgcgatgggcttattttatccatttgtagacgatgcttctgttcaaatgcacggtgtggaagcagctggtcacggattagagacagaattccacgcagcaaccatttccaaaggagaaattgggattttacacggagcgatgatggatgtattacaagatgagaatgggcaaattttggaagcattttcgatttctgctggcttagattatccgggtattggtccagagcatagctttttccgtgatttaggtcgcgcagcgtatcattctgttactgatgatgaagcagtcgaagcctttcaacttttatgtcgtacggaaggaattattccagcgctcgaaagttctcacgcaattagctatgcggttaaacttgcaagtaaaatgcgtccagaagaaagtatggttgtttgtttatctggtcgcggagacaaagacgttaaccaactaaaagaacgtttggagggacaaacaaatgactaa

SEQ ID NO: 24315 - DNA, 969 bp, Listeria monocytogenes
atgaaattaggcgtttttacaccattatttgctaatttatcattagaagaaatgttagataaagtgaaagcagcgggtcttgatgctgtagaaattggcacaggaggaaaccctgggaatcatcactgcccaacggacgaacttttggcaagcgaagcagcacgcaaagaatacttagaaaaatttactagccggggattaacgattagcgcatttagttgtcatgataatccaatctctccaaataaagaagaagcggcagcgtccgatgaaattttacgtaaatcaattaaactagcttcattaatgaatgttccggtagttaatacattttctggaacagctggtgatagtgatgatgccaaagcgccaaactggccggttattccatggccaactgtttatagcgatattaaaacgtggcagtgggaaacaaaattaattccttactggaaagaaattggtgaacttgcagcagccagtggcgttaaaattggtatcgaattgcacggcggtttcttatgccataccccatatactattttaaaattgcgggaagaaacaaatgattctattggagtcaatttagacccaagtcatttatggtggcaaggaatcgacccagttggcgctatcaaaatcttaggaaaagctggagcaatccatcatttccatgccaaagatacgtatttagatcaagataatatcaatatgtacggtctaacggatatgcaaccatatggcgatgtacaaacgagaagttggacattccgttcggtagcttgtggtcatagtttaaccgagtggtcggatattatgagcgcgcttagaacatacggttatgattatgtagtcagcattgaacacgaagatccattaatgtcgattgatgaaggcttcgaccgtgctgttacaaacttacaatcgattttaattaaagataaaccactggatatgtggtgggcttaa

SEQ ID NO: 24316 - DNA, 816 bp, Listeria monocytogenes
ttgttagtagaagagctaaaaacaaagtatcttgtcaaagatatctgtcagatactacaagtacctttatctacctattatcgctggaaaaagaaagatttctcacagagctcattggagaaaaaaatagggcagttatgtaaagcatatcagttcacttatggttatcgaaaaatcgccgcattaatgaaacaagaagaacaagttggcatcaataaagtacagcgtattatgcaaaaatatcagtggcaatgtcaggtaaaagtaaaaaagaaaaatcgaccaggctccgcctactatcagacagaaaaccacttaaatcgaaactttcaagctagtcagccgctggaaaaattaactaccgatatcacctacctttatttcggagactgccgtttatatttatcaagcattatggatttgtataatggagaaatcgttgcctactccattggcgaaaaacaagacacagaattagtgctagatacattaaatcagttgtcccttccagaaggaagtttacttcatagcgatcaaggttcggtgtacacatcttatgaatattatcagtgctgtaaaaagaaaaacgttatccgcagtatgtcccgaaaagggacacccgcagacaacgctcccatagaatgtttccattcctcgctaaagtgcgaaacattctaccataaaacagcgtataaatacgctaaatctattgtaatccaaatcgtaaaagattacattaaatattataacgaaaaacgaattcaacaaaaattaggctaccaatctcctattaatttcaggaaacaagcagcctaa

SEQ ID NO: 24317 - DNA, 675 bp, Listeria monocytogenes
atgactaaaaagatatgtatcgcgattgatgggccggctgcagctggaaaaagtacggtggcaaaaatcgttgcaaaaaaattgcgctttgtctatattgatacgggtgctatgtatcgtgcagtaacctatatcgctttaaaaaataacatcgcatatgaagacgaaaaagctatagcagctttactccaaaaaacagttattcgttttgaacctggcgaagtacaacaagtatttgtaggttcagaaaatgtcacagaagtgattcgctctatagaagtgaccaatcatgtatctatcgttgccgcacacccatctatccgtgaagcacttcaagaacgccaacaagtttttgctacagaaggcggaattgtaatggatggtcgtgatatcggtacagcagttcttcctaacgctgaactaaaaatatttttacttgcaagtgtagaagaacgagcagaacgtcgctataaagagaacatggcaaaaggttttactggagatctagaccaactcaaaaaagaaattgaagagcgagatcatttagattatacaagaacacactcaccgttaaaaaaagcggacgatgcaattgaagtggatacaacatcaatgtcgattgatcaagtagccaataaaattctttcactagcagaactaaaaattaataattag

SEQ ID NO: 24318 - DNA, 1047 bp, Listeria monocytogenes
atgaaagctttaaaattatatggaaaaagagatttgcgttatgaagaagcggatatgccaacaattgaagagccagatgatgttattttgaaagtgaaaacagttgggatttgtggttcagatatttcgagatacagtaaacttggtccgtatgtaccaggaatggtatggggtcatgaattttcaggggaagttattgaagttggtagtgaggttacagatattgagattggcgatagggctgccggatgcccagcactctattgtggagagtgtgaatactgtaaaaaaggcgaattcgcccgctgtcggaagctaacagtaatcggagcaagacatcccggagcctatgctgagtatatcaaacttccagcagaaaatgtagtgaaaataccaaacgaattagattatgaggctgctgcacttgtcgagccttccgcagtggtcgttcatggattttatcatacgaaattacaagcaggcgatgatgtcgttgttgtcggaagcggaaatatcggtttgctagcaattcaatgggcgaaagtctttggggcaagaagagtgatagcgattgatgtagacgataaaaagctagcacttgcgaaagaagtcggagcagacgtagttattaactctttaaaagaagatcctttagaagtagtcgcagcacatacagatggtctaaacgctgatttagttgtagaagctgcgggatcacctattacatctgcacaagtttttgcctatgcgaaaaaaggtggaggcgtagtgttcctcggaattccatacgccgatgtaacaatcgaacgtttttactttgaaaaaattgttcggagcgagcttactgtatggggttcatggaatgcgatttctgcaccgtttccaggaaaagagtggcaaacaaccattcacttcttagccaataaacaaatcaacattgagccaatgattacacatcgtctttcacttgctgaaggaccagaagtttttgagcgaatctatgaaagaaatgaatttttcgggaaagtattatttttcccagaatga

SEQ ID NO: 24319 - DNA, 360 bp, Listeria monocytogenes
atgccacgcgtaaaaggcggaacagtaacacgcaaacgtcgtaaaaagatagttaaattagccaaagggtattacggctctaaacatttattattcaaagtagctaaccaagcggtaatgaaatcttaccaatatgcttatagagatcgtcgtcaaaagaaacgtgatttccgtagattatggatcgcacgtatcaatgcggcagctcgtatgcaagatctttcttacagcaaattaatgcacggcttaaaattagctggtattgatattaaccgtaaaatgcttgcagacttagcagttaatgatatcgcatcattcaacacacttgctgattcagcaaaaaaagcattagctaaataa

SEQ ID NO: 24320 - DNA, 294 bp, Listeria monocytogenes
ttgtcaaatatatcaaaagaaacagtagaaaaagtagcaaatcttgccaaactagaagtatcagaaacagaagcaactgctttcgctggtcagcttggtaaaattattgagctagtagagcaattaaatactttagatacaacgaatgtagaacctaccagccatgcaatcgacgtatcaaacgttttacgtgaagatgtagcaacaaaagggttagatcgtaaagaagtactaaaaaatgccccagatgagcaagacggcatgttcaaagtaccgacaattatggaacaataa

SEQ ID NO: 24321 - DNA, 192 bp, Listeria monocytogenes
atgaaagctaatgatatccgtgatttatccactaccgaaatccaagatcaagaaaaagctttgaaagaagagctcttcaacctgcgctttcaattagctactggtcaattagaaaacaccgcacgtattcgtgaggttcgtaaagcaattgcccgtatgaaaacaatcgttcgagaaagagaacttgcttaa

SEQ ID NO: 24322 - DNA, 2355 bp, Listeria monocytogenes
gtgaaagtgaacaaatttttcaagaaaactacacatgttttactcgtagcagggctcacaatcggacttacagcaccattcaccgggacaacagcacaagcagcagcggataccgttcccattcagattttgggaataaatgatttccacggagcgcttgaaacagcctctaaagatgcatcaggctcaccaattggcggagcagattacttagctaccaatttggacaatgccactaactcatttttacaggcaaatcctggggcgacaactgacaatgctatccgtgttcaagcgggcgacatggtcggcgcaagtccagcagtatcaggtttacttcaagacgagccaacgatgaaagttctccaaaaaatgaatttcgaagtcggcacattaggtaaccatgagtttgatgaaggattaccagaatacaaacgaattttggacggagtttctacaaacaaattcggaccaatcgtagaagcttatccacgcgttaaaagtgacatgaaaatcgtcgcagctaacgttgtcaacaaaggaacaaacacagtcgcagaaggctttttaccatactatgtaaaagaaattgatggcgtcaaagttggcttcatcggtatcgttacaacagaaattcctaacttagttcttgcgaatcatattaaagactacgatttccttgacgaagcagaaacaatcgtcaaatactctgctgaacttagaggccaaggcgttaacgcaatcgttgttttatctcacgttcccgcactttctactggaaatccaaatactggaacaaaacaagatgtagctggcgaagctgccaatatgatgacaaaagcaaacgaattagacccaaataactcggtcgatttagtccttgctggtcacaatcaccaatacacaaatggattagttggaaaaactcgtatcgtccaaagttacaacaatggtaaagctttttcagatgtaactggcgaactcgataaaacaactggcgatttcgtttcaccacctgacgctaaaattacatacaacacgagaagcgtcacaccaaatgccgatattacagcagtaactgaagatgcgaaaagccgcattgaaggggttatcaacgaaactatcggactagcgaataaagacgttatttctcgtgacaccaatccagataacaaagcaattgatgataaagaatcagagcttggtaatatgattacggatgcgcaacgttacatggcaaataaagccggcgccgatgtcgactttgctatgactaacaacggcggaattcgttctgaccttactactcgtcttgcaaatggccaaaacgaaatcacatggggcgcggctcaagctgttcaaccatttggtaacattcttcaagtagtcgaaatgactggtgctgatattttggaagctctaaaccaacaatatttaagcaaccaaacttacttcctacaaatttctggactaaaatacactttcacagatacagatgacttggatcacgcgtacaaagttgcgagcgttacaacagaagacggaactcctttaaaaactgaccaaaaatacaaagtcgtaatcaatgacttcctatttggcggcggcgacggattctcagccttcaaaaaagcaaatctagtaactgcaatcgacccagatactgaaacattcatcaactacatcaaagaccaaaaagctgctggaaaagtcattacagctcaaaaagaaggacgtaaagtctacaaatcccaagctgaaatcgacaaagaaaccaaagatgcagctatcaaagccatcaaagaagcaacaaaaatcaacaaactagccgaaaaagacaaaactctaactggaactactttaccaggagctacagtttccgttcaaaaggcaactgctaacgcaagaatggcgcttgctgccggacctaacgcaacagctgacgcaaatggcaagttttccgtagatgtaacatctttaaaccttaaaaaaggcgaccaaatcacaacaactatcactgacccgaacggatacagcaccactttccaagcaacggttcaagctgcggcaacgactcctccagataatggaaacggcggcacggacaatggtaatggaaacggaaataacggaggaacggatggtaatggtggaacaaacaacggtaacggatccggcacaaacggcggaactactactaccgaagatcctacaactacgacatcaaacacatcaacaacaggaacttcttccaatacttccttaccaacaactggtgatacagctggattggcaactgtatttggtgttattttaacaactactgcgctttatgttttgcggaagagaagttaa

SEQ ID NO: 24323 - DNA, 1353 bp, Listeria monocytogenes
atggagcaagataaatatttgacggtagcagcaataaccaaatatatcgaaaaaaagtttgaagtagatccctacatgaagcaagtttttgtgcgtggtgaaatttcaaacttaaaacaaccagcaagtggacatctatattttacggtaaaagatgaatttgcaatgcttcgttctgtcatgtttcataaagcagttcaaaaaatcggttttgttccagaagacggcatgaatgtccttgtcacaggaagaattggtgtttttacaaaagctgggcgctatcagttttatgcagaacatatggaaccggatggtgtcggagctctgtatattcaattagagcaattgaaagcacaattagaaaaggaagggctttttgcggaaacgcataaaaaagtgcttccttctttcccgtccaaagtcgctgtcgttacatccaaaactggtgcggctgttcgtgatattctaaccaccattcatcgaagaatgccttctgtggaagtgattgtttatccaactattgttcaaggggaaaaagcagctcaaaaaattgtcgaaaacattggcaagattaatcagcggaacgatattgatgtcatgattattgggcgtggtggtggctcgcttgaagaactatgggcatttaatgaagaacccgttgttcgagcagtatatgattcggatgtgccggtaatttctgctgtcggacatgaaactgattttgcattaagcgatttttctgcagatgtacgagctgcaacgccaactgcggcggcagaacttgctgtcccagattatcgcgatttagaagaacgattagcagaacgtaaataccgtttgctcgcggttaccagacaagcattagaaagaaaagaacggtcactagagcaacttaaacaacacttgattctaaatggtccgaaacatcaattagaacagcaaatggaacgtacagattatttttccgaacgattaaataatgctttttctaaacaaatatttgttaagcaaacagcttttgaccggttaaatgatcggctacattattaccatccgaacaaagaaattgaacttcaaaaagaacaaatgacattgcaccttcaagcgttggataaagcgatgaaacaacttttgaaagacaaacaacaatctttctttaggcaagtagatgcgctagaacatctgagccctctttctttattgaaacgaggatttggtgtaacgtataaagagaatacactggtcaaatccgtacaggagcttgaagtcggtgataatattcaagtgaaaatgcaaggcggacatatagatgcactcattaccgcgaaggaggaagatataagtggcaactaa

SEQ ID NO: 24324 - DNA, 1389 bp, Listeria monocytogenes
atggggaaaacactttttgataaactttggaaccgtcatgtcatttatggcaaagaaggtgaaccgcaattattatacgttgatcttcatttgattcatgaagttacttctcctcaagcgtttgaaggactaagactggaaaatcggccactgcgcagaccagataaaacgttcgcgacaatggatcataacgttccaaccgaagatattttcaacatccaagaccttgttgctaaaaaacaaattgaagcactgcaaaccaactgcgcggaattcggcgtaacgctagctgacatgggcagtgaccgtcaaggaatcgtgcatatggttggaccagaaactggactaacgcaacctggcaaagtgattgtttgtggggattctcatacggcgacacatggtgcttttggagcgattggctttgggattggttctagtgaagtagagcatgtttttgcgactcaaacaatttggcaacaaaagccaaaatcaatgggcattgaaattaacggcaaacttccaaaaggtgtatatgcgaaagatattattttgcatttgattgccacgtatggtgttgcttttggaactggttatgccgtcgagtattatggtgaaactattcgtaatatgtcgatggaagaacggatgacaatttgcaatatggcaattgaaggcggcgcaaaaatgggcatgatggcgccagatgaaactacttttgaatatgtgcgcggtcgtgaatacgctcctactgatatggataaagcaattagcgactggaaaacgctccaaactgactccgatgcagaatacgatcttcatatcaaaatggatgcgagtattttggaaccatatgtcacttggggaacaaatcccgaaatgggtgttcctttttcgaaagcatttccggaaattaaagatatgaactatgagcgtgcttatgaatatatggggctaaaacctggacaaacggcggaacaaatcgagcttggctatgtgtttattggttcttgtacgaatgccaggctttctgacttagaagaagccgctcgtatcgtcaaaggaaataaagtgaaaaataatattcgcgcactcgttgtccctggttcccgccaagttcgtaatgcggcagaatctattggactagataaaatttttatagaagctggttttgaatggcgtgaacctggttgttcgatgtgtctaggaatgaatcctgaccaagtaccggacggcgttcactgtgcctctacttcgaatcgtaattttgaaggacggcaaggtaaaggcgcccgtactcatctcgtttcaccagcaatggctgcggccgcggcaatcaatggacactttatcgatattcgaaaggtggcggttatcagtggaggaaattaa

SEQ ID NO: 24325 - DNA, 618 bp, Listeria monocytogenes
gtgatagtaaacgcattttataatgaaaaaggggtaggggacactctactaattgaaactggtgaagtaacatttgaaaatcgcgaatgggaacgtcgtggggatgtagcgcgaattttcgatcgagaaacaaaagaagtagctggcttcaatatttttaacagctcaaaatattttgatattactgcaaatggtaaagtagaactaacggaagaattggttgcattaatgaatcgagtgatcgaaaaagctggatttgaaccagaaattgtggctgatttatctcctaaatttgtcgttggttatgttgaatcgaaagaaaaacatcctaatgcagataagttaaatgtatgtaaaatcaatgtaggggataaagttttgcaaattgtatgcggtgcaccaaatattgatgttggacaaaaagtagtagtagcgaaaattggtgcggttatgccgagtggtttaatcatcaaaccttctaatttgcgaggcgaggattctttcggcatggtttgtgctgcgagagagttggcgattcctgatgcgcctacggaaaaggggattatggttctggaagaatcagctacaatcggagaagcttttcctgttaatttctaa

SEQ ID NO: 24326 - DNA, 795 bp, Listeria monocytogenes
atgaaatatatgattacttccaaaggagacgaaaaatccgatttgctgcgactaaatatgatcgcaggttttggggaatatgacatggaatatgatgatgttgagcccgaaattgttatttctattggtggagatggaacatttctgtctgcttttcatcaatacgaggagcgcttggatgaaattgcctttatcggaattcatacagggcatcttggcttttacgcggattggagaccagctgaggctgataaattggttaaacttttagcaaaaggagaatatcagaaagtttcctatccccttctcaaaacaaccgtgaaatatgggattggcaaaaaagaagcgacatatttagcgcttaatgaatcaactgtaaaaagttcaggaggcccttttgtagttgatgttgtgattaacgatattcattttgagcgatttcgtggagatggcctttgtatgtcaacacctagtgggacgacggcatacaataaatcgctaggtggggcacttatgcatccttctattgaagcaatgcagttaacagagatggcatcgattaataatcgtgtgtaccggacaatcggtagcccactagtttttccgaaacatcatgttgttagtttgcaaccggttaatgacaaggactttcaaatttctgtagaccatttgagcattttgcatcgggatgtacaagaaattcggtatgaagtatctgcaaaaaaaattcactttgccagatttaggtcatttccattttggcgtcgtgtacacgattcgtttattgaagattaa

SEQ ID NO: 24327 - DNA, 855 bp, Listeria monocytogenes
atgcctatcgttaacatgacagacatgctgaaaaaagcattagctggaaaatatgctgttggtcaattcaacatcaacaaccttgaatggactcaagctattttgaaagctgcagaagcagaaaaagcaccagttattttaggagtttctgaaggagctgctaaatacatgggaggattcaaaacagttgtaaaaatgactgaaggacttgtagaagacctgaaaatcactgtacctgttgcgattcaccttgatcatggttcaagctttgattcttgtaaagcggctatcgatgcaggattctcttctgtaatgatcgacggctctcaccatccaatcgacgaaaacattgcaatgactaaacaagttgttgattatgcgcacgctaaaggcgtatctgttgaagctgaaattggaactgttggtggagacgaagacggagttactggtggaatcaactatgctgatccacaagaatgtttacgtgtagttaaagaagctaacattgatgcacttgctgcagcattaggttctgttcacggtccttaccacggcgaacctgttcttggttttgacgaaatgaaagaaatctccgaacttacaggtgctccacttgtacttcacggtggttctggaattcctgaacaccaaatcaaaaaagcaattgaactaggtcacagcaaaatcaacgtaaacactgaatgccaaatcgtttggactgcagctgttcgcgaaaaattagctactgatgacaaagtttatgatccacgtaaagtaatcggccctggtgtggacgcgattatcaaaactgtaacagaaaaaattcaagagtttggttctaacggtaaagcgtaa

SEQ ID NO: 24328 - DNA, 828 bp, Listeria monocytogenes
ttgaaaaagaaaaatattattttaattagcgttttacttggtgctttactattacttacaggttgtagtatggacccttcacaaaatacagatgggtttttcagcacttatttgatccaaccatttactagttttattatgttcgttgcaaagtttgttggaggtaattacgggattgcgattattattacaacgttacttatccgtgcactaattatgccactaaacttgcgtactgctaaagctcaaatgggaatgcaatccaaaatggccgttgccaaaccagaaattgatgaaattcaagctcggttaaaacgtgctacatcgaaagaagaacaagcaactattcaaaaagaaatgatggctgtttattccaagtataatatcaatccaatgcaaatgggttgtttaccgttgcttattcaaatgccgatattgatggctttctattatgctattcgcggatcttccgaaattgctagccacacatttttatggtttaacttaggctcaccggatatggtgcttgcaattatcgccggacttgtctacttagcacaatactttgtttccatgattggttattcgcccgaacaaaagaaacaaatgaaaattatcggtttaatgtctcctattatgattttattcgtttccttcacagccccttctgcactagcgttatactgggctgtcggcggactcttcttagcgggtcaaaccttattaaccaaaaaactttatatgaataaacacccagaaattaaagtaatggaacaagaagaaaaagaattcgagcaaatcgtagaagaacaaaagaaagaaaaataa

SEQ ID NO: 24329 - DNA, 1602 bp, Listeria monocytogenes
atgttaactgtaaataatgttggcttacgctacggcgataaaaagctatttgaagatgtttcgattaaatttttaccaggtaactgttatggtcttattggcgcaaatggtgctggtaaatcaacgttcctaaaagtgctttctggcgagcttgattcacaaagtggtaatgtgcatattggttcaggtgagcgtctagctgtccttcgccaagatcatttccagtatgatgatgaacttgtcctcaacacagtaattatgggacatgaacgtctatataaaattatggacgaaaaaaatgccatttacatgaaagaagatttcagtgatgaagatggtatccgtgctgcagaactggaaggcgaatttgctgaattagatggttgggaagcggaatctgacgctgctgttttattaaacggcttaggtatccctactgacttacacggaaaactaatgaaagatttaactggtggagaaaaagtgaaagtgcttcttgcacaagctttattcggtaaaccagatatcctacttctggatgagcctactaaccaccttgacatccgtgcgattcattggttagaagaatttttaattaactttgataatactgttatcgttgtatcccatgaccgtcacttcttaaataaagtatgtacgcacattgcggatcttgatttcagcaaaattaaattatatgtcggaaactatgatttctggtatgaatcaagccaattagctcaaacaatgatgggcgatcgtaataagaaaaaagaagaaaaaatgaaagaattacaagactttattgctcgtttcagtgcgaatgcatcgaaatccaaacaagcaacaagccgtaaaaaaatgctcgaaaaaatcacgctggaagatattcaaccttctagtcgtcgttaccctttcattcagttcaaaccggatcgtgaagttggaaatgacttattgacagtgacaaatttgtctaaaacaattgatggcgtgaagattcttgataatctttctttctcgattaatcgtaacgacaaagttgcattagttggcgacgatgaagttgctaaaacggttcttttccaaatccttgcgggcgaaatggaacctgatgaaggtagctataaatggggtattacaacaagtcaaagctatttccctaaagataactcagagttctttgaggaaaacgacatgagtcttgtagaatggttacgtcaattctctccagaagatgatagtgaagcattcttacgcggattccttggtcgtatgctatttagtggcgatgaagtacttaaaaaagtacgcgtcttatctggtggagaaaaagttcgttgtatgttatccaaaatgatgctttcaggttctaacgttcttttactagatgaacctactaaccacttggacttagaatccatcacagcattaaataacggcttggaagcatttaaaggtgcaataatctttgcttctcacgatcatcagttattacaaacaattgcaactcgcatcattaacttatcaaaagaccaattttacaataaagaaatttcttatgatgagtatctaaaagaagtaatgaacgtagcagaataa

SEQ ID NO: 24330 - DNA, 399 bp, Listeria monocytogenes
atggtgatgacagatccaattgcagattttctaactcgcattcgtaatgcaaacatggttaaacatgataaattagaactgcctgcatccaaaatcaaaaaagaaattgctgaaatattgaagcgtgaaggttttatccgtgacgttgagtatattgaagatgacaatgctggaacaatccgtgttttcttaaaatatggagcgactggcgaacgtgtaatcactggtttgaaacgtattagtaagccaggtttgcgtgtatatgcaaaatcaactgaggtgcctaaagtacttaacggtctaggtatcgcaatcgtgtctacttcccaaggtgttttaaccgacaaagaagcccgtgctaaacaagtcggcggagaagtactagcatacgtttggtaa

SEQ ID NO: 24331 - DNA, 1668 bp, Listeria monocytogenes
ttgacaataaaaaaagcgaaaaacataaaaatcattccactcggcggtgtcgatgaaagtggcaaaaatttatatgtagtagaaatagacgaagatatctttatattagatgcgggcttaatgttccccgaaaatgaattactaggaattgatattgtcattcctgatttcaaatatttagaagaaaataaagatcgtgtaaaagctatttttctaacacacggtcacgaagatgccattggtgcattgccatacttacttcaaaaaatcaaagcgcctgtttacgggacagaattaacgattgctctagcaaaatcagcgcttaaagagcaccgcaaactacgcttcaagaatttccatgtcgttaacgaagaaacaacattgtccttttcaaaaattgatgtttcctttttccggacaacacatactattcctgattctgtgggtattgtccttgaaacaagcgaaggatccattgtttatacaggggatttcaaattcgatcaatcagcgaaagacggctacgcttctgatttaagccatattgcagaatttggcgaaaagggtgtactagccttgctttcggatagttcagaggctgagcaccctggaacaacgtctagcgatagtttaattgaagaagagattagacatgctttccgaatggcagatggtagaattatcgttgcttgtgtagcttctaatttaattcgcttacaacaagtactcgatgcatccgttgcaaccaaacgtaaagtcgctattgttggtaaagaactagagcgtgttttcgaaattgctggcagtttaggtaaaatcgtcattgaagaagacttaattgttccgttaaaagaacttaaaaaatatagcgatgatgaaattacaattattgaaacaggtaatctaggagaaccaattcaatcattacaattaatgactaaaggaaaccatccgcaacttaacatcaaacctggcgatactgtttacattacgactacgccatcaccatctcttgaaacaatgatggcgaaaacaatggatatgctctataaagcaggtgcgaaagtgctaactatgagtaacaatctcttcatctctggtcatgcaagccaagaagatttaaaattaatgattaacttattaaaaccaagatattttgttccagttcacggagaatatcgcatgttaatcagccatgctaaattagctcatgaagttggcatggcaaaatcagaagtatttatcgttggtaaaggcgaaattttagaatataaaaatgataaaatgacggccggaaatcgcgtttattctggtaatactttaattgatggattaggtgttggtgatgtaggaaacatcgtgctacgcgaccgtaaattactctcagaagacggaattttcatcgttgtagtaacacttaatcgtaaatcaaaaaccattacttcaggaccagaaatcatttcacgcggctttatctacgtgcgcgaatcagaacatttgattgaagaatcttccaaagttgtcacaaaaattgttgaaaaaaatcttcaagaaaccggctttgaatgggcgaaattaaaacaagacattcgcgaccaattaaatcgctacttatttgaacaaacaaaacgacgtccaatgattttaccaattattatggaagtctag

SEQ ID NO: 24332 - DNA, 408 bp, Listeria monocytogenes
gtgaaaagatctattcatgtgcaggcatttgtatataacgaaaagaaagacgagatactagtggtgagagatcgcaatttgacatgggcatttccagggggacatgtggaaacaaaccaaacaatggaagaagcgcttgcaagcaaagtgaaagagcaaaccaatattgacatagaaatagaatctattttacactgcaaagagcgccgtgctacatgggagcatgtttgtacattcgtttttcgtgcaaaacctgttggtaatgcacttcttgcttccaacgatgacaatgtgtttcgagtaaagtggatacctatcccgctcgcagatgatttattagctgtagaccaattatcattaaatgaactagtcagaagcgagggagtcttatatgaaaactatacctga

SEQ ID NO: 24333 - DNA, 1413 bp, Listeria monocytogenes
atgacagaaattaattggcaaaaagaagtggaagcacgcaaagatgatttcctagaagatttaaaagggcttcttcgcattccaagtgttcgcgatgacagtaaaaaaacagaagatgcgccgtttggaccggacgtaaaacgcgcactcgattatatgatggagcttggtaaaaaagacggcttcacagcgaaagaagttggaaacgtagcgggacaccttgaatacggccaaggcgaggagctagttggcgttttagggcatgtggatgtagtgccagttggtgacggctggacaaacggaccattcgaaccaactttacgcgacggtaaattatatgctcgtggagttgcggacgataaaggcccaacaatcgctggttactatgcactaaaaattattaaagaactaggattaccactttctcgccgagttagaattattattggttctgatgaggaaagcggtatgagttgtgtggagcgttattttgaaacagaagagcaaccaacgcttggttttgttcctgatgcagaatttccaatcattcacgcggaaaaaggtatctcagaactagatgtatcatttaaagacggtgaagcaggcggggaagcagcattccgtttacttagcgtagaatcaggcgaacgctacaacatggttccagatcacgcaacagctattttagaagatgtaaaagactttgataaagtagcgagtgccttcaaaaccttcctagcaaatcatccagtagaaggaacactagaagaaaatggcaagtccgttaaaattaatattgtcggcaaatctgcccatgcaatggaaccaaataacggtgtgaacgctggtctacatttagtcgctttccttggtaaattcaagctgactggagcagcgaatgatttcgtaacatttggtcgtgactatctgtttggtgattctcgtgctgttaaactaggcattagctatgaagatgcagaaagcggcgaactaacaatgaacgttggagttatccgttatgatgttgcagaaggtggcaaatatggacttaatttccgttatccagttactgctagcatggacaaacttaaaaataaaatgcaaacagtcgtatatgagtataatgcgcaatatacacattatgaagattccaaaccacttttcgtaccaaaagatcacccacttattcaagttttacaagaagtatatacaaaacaaacaggtgaagaggctactttactagcaataggtggcggaacttatgcacgtcatatggagactggcgtagcgttcggagcgctattcccaggccgtgaagacacgatgcaccaaaaagacgaattcagctattttgatgatttgttaaaagctacagcaatttacgcagaagcgctttacaaattagcgaagtaa

SEQ ID NO: 24334 - DNA, 291 bp, Listeria monocytogenes
atgttaaaatttgatattcaacattttgcgcacaaaaagggtggcggttcgacttctaacggacgtgactctgaatcaaaacgtttaggtgcaaaacgtgcggacggacaatttgttactggtggatctatcctttaccgtcaacgtggtactaaaatctatccaggaactaacgtaggacgtggaggcgatgatactttattcgctaaaactgatggcgttgtacgtttcgaacgtatgggacgcgacaagaaaaaagttagcgtttatcctgaagtacaagaagcttaa

SEQ ID NO: 24335 - DNA, 1254 bp, Listeria monocytogenes
atgaaaaaagtattgttagcaattcttagtatggtgttgttgctcagtttagcggcttgtggtggaagttcagacagtagtaaggataagaacggaaaagaagaaattgttatgtggggctcttggtcaggagatcaaattaaacagttagaaaaacaaatcgatagctataataagtcacaagataaatataaagtaaaatatgtaatgcaagaaaatgtagaagaaaaattattaacaggaattgcaggtggcgaactccctgatattattatgtgggatcgctatcaaacagctctttatgcaccaaaaggagtgcttgaaccgctagataaacttgtcaaagaagacaacttgaagatggatgatttttatgaagaatcagtgaaagaaatgacctatagtgataaattatatggtttaccactattaaatgataatcgaattctattttataataaaaaattattacaagaagctggcgtaaaaccaccaactacgtgggatgaattagcaactgctgcgcaaaaaacaacgaagtgggatgggaataaaatgacgcaagcaggaatgtcgctccaagatgttgggttgtttaacttatatttaatgcaggcgggtggcgaactagtaacttctgacaataaagaaacggcattcaattcagaacaaggcttagaagtactaaattactgggataaaatgcaaaatgatttaaaagtgtaccaacgtggttttgatgatggctccgatgcttttgcagctggaaaagaagccatgacatacaacggtccgtgggctttagcagattataataaagtagaagaccttgattatggtgtagtagaaccacctaaaggaccaaatggcgataaaggcgctatcatgggcggatttggattagtaatgcctaaacaagccgaacataaagatggcgcatgggactttatgaagtggtggacaacgaaaccagaaaatggcgtagaatttgccaaaattagtggttggttaccagcaaacaaaattgctgctgaagatgaatattttacgaaagacccaaattattctgtttttgtaaatacaatgaaatatgctaaaattcgtccaactgtggcaggctatgcagacgtagaaggtttagcaatgaaacctcaatttgagaaattcatgaatggtaatatttcagctgaaaaagctttatcacaagctgaaaaagaaggaaaccaaattttaaaagaagagagagataaataa

SEQ ID NO: 24336 - DNA, 930 bp, Listeria monocytogenes
atggcaagacatgcacaaaaaagaaaagcgcgcaaaggtagaatttttgttacaattcttgtagccttattaattttagttggtgtagttgcagttataggttatttccaatatcaatctagcttaaaagaagcgcaaaatgaaagtaaattaaaagattacaaattcaatggtgccaaagcagttggcgatgaaatcaatgtactacttatcggtagtgactctcgcggagaagaccaaggccgatcagacagcttgatgattgctcattataatacgaaaacaaatacgccaaagctggtatcaatcatgcgtgatacgtacgtagatattccaggacacggcaaaaacaaaatcaatgcagcttattcatacggcggtccagaacttgtacgccaaacgattaaagaaaactttggagtagacgtacaatattatgtagtagccaattttgaaggtttccctaagattgttgatacacttgcaccagaaggaatcaaaatcaacgcagagaaagatatgtcgaaaaatatcgatgcgaacattaaaaaaggcgaacaagtaatggatggtaagacactgttacaatatgctcgcttccgtaaagatgcagaaggagactttggtcgaattcgtcgtcagcaacaagtattagaagccttgaaagaacaagcgattgatgttggtgatgttggaaaaatccctgatgtcatcggaaaactacaaggctattcttccactaatatcccaacaggaacactaatgtccattggcgcagatttcctactagggaaaacagaaacaatggaaaaattcgccatcccagttgaagggaaatggcacaatgagcgaattgatggagcgggagcagtacttcgtttagatgatatggctgctaacgcaaaagcattacaagattttctaaagtaa

SEQ ID NO: 24337 - DNA, 459 bp, Listeria monocytogenes
atgggactatcgaataaatttaagtcattctttttcttagatgaagaagaggaatattatgaagaggaagtagcgagggaaccagaacctatgcaaaagaaaacgaagaaagaaaaaccaaataaaaatcgtttttatgcagtagaagaagatgatgcaaaggtggttagtatgcagggagctcagttttctagtcgtatggtacttgctgaaccgcgtgtgtatgctgaagcacaagaacttgcggattatttgaaagaatataaatctgtcgttgtgaacttgcaacgtattagccatgatcaagcgacacgtattgtcgatttcttgagcggtacagtgtatgcattgggtggagatattcaacgcgttggcaataatattttcttatgtactccagacaatgtggaagtggatggctctatttccgaaatgctcgatgaacaaaactttatgtga

SEQ ID NO: 24338 - DNA, 1263 bp, Listeria monocytogenes
atgggacaagaaacagaaattaataaacgatatcaagtggcgaaagaacgttatcaagcaattggagttgatacggaaaaagcgcttaaaacactgaaagacattaaaatttcgatgcactgctggcaaggcgatgatgttaaaggtttcttaaatccagacggcgaacttacaggcggaatcatggcgaccgggaattatccgggtgcggctcatactcctaagcaattacgccaagatttggaaaaagcttattcacttattcctggaaaacataaacttaacttacacgcaatttacgtagatacagatgaaaaagtagatttaaatgaaattgaacctaagcatttcactccatgggtagagtgggcgaaagaacaaggtttgggtcttgatttcaacccaactttcttttcacatccaatgtttaaagacaattacactttagcttcaccagataaagaagttcgcgatttttggatagagcacgggaaacgctcgcgaaaaatttctgagtactttgggaaagaacttggtcaaacaagtattaataatttttgggtgccggatggtataaaagattgtccgattgatcgctacaccccgagaaaacgtttaatggaagctttagatgaagtttttgcagaaaaattagatgaaaaatatacccaagaagctgtagaaagtaagctgtttggtctaggagcagaggcttatactgtcggttcgcatgaattttatatgggttacggaattacgcgggataaattgatttgcttggatgcgggacatttccatccaactgaagtcatttctaataaattatcttctttggcacttttcagtaaaggcgtcatgttacatgtgagtcgtccagtccgctgggatagtgaccatgtggtgattatggatgatgaattaattgaaattggtcgcgaattggtgcgcaatgatttacttgggattacaaatatcggtcttgatttcttcgacgcaacaatcaatcggattgctgcatgggttgttggaactagaaatacgcaaaaatcattacttaaagctcttttagaacctacagctgatttgaaaaaaatggaactggaaaatgattttacatctcgtatggcaattacagaagaattgaaagacttcccatttggcgatgtatggaactacttctgtgaaattaatggtgtcccagttggtttggactggttgaaggaagtaaaagcttatgaagaagatgtattactaaaaagatag

SEQ ID NO: 24339 - DNA, 1266 bp, Listeria monocytogenes
atggattatgatgtaattgttattggtggcgggccatctggacttatggcggctatcagtgcagcagagaaaaataaacgagtactattaattgaaaaaggaccgaaattgggacgtaaattaattatgtctggtggcggacgttgtaatgtaaccaatagacgaccagcagaagaaattattaaacatattcctggcaatggtcgctttttatatagtgcgtttcatgcctttgataatgaagatattattcgtttttttgaaagacttggcgtggcgttaaaagaggaagaccacggcagaatgtttcctgtatcgaatagcgcacgttcggttgctgaggcgatgattcagcggatggaaaagcttggcgtaaaaatttacatgcaaacagccgtgaaacaagtggattatgaggatggacatgtgaagggcgttacgctgaaagatggtcaagaaatttcagcaagcgcggtaattgttgcagttggtggtaaatctgttcctcggacaggttcgaccggagacggctacgcttgggcgaaaaaagcaggacataccatcacagaactttatccgacagaagtgccgattacgtccagtgagccttttattaaacaaaaagtgttacaaggaacgtcgcttcgtgatgtgtccctttctgttttaaatgcaaaagggaagccgattattacgcatcaaatggatatgattttcacgcattttggtgtgtcaggaccagcagcacttcgttgtagtatgttcgtccttcgtgaattgaagaaaacgggcgcaggtacggtgaagatgcgtcttgatttattcccgaatgtatccgctgcggaactttcgaaagatgtgtataaattgttagaagagaatccgaagaaagccttgaaaaattcgttaagttcgcttttacaagagaaaatgttattgtttttacttgaaaaagcagacttagaggaaacggctgaatataaacaagtaagtccgaaaaaaatcgagcaatttattcagttattaaaagattttactttcgaagtgaatggtacgcttgattttgaaaaagcgtttgtgactggtggcggggtttctgtaaaggaaattaaaccaaaagagatgcaatcgaagttgatggaaggattatttttctgcggggaaatactggatatcaatggttatacgggtggatataatattacttgtgcgctagtgactggacatacggcaggagcttacgcggcagaagtttcgaatgcataa

SEQ ID NO: 24340 - DNA, 1284 bp, Listeria monocytogenes
atgaagaataaattcatttttatcaccgttgtctccattttattgattgcagcaggtatttttacaaccatagcaatggcgaacgcgaattccgttgtcgtcaaagcagaagtcttaaatgtccgtagcggtcctggtttagcatatgatgtaacgagccaagccagaaaaaatgaagtactccgggtagtcggtgaagaaaatcaatggtacaaagttcagttagataacggaaatagcggttgggttgcaagctggttagtagaaaacactgatgtcagcgcagcaagtaacagtgtcgctatcgtttcttctgacggcggtttgaatgtacgtgaaaaaccaagtacctcaagtaaatcacttggattgctaaataatggtgatcaagtaacagttactagccaacaaaacggctgggcgcaaatccaatataacggaacaagcgcatgggttagctccgattacttaactattcgtgaatctgttacaaaagtagatgaaagtgagctacaaacagtaaccattcgcgatgactccactaatattagaaataagccaagtcgtgatggtgccgtcatcgaaaaagcaaattctggccaagggttcgctattcagggagtacagggtgactggtataaaatacgaacgacaagcggcgaagaaggttatgtagctaactgggtagtcgatgtttccgacaaaggtcaaacatccagccctcgaagcaaaacaaccaaattatccgaagcaaccatcgttattgaccccggacatggtggcaatgatccaggtgctaaaggggcaaatggcacaattgaaaaagaaatgactttaaagacagccaaacaattaaaacaaaaattagaagctagaggcgctaaagtaatcttaacgagaaacagtgataaatatgtctctctaaaaggaagaacaaatatagctgccgaaaataatgcagatgtgtttattagtattcattttgatagcttagaagacgcaagcaaaggtgtaagcggtcaaacaacttattattatgataatagtgataaatcgcttgctgaaagtattaatactacgctcgggaaagatctccctactactaatcgtggtgcaagagtcggcgattattatgtagtcagagaaaattcacaaccagcagtcctcttagaacttggttatctaagttccgcaaaagatgaaaataatattaattcagcatcttacagaagccaaattgctgaatcagtaacagacggcctatctaattacttctctaattaa

SEQ ID NO: 24341 - DNA, 624 bp, Listeria monocytogenes
atggcaacaacattagaggtccagaaaagagaaacaacgcaacattcagaagtaacgagattgcgtagtgaaggaaaagtacctggaattatttatggctacaaatcggaaaatgttccagtttccgttgattctttggaattaatcaaggcagttcgtgacaatggtcgtaacgccgtattttcagttactgtggacggcaagaaattaaacgttttattacatgaatatcaagtggacccgttaaaggatgttttagtacatgttgatttactagcggttgatatgaatgaagaagttgagacagatgttcgtgtggtattagttggggatgctcctggcgttaaagctggcggtgtacttcaacaaattatccatgatgtaaaagtttcagcaacaccagaaaaattaccagaaacaattgaattagacatttcttcattagaaatcggtgatgttttaacaacgaacgaccttccggaaaacaaagattatgttgtgcaagctgaagaagaagaaacggtagtaactgtatctgctcctcgtgctgaagaagaaccaacgactacggaagcacctgaaccagaagctgtacatggtaaagatgaagaacctgttgaataa

SEQ ID NO: 24342 - DNA, 762 bp, Listeria monocytogenes
ttgagcaaagtgattgcactagcaaaccaaaaaggtggggttggtaagacgacatcatctgtgaatttaagctcgagcctagcttttttaggtaagaaagtgttactagttgatattgacccacaaggtaacgcatcaagtggcgttggtgttaataaaggtgaaattgaacattgtatttatgatgtactagttgatgatgtagccattcaagatgtgttgcaaaagacagacttggataatttaaatgttattccagctacaattcaacttgcaggtgcagaagtagagctagttccagctatctctcgtgaaattagattgaaaaaagcaatcgactcaatccgtgatgattatgactatgtgattattgattgtccgccatcacttgggcttttgactttaaacgcattaacagcagcagattctgttttaattcctgttcaatgtgaatattatgcgctagaaggtttaagccagctattaaacacaattagaatcgttcaaaaacatctaaatgaggatttacaaattgaaggtgttttactaacaatgcttgatgcaagaacaaatctaggcattcaagtaatagaagaagtgaaaaaatacttccaaaacaaagtatttaatactattattccacggaatgtacgtctaagtgaagcgcctagtcatgggaaaccgattttgttatatgatgcaaaatcgaaaggtgctgaagtttatttagaattagcaaaggaagtggttgcacatggctaa

SEQ ID NO: 24343 - DNA, 975 bp, Listeria monocytogenes
atgaaaaatcaatttgatagacatcgtcgtctaagaaaaaccaaaacaatgcgtgatttagtaagagaaacagttttacatacagatgatttaatctatccgatttttgttaaagatggcaaagaaccaaaaacagaagtagtttctatgcctggggtttttcaatatcctttacatgaattagaagaagaaatgcgcgtagttgaaagtcttggtattaaagcggttattttatttggcattcctgccgaaaaagacgcagttggtacgcaagcttatcacgaccacggaattattcaagaagctacaagacttattaaaaaaagttttcctaaaattcttgtggtggctgacacttgtttatgtgaatttactgatcatggacattgtggtgttattgaaaacggtgaaattctcaatgacgaatcgcttgaattattgaaacaaacagctgtcagtcaagccgcagcaggagcggatatcattgctccatctaatatgatggatggttttgttcaagtcattcgcgaagggttagatgaagctgggttttatgatatcccaattatgtcttatgctgttaaatatgcttctgctttttacggaccgttccgtgatgctgctggcagtgcacctcaatttggtgataggaaatcttatcaaatggatcctgccaatcgtgaagaagctcttcgcgaagcaaagtcggatgaacaagaaggcgcagattttcttattgtaaaaccatcattatcttacttagatatcatgcgcgacgttaagaataataccaatttaccagtagttgcctacaatgttagtggtgaatatgcaatggtaaaagcagctgcgcaaaatggttggatagacgaagaaaaaattgttatagaaatgctaaccagtatgaaacgagcgggtgcaacacttatcattacttattttgcaaaagatgtatctaaatacttaaataaatag

SEQ ID NO: 24344 - DNA, 906 bp, Listeria monocytogenes
atgttaaaaatagcggtagtagggcttggcggcattgcacaaaaagcatatttgccagtttttgctgaaatggaaaatatcgaggtacatctttacacgagggatgcgcagaaattaaagcacttaagtgagaaatatcgttttgatcattatcatcaaagtattcattctatgattgagtctggcgtgaatgcagcgtttgttcattcatctacagcaagccacccagaagtaatccggacttttctagcaaatcatattccagtttatgtggataaaccaattgccgacaatttagccgaagtagaagaattaacacgcctagctgaagaacaaaatacgttacttatgactggctttaatcgccgttacgcgccaaaatatcaagaattaaaagccttaacagataccaacatgattattatgcaaaaaaatcgcgcggcgcaaccgggtgaggctcgtacatttatttatgacgattttattcatgtcattgataccgtgcgttttttactagatgccaaaatagaacagttacatgtcgttccggtatggcaagagaatcttctagcaagtataacggtacaaattacagcgggaggtaaagtggcaacggcgattatgaaccgagatagcggcgtgaacgaagaacgattagcagtgatgaccccgagcgccaaatatgaagtagaaaatgttacggaaacgcatatttatgaagggacaacagaacggtttgagcgttttggagattgggaaacgacgctttacaaaagaggttttgtatctatcatccaagccttcttaacggccgtgcgaaatggggagaaagcaccaatttccaaagaagatgctctagagacacatcgacttgcagaagaaattctacgtaaaatcgaaaattaa

SEQ ID NO: 24345 - DNA, 219 bp, Listeria monocytogenes
atgtctttaggtgttattgcagctgctattgctgttggattaggtgcattaggtgcgggtattggtaatggtcttatcgtatcaaaaactgtcgagggtgttgcgcgtcaaccagaagcgcgttctatgcttcaatcaatcatgttcgttggtgttgcgttagttgaggcccttcctatcatcgctgttgttattgcgttcatggttcttaataaataa

SEQ ID NO: 24346 - DNA, 282 bp, Listeria monocytogenes
atggcaaataaaaagatagatcacagagaagaggcagtggagcttttaaaacaagacgcaaaacgaatcttacagttgattaaagtccaaatggataatctaacattaccgcaatgtccagcatatgaggaagttcttgatacacaaatgtatggtttatcacgtgaaattaactttgcaacccgcctaggactaattgaaccagaagaaggcaagaaactaatgtctacactggaaaaagaattgtccactttacatgaactgtccatgagtaaaaaataa

SEQ ID NO: 24347 - DNA, 3207 bp, Listeria monocytogenes
atgaagaaagtaaaatggagtattttactctttttagtcttggcgatttttctttcggcaggaattacttatttggctttgaatcaaagttcgaataaagagtctaaaaataatagtgaaaaaacacacaagatgaccatcgcactcgttaatgaggaccaaggagacaacttccaaggaaaacaagtagagtttggtaatcaatttgttaaaagtattgaaaaagatgatacgcatgaatggtacgttgttagccgcggagttgcagaaagtggcttaaaacgagatgtatacaatatgatgatcgttatcccgagtgacttttctgaaaaagcaatgtcaatgacttcgagcgccccagaaaaagtgacaattagctacaaagttaacgatgtaggaaatagcgatctaaaagcggaagccgaaaaaacagcagcttctgtattggaagatttcaattcacggattattgatgtttattttgcaagcattttaacaactttacaagaagcgcaggataatattggaaccctagttaaagaagagaaaaagtatgacgctatctacaataaagacgtaaataatccgttatccagctacacaaaacagtttaaaacggtgcaagactacacaggaacttctaaagagagcttccaaggtttccaagatattatgaaagaatttgaggaaagcctaaatctctctcaaaaagaaaacgaagaacatatgaaaaacatggatgcttatacaaaaacacaagaggaaaatgctccttttggggcagaattcacagaaaacttgtcaaaatttgatggcactttatcggcagaagatattcgaatgcaaactgccgctttagaacaagtcaatgcgaaaatgacttcagaatttcaaattttagaaaatagtaattcattgttatcacaaacacaggctttacagagctatatagctgaaaccaatgcacggattgatgcggtggatgccgaaattatgggaacgctcgaaaatgattttcggacggctgtttataatgacttgttgcgtattttacaagaaaacgagtactcggataagttgaatgaaattggtcttaaagatttgaccggagaagatattaatgctggctttaacaaaatgattgttaaggaaatacaatcattaccaacatataatgcggaccaattagcatcgattgggcttgatgaagagatgtacaaaaatgttgtaacgctttctaaggaatattatagtaaccatcgcggtgcttttagcgaaggttttagctttacgactgatcctaaaactctaccaactgacacgctgaaaagcgatacgattaatcgattgaaatccgaaggggtcgcgctagaaagcagttcctatacggttgaaggtagcgattatccaacagaaataattctaactttagatgaaaatttcactttttcagatgttgattgtttggttaatggaagcagtaatccagagttagttcaacaaaacgcatacggagaaaatggcataaagcttagcatacaggcgcttggaagtacaccggcagagattaaaatcaccggaaaagcgaagttgcgagaaggtgtgaatgttccattaattggtgctgtaaattggaatgctacattgcaacaatatgagaaaaaagaatatagtgaaatgccaacaattccatcagagcttgatcctactaccccggatacttcattaatagttagaaaagaacctgtaccgattaaggtcactgcaccaacatatttgaatgagacgaagagttctgtaaaagcaattactaatacagtaaaagattactataaactacaagcattatttgatttatattacggaattgatgcgagtgattctggacaaataccggattttagtaattatcaagtgacgctagaaaattctgcgaaagcatcctcgtattattatatttttaataaagaagatgtgattggtagctttgtaaatcttactacagatcggtttgtggcagattatacgaaaaaaattaaagcttttgagaagcgaattgatgactacaaaaatacaatggctgaggccaattccagatcagaagacgtaacaaatagattaaacgaaacgacgcaagaagccattaatttaaatacaaatctagcgttaacgttgcaaaacctagaatcttggcgagaggaaagtaaaggtttaatagaagaaaatggcgttgttttagaaaaatctggcgaagaagccacgatggcactgcaattaagctctgaatttgccgggcttttagcggaaagtgaatcgttagctggtacttctgaaggtaatttgaagtcagcggaagtcgtgtacaaaacttttgatgcgatcgataaggaagccaagaatattcaacaaagcggagaaactttagtaaaagaagcctccacactatccgatgatttaagcgaaaaattggaagacgacgaaacgttccagaaaaatttcgctaaggttatggaaaatagccgtgttggtgatcgacaaaatgaaaatttatatagtttcttaagtagtccggtcgataagatgaatgccgggactattgttgcgggtgacaaatcaatgccatacttcatgattttgatttgtacgattctggcaattttcactagctacgttatttcacaccaagagaaaaaacgtgaacaattaaatgaatttgagaaagaaatgtcgcttgtctttaaaaatattccaattactttcctagcgatctgtgttgggattattgaggggctcataataggcgccatttcaggatttatttttgaagttggagaaattgggatgttcctatggataggtgtctgcgttctaattatgatgacgttagttactgctttttcatatttattacgtcagttcaacatgattgggatgtcgattattttactcgttttaagtttgtatctattcttaacggatgcagttggacttaacattgataatgaatctattttcgcgacgttcagaacgttctcgccacttcaatacatggaatacttattgaatgggattttgagtgcacagaaggattatattattgtcgtatacagcttgattggcgcgacagtagtatttactggtctcaacctatttgtctggcaccgttctaaagaaaaagtagaggaggacgattcagatgaaatataa

SEQ ID NO: 24348 - DNA, 903 bp, Listeria monocytogenes
gtgacgcttgaactacataatgttacgaagaaatttggaacaaaagtcgctgtcaatgatttatcgtttcgggtagaaccaggaaaaatactcggattaattggtcaaaatggcgctggtaaaacaactacttttcgccttattttgcattttttagaagctacttctggaaaaatcacttgggacggcaaagaagtaagcaaaatcgatccaaatattatcggctatttacccgaagaacgtggtttatatccaaatgtcacaattgaagaacaattaatattttttgctgaattaaaaggatatccaaaacaaaaaataaaggcagaaattgatagctggctagaacgcgctgaaattgtcggtaaaaaaacagacttaatcaaaacactatccaaaggaaatcaacaaaaaatccagcttttaagtacaattatccaccaaccaaaactagttatcttagatgaaccattcagcggtttagacccagtcaatgcagaaattttgaaaaagtttgtatttgacttacgcgcttctggggcagctattattttttccagtcatcggatggaaaatgtggaggagctttgcgactcgctattaatgttaaaaaaaggaaatgtggtcctccaaggaacgactgaatctgtaaaatctgtttttggtcgtaaacgtattttgattgaatccagccacagtgcagcagaactcgctactttacctggtgtattaaatgtccaaacccaccgtgatggcgttctacagcttgaaattgcgcatgaaagcgacgcagagaaaatttttgactatgtaacaaaagatggtttcatccaaacattcagtctccaagctccaacactggaagaaattttcaaatggaaggctggtgagttgaatgagtaa

SEQ ID NO: 24349 - DNA, 1116 bp, Listeria monocytogenes
ttgagtacaaataatagtgacattcgtgtagttgtcggcatgtcaggcggagtagattcatcagtcactgctcatatattaaaagaacaaggttatgatgttattggcatctttatgaaaaattgggatgatacggacgaatttggcgtttgtacggcaacagaagattacgatgatgttattcgcgtagccaaccaaatcggtatcccttattatgcggttaatttcgaaaaagaatattgggataaagtgtttacgtatttcttagatgaatacaaacttggtcgcacaccaaacccagatgttatgtgtaataaagaaattaaattcaaggcatttttagaacatgcggaaagcctgggcgcggattatgtggcaacgggtcactacgcacaagtgaaaaaagtaggcgacgaaatcgaattgcttcgtggcgttgataataataaagaccaaacgtatttcttaaaccagctttcacaagatcaactgaaaaaagtcatgttcccacttggggctatggaaaaaacagaagtgcgtgaaatcgcgaaaaaagctggacttgctactgcagacaaaaaagacagcactggcatttgttttattggcgaaagaaactttaagcaatttttaagtgaatatcttccggcgcaacctggcgaaatgagaacactggacggcgaagtgttagggaaacatgacggattaatgtattatacaatcggtcaacgtcatggcctaggcattggtggagacggtgaaccttggtttgttgttggtaaagatttaaaagaaaatgtattgtttgtggaacaaggtttccatcatgaaactttatattcagattctctaattgcaacggacatttcttttacaactaatgcagaaaaaccaaaaacaatcgaatgtactgctaaattccgctatcgtcaaacggacactaaagtaaccgtgcacttgcgtgaagatggtacagcagaagttgtttttgctgatccagttcgtgcaatcactccaggccaagctgttgtattttacgatggcgacgtttgccttggcggtggaacaatcgatacggtttggaaaaacggtcaaaagttagattatgtaggctga

SEQ ID NO: 24350 - DNA, 984 bp, Listeria monocytogenes
atgcggattggaatgcgaacggtgaaaaccgcgattgcagcgacactggcgataattttggcggaatggctacacttggaatatgcagtttcggcagggattatcgcaattttaagtgttcaaaatacgaaaaaggggtctttacaattagcgattcagcgggtttattcgaccgttttggcgctatctattgctgctgtatttttcatgcttattggttataatgcggtgagttttggactttatttattgatttttattccgcttgctgtaagacttcatgttgctgacggaattgttgtgagctctgtacttgtatcgcatattttacttgaacaatcattatcctttttctggtttaaaaatgaactgttacttatggcagttggcgctggcatagcgattattttaaatttatatatgccaaaaatggaagacgaattaaaacgcagccaacaaaaaatagaagcaattatgcggcaaattttaacggaaatgacgcaagggcttcggaatcagtcggagtatcatgatgagtttggcttattaaatcaattaaagggtacattagactatgcacaggaaaaagcagcgagaaatttagacaatcagttttttgcttcttcccattattattcccagtacgttgatatgcggcttgtacaatatcgaattttaacacaaatgaaacggcatttagtcgcgtttgatcattcttctgagcaaagtatggcgctggcagaaattacagaaaaaacggcacagacgctagatgagcataatacagcagaagatttagtggcggaaattactaagatggtgcatgagtttcgaagcagtaaactcccagaaacacgagcggaatttgaaaatagagcgattttattccaatttatgaatgatttgcgttatttgttagaaatgaagcgtgacttttatgcggagtttggattgaaagaaaaagaaatgacgaggggacgatga

SEQ ID NO: 24351 - DNA, 3072 bp, Listeria monocytogenes
atgagaccaattaaattaacgatgcaagctttcggagcctatgcgaaaaaagaagtaattgattttgaaaagcttggaacagagcagatttttgtcatttctggtaaaactggggcaggaaaatcgactatttttgatgcgattagttttgcgatttttgggaaagcaaacacatttgatcgggaaagtttttcgatgcggagtcattttgcgacagataaagaaattactgaagtaacgcttgcttttagattgaaagacaagatttaccaaattagtcgtattcctcagcaggaaattgccaaacaacgcggaaacggaacaaccacttcgccgcaaaaagcagaattatatgagttaattggtgacgaaatgaagttgcttgcaagttccgtgcgcgacgttaatacaaaaatggaagaattaattcaacttaatgtggatcagtttagacaaattttgatgattcctcaaggcgaatttagagaactgctcgtatcggatagtaaagaaaaagaagtcatattgcaacggttagcgcatactgtttactatgaaaaagtggaaaatttgctatgggaaaagcaaaaacaagccgaaatcttggttgtagaagcgcgtaaaaaagtggcagagcttgctgaacttagtttaccggatgtggaagtttctggaaagacaacgagtgaaatcagtgtgttacaagacgaggccattcaaaaagaacaagtaattttaacggaattagaaaataaattaagtattatgcggaaacaaacaagtgaagctgtcgaaaaagtgacgcttgcgaaagaacaactgcttgattggcaaaatttggataagtatacagaagaagttgcgacactagaagcggagaaagatttttatcaatcaatggaagttcgcatgaatgctgcgaaaagagcaagcaaccttcaatcccaagatgcactttgtattcgtttaaaagaacaattagaagcagccgaacaaacagaaaaacaagtagtagttgaggcggaacaagtgaaaacgcaatttttacatgcgaaaaaacaaaaagaagcactcgctgaaaaagaagcagaattagaaataaacaaacgaacacttttccagttagaagaaatggaaccgaaaatcttggaattagaaacagtctcgattcaaaaaagacgcgccgaattagattggaaagaaacaacgacccttttagaaaaaataatcgacaaggaacaaaaaatagctacagaactgcaatcagttgaagcgcgattagcggaaataaacaaagcagagctcacgtatttagaagctattaacaaacggacaacattagaagccagggttgagaaagaacaagaattagttaataaacggatgaaaatggaggagtgggacgcagccaaacaaactgaagaacaaaccttagcacaacttttaatagaaaaagcggaaatggaaagaacgattaaacaagaagaaataaaactagaaaaagaacaagcagcaacaatcgcagcgcatttgcatgagggagatgcttgtcctgtctgtggttcacagtcacacccagtactcgcaaaatttggagaaacagctgaccttgaaacactcgaaatagcaaaagcaaagctacaagaaaaacaattagtgattactacgacggaaaaagctatcagtcaactcgaatggcaacttaatgaatgggcagatatgaaagagcaaagtttagccgaaatacaacaaacattagctggaaatatccaactagctaccaatctgagagagcaaataacccagttgcaatccgaagtagctcaaaaagaaactgtccaagcgacattagaatcattgaaaaacaaacaaaatgaaacgctaaccgaaaaaaataagatggctctcgaagtagaaaagttgcatcaacaagtgcaactaacggaagggaaacgaacttatttggaacaatccattcccgacgagttgcgagataaggctgttttcgataacaaaatgaaagaactaagctcaaaaatcgaaacacatatcaaacaagccgaacagattgatgcgttgtttagacaggcagaaaaagaaacaacaagactagaatctacgttacattcggctcaaaaaacaacggtggatgcgaaagaagccttacaagtacagcgcgaaattttcaaagaagccatgaaacaaaatgattttttatcctatgatgcgtataaacaagctttgttatcagtagatgaactaaaaaacttagaaggaaaactggccgaatacgagcaaaaacgccatttagctgtatcacgccaagctgatttaaaagaaaaactccaaaacaaacaaaaaccaaatatggaacaactagaattcatcatgaaagaaaaacagctcgaacttagccaatcagaagaaaatacaatgaaacaacgcgaattcgttgcaaaaagaaaagaacttgtcgaaaactaccaaaacagtattcaggcagtggaacaagccgaagaaaattatgcggacattggtttactagctgatgcagctcgtggtaaaaatgcccggagattaacctttgaacgatatattttagcgatgtttttagacacgattattcaccgcgccaaccaccgtttatccaaaatgacaagcggtcgttttgaactccagcggaaaatggaaaaagcaaaaggaaacgtccaaagtggcttagaacttgaagtttttgatgagtatacaggattaactcgacatgtaaaaacactttcgggaggagaaagcttcaaaacttctttagcgcttgctttatcactcgcagaggttgttcaagaaatggcaggtgggatttcacttgaaacgatgtttattgatgaaggattcgggacacttgatcctgaatcacttgaagccgcggtggaatgtttactggaaacacaagaaaacggacgcttagttgggattatttcccatgtaccagaactaaaagaacgaatttccgcaaggctggaggtaaccgcaacaaatcacggaagtaccactaaatttattacagctagtagctaa

SEQ ID NO: 24352 - DNA, 924 bp, Listeria monocytogenes
atgatttatacaattactttaaacccatcaattgattatattgtacaaatcgatcaactaaaccttggcggccttaatcgtatgaagcaagattataaattgcctggtggcaaaggaattaatgtcagcagagttttaaatcaattgaatgtaccaagtctcgctacaggttttttaggtggatttacaggcagttttatcaaagattggctacaaaacgaaggtgtgaaaactggctttgtaacggtgaaagatgacactcgtattaatatcaaactaaagcacggagaagaaacagaaatcaatggtctagggccagctatttctgagaaggaaattaatgaatttttgaaagtgatggataaagtaactgctaacgatattgttattttatctggtagtgtgcctccttcacttggaaatgatttttacaataaaataattcagatttgcaaagaaaaaaaagctgaatttatgattgatacaactggtcaagaactgctagatgcattaccaaatcgcccgattctaattaaaccaaatcaccacgaactagcagacctatttggcgtgaaacttggtagcgtagaagaacttatcccatacgggaaaaaatgtttagaattaggcgcgcaacatgtaatcgtatccatggcgggtgacggagcacttctatttacaggagaagatgtttacttcgccgatgcattaaaaggggaactgaaaaattccgtaggtgctggagactcaatgattgcaggctttgttgggacttttgataaaacgagagatcccgttaaagcgtttgctgcaggagttgcaacaggtggagccactgcattctcaacagatttagcccaaaaagaactaatagatgaactattaccgcaagtgaagataaccaaaataacagggaggaactaa

SEQ ID NO: 24353 - DNA, 4593 bp, Listeria monocytogenes
atgaaacaaactaatttgccaaaaaagcacggcctatacaatccagaaaatgagcaagatgcttgtggaattggcttcgtagcaaatattaaaaagatttcttctcataaaattgtcgaacaaggtattcatatgctttgtcaattaaagcaccgcggtggagaagttggtggggatacgggcgatggcgctggtattttacttgagatttcagactctttcttccgacgcgaatgtagcaaactaggtattactttacctgaaaaatatcattatgctgttgggatgtttaatttccctcaaaataaaacagaacgtgaatgtttaatggacgaaacagaaaaactgattgcgagtgaaggccaaatgttccttggttggcgcaaattaccaactgatgtaacaaaggtaggtgctggtgcaagaaaaacagaaccagcgatttatcaactattcattcaaaaaaatgccaagttagatgaagctgggtttgaacgagcactttatttaattagaaagcaaatcgaaaagtttgctgcgacttctaagctaattacagagactttctacgttccaagtttatccacaagaacagttatttttaaaggaatgttactgccagaacaaattaatcaatactatttagatttagcagatccagcgtatgtatcggcttttgcgctagtgcattctcgtttttcgacgaatacttttcctagttgggagcgggcgcatccttatcgatatttaattcataacggtgaaattaatacgcaacgtggtaatgtcaactggatgaaagctcgggagaaaagagcggaatctggtttacttggtgaagatttagccaaattactgccaattattgatgaaagcggtagtgactcggcaactttagataatgcgttagaatttttagtgcaagcagggcgttcattacctcatgcggcaatgatgcttattccagaaccttgggataaaaatccgcatatgactgatccgaaacgcgctttttacgaatatcatagtacgctaatggagccttgggatggaccgacatcgatttcctttacaaatggtcgtgtaatcgggacaattttggatagaaacggcttacgtccggctcgttattatgaaacgaaagaccatacgattatttattcttcagaaacgggcgttgtgccagtagatccgagtgagattattcgcaaagaaactgttggcgcgggaacgatgttgttaattgatttagaagaaggtcgaattgtggcggacgctgaattaaaagaagaactaacaacggaaaaaccgtaccgtgcatggttggaagcggaaatgacagaaattgccgatttagcagcagccgatttacattatgaagcaatggataaatcagaacgttttaaaaaacaacgagcatttggttacacacaagacgaattaaataaaattttgattccgatggtaacagagaaaaaagatccaatgggcgcaatgggttatgacgcaccacttgctgttttaagccaacgaccacaagtgttatttaattactttaaacaactttttgcgcaagtaaccaaccctccgattgatgggattcgcgaagaaacggtgacttcagcgatgacgttacttggtgatgaaggtaatattctaaatccaactgctcaaaatgctaaccggattcgcttgaaaacaccaattttatctcgaaaagaatttgcggcacttgagcaacaaacaaaatttgcccaaccgactgtcactttaccaattttatttaaagcagaggaaagagatggtttggaagctcgcctggaagcattatttgcagaagcggatgaaaaaatcgcagctggggcagaattgctcattttatcagatgagggggtgaatgcggactggattggcattccttctctgttagctgtcagtggcttacatcatcatttagttaaagctggtacgcgtacacaagtgagtattatcgtgaaaacagcggaagcgagagatgtccatcaatgtgcgcttttaattggctacggggcagacgcggtatttccaagccttgctatcgatacgtttgacggtttgattaaagaaggaaggattaaaggatttacacttgatgaggcggaaagtcgttatattgaagcgattacagatggtattctaaaaattatgtcgaaaatgggaatatctacggtgcaaagttaccgtggtgcccagatttttgaagcaattggtattggcgatgatgtgattagaaattatttcccgggaacagcctcacaaattggtgggattccactggaagttatcgcgcaagaagcttggcttcgtcaccgcgaagcctatcatgatattggctaccaaagtttcacacttaatacaggcggggaatatcagtggcgctcaaacggagaatatcatgtatacaatccgcttgcgattcattctttgcaacaagctacccgtgaaaatgaccgtgaaacgtataatctttattcagatttaatgcaaaatcaaaataatgcctttttaagaggcttgctaacttttacaagtgatcgcaaaccgattccactggacgaagtagagccggccgaagccattttcaaacgatttaaatcaggcgcgatgtcttatggttcgattagtcaagaagctcatgaagcgcttgctatcgcaatgaatcgtattggtgggaaaagtaatagtggggaaggcggcgaaaacccgaaccgttttactccggacgaaaatggtgattggcgtagaagtgctattaagcaaattgcatctggtcgttttggtgttacaagtcattacttggtcaatgcagaggaactgcaaatcaagatggctcaaggagcgaaacctggtgaaggtggacacttgcctggaaataaagtctacccatggatttcgaaaacgcgtggttcaacaactggtgtaggattaatttcaccaccaccacatcatgatatttattccattgaagatttatctcagctgatttttgatttgaaaaatgcgaatcaaaatgcacgtatcaatgtgaaactagtttcgaaaactggtattggcacgattgctgcaggtgtagcaaaagggaacgcggacgttattttagttagtggttatgaaggtggaactggtgcggcggcaagaacaagtatccgacacgcgggagtgccgtgggaaatcggcttggcagaaacacaccaaacattactattaaacggtcttagaaacaaagtcgttgtcgaaacagatggtaaactaatgacagggaaagacgtcttagttgccgctatgctcggcgcggaagaatttggttttgcaacggcgccactcgtaacacttggttgcgtcatgatgcgtgtttgtcacttggatacatgtccagtaggtgtagcgacacaaaatcctgagttgcggaaaaaattcagtggttcggcagattatgtcgtgaacttcttccattttatcgttgctgaaatgcgcgaaatgatggcggaacttggctttagaagtttaacagaaatcattggacataaagaatttttaactactcacgagaaaaaagaagcgcattggaaagcaaaatatatcgacttttcgaatatgctttatagtgatgatttttataaaaaccaagtccaatattgtacaaaacaacaagaccacaaaatcgaccaaacgcttgatatgcgcgaacttgtgccattaattcagccagcactagaaaacggtgaaaaagtaactggaactttcgctgtacgaaatgttgaccgcgcgattggaacgattgctggttcctttattagtaaaaaatacggagcggcagggttaccagaagataccatttcgcttgattttgtcggatcagctggtcaaagctttggtgcttatacaccgctcggcatgacgctccgaattcacggcgacgccaatgattacttcggaaaaggactttcaggtggtaaattaattgttagtccggatgctaagacacctattaaacctcatgattccgcgattgttggaaatgtaacgctttacggtgcaacaggtggatttgcctatatgcacggaaaagcgggtgcacgtttcgccgttcggaatagtggtgcaacagctgtcgttgaaggtattggcgacaacggttgtgaatatatgacaggaggtgcggtagttgttctcggtgacattggggagaacttcgcagctggaatgtctggtggggttgcttacatttatactaataataaacaagcaacaactgccaaaatcaatcatgaacttgtaaatagtcgctctacttttagcacatccgaattaactaaattaaaacagctaattgaacaacatgcaaaccttacaggaagtgatttcgcccaagatattctacaaaattgggaagcagagaaagcgaattttattttcgtcattccaaatgaatatgaaatgatgctgacgagaatcacgacgcttgaacaaactggaaaaacacacgatgaagcagaattacaagctttttatgaacataaagatggaaaattagttgccggagtggcgaaatag

SEQ ID NO: 24354 - DNA, 435 bp, Listeria monocytogenes
atgttagatattaagaaaatcaaagagattttgcctcatcgttatccatttttgttagtagatagagttatttctgttgaagaaggcaaaaaagttaccgctattaagaatgtaacagccaatgaagaattttttaacgggcactttcctgagtatcctgtaatgccaggagtattaatagtggaagctctggcgcaaacaagtggaattgcaatgatgcagagtgaagcgaataaaggtaaaattggtttatttgctggaattgatggctgccgatttaaacgtcaagttgttccaggggaccaacttttgcttgaggctgaaataactcggatgaggggcgcgattgcaaaagcgaaagtcaaagcaacagtagaaggcgatttggtttgtgaagctgaaattatgtttgctttatcagatctacctaaataa

SEQ ID NO: 24355 - DNA, 1002 bp, Listeria monocytogenes
atggataaaaatattaaagtttcatttaaacatgtgtccaaagaatatgacctctaccaaaataaatctgataaaataaaaggtttattcttgccaaaaagtaagagagtacagtctttttgggcgcttagaaatgtttgttttgatgtatatgatggagagacagttggattaattggtattaacggttcaggaaaatctactatttctaatatcatgtcaggtgttatcccaccaacgcaaggagaagtagtcattaacggcgaaacatctcttattgcgattgctgttggtttaaaaggcccattatcaggtttagaaaatattcgtctcaaattacttatgcatggcttaaaaggttcgcaaatagattccttattgccaagtattatagaatttgctgacataggtgattttatcaatcagccgataaaaaactattcaagtggtatgcgttcccgattgggttttgcaatttcagtgcatacagatccagatattttagttgttgatgaagccttatcagttggtgaccaaactttctatcaaaagtgtgtggataaaattaatgaatttaaagcacaaggaaaaacgatagtgtttgtcagtcactcgctaggacaagtgaaaagtttatgtgataaaataatttggatgcatcatggtgaagtcagagaaattggtgacgctgcagaagttgcagaaaaatatgatgaatttgttaaatggtttaataaacaaccaaatgactttaagaaaaaatatcaaaaagaacaaaaagaaaagcaaaaacttccacaagaaaagatttatccaacccctaatgctaataaatataaaatgggtctatttgataaatgttttttagttgttctgttagctttattagttctgtttggatcactgatatctacaggtaaatccttcatgggattatttagtgctactgacaacaaagtggaacaagtaacaaaagtagataaacgtaccgattggaaataa

SEQ ID NO: 24356 - DNA, 2214 bp, Listeria monocytogenes
atgagtgataaatatgtaagacaagatttaaacgtttttggaatgacttgtgcggcctgttccacgagaattgaaaaatcgttaaataaagcagatggtgtagaaaaagcgaatgtcaacttagtaacggaaaacgctgctgtttattacgacccggaagttacatcgacagaagatctaattaaagttgttaaacatgcgggttatgacgctgcggaaaaaatgtccaaagaagaaaaagatgctgtattagaaaagaatttcaaaaaagaagtgagacgttttattctttcggcgcttctttccttgccattacttcttaccatggtgacacatattccgtatatccatgaaatggcgtttgcggaaacgataggtaactggattaatccaacgattcaattagttcttgcaactattgttcagttttatattggttggcggttttacgatggggcttataaagcgctgcgaggtaaaagtgcgaatatggatgtattagtcgcacttgggacatctgctgcatacttctatagtgtggtagagtatgtccgccatataattgacccaagcgtgatgccacattactactttgaaacaagtgccgtgctaatcacattaatcttattaggtaaactgcttgaatcatacgcaacttccagaacaacggaatctattgctggtttacttgaactacaagcaaaagaagcgaccgttattcgcgaaggaaaagaatggttagtaccagtagattcgttgaaaattggcgacgttatccttgttcgtccgggtgaaaaagttccgatggatgcagaaattatttctggtgaaacgagtattgatgaagccatgattactggtgaacctgtgcctgtagagaagaaaccaggtgattctgtcatcggcgcaacgattaactttgacggggctttccaagcaaaaattacgaaacgaatggaagaaacagttttagaatccattattcgtttggtcgaggaagcgcaaggtattaaagcaccaattcaacgtttagcagatagaatttccggcatatttgtaccaattgtacttggtattgctgctgtaacatttattatttggtatcttgtgactggaacagtagatggttcactagaagcggctattgcggtattagttatcgcctgtccctgtgcacttggtcttgcaactccaactgctatcatggctggaactggtaaaggcgccgaaagtgggatattatttaaaggtggcgaacatttagaacgtacttccaaagtagatactatcgtttttgataaaactggtactttaacagaaggtaaactggaagtgagtgataaaaaagcagccaatgatcagtttttcccttatttattcttaatggaacaacaatcagaacatccgattgctaaagcgattattaagatgttagagcctgagaatatggatgtatccgcaattaaacaaggaaaaatccgcgcgaaagcagggcatgggatgactggtaatttggatgatagtaaggtagaactgggtgcttaccgctatgtttcttcccttacaacaatcccaaaagaagacgatgaattaatcgaaagttggatgcatgcaggaaaaactgtcgtagcaatggcaattgatggcgtttatgcaggtgctctagctttatccgatacaccacgacctgaagcaaaagaagcaatccaaaaactaaaagctcaaggtattaaaacagcgatttgttctggtgatcaatctgttgtcgtagaaaatatggccaaagatttaggcatagatatgttctttgccgaacaactaccgaacgataagagtgcattagtcgagaaactgcaacaagacggtcatattgttgcattcgttggtgatggtattaatgatgctccggctcttgcagcaagtgatattggtattagtattggaactggaacagacattgcgattgaaacaggggatgtaacacttgtaagtcaccgtttaacgctcattccagaaacaatagaactttccaaagcaaccatgcgaaatatccgtcaaaactttttctgggcacttgcttataattgtgcgggtattccaattgctgcgttaggcttacttgccccatgggtagcaggacttgcgatggcatttagttccgtctctgttgtcacaaacgcacttcgcttaaaaagatataaatttaaatcatag

SEQ ID NO: 24357 - DNA, 1968 bp, Listeria monocytogenes
atgatgattggtaagcgattaagcgatcgatataagattttacatgcaataggcggcggcggaatggccaatgtgtacttggcgcatgatattattcttgatagagatgttgcagtgaaaattttacgaatcgatttggcagatgaaagcaaccttattcgtcggttccaacgagaagctcaatcagcaacaagtctcgttcaccctaatattgttagtgtgtacgatgttggtgaagaaaatgatttacactatattgtaatggaacatgtagatgggatggatttaaaacagtacattcacgaaaatcatccaatcagttatgaaaaagcagtagatattatgctgcaaatcgtttctgcggtagcaatcgcccatcaacatcacattatccaccgtgacttaaaaccgcaaaatattttaattgatcatgatggtgtcgtgaagattacagattttggtattgcaatggcactttcagaaacatctattacacaaacgaattctttactaggttcggtgcattacttatccccagaacaagcacgtggcggaatggcaacacaaaaatcagatatctattcacttggcattgtgttatacgaactattaactggaaaagtaccttttgacggggagtcagcagtttctatagctattaagcatctgcaagcagacatcccatccgcaagagaacaaaatccagaaattccacaaagcttagaaaatattatcattaaagcaacggcgaaagatccatttttacgttaccaaaacgcggaagaaatggaaaaagacttgcaaacttgtttaaataaagaccgtttgaacgagccaaaatatgttttcccaacagatgatggtgatacaaaagcaattccaatcatcgcaacaaaagatacgatgcaaaaccttgataaaacgattgttccagaaggaaaagtagccgctgccgaagtagttcctgaggagaaaaaagataagaaaaagaaaaaaatgagcaagaaaaagaaaattgctctcattgtttcttctgtcattatcatttttatcatcggtattttactactgtggcttttaggcaagagccctgatgaagtcgctgtgccggacgtttctggtaaaacggaagaccaagcagtggcgttacttcaaaaagaaggctttgtcataggtaaaacagcagaaaaaaatagtgatgaagtagatgaggggaaagtaattaataccgacccagaagctggagaaatgaaagaaaaaggaacaaaaatcaatttattcgtaagcattggttctaaaaaaataaccatggatgactatacaggaagaagttacacagatacaaaagctttacttgaagaacagggatttaaaaatatttcttcggaggaagcttatagttcagaaattgaaaaaggcttaattattagccaaacaccgacacaaggaacagaagtagtcgctaaatcaacagatgtgaaattcgtcgtaagtaaaggtgcagagccaattacactgaaagatttacgaggttatactaaaacagcagtagaagattatgcttcaccacttgggctaaaagtttcaagtaaagaagagaactcaagtacagtggaaaaaggacaagttatttcacagtccccatcagctggaacagcaatgaactctggtgatacaatcgagattgtcatttctgctggaccaaaagaaaaacaagtaaaagaagtaactaaaacatttaacatcccttatacaccaagtgatgaagaaaacccacaaccacagaaaattcaaatctacattcaagataaagaccatagcatgactagcgcttaccgagaaatgagcattacacaaaatacctcggtagaaataactttccaaattgaagaaggttctagcgcaggctataaaattatcagtgatgataaagtaatcgatgaaggtacagtcccttatccaaattaa

SEQ ID NO: 24358 - DNA, 1941 bp, Listeria monocytogenes
atgtcagaagaaaatattacaaatgtacaagaaaatgcttcagattataacgaagatcaaatacaagtactggaaggcctagaggcagtaagaaaaagacccggtatgtacattggttcaactagccaacgcgggctccatcaccttgtatgggaaattgttgataatgcaattgatgaagcacttgctggtttttgtacagaaattgaaattacaattgaagctgataacagcattactgttcgcgataacggacgtggaattcctacagggattaatgaaaaaatcggtcgtccaacagtagaagtaatctttaccgttctgcatgctggtggtaaatttggcggcggcggatataaagtatctggcggacttcacggagttggtgcatcggtagttaatgccctttccacatctcttgaagtatacgttcaccgtgaaggtcaaaaatattaccaacgctttgaacgtggtgatgtagtaatggatatggaagaacaaggcgaaacggattatcgtggaacaattgttcactttacaccagatccacaaattttcacagaaacaacggaattcgattttgatacgcttcgtacgcgtacacgcgaacttgctttcttgaatcgtggtttaacgatttcaattgaagataagcgcgaagaacacaaagttcgtaaagatttccactatgaaggcggaattcgttcttacgtggagcatttaaataaagcaaaagacgttatccatgagccaccaatttatttggaaggtgaacgcgatgatattatggttgagatttccatgcaatataatactggattctcaagcaacatcatttcattcgcaaataacattcatacgtatgaaggcggaactcacgaatctggctttaaaacggcgttaacacgtgttattaatgactacgcgcgtcgtaataaattgtttaaagatagtgatgacaatctttctggtgaagatgttcgtgaaggtttaacggcgattatttctatcaaacacccagatccacagtttgaaggacaaaccaaaacaaaacttggaaattcagaagcccgttcaatcacggataagctattttctgaggctttaaataaatttatgatggaaaacccagatgttgctaaaaaaatcgttgagaagggcgttgtggcttctcgtgcacgtctggctgctaagcgcgcgcgtgaagttgctcgtaaaagcagtgggctagaaatttctagcttgccaggtaaattagctgactgttcttcccgtaatcctgaaatcagcgaactttacatcgttgagggtgactcagctggtggttcagctaaacaaggtcgtgaccgtttattccaagcgattttgccgattcgtggtaaaattttgaacgtggaaaaagcacgtttagaccgtattctagctaacgaagaaattcgaactatttttacagcgatgggtactggttttggtggcgattttgacgtttctaaatctcgttaccacaaattaattattatgactgatgccgatgttgatggtgcacatattcgtacactacttcttacactattttatcgttatatgcgtccactgcttgatgctggttatatctatattgcgcaaccaccgctttaccaaattaagcatggtaaacaaatagaatatgtatacagcgacggacagttagaagactatctggcttcccttgacggagacactaaatacagcattcaacgatataaaggtcttggagaaatgaacccagaacaactttgggatacaacaatgaatccggaacaccgtacactacttcaagtcaatatcaaagacgctattgatgccgatgaaacttttgaaatgttgatgggtgaccgcgtggaacctcgtcgtaaattcatcgaagacaacgcgcaatacgttaaaaacttggatgtttaa

SEQ ID NO: 24359 - DNA, 720 bp, Listeria monocytogenes
gtggtaaaaacaagaaaagaaaaacgggaatacgaagaaccggctgattatgacatgagttctgaaggccaagatgaattcaacaatgaaccgccaatgttatcccgttctgatagcagaagaggaaaaaagaaaaccatttttagatacccattacttaatttattgattgtgttttttctattaataccaatcgttatcgtgattgtatttgtaacagtacaaaatatgggttcatcaaatgaagtgaaaacagaaacagaatcaaccgtaaatgtatctgacaacacgcaatctaaagaagaaaaagaaaaagcgaaaaaagctgcagaagaaaaagctgcggctgaaaaggcagctgaagagaagaaagctgcggcagaaaaagcggaagcagataagaaaaaacaagaagaagatgcagtgaaagctgcaaatgcaaaaaaagaacaagaagctgcagaagaaaaagcagctgctgacaaagctgctgccgagaaagcagccgctgaaaaagctgagcaacaaaaagcgaatgaagcttcacagcaaaaagctggaggatctcatacagttaaagctggggacaccctttatagtattgcgcgttcaacatatggacaagcgggggcagctgctggagtagaaaaaattaaacaagccaatggactaggaagtgacaatgttccagttggtacagttctaacaattccacagtaa

SEQ ID NO: 24360 - DNA, 930 bp, Listeria monocytogenes
ttgacagaactcggtgataaactgaaacaagctagacgtgaaaaaggactcagtttagacgacttacaacaaataacgaaaattcaaaaacgttatttggtagcgattgaagaaggaaactatgctgtaatgcctggcaaattttatgcaagagcatttattaaacaatacgcagaggcagttgggctagatagcgcaacacttttcgacgagtttgaaagcgaagttccggaaacgccgcaacaagaagtagtaaataatgagccaacacgggtacaaagtaaaagaaatccaatgcctgcacaatctgtaggtaatcaagcgaatacacgtaatcgtttttttgatatcttaccaaaaatccttattgccttatttattgtgtttattcttttcattgtttggtttttcttgcttaataaacaagacaactccacagaaaaagtgaaaacagatacaaataatcctacagtaaaagtagaagattcgacaaaaagcaaggatacaagtaaagacactgagaaaaaagatacgacaacaaacgaagataaatccacagaaacaaaggataaaaaggaagatacagccaaagaagttgaagtgactaaaggagaaacgtctggtaacgccactacgtacacagtgaaaaatacggacaaaatgactctatcacttagcgccactggtgattcttggataggtgtttccgatgcgaatggtagtacaattcaaaatgaaacactatcaacccaaaatccttctgcagaaattgatttaggtgataacaagacagtttctatcgtaattggaaattctcctgttacaactgttaaaatcaacggcaaacagctggaacttgctcctgatcttgttaaacaagttttaacaatcaatttagaagcaagcgattctagttcagatgccgaataa

SEQ ID NO: 24361 - DNA, 1368 bp, Listeria monocytogenes
atgaaaaaaattgaaatgtaccatcacaaaaaagtacttgtcttgggtcttgcaagaagtggtgttagcgcggcaacaattatgcataaactgggagcatttgtaactgttaatgatcaaaaaccttttagcgagaatccagaagcgcaaggtttacttgagcaaggtattaaagttatttgcggttcgcacccaattgaacttttggatgagggatttgagcttgttataaaaaaccccggaattccgtacaataacccaatgattgaaaaagcgttaaaacttaaaattccagtcattacggaagtggaattagcttaccaaatttctgaggcaccgattgttggaatcacaggaacaaatggtaaaacaacgacaacaacgattattcaccatatgttaaatacacataaagaaaatagttctttactagcagggaacattggttttccagcatccgctgttgctgaaaatgcaacaagtgatcaatatatttcgatggaactatcttcgttccaattaatgggcgtagaaacgtttaaaccacatatttccgttattacgaatatttatgaggcacatttagactaccatacagaccgtagcgaatacgtccaagcaaaatggcacatccaaaaaaatcaaatagcggatgatttcctagtaattaactgggatcaagaagagcttaaaaatttaacaaaacaaacaaaagcgcaagttattcctttttcaacaacgcaacgtcttggtcaaggaagctacgtgcaaaatggcaatattatgttcaacgacgaagtgattggggagcgtgacaatattttacttcctggagaacataacttagaaaacgtacttgcttccgtagcagtagcaaagacattaggtgttacaaacgaagaaatcatgcacgtattagaaacatttaaaggtgtagagcaccggacacaatttgttgtagaatggcaaggtcgtaaattctataacgattcaaaagcaacgaatatccttgcaactcaaagtgcattaaaagggtttaaaaatccagttgtgttactcgctggtggtttggaccgtggtaattcatttgacgaattactaccatttttcaaaaatgtaaaaacgttaatcgtctttggcgaaacagcagataaaattggtcgtgtcgggaaaatcgctggcattgaagtacattacgtggataatgtcgaagcggcagttcctgttgcttatcgcgaatcagcgccaggagatattatcttactttcaccagcatgtgcgagttgggatcaataccggacatttgaagttcgcgggaatgcatatatggacgcaatcggcgagctaatagaagaggtggaaaaatga

SEQ ID NO: 24362 - DNA, 1626 bp, Listeria monocytogenes
ttgaagaaagttttgttgaatagtgtaaaaggttatacgtgggcgaggtttaggaaagacttgcttgcgggtattatcgtgggcattattgctttaccactagcgatgtcatttgcgattgcatcaggtgtaagtccggaatatgggatttattcaagttttgtagcgggaataattgtttctatttttggtggttcgaaatttcaaattgctggaccgactggtgcatttattccagttttactaggaatcgtattaacttatggttaccaagatttacttgttgccggaatgatggcaggggttttactttgcctaatgggaatttttaaaattggaacattaattaaatttataccgcgtccagtaactatcggattcacagctgggattgctgtcactatttttatggggcaagtgggtaatttcctaggattaactggaatggagaaacatgaatcatttgtagcgaatatgaaagagatctggttgcatcttgattcatggaatttctatagtgtgctcatttcatgtatttgtatgcttgtcttatttatttttcctaaaattttaccgagaattccagcaccacttattggacttgtggttacgacggcgattgctatgctgtttttcccggatgcgcttccgacaattggatcagcttatggaaatattccgagtacttttcctccatttgaatttccagatatgacttttgcgaatatgagtaaattgattggaccggcttttgttatcgcgatgcttggcggaattgaatcgcttctttcggcggtggtggcagatgggatgacgaatacaaaacataatagtaatcgagagctaattgggcagggtatcgcaaatattgtaacgccaatgttcggtgggattccggcaacaggagctatcgcaagaacggcaaccaatattaataatggcgcgactagccgtgtctcaggtgttatccacggggtttttgttttactcactttactagtacttgcaccagtagctgtcaatatcccaattgcagcaatggcaccgattttaatgttagttgcttggaatatgagcgaacgaaaaaccttccaacacatcattaagttgaaatcgggcgatactttagtgctggttattacttttttattaacggtatttgcaagcttaactgtggcagtcgaagttggtttactgctggcagtggtgcttttcgctaaacaaatgggaagttcaatgcagattgaagaaatcgaaccagaaggcgccgaaatcgctcctcatttacacgaaaaaattagtatttttacaattcgtggtccgcttttctttggcgcagcacagatttttcaacaaaatattataaaagcaattcatgttaaaccaaaataccttatattgcggatggggaaagtgccaattattgacgctacagcagaaggctatttccaccaaattgaaaaagaattttcgaagcaaggcggtcaaattttaattaccgggctaacggataaagcgaaagaaagtttgaaaggtagcggactttacgaccgaattggcgaagaacacttcttttcccataccgaagatgcgattcattatgcggaaaatgctttaaataagtga

SEQ ID NO: 24363 - DNA, 558 bp, Listeria monocytogenes
atgagtaaagaagtattatcgaaatccaaagaaaaaatggaaaaagcagaacaagcgttaacaagacaattaggtacaatccgagctggtcgtgcgaatgcatcactacttgaccgtttatctgtagattattacggagcagctactccagttaaccaaatggcttctatcagcgttcctgaagctagaatgttgctaattacaccctatgataaaacaattttaggtgaaattgaaaaagcaattttgaaatcagatttaggtttaacacctaataatgatggttctgtactacgtttatctattccacaattaacggaagaacgtcgtaaagagttggttaaagaagtgaaaaaagaagctgaagaagcgaaggttgctgtgcgtaacattcgtcgtgaagcaaatgaagaactgaaaaaactagaaaaaaatggcgacatcacagaagatgatttacgttcttacggtgaagacgttcaaaaattaacagatgaaagcatcaaaaacatcgatagcatcacgaaagacaaagaagcggaaatcttagaagtttaa

SEQ ID NO: 24364 - DNA, 483 bp, Listeria monocytogenes
atgatgaatcgtgtagtacttgtaggacgattaacaaaagatccggatttacgttacactccagcaggcgtagcagtcgcgacttttacattagcagtaaatcgtacattcactaatcaaaacggagaacgagaagcagatttcattaattgtgttgtttggcgcaaaccagcagaaaacgttgctaatttcttgaagaaaggaagcatggcgggcgttgatggacgtgttcaaactcgtaattatgaggataacgacggtaaacgtgttttcgttactgaggtagttgctgaatcagttcaattcttagaacctaaaaataacaacgtagaaggtgctacatcgaataattaccaaaacaaggctaattattcaaataacaatcaaacaagctcatatcgagcggatacgagtcagaagagcgattcatttgcaagtgaaggtaagccgattgatattaatgaagatgatttgccattttga

SEQ ID NO: 24365 - DNA, 1011 bp, Listeria monocytogenes
atgacaactgtgaaggcgcatgatccgcggcgaaaacgtagacggataacttttatagtagtaatcgttttactcattttagcttttttctacgggctgactactgggtccgtaaaagttacatatagcgacgcttggcaaactttgactggcggcgggagtgaccttgctaaccaattgatttggaatttgcgattgccacggttattaattgctttcttagtgggagcggcactggcgattgctggttgcttgctgcaaggtgtgatgcggaatccattagctgacccaggagtaattggggtttcagcgggtggtggttttgttgccattttaatgacattagcatttcctgctttagcttcctttgtgcctattggcgcgtttttaggggcgttcggtactgctattttgatttatttactagcatgggatcgcggcgtttctcctttacgtgtaattttgtctggggtggcaattaatgcgtttattggtgcgatgacgtctggcgtaatggtgctttatagcaaccgggttcaaagtgttatttcttggatgacagggacactttccggaaaaagttggtatcatttggatatgatttggccgtatatgttagttggatttgttttaagtggttttgcgattcgttcttctaatgtattgttacttggggacgatgcggcgaaattacttggcttttctgttgaacggcatcgctttttcattattatgttggcggcctttctcagtggtgttgcggttagtgtagctggacttattggctttgttggacttgttgtgccacatattttccgtttgatcattggaaatgactataaatatttactaccattatccgcactcggcggggctttattagttggctttgctgatacagcagctagaagttggttcggatccatcgagcttccagttggaatcttgcttgcaatgattggtgcaccattcttcttattcttacttcaaagagggagggttgcttcatga

SEQ ID NO: 24366 - DNA, 1077 bp, Listeria monocytogenes
atgacattaaaagttggaattattggttgtggaggcattgcaaacgggaagcatatgccaagtttattaaaagctgagaaagcagaaatggttgctttttgcgatatcgttttagaaaaagccgaagccgcagcaaaagaatttggtagtgaaaatgcaagcgtatacacaaactatgtagaattactccaagataaatccatcgatgtcatccatgtgtgtacaccaaatatttctcatgcggagatttctattgcagcaatggaagccggaaaacatgttatgtgtgaaaaaccaatggcaaaaacaaccgaagaagcgaaaagtatgattgaagctgcagaacgtacgggcaaaaaattaacaatcggttaccaaaatagattccgcaaagactcggattatttgcaccaagtttgcgagaacggcgaattaggtgatatctattatgcaaaagcaaaagcgattcgtcgtcgtgcagtcccaacttggggtgtgtttttagatgaagaagcgcagggcggcggacctcttattgatattggaacacatgcgcttgatttaacgctttggatgatggacaattataaaccgaaatatgtagtaggaaacagttatcataaacttgctaaaaaagaaaatgcagcaaatgcatggggctcatgggacccaaataaatttactgtagaagattccgcatttggttttatcacaatggaaaacggcgcgacgatagtattagaagcaagttggacgcttaacacacttgatgtcggtgaagcaaggacgtctctatcgggaacagaaggcggcgcggatatggaagacggtttacgaattaacggcgaagcgcacagccaaatgtatgaaaagaaaattcaattagaagcaggtggcgttgatttttacgacggaacaggtgatgatccagcattaatcgaagcagaacaatggttagaagcaattgaaaaaaatacagatcctgttgttaaaccagaacaagcacttgttgtaacacaaatcttagaagctatttatgaatcatcgaaaacaggacagccagtttattttaattaa

SEQ ID NO: 24367 - DNA, 2307 bp, Listeria monocytogenes
atgaaacctacatggaaaatagggataatcgttgcagctgttccgttaataattatcgctgtcgtcttatggggatcttttaaggaggcaaggtataatcttgtctctctccctgatgacggggtagtcctaaataatgagcaagagacattgcaatttcagaagggcaatacgctttatcgtagttggaatagtgatcaattaattgcgaaaaacgataaagaagatactcgaaatgaaattatggagagtaccatactttatctaaataaagaagccttaatgtttactaagagtgttcctgtcattgatacaaatggggttagtagcaaactaaaaggaagacaagtctatcaacagaccaactcttcctataaatataaaaactccgaaattgtggaaaatagtattgtaaaactagcaaaccgtcaatactatctaaatgcagatgcaacactttatctcggtggtaaagaaattaaaaaagtgactaaaccgctacttttgattgataaaacaggtagtgtcactatttatgaaaataaaaagaaaagccgttttctgggtcatatgacgttgaaagtcaatgataaaacagttttagatgctagtaatgaaacgtataccgttggcgaacggaagattgatttagctagctttggtgggacagacaatgaaaagattgtcgtaaaagaagatgaaaagaaagaagataagaaaaagaccgcagaatctgcgaagaaaacagcaagtaatacctctcaatcagaaaatgaaagtaaccaaacaacaaaaggtacaggcaatcaactcaatgctaccaaaaaatacggaaataatttaaatgttggaaatggaacttctgattcagaaccaaacgatggtaaggatactaaaaataacggttcaggaagtaatgcgaatggtggaaccaatcaatcaggtctgaatgaaatagatgactatgaagctgttttacgtaaaatagaggacttaaataaaaaattagagcgaaatattccagtgctaagaatcggctatatcgcacctggagtgaccagcgtgaaagtcagctataactatgcagatccgaataacactttaattggcgtcactaaaattagcgccgtagatgaaaaaactggaaaaacagttaatacgcaatatgtttcagcagtagatacggaagctacactaaaaggactttcgccaaatggcaagtatcatcttgaatttacctatcaatatgatttaggaacaaataaaggcattcaagaagttaaaatgcaaagtgactcatttacaacgcaaactgttgccgcaatttatcaaatgcaaagcgttacaagcacaacaatgaaagtaaatatagcgcttgatgcacaaattgatgatgttaaacgagcaagaattaaagtaaccaagtcagatggagattttttctatatgaatgttagtgcgaattttttaaatggaaacggagaaattcttaatgcaacagggcttaagcctagtactgcttaccagtttcaaacagtgattgaaatgaaaaacggagaaacaattgaactaaacagctccgagaaatattacactatgcaagcaactgtattaaaaaatctaaaagctagtcagtctgtgaataaagttttacaagtgcaatatgattggagttcggctgattacaccctaaatcaagcaatcatcgaactggaagacgaggaagataatacagaagtagattaccaaattgttaaccaagaaaaaggtaatattcatcttgttccagacacaaaaagtgagttaatcaacttaaaagccaaactagtgctcaaaacgacaaataataacacaaaagaaagcaaaacatttgagtatcctgttaagcaagaaattgaatacgacaaacaagctaaattaacaatggacttaacgccatttcaaactgaagaaaatagtgaggctcagaccgaaaaacaagatgtagtagcagagaaagaaacgaatggaaatgatttaacagctaagatggaagatgttttagcccctcaaaacgcaacttatgatatgtccttttcgatgcaacgcaaagctctcgaaacctatcagttggcatttgaaaggaagatagctgggatagacgatgataattggaccatgtggaagagtcaacaagttacaacggatgaagcagggcaagtgaaggttacagaaaccatttcaaaactagctaaagatagcttcgattatcgtgtagctgtatacgatgcgcaaggtgcattacaactgtacgtttatcaaaagtag

SEQ ID NO: 24368 - DNA, 1167 bp, Listeria monocytogenes
atgagatacttaacggcaggagaatcacacggaccggggcttacaacaattattgaggggttaccagcaggaatgcctctactagcagaagatgtaaacaaagaactaaaaagaagacaaggtgggcatggtcgtggggcgcggatgcgtatcgaaaaagaccaagtacaaatcacggcaggaattcgtcacggaaaaacattaggcgcacccgtagcaatgtttgttgaaaataaagactggaagcattgggaaacggttatgagcattgaaccagttccagaaaaaaatgaaaagtctcgtcgcgtatcccgtccacgtcctggacatgcggatttggttggcggcatgaaatatggtcataacgatatgcgtaatgtactagaacgttctagcgcgcgcgaaacgactgttcgcgtggcagcaggagcagtagcgaaaaaactattgcacgaacttggcattgaagttgccggccatgtacttgaaattggcggaacgcgtgcgaatttaacacgtgattacgcggttgcagaaatccaagaaacatccgaagcttccccagttcgttgtctagacggcgtggctgcagaagaaatgatgcaaaaaattgatgacgcgaagaaaaatggcgacacaattggtggaattgttgaagttgttgttggcggcgtgccagctggacttggtagttacgtacaatgggacaaaaaattagatgcgaaaattgctcgcgcgattgtaagtatcaatgcatttaaaggtgctgaattcggtgtcggttttgaagccgctagaaaacctggtagcgaagtgatggatgaaattttatggagtaaagaagatggctacactagacgtacaaacaatcttggtggattcgaaggcggaatgaccaatggtatgccaatcgttgttcgcggcgtaatgaagccaattccaacattatacaaaccacttcaaagcgtggatattgattcaaaagaaacgtttaatgcaagtgtagaacgttcggatagttgtgcagtacctgctgcaagcgtagtagctgaagctgttgtcgcttgggaagttgcagtagctgttttagaaaaatttgatggtgatcgttttgatacgcttaaaaaacatgtggaggaacaccgaaacttaacgaaggagttttaa

SEQ ID NO: 24369 - DNA, 1350 bp, Listeria monocytogenes
atggaaaagcattatgattatattgcgattggtggcggtagtggcgggattgcttcgattaatcgcgcagccatgcacggagcaaagtgtgcattaattgagccgaaatttttaggtggaacttgtgtaaatgttggttgtgttccgaaaaaagtcatgtggtacggcgcacaaattaaagaagcgatggatttatacgcagatgcttatggttaccaagtggacgcgagcttcaacttccaaaaactagtcgaaaatcgagaagcgtacattgaacggattcgaggttcatacaaaaatggacttgataataataatgtagattggataaaaggttatgccgaatttgtcgatgaaaaaacattgcgcgtaaacggcgaactagtgacagcggatcatattttaattgcaacgggcggcgaaccagcgcttccttctattccaggtgcagaattcggcatcacatcagatggcttttttgcattaaaagaacttccgaaaaaagtggcggttgttggcgcgggctacattgcagttgagctagctggtgtattacaacaacttggctcagaaacgcatttgtttgtacggaaacatgcaccactccgaaatttcgatccacttttaacagatacactaaccgaaattatcgagcaatcggatatgacgttgcataaacacgccattccgcaaaaagtcgaaaaaaatccagatggcagtttgacgttgagcttagaggatggccgcacagaaaccgtcgatacgcttatttgggcgattggacgtaaaccagttatcaaaggtcttcaaatcgaaaaatcgggagtagaacttctagaaagtggtcatatcgccgtagataaattccaaaacaccaatgtagcggggatttatgcagttggcgatgtaacaggtcattatgaattaactcctgtcgcgattgcagcgggccgccgtttatcagaacgccttttcaataacaaaaaagatgcacatttaaactatgaaaatatcccaaccgtcgtatttagccatccagctatcggaacagttggtctaacagaaccagaagcaatcgaaaaatatggcaaagaaaatattaaagtgtacacttcaagctttacctcaatgtatacagccatcacagaccaccgcgaaccttgtcgaatgaaattaatttgcgaagggaagacagagcgcgtcattggcttgcacgggattggttacggtgtggacgaaatgattcaaggattcgctgttgctattaatatgggcgcaacaaaagccgatttcgacaatacagtcgctatccacccaacaggatccgaagaatttgttacaatgaaatag

SEQ ID NO: 24370 - DNA, 978 bp, Listeria monocytogenes
atgagtgatttatttactacaatcaaaggacaagttactgggaaaaacgtgcgcatcgtactacctgaaggaacagatgaacgtattgttggagcagctgcacgtctgcaaaaagaaaatatcgtaaaaccaatcttacttggaaataaagcggagattgaagcaaaagcaaaagaaattggtgtttctgttgaaggaatcgctattcatgaacctgcgaccgatccactttttgatgaattagtggctgcatttgtagaacgtcgtaaaggtaaagcaacagaagaagctgcgcgtaaaatgctagttgatccaaactatttcggcacaatgcttgtatacacaggaaaagcagaaggtcttgtaagtggcgcggctcactctactggcgacactgtacgtccagcactacaaattattaaaacaaaaccaggcgtaagtaaagttgccggcgcgatgattatggttcgcggtgaagaacgctacttattcagtgatgtagctatcaatattgcaccagttgcagcagacttagcggaaaatgcgattgttagtgcggaaacagcagaaatcttcggcattgacccacgtgttgcaatgctaagtttctctacaaaaggttctgcaaaatccgatgaaacagaaaaagtcgtagaagcaactgctcttgcaaaagaaaaagcacctgaattaacgcttgatggtgaattccaatttgacgcagcatttgttccaactgttgcggagaaaaaagcaccaggatccgttatcaaaggggacgcaaatgtatttatcttcccaagcttagaagcaggaaacattggctacaaaattgcccaacgtttaggtaactttgaagcagttggaccaattttacaaggcttaaatgcaccagttaatgatttatctcgtggttgtaatacagatgacgtttataacttaacgttgattacagcagcgcaagcagtgaataaataa

SEQ ID NO: 24371 - DNA, 1194 bp, Listeria monocytogenes
gtgttaaaattcgaacacgtaacgaagacttataaagggggcaaaaaagcggttaatgatctaacacttaacatcgataaaggagaatttgtttgttttatcggtccaagtggttgtgggaaaacgacaacaatgaagatgattaaccggcttattgaacctacagaaggaaaaatatttattaatgataaagacatcatggcggaagatcccgtcaaactaagacgctcaattggttatgttattcaacaaattggcttgatgccacatatgacgattcgcgaaaatatcgtccttgtaccaaaattacttaaatggtccgaagagaaaaaacaagaaagagcaaaagaattaattaaattagttgatttacctgaggaatttttggaccgctacccttacgaattaagtggtggacagcagcaacgtataggtgttctgagagctcttgcggcagagcaaaacttgattctgatggatgaaccttttggcgcgctagatccaattactcgtgattccctacaagaagaattcaaaaatttgcaaaaagaacttggtaagacgattattttcgttacccatgatatggatgaagcgattaaactggcagaccgtatcgtaattatgaaagatggcgaaatcgttcaatttgataccccagatgaaattttgcgcaatccagcgaattcatttgtggaagatttcataggtaaagatcgcttaatcgaagcgaaacctgatgttacacaagtagcacaaatcatgaacacaaatccagtctctattacagcggataaatcactccaagctgcgattactgtcatgaaagaaaaacgagtagatacgttacttgttgtggatgaaggtaatgttttaaaaggctttatcgacgtagagcaaattgatttaaatcgtcgtacagcaacttctgttatggacattatcgagaaaaatgtcttttatgtttatgaagataccttgcttcgtgacactgtacaacgtattctaaaacgtggatataaatacattcctgtagtggataaagataaacggcttgtcggaattgttactcgtgccagcttagttgatatcgtatatgactccatttggggtactttagaagatgcgacagaaaaccaggaggaacaggcggattccaaaacgacagaaccagaaatgaagcaggagggataa

SEQ ID NO: 24372 - DNA, 759 bp, Listeria monocytogenes
atgtttaaaaagctatttcgacaagatgaaaatatattaaatagtgaacttgcagaagatttgcctatcccgcgccatgtagctattattatggatggtaatggaaggtgggcgaagaaacgttttttgccgcgcattgctgggcataaagaaggtatggatgtcgtaaagcgagtgacacgatatgctaatgcaattggcatcgatgttttaacgctttatgcattttcaactgaaaattggaagagacctacagatgaagtggattttttaatgaaacttcctgtagaattttttgactcttttgtaccagagttgattgaagaaaatgttcgtgttaatgtgatggggtacagagaaaatttacctgatcatacgatgcgagccgtggagaaagccatagctgatacagcacattgcacagggcttacgcttaattttgcacttaactacggtggacgttcagaaattattactgcggccaaagaagcgatgaaagaattagaacttgaagggaaaagtgcagatgatctgacagaagaaaaattaaatgatcatttgatgagtagtggtttgggcgatcctgacttgttgattcggacgagtggggagcttagattaagtaattttatgctttggcaacttgcgtatagcgagttttattttaccgatacacattggcctgatttttcaaaagaggattttttacaggcaattattgaatatcaaaaccggtcacgtcgttttggagggctctag

SEQ ID NO: 24373 - DNA, 906 bp, Listeria monocytogenes
atgagtgaaccatttaaatcaggatttgtagctatagttgggcgacctaacgttgggaaatcaactttattaaatcacattattggccaaaaaattgctattatgagtgataaagcccaaacaacaaggaataaagtacaaggtgtttatacaacagatgaatcacaaattatttttattgatacaccaggtatacataaaccaaagcataagttaggcgatttcatggtgaagattgcgctaaatacgttccaagaagtagacttaatttattttgtaatcgatgcatctactggatttggacgcggagatgaatttattattgaaaaacttaaaaacgtacaaacccccgtttttcttttgattaataagattgatttgattgctccagaagatttattcaagttaattgaacagtaccgcgatctgatggacttcgatgagattattcctatttcagcacttcaaggaaataacgtacctaacttactagaacaaacgaatgctaacttagaaattggaccaatgtattatccaaaagatcaaatcacggaccaccctgagcgtttcatcatctcggaattaattcgtgaacaggttttacaattaacaagagaagaagttccgcattctgtggcagtggttattgaaggaattgaaaaaaaccctaaaacagaaaagcttacaatcaatgctacaattattgtagaaagaagcacacaaaaaggaatcattattggtaaacaaggtcaaatgctaaaacaaattggtatgcgcgctagaaaagaaattgaacgcttactcggctccaaagtcttcttagaaatttgggtaaaagttcaaaaaaactggcgtgacaaagaacattatttgcaagattacggtttcgaccgcgaagagtattaa

SEQ ID NO: 24374 - DNA, 822 bp, Listeria monocytogenes
atgaaaaaattaacaaaagggttaggaattttacttgcatcaagccttgttttaggattagcagcatgtggaggaggcagtgacgataaagccttaagcacagaaaaaatcaccattggaacaactgcaggacctcaccaacaaatcgctgaagaagttcaaaaattagcgaaaaaagacggtcttgaaatcaaaatcaaaacatttgatgattataatacaccaaatacagctttaaacgatggtgatttggatgcgaataactaccaaacaatcccatttttagagcaacaaaagaaagataaaggctacaaattagatgttgcttttaaaacagtagctttcccaatgggtatttactccaacgatattaaagacttaaaaaaccttaaaaaaggcgacaaaattgccgttccaaacgatccaagtaacgaataccgtggtttaaaactatttgaagatgctggcgttattaaattaaaagatggcgtggaagaaaaagcaacgaaaaaagacattgctgaaaacccgcttgaccttgaaatcgttgaacttgaagcttctcaaatccctgcacaattagatgaagtcgcagccgcagctatcaatactaactttgcaatgggcgctggactttctattaataaagatgccatttaccacgaacctacaaaagacaatccatatccaaatgttttcgttgttcgtagtgccaacaaagacgatgaagtcgtaaaaactttagaaaaatattaccattcagatgaagtaaaagcatttattgaaaaagaatttaatgggtctgtagtacctgcattctag

SEQ ID NO: 24375 - DNA, 1533 bp, Listeria monocytogenes
atgacaacgagtatcatagaaagaattgatgcatgggcagagaagacaccggatttcccttgctatgaatatgctggaacacgtctttcctataaagaactaaaacggcaatctgatgcattcggctcttttctactaaaaaacctaattactgacaaagaaaaacctattatcgtttacggccatatgtctcccctaatgttagttgcattcttaggctctatcaaatcaggtcgagcttatgtaccagtagatgtttctatgccagttgaacgtatagaacaaataaaaaaagcagctgatccttctatgtttatttgcacagaagagctgcctaacaaccttactattactggttgtccggtgctaacacaagatcagctaatggacgctttagaaaaacatttcggagaagttccagacaaagaagcatgtgtaaacaatgatgataactactatattatttacacatctggaagtacaggaaatcctaaaggcgttcaaatcagtcaaaacaacctagtaagttttagtaactggattttacaagacttttctttaagccaaggattgcgtttcttaaaccaagcgcccttctccttcgatctatccgttatggatttatacccaagtttactatcgggtgggacgcttgtacctcttgataaaacaattactgcgaatatgaaagatctatatcgtgaaatacctgctcaaaacttggatgtatgggtttctactccttcttttgcagatttgtgcttactagacgagaactttaaccaagaaaataacccccgcttaactcgtttcttattctgtggtgaagtacttgccaagaaaacagcaagcgaattactggaccgtttcccagatgcagttatttacaatacatacggacctacagaagcaaccgtggctgttacccaagtgaaagtaactcgagagattatcgatgcttatccaagcttaccacttggcgttattaaaccagatatgcgtttacacatcgttgaccaagaaactggtgaggttcttccagaaggcgaaaaaggagaaattgtcctaattggtgctagcgtttctaaaggttacttaaatgaacctgaaaaaacagaccaagtattcttcgattataaaggttatcaagcctatcgcacaggagactctggtattatcaaagacggttatctgttcttccaaggacgtcttgacttccaaattaaacttcatggttaccgcatcgaattagaagatatcgaaaacaacctaaaaaaagtaagttacattcaaaactgcgctattattccgaaaatgaaagatgaaaaggtagatatgttagtcgctcaggtcatcccaactacccatgatttcgaaaaagaataccagctaagtgcagcaataaaaaaagaactaaaagaatttatgccagcatacatgatcccccgaaaatggatttataaaacggacttcccgttaactatgaatggcaaaattgatcgcaaatcacttaatagtgaggttaacaagtga

SEQ ID NO: 24376 - DNA, 1713 bp, Listeria monocytogenes
atggcgtttgatgcaatgtttttaaaagcaatgaccgaagaacttgccgagcacggagaaagtggtcgcattatgaagatccaccaaccgttttcgcatgaacttgttttatatattcgaaaaaaccgtgaaaataaacgtctacttatttcctcgcatcctagctatgcgcgcattcagtggacagatgatattcctgaaaacccagcaacaccgccgatgttttgtatgttactgcggaaatatttagaaggtgcaattattgagtcgattacgcaacttcctaatgaacggattttacaatttagtattcgtggcaaagatgacatcggcgaaaaccgtttttgtgatttatttgtagaaattatgggacggcatagtaatatcacccttgttgaccgtgcgaaaaacgtgattgttgattgtattaaacacgtttccccagcgcaaaatagctaccgaacacttttgccgggagcgacgtatgttttaccaccagcaacggataaactgaatccattcgaggttacttcggagcagattctggatagactggatttctcagcaggtcgaattgataaacaactcgttcaaaactttgcgggattcagccctttgcttgctcgtgaaattgtgtttcgcgctggaaacttaacggcagattcgcttgtcgccgccttttttgaagtaatgggacttgtgaacgaccatctaggaagtgccgctgttccaaacgagtggcgcatccaaaataaagaagattactatttcttctcgctccgtcatgtcgatgcggagattacggaattcgccaacttgagtactcttctagaccatttttatatcggtaaagcgcgtcgtgatcgcgttcaccaattcgcgcatgatttggaaaaactattatctaatgaactggctcgcagtagactgaaaatcgaaaaactcgaaaatactttactcgaaacagaaaaagcagatgtttatcgtatccaaggcgaacttctaactgccaacctgcatttaatggaacgtgggatggaagaaattaccgtcgaaaacttttacgatgatatgaagaaaatgacgattccgcttgatactagaaaaacaccatccgccaatgcccaaagttactttagccgttaccaaaaactgcgtaatgccgtcgaagtagtgaaagagcaaatcgcactcacaaaagaagaaatcacttacctagaatctgtggaatcccaactagaaacgtccggcccgcaagatgtggaagaaatccgccaagaactcgctgaacaaggctatcttcgttacaaacagaaaaaaggcagccgtaaaaaagcgactttacctgctccagaaaaatatacttcttcgaccggcttaacgattttagtcggaaaaaataataaacaaaatgattatttaacgaataaattagctaggaataatgaatactggttccacgtgaaagatttgcctggttcgcatgtggtgattcaatcgaataatccagatgagacatcgattacagaagccgcaatgattgccgcctattattcgaaagcgcgcctttcagcaacagtccccgtcgacggcacgcttgtaaaacacgtgaaaaaaccaaatggtgccaagcctggttatgtcatttatgataaccaaacgacttatttcgttacacctgatgaaaagctcgttttagagttaaaaaattaa

SEQ ID NO: 24377 - DNA, 1281 bp, Listeria monocytogenes
atgaatgcttttgataaattttataaaaaaacagtagaagaacgacatgcaattttggcggaatatgctgatttaaatgaagaagaacaagcatttttagcttctacaggggcgctttcttttgataaagcgaatcatatgattgaaaacacgattggtatttattcgctgccgctcggattaggaatgaatatgcttttaaatgataaacgttatgttgtacccatggcgatggaggagccttctgttgtggcggcacaaagcgctggggcaaaacttattgcacaaaatggcgggataactggaagtgcaacgaaacgaaaaatgattggtcagattgagttgatttctgtttctgatatccaagcagcaaaagaaaacatcattgcgaacgaagaacaactaattgctatcgctaaccaagctcatccatcgttacaaaagcgtggcggtggtgcggttaaaattcaagtcagaacagcacaaacagcgaatgacgaaacgttatttatcgttcatttactcgtagacacccaagaagcaatgggcgcgaatatggtcaatacgatggtcgaaaccctagcaccagaattagaaatgttgacgaacggaacagccaatatgcgcattttatctaatttagtagatgaagcgaccgcaactgctgtttgtcggattaatccagaaagcttggcaaccaaaacccagagcggtgaatgggttcgtgatagaattattgctgcatatgaatttgccgacgcggatatttaccgggcagcaacacataataaaggaataatgaatggcattgatgcggtaattatggcgtttgggaacgattggcgcgcggtagaagcagcaagtcacgcctacgcagccagaacaggaagctataaaccgatgtctaagtggtcaaaagatgcggacgggtatttggttggggagctaactttaccgatgccagtggcctttgtaggtggttctatagcgattcatccgattgcgagtctttctaaaaaaattgctcgagtagaatcagcgaaggaactagcgatgttagtttgtgccgttggattaacgcaaaatctcgctgctttaaaagcactcgtaacagaaggtattcaacgtggtcatatgtcactacaagcgaaatctcttgcaatgacagctggcgcagaagcagatgaaatcgaaatagtagccacatttttgcaagaaagcaaacaattaaacgtagtcgctgccaaagaatttatcgcgaaattgcgcagcgaaaaataa

SEQ ID NO: 24378 - DNA, 1140 bp, Listeria monocytogenes
atgtccgccattcgttatgaactaattaaaacagataaacaaacaggtgctcgtcttggtaaaatccatacaccgcacggcacatttgatacacctatgtttatgccagttggcacgcttgcgacggtaaaaacaatgtcacccgaagaattaaaagccatgggtgcaggtattattttaagcaatacgtatcatttatggttgcgtcccggagaagaacttattcgagaagcgggcggactacataaatttatgaactgggatcaaccaatcttaacggattcaggtggttttcaggtgtttagtttgagtaaaatgcgtgatatcaaagaagaaggcgttcatttccggaaccatttaaacggggacaaacttttcttatcaccagaaaaagcgattcaaattcaaaatgcacttggttcggatattatgatgagttttgacgaatgtccaccatatccagcgtcgcatgaatatatgaaaaaatcagtagaaagaacatctcgctgggctgaacgcggcttaaaagcgcacgttagaccagaagaccaaggtttgttcggtatcgtccaaggtggagcttacgaagatttacgtgcgcaaagtgcgaaagatctcgtttcgcttgattttcctggttattccatcggcggcttatcagtaggggaaccaaaagatgtcatgaaccgcgttttggaacacacgacaccgctgttaccagcgaacaaaccacgctatttaatgggtgtaggttcgcctgactcattgattgatggcgtgattcgaggagtggacatgtttgactgtgttcttcccacacgtattgcacgaaatggtacttgtatgacatctagtggtcgcttagttattaaaaacgctaagttcacacacgatttccgtccaattgatgaaaattgtgattgttatacatgtaaaaattactcgcgtgcatacatccgacacttgattcgttgtgaagaaacatttggaattcgacttacaacttatcataatcttcattttctgttaaacttaatgaagcaagttcgtggcgctattatggaagatcgtcttgctgattttagggaagaattttttgagcaatatggattcaatcgtcctgatgcaaaaaatttctaa

SEQ ID NO: 24379 - DNA, 1281 bp, Listeria monocytogenes
atgggtgatagcgaaatttatgtaagtttagacattggaacagcttctgtgaaagtaatcatcgcagaaatggctgacgatagactcaatattatcggtgttgggaatgtcgaatcttccggaataaaaaaagggattattatcgacatagacaagactgtagaatccattaaaaaggcaattgaacaagcagaaagaatggttggcgttgaaatttctcaagtaatagttggggtagtatcgagtcaagtgcatttagaagcttgccgaggaattgtggcagtaggtagcgaaaaccgtgaaattacagatgaagatgtctggaatgtaatggatgccgctcaagttgttcctctatctcctgaaagagaaattattaacactattccagatcaatttgttgtagatggattaactggaattacagatccacgtggaatgattggtgttcgtctagaaatggaaggtacattaatcactggttcaaaaacaattttacataatacgttacgttgtgtggaacgtgcaggacttgaaatttctgatattgctttacaaccacttgcggaggcatctatttccttgtcagaagatgataaagaatttggaacagcactcgtgaatgttggtgcaggaactacaactgttagtgtgtttgagcaaggacgactaacttatactggtgtcattccagttggtggagataatatcaccaaagacttatcacttggactaaacacttctactgcaaatgccgatcgcgttaaattggatcatggctatgcattttatgatgatgcttctccagatgaagtttttgctattgatgttatcggtagtgaccaaaaacaacattttacacaagtagaagtagcagatattatcgaagcgcgtatggaagaaattttccaattagtagtggaagaacttactcgtgtcggtaaaacgcatcttccaggaggttatgtactaactggtggttcgatggctattccaggggcaattgatttggctggaaaaaccttagcagcgcatgttagactagcgattcctgattatattggtgttcgggaaccttcctttacaaccgcagtaggcttaattaaatatgcttatcaaatggctgaattagaaggacgcgacgtaagcagttcggcaaacgaacctcgttacgacgacgaagcaccaaaacaaaaacaacctaaaccaaaacaaaagaaatcagatgacgaaaaagtatcaacgaaaatgaagaattttttcggcgcattttttgaataa

SEQ ID NO: 24380 - DNA, 669 bp, Listeria monocytogenes
atgttaaagaaaacaattgcaataataattttaatcatcgggctactattaattttttccccattcatcaaaaacggcattgtgaaatacatgagtggtcatgaaacaatcgagcaatataaagcatcagatataaagaaaaataatgaaaaagacgctacatttgattttgaaagtgttcagctaccttctatgacatctgttattaaaggagcggcaaattacgacaaagatgcagtcgttggttctatcgcagttccatctgtagacgttaacctattagttttcaagggaacaaatacagctaatttgctagctggagcaacaactatgcgttctgatcaagtaatgggtaaaggtaattatccgctagcaggtcaccatatgcgtgatgagtctatgttgtttggcccaataatgaaagtgaaaaaaggcgacaagatttatctaacggatcttgaaaatttatacgaatatacagttactgaaacaaaaacaattgatgaaacagaagtaagcgttattgataatacgaaagatgctagaataacgctgattacttgtgataaaccaactgaaacaacgaaacgttttgtcgcagttggtgagctagaaaaaacggaaaagctaacaaaagaactagagaataaatatttccctagtaaataa

SEQ ID NO: 24381 - DNA, 921 bp, Listeria monocytogenes
atgtacaaacaaatgaaattaaaagcgacagatgggctagatttacatttacatatatgggatgaagttgaaaatccagttggtgtagttcaaattgttcacggcatggcagagcacggggctagatatggcgtgtttgctgaacgtttgaacgaagcgggatatattgtagtagcagacgatcatcgtgggtttggaaaatcggctatagatgaaagttatttgggtcatttagatggtgaaacaggatttcaagatatgataaaagatgaagtagtcgttcgaacttatttaaaagaaacttatcccggactgagctattttattttcgcacacagtatgggaagtttcgtcatccggacttttatggcgcaacatcaagttgatggagtaatactgagcggaagcggattacaaccaatccctttactgaaaatgggacaaattataacgaagcaacggataaaaaaagatgaaatgaaacgaagcggatttctaaataaattagcattttggggttataataagccgtttaatgaaaatcatcgcttcagttggctttctcgtgatgtggcgatttatgaagcttatgagaaagatccgttttgtgggccggtagtcggaacgagtggatttttccataatctttttgaagccgttaaaataagccagcaaaaagaaactgtcgaaagtgtgccgaaagatttgcctattttattactctcagggagtgatgatccggttggccattttggaaaagatacgcctaaaattgcgttagctttagaagcagctggagtggaagatgttacctataaaatatacgaagatgcgcgtcatgaacttgtcaatgaattatgtaaagaaactgtttttaaagatgttattgcttggttgaatacaaaaaacaaggaagcctaa

SEQ ID NO: 24382 - DNA, 528 bp, Listeria monocytogenes
atgccattatcgccgctggatatacataacaaagagtttacccgtggttttagaggttatgacgaagacgaagtaaatgacttcctcgatcaaatcattaaagattatgaacaagttatcaaagagaaaaagcgtattgaggacactttaaataatagtgaagaacgtttaggtcattttacaaacattgaagaaacattaaacaaatcattaatcgtggcacaaacagctgccgaagaagtgaaagcttccgctgaaaaagaagccaaacttattatccgtgaagcagaaaaaaatgctgaccgaattctaagcgactcactttctaaagcgcgcaaaatcgcgattgaaattgaagacctaaaacgtcaatccaaagtattccgtgagcgtttacgtatgctagtggaagcacaaatggatttaattaaaagtgaagattggcaacaaatgatggcttacgatgtagatgcgacagaacttgcgtctattaaggaagtagaatcagctgaatctgaagaacgttaa

SEQ ID NO: 24383 - DNA, 1305 bp, Listeria monocytogenes
ttgatattaaccattaaatttttaattatagctttacttattgctatatcagcatttttcgtggcaacagaatttgcgattgttaaaatgcgaccgagccgtttagaccaattaattgcggagaaagataaacgcgcggtcctcgctagacatatttacaatcatttgaatgcttacttatcagcctgccaacttgggataacgattagctcccttggacttggttggttgggagaatctacggtagaagcggcgttacatccgttatttagcttaatggaacttccgcaatcagctattacgattctatcctttacaattgcatttctatttatcacattcttgcacgtagttgttggggaacttgtaccgaaaactttggcgattgataaaacagagacagttgcacttgcggtagctcgtccactgcatattttttataaagtgatgttcccgttcatttggattttaaatggttctgcagttttcatcgcgcgtctttttggtctagagccagcttctgagcacgaaatcgctcataccgaggacgaattaaaaataatcgttggtgaaagttataagagtggtgaaatcaaccaatcagaattccgttatgtgaataagatttttgattttgatgaacgtatggcgaaagaagtcatgattccgcgaacagagattgtgaccgttgatactggatctacaatcggggaattatccgacattatgcaaaatgaacgttatacacgatatccagttattgatggagataaagaccacgttatcggcgtacttaatttaaaagaaattttatcagcgtatgtcgaacatggctcgagtccaagttttagcattgatccttacgtaaaaccaattattcgtgtgattgaaacgattccgattaaagaattgcttttccgtatgcagcgtgaacgttcccacattgctattctgcttgacgaatatggtggtacttctggacttgttacggttgaagatattgtagaggaaatcgtaggtgatatccgcgatgaatttgatgccgatgaaattccagaaattcgcaaaatcaaagatggacactatattgtagatgcgaaacttctgattgatgaagtaaataacattttaggtactgaaattgaggaagaagaagtcgacacaatcggcggttggttcttaacacaaaattatgaagtagaagttggggacgaaattgattatgatggattcattttccgcgtaaaacaaggcgaacctcatcatattgaatatatcgaaatcatcaaaaaaacaaatgattaa

SEQ ID NO: 24384 - DNA, 2514 bp, Listeria monocytogenes
atggctggactattgaaaaaaatttttgaatcaggaaaaaaagatgttaaatatttggagagaaaagcagatgagattattgctttagcggatgaaactgcggctctttcggatgatgctctacgtgaaaaaacagtagagtttaaagagcgtgttcaaaaaggtgagacgctggatgacttattggtagaagcatttgctgttgccagagaaggtgcgaaacgtgcgctaggattgtatccatttaaagttcaattaatgggtggaattgttctccacgaaggtaacattgcagagatgaaaactggtgaaggtaaaacgttaacagcgacactaccagtttatttaaatgcactttctggtgaaggggtgcatgtggttactgtcaatgaatacttagctcatcgtgatgccgaagaaatgggagttttatacaatttccttggactttctgtagggcttaacctaaatgctttatcgagtacagaaaaacgagaagcttatgcatgtgatattacgtatagcacaaataatgaattaggatttgactatttgcgtgataacatggtcgtttacaaagaagaaatggtacaacgtccgctagcttttgctgttatcgatgaagtcgattccattttggtcgatgaagcgagaacaccattaattatttctggagaagcggaaaaatcgactattctatatgtgcgtgcaaatacttttgtccgtactcttacagaagaggaagattatacagttgatattaaaacaaaatctgttcaattaaccgaagacggtatgacaaaaggagaaaactactttgatgtagagaacctttttgatttggaaaataccgtaattttacatcatattgctcaagcgttaaaagctaactatacaatgagtctagatgtcgattatgttgttcaagatgatgaagtattaatcgttgaccaatttactggtcgtattatgaaaggtcgtcgtttcagtgaaggcttacaccaagcgcttgaagcaaaagaaggcgtaactattcaaaacgaatccaaaacaatggcgacaattacattccaaaactatttccgtatgtataaaaaacttgcagggatgacgggtactgcaaaaacggaagaagaagagttccgcgatatttataatatgcgcgttattgaaattccaactaataaagtaattattcgtgatgaccgtcctgatttaatttacacaacgattgaagcgaaatttaatgcagtagttgaagatatcgccgagcgtcatgcaaaaggacaacccgtattagtcgggactgttgcgattgaaacatccgaacttatttctagcaaattaaaacgcaaaggaattaagcatgatgtactaaacgcgaagcaacatgaacgcgaagctgatatcattaaacatgcaggtgaacgtggtgcggtagtaatcgcaaccaacatggctggtcgtggtacggatatcaaacttggtgaaggtacgattgaagctggaggtttagcagttattggtacagaacgtcatgaatcacgtcgtatagataaccagttacgtggtcgttctggacgtcaaggggaccctggtgtgactcaattttatctttctatggaagatgaattgatgcgtcgtttcggttcggacaatatgaaatcaatgatggaacgctttggtatggcagaagatgctatccaaagtaaaatggttagtcgtgcagttgaatccgcacaaagacgtgtggaaggaaataactttgattcccggaaacaagttttacaatatgatgatgtacttcgccaacaacgtgaagttatctataaacaacgctatgaagtaattaacgcagaaaacagtttacgcgaaattattgaacaaatgattcaacgtacagtcaactttatcgtttctagtaatgcatcaagtcatgaacctgaagaagcttggaatttacaaggaattatcgactatgtggatgcgaacttacttcctgaaggtacaatcacactagaagatctacaaaatagaacaagcgaagatattcaaaatctaattttagataaaatcaaagcggcttacgacgaaaaagaaacactactacctccagaagaatttaacgaatttgaaaaagtagtattgcttcgtgttgttgatactaaatgggttgatcatattgatgcaatggatcatttacgtgacggtattcatttacgtgcgtacggtcaaattgatccgcttcgtgagtatcaatcagaaggcttcgaaatgtttgaagcgatggtatcttccatcgatgaagacgtggcgcgttatatcatgaaagctgaaattcgccaaaaccttgaacgcgagcaagttgccaagggagaagcaattaatcctgctgaaggtaaaccagaagcgaaacgccaaccaatccgcaaagatcaacacattggacgtaatgatccatgtccttgtggcagcggcaaaaaatataaaaattgtcatggtaaagaagcatag

SEQ ID NO: 24385 - DNA, 1776 bp, Listeria monocytogenes
atggaaaaacgtacaagttactgcggtgaattaaacgaagcgcatattggtcaaagtgttgtccttcatggttgggtgcaaaaaagacgcgacttaggtggtttaatttttattgatttgcgtgaccgtgagggaattgtgcaagtggtcttcaatcctgaattttcaaaagaagcgcttgaaatcgctgatagtgttcgaaatgaatttgttgttactattaaaggaacagttcatgctcgtggtgaaaaagctatcaatgaaaaattagcaactggtaaagtagaagttttagcagaagaaattacgattttaaatacttccaaaacgccaccattttatattgaagatggagtgaatgtttcggatgaattgcgtttgaaataccgttatttagacttacgccgcccagaaatgaataatattttcaaaatgcgtcacacagtaacaagaacgttccgcaataaactagatgcgcttggattctttgatatcgaaacaccttatttaacaaaaagtacgccagaaggtgcacgcgattatcttgtgccaagtcgtgtttatcctggtaacttctatgcattgccacagtccccacaaattttaaaacagttactaatgactgctgggttcgataaatattaccaaatcgtacgttgcttccgcgatgaggatttgcgcggtgaccgtcaacctgagtttacacaaatcgatttagaaacaagctttttaacgaaagaagaaatccaagcgattacggaagatatgctggtagatgttgtcaaagaagcaaaaaatatcaccattgaaaaaccgtttcctcgtatgacatataaagaagcaatggatcgttttggcagtgataaaccggatattcgttttggtttagaattacaaaatgtatccgatgtcgtaaaagatgttgattttaaagtcttccaatccgcaatcgaaaatggtggcgaagtgaaagcaatcaatgcaaaagcagccgcagctaatttttcgcgtaaagatttagacgcacttggcgtttttgttgctaactacggtgcaaaaggtcttgcttggttaaaagtagaagctggtgaactaaaaggtccaattgctaaatttttccctgaagataaagcggcagaacttaaagtagcactacaagcagaagatggtgacttattactatttgcagctgataaagcagatatcgttgcagcatcacttggggcgcttcgtaataaacttggtaaagacttaaacttaatcaatgaagaagaacttgctttcttatgggtgactgattggcctctatttgaatacgatgaagaagcagagcgttatgtatctgcgcatcatccattcactttaccaaaagaagaagatatcccgcttcttgaaacggattcttctaaagtgatggcagaagcttatgatatcgtattaaacggatatgaaatcggcggcggttcattacggatttataaaaaagaagtgcaagaatcgatgttccgtgcacttggctttacggatgaatcagcgaaagaacaatttggcttcctaatggatgcgttagaatatggtacaccgcctcacggtggtatcgcgctaggattagatcgtatcgttatgatcttagctggtcgaaacaacttgcgtgacacaattgcattccctaaaacaggtagtgcagtggatccgctaacaaacgcaccaggtgaagtgagtgaagctcagctagcagagttgaaactcgaaacagtaaaaaaagaaacaaactaa

SEQ ID NO: 24386 - DNA, 1293 bp, Listeria monocytogenes
ttggaaaaaattattgtacgcggtggaaaacagttaaatggttctgtgaaaatggaaggtgccaaaaatgctgtattaccggtaatagctgctacattacttgcgagtaaaggtactagcgtattaaaaaatgtcccaaacttgtctgatgtattcacaatcaatgaggttcttaaatatctaaatgcagatgtttcttttgtaaatgatgaagtaacagttgatgcgacaggagaaattacttctgatgcaccttttgagtacgttcgtaaaatgcgtgcttccattgttgtaatgggaccacttttggcacgtactggttcagcgcgtgtagctttacctggtggatgtgcaattggttctagacctgttgatttacatttaaaaggctttgaagcaatgggcgcagtcgtgaaaattgaaaatggttatattgaagcaactgctgaaaaattagtaggtgctaaagtatacttagatttcccgagtgttggagcgacacaaaatattatgatggctgcgactcttgcagaaggtacaacagtcattgaaaacgttgctcgtgaacctgaaattgttgacttggcaaacttccttaaccaaatgggtgctagagttatcggtgcaggaacagaagtaattagaattgaaggagttaaggaattaactgcgactgaacattctattattccagaccgtattgaagcaggaacatttatgattgctgcggcgattactggtggaaatgttttaattgaagatgcagttcctgaacatattagttcgttaattgctaaacttgaagaaatgggcgttcaaatcattgaagaagagaacgggattcgtgtaattggccctgataaattaaaagctgtagatgttaaaacgatgccgcatccaggtttcccaacagatatgcaatcgcaaatgatggttattcaaatgctgagtgaaggcacaagcatcatgactgaaactgtttttgagaatcgttttatgcatgtagaagaaatgcgcagaatgaatgctgatatgaaaattgaaggacattctgttattatttctggtccagctaagttacaaggagcagaagttgcagcgacagatttacgtgcagcagcagcgcttattcttgctggtttggttgcagatggctatacacaagtaactgagttgaaataccttgatcgaggctataataatttccacggaaaactacaagcgcttggtgctgatgtggaacgtgtagatgattccaaagtcgatgtaacaaacttagcgtctttattctaa

SEQ ID NO: 24387 - DNA, 2217 bp, Listeria monocytogenes
atggcgaaagaacaaaatctgacagctgagcaggtcatcgatatggcttctcattatatgaatcaggaacatctagcgcttgtaaaaaaagcgtatgaatttgcgcgcgattctcataaagagcaatttcgtaaatcaggtgagccgtatattattcatccaattcaagttgccggcattttagtcgaattaaaaatggatccatcgaccgttgcatctggatttttacatgatgtcgtggaagatacaccagtcacactagcggatttagaagaagtttttggcagtgaagttgccatgctagtagacggagtaacgaaacttggtaaaattaaatataaatcacatgaagaacaacaagccgaaaaccatcggaaaatgttcattgcgatggcgcaggatattcgcgttattttaatcaaactggcggaccgtttgcacaatatgcggacattaaaacatttgccagtggaaaaacaacgtagaattgctaatgaaacattagaaatttttgcgccactcgcgcaccgtttgggaatatcgcgagtgaaatgggagctagaagacacagcacttcgctatttaaatccacaacaatattaccgtattgtccacttaatgaagcaaaagcgggatgcaagagaacgttacttgcatgatgtgattgatggtgtaaatgaaaatttagatgaacttaatattcaagcggatatttctgggagaccgaaacatatttattcgatttaccggaaaatgagtgaacaaaataaacaatttaacgaaatttatgatttactggctgttcgaattgtcgttagtagtatcaaggattgctatgctgttcttggtattattcatacgcgctggaaaccgatgccaggtcgctttaaagattatattgcgatgccgaagtcgaatatgtatcaatcgattcacacgacggttatagggcctcaaggagaacctcttgaagttcaaattagaacgcacgaaatgcatcaaatcgctgaatacggggttgcggcacactgggcatacaaagaaggtaaagtggtcaattccaaaacttcattcgataacaaattaacatggttccgagaaattttagaatatcaaaatgaatcggataatgcggaagagtttatggaaagcttgaaactcgacttattttcggatgttgtttacgttttcactccaaaaggtgacgtgtacgagttaccaaatggctctgtaccgcttgatttcgcctaccgcgtccataccgaaatcggaaacaaaactatcggtgcaaaaattaatggaaaaattgttaccctagattataaattaaaaacgggcgatattattgacattttaacgtccaaacattcttatggcccaagtcgagactggcttaaattagttcaaacttcccaagctcgaaacaaaatcaagcaatttttcaaacgacaagcaaaagaagagaatgtcgaaaaaggccgagatttagttgagaaagaaattagacaacttggatttgagccgaaaaaaattatggcagctgaaaaccttcgcaaattagcagataaactaaacttttcgcatgaagatgatctgtttgctgctgttggttataatggtattacagctttacaagtagctaaccgcttaacagaaaaacttcgaaaagaacgtgaactagaagcagaaacagagaagttattaacacaatcagaaaataaaccttcgaattcagatgctaacaatgaaaaactgaagattaagcataatgcaggagtagttgttcaaggggtaggtaatctattaattcgactatccagatgttgtaatccggtacctggtgatgatatcgttgggtatattacaaaaggtcgcgggatttctattcatcgtcaagattgcccaaatgttcaagctatcgaaccagagcggctaatcgaagtggactgggaagatgctgattcacaagcgaaaaatgactataatgtagacatcgaaatatacggttataatcgcaacggactattaaatgatattttgcaagtgattaacagtctaacttctaatattaatggtgtcaatgctaaggttgataacaacaagatggcaacattagtggtcacgctgcaaattcataatattaatcatttacaacgagtagtggataaaataaaacaaatcccagacgtatatacagtgagaagattaatgaactaa

SEQ ID NO: 24388 - DNA, 2016 bp, Listeria monocytogenes
ttgaaaaaaacattagatagacaagcagtagatacgattcgttcgttatcaattgatatgattgagaaagcaaattcaggacacccgggaatgccgatgggagcagcaccaatggcgtatatgctatttgcgaaacatttagtatttaacccagccaacccagaatggtttaaccgcgaccgattcgtcttatcagcagggcacgggtccgcgctactttatagcatgcttcatttatttggttatgatgtgaaaatggaggacttaaaacagttccgtcagttagatagtttgacaccaggacatcctgaattcggatggactgcaggagttgatgcaacgagtggaccgcttggacaagggattggtatggcagctggaatggcacttgcagagtctcatttggcggcagaatataaccaaccaaactacccaattgtcgaccattacacgtatgcgatttgcggtgatggcgatttgatggaaggtgtggcatcagaaacagcctcacttgcaggacatttaggacttggaaaattaatcgtactatacgattcaaacgatatttgtttagatggtgatttaagtgcaacattcagtgaaaatgcagcagaccgtttccgtgcatacggatggcaagttttgcgcgtagaagatggcaacaacttagcagctattcaagaaaaaattgttcaagctaaattagaaacatcaaaaccaacactaatcgaagtgaaaacagtcattggttacggtgcgccaacaaaagcaggtagctccgcaagtcacggtgctccgcttggtgaaaaagaagctaatggcgcgaaagaacattatgaatgggcagaagagcctttcacagtaccggctgaagttcgtgattatttaagaaattacaaagcgcgcggagaaaaactagaaggcgcttggaacacgatgcttgctaattacaaaaaagaattcccagaacttgcgagacaattagatcgagtgctagcgggagaagtagcagctgattggaatgctaatttgccaacttttgaagcaggcacaaatgtcgcaacgcgctctgcttctggaaaaatgatcaacgcgattgcagccgaattaccggaacttttcggtgggtctgctgacttaggttgctcgaataaaacatttattgatgcgagcccagcgtatagcattcaagacccagctggtaaaaatatttggttcggcgtgcgcgagtttgcgatgggagcaatgttaaacggaatggcacttcatagcggcttacgagtatttggctcgactttcttcgtcttctcagactatgtccgcccagcaatgcggatggctgctttaatgcaacttccagtaacatatgtattcacgcatgacagtatcgctgttggtgaagacggcccgacacatgaaccaatcgaacaattagcctcgcttcgtgccatgccaggtctaaccgttatccgaccagctgatgccaaagaaacgcgcgctgcttgggaaatcgctgcaactaacacaaacggcccgattgcacttgtattatcacgtcaagacttaccggtactcgaaaacgaccaagaagaagtagatgcagggatcgaaaaaggtgcatatatcgtagctccagcaaatagttccaaaccagacgcaatcattatcgcaacagggtccgaagtgtccctggcaatcgaagcgaaagccgaactcgcgaaaaaagatatcgacgtttccgttgtcagtttatccagctgggaacgcttcgaaaaaacaaccgatgcgtataaagaaagtattttaccaaaagaagtcacagcgagatttgcgattgaagccggagcaacatttggttggaaagaattcattggatcagaaggtgacatgctaggaattgatcattttggcgcatctgctccagcgaaagatttgtttaacgcttacggcttcactcctgaaaatgtggcggatcgcgtcgaagctgtaattgcgaaagccggtgtgcgcgtatga

SEQ ID NO: 24389 - DNA, 414 bp, Listeria monocytogenes
atggattatgttataacaaccgaattgcctagtgcagaggagtttgttcaacttcgagtggacgctggacttagttttcgagctattgaggcgtcaagaaaggcacttttaaaaagtgtatattttgtaggattacgttcaaaagaaaatggtaaactgattggaatggggcgactcgttggtgacggtattatgtttattgtttctgatattgcagtttttccgtcatttcaaggtaaaggctttggaaaggtaatcatgacacatattaaagattatattgaagcaaatcttgataaaactgcgtgtgtaacacttctcgccgatgttccagctcatgggctctacaaacaatttggctttcgggaatctgcgccagcttctattgggatgatttatcaagtaggaaattaa

SEQ ID NO: 24390 - DNA, 1365 bp, Listeria monocytogenes
atgattttaaaaacgaatttattcggccatacataccagttcaaatccatcactgatgtgttggcaaaagcaaacgaagaaaaatcgggcgaccgtttagccggagttgctgctgaatctgcagaagaacgtgtagctgcaaaagtggtgctttctaaaatgacgcttggagatttacgtaataatccggttgtcccatatgaaacagatgaggtaacacgtattattcaagaccaagtaaatgaccgtatccatgattccatcaaaaactggacagtggaagaattacgggaatggattttagaccataaaacaacagatgctgacattaaacgtgttgcacgcggcctaacatcagaaattattgctgctgttacaaaattaatgtccaatctagatttaatttatggcgcgaaaaaaatccgtgtaatcgcacatgcgaatacaacaatcggtcttcctggaactttctccgctagactacaaccaaaccatccaactgatgatcctgatggtatccttgcttcattaatggaaggattaacttacgggattggggatgcggtaatcggacttaacccagtagatgattctactgatagcgttgttcgtttacttaataaatttgaagaattccgcagcaaatgggatgtgccaacacaaacttgtgtgcttgcacacgtgaagactcaaatggaagcaatgcgtcgcggcgctccaactggtcttgtattccaatctatcgcaggttctgaaaaaggtaatacagctttcggttttgacggagcaactattgaagaagctagacaattagcccttcaaagtggtgctgcgactggaccaaacgtaatgtactttgaaacaggacaaggttctgaactttcttctgacgcccatttcggcgtagaccaagtaacaatggaagctcgttgttatggattcgcgaagaaatttgatccattcctagtaaatacagtagttggatttattgggcctgagtatctatatgattccaaacaagtaattcgcgccggtcttgaagatcactttatggggaaattaactggtatttccatgggctgtgacgtatgttacacaaaccatatgaaagccgaccaaaacgacgtagaaaacttatcagtacttctaactgcagcaggatgtaactttatcatgggtattcctcatggtgatgacgttatgcttaactaccaaacaactggttaccacgaaacagccactttacgtgaattatttggcttaaaaccaatcaaagaatttgatcagtggatggaaaaaatgggattcagcgaaaatggtaaattaactagccgtgctggagatgcatctattttcctaaaataa

SEQ ID NO: 24391 - DNA, 1881 bp, Listeria monocytogenes
atggcgcggattcctgaagaagtaattgatcaagtccggaatcaagcggatatagtcgatataattggtaattatgtccagttaaaaaaacaaggacgtaattattctggcttatgtcctttccacggtgaaaaaacgccatccttttccgtatcaccagaaaaacagatttttcattgttttggttgtggtaagggcggaaatgttttttcttttctaatggagcatgacggactcacttttgttgaatcggtaaaaaaagtggcagacatgagtcatttagatgtggctatcgagctccctgaagaacgagatacaagtaatttgccaaaagaaacttctgaaacagcaaaaatggtggaaatgcatcagcttactgccaaactttaccattatattttaatggaaaccgaagaaggcacagcagcattaacttatttgaaagagcgtggtatgtctgaacaaatgatgaccactttccaaattggttttgcacctaatcaccatgcaacaattacttcttttttagaaaaacgaggcatggatttacaattagccggtgcagctggacttttatccgaacgtgatgatgggcagatggtggatcgttttcgtaatcgaattatgtttccaattacgaatgatcgtggacaaattattgccttttctggccggttatttgatcgtgatgatggtcctaaatatttaaatagccctgaaacgcctgttttcaataaaagacgaatattgtttcatttttcagaagcaagacaagctattagaaaacaagaagaaattacgctcatggaaggatttatggatgttatttccgcagaagaagcaggtgttcaaaatgcagtggcttcgatggggacaagtttaacggaagaacatgcagatttaattaaacgacttactaaccgggcgattatttgttatgacggtgacagggctggaattgaagcagcctataaagctggcacacttctagttgaacggaatcgtttagatgtttttgttttgcaacttccagctggaaaagatcctgatgatttcattcgagcaagtggtccagaaaaattcaaagaagtctataagcaacaacgaatgacttggacagcttttaaaattcattatttacgtaaagaacgcaatttacagaatgagacagagcaaattggttatattgatgattgtttgcgtgaaattgcaaaactggatcaagccgtcgaacgtgaattatacttaaaacaactagcggatgaatttgaattaacgatagaaacattaaaacaacaattacagcaatcactaaaaaatagtcaaaaatcaaggcaaatggctagttataatgaaccaccaatagatgattcttttatgggaatgatgcctcaagaaggtgcagaaatgctattttcttttgagcagccagcccaaaagttatctgcccatacaatctcagagcagcagctaatgaaagcaatgatggaaagccgagataactttcttttaattaagcaacttctcggtgatacgacgttttaccatgataattacgaagcgctttatacctatctaattggttattttgcggaaggtaatgatgcggatccaacgaaattcatggatagtgttcctgatgctgcaatgaaaggacttattagtagcctagaaatggttattagtccagatgaacaaggtaaaccccagtttgaagactatattagaagtctaaaacgctataaattagaacaaaagaaaaaagaacttgagcaagaactagcgacgtataatcgtgaaaacgataatgaaaacgaaattcgcgtcatgctcgaaattgtccaactcaaccgtcagttaaacagcggccaattggattaa

SEQ ID NO: 24392 - DNA, 741 bp, Listeria monocytogenes
atgcaaataaaagaattagctgaactcactggtgtaagtgtgcgcacgcttcaccactacgataaaataggcctacttgtaccgcaaaaagatgactggaatggctatcgtatttattcagaaaaagatgtcgacaaattacaacaaattcttttctttaaagaactcgatttccctttgaaaaaaattcaacaaattcttgatgacccacttttcgataaaaacgttgctttagatatgcagcgccacttactaatagaaaaaaagcagcgaattgaaactatgctagcaaccctcgatctgaccatcaagaatgaaaaaggagaaataacaatgacaaacaaagaaaaattcactggatttgatttttcctcgaacccatatgaagaagaagcaagaaaactttggggagataaagtagtagaaaaagccaatgaaaaagtgaataatatgagtgaaaaagaacaattaactttaaaagagagttttgacgctgaatttcgtcatttagcttctgttcggaaactcaccccggaatcagaagaagcacaactcgagattgatcattttttccattatttaaatgatacgcatggcaacatttattctttagaagcctttgctagtcttggggaaatgtacgttaatgatgaacgtttcactaaaaatatcgaccaattcggcgatggcctttctcaattcctccaagaagccatgaccatttatgccaagaacaagtaa

SEQ ID NO: 24393 - DNA, 1236 bp, Listeria monocytogenes
atgaaagaaatcaaatttttacatatggctgatttacatttagatagtcctttcatcgggctttcgacgctaccacagccgcttttttctgccatacaagaaagcacatttcaatcattagaacggattacaactgtggcgataaaagaagcagtagatttcgttttaattgctggagatatatatgatagtgaagatcaaagtgtccgtgctcaagcgcgttttgcaaaagaaatgaaacggttagaagtggcgaacatccccgtgtttatgattcatggaaatcatgattttatagaaaagcataaagaaaaactcgcattaccaagcaatgttcacgttttttcagagcaagtagaagtaatgttgcataaaacagccaccggtgtgagcgttaatatttatggatttagttacaatgaacgccatattcgctcaagccgaatagatgaatacaaggttcaaggtgatgctgattttcatattgcgttattacatggctcagaagtatctagtagcgaggaacatgatgtctacgccccatttcgcgtgcaagaaattagcaaaaaaggttttgactactgggcactaggtcatattcataagcgacaattgcttgcagagtctcctagcatttattacccaggaaatattcaagggcgaaaccgcaaagaatcaggtgaaaaaggcgcaagtatcatcaacttatcagaagcaagtacaacaattgattttattggtacaagtccgattatttgggaagaaattatcatcccgttgccgaaaaatagtgaaataaatgccttttaccgagaaattactaatgttctagaaagttatcaaggacgtagccattcgtattttcttcatataattattcaaatggctagttcgcaaaaaataaatacaaatgactggttgcaaatgcttcaagaagaagtagagctttcaaacactacttttgtgtgggtccacaaattgacaactgagataacgaatcgaagtaatctacaaacatggtatgaatcgcatttagcaggagaagaaattaggcgctcatttgagcaactacaagatgaatcagctttttatcaatcagtagaagcgctgtatcttgaaagtggtgcaaacagatacttggatgatttgtcggaacaagagcgtgagagactcttggaaaatgctttaatggaactaggaatgacacttgcagaagtggagggtgatgaaaaatga

SEQ ID NO: 24394 - DNA, 1701 bp, Listeria monocytogenes
atgaaaaataaaaaacgtacgctagtcgctctaactggggctgcaattgggacaggtattgccgcaaagaaaatttctgaacaaaaggccgctgaaaaagaacgggcagtggatgaagcaattaaagcgcgctattatggtgacaaacaagtgtatttcgtcggtggcgggattgctagtttggcgggggctgtttatttaattcgtgatgccaattttgatgggaaaaatattcatattattgaagggatgcatattttaggcggaagtaatgacggagctggaagcgtggaacatggctttgtttgccgtggtggtcggatgttgaatgaagaaacctatgaaaatttctgggatttatttagtagtattccgtcgcttgatatgccgaactttagtgtgacagaagagattttgaactttgaccatttacatccaacccatgcgcaagcgagattagttgataaagatcgcaatatcctcgatgcgcattcgatgggatttaataataatgaccggatgttgatgacgaaactgctcgctactccggaagaaaaacttgataatttaacgatacgtgattggtttgacgaacactttttcgaaacgaatttttggtatatgtggcaaaccacttttgctttccaaaaatggagcagtttattcgaatttagacgttatatgaaccgaatgatgttagaatttagtcggattgatacgctagaaggtgtaacaagaacgccgctaaaccaatacgaaagcttgattttacctttaaaaacatttttagataaacatcatgttgattttacgattaatcaaacggtggaagatatcgattttaaagatgcgcctggaattacagcgacagcacttcatttatcggatgaatcaactattgaacttggcccagacgatgacgtgattatgacgaatgcatgtatgacggatagtgcgacactcggcgatatgaatacgccagcaccgaaaccagaagaaaaaccaatttccggggagctttggtataaagtcgcgcaaaagaaaccaaatttagggaatccagagccattcttcgctcatgaggaagaaacaaattggcaaagctttaccgtcacttgtcatggtgataaattattaaaacgtatcgaacgcttcactggaaatattccgggaagtggcgcgcttatgacatttaaagattccaattggcttatgagtacggttgttgctgcacaaccacattttaaagcgcaagatgcgaatactacgattttctggggttacggattatatccagaccgcgttggtgatttcgtgaaaaaaccaatgaaagaatgtactggggaagaaattttatatgaattaatgtgtcatttgaactggcaagatgattttgaagaaattaaagcggatataatcaatgtaattccgtgctatatgccgtacattgacgcgcaattcgaaccgcgggcaatgagcgatcgtccggctgttgttccggagggcagtacaaacttcgcgatgattagccaatttgtggaaattccaaaagatatggttttcaccgaagaatattccgttcgcgctgctagaatcgccgtgtatacgttacttgatattgacaaaaaaatctgtccagtaacaccacataatcgtgatccaaaagtgctagcgaaagcaacccaaaccatgtttagataa

SEQ ID NO: 24395 - DNA, 900 bp, Listeria monocytogenes
atgaaatggtttaaaggaattgccgtagttttattgcttgctattttaactgcatgcgggaatacggaagtaaaagagacaacgaagcaaacagaagaaatcaaagtgaaagatgcaacgggtgaaacaattacactgaaaaaagctccaactaaaattgtttcattaattccaagtaatactgaaattttatttgcactaggacttggtgatgaagtaaaaggagtatcggcatatgatgattatccaaaagaagctcagaaaatagagaaagtgacttctacttcagttgatacagaaaaaattattgctcttaagcctgatttagttcttggacacgaatcgatgcttgcaacagaaaaagacgcttataaaatacttacagatgcgggaattaacgtgtttgtagttccagacgcaacaaacttaaaggaagtagaaaaatcgattgctaccattggtgatctaacaggaacggaaaaagaagctacaaaagtgaccgattcaatggagaaacaaaaagtagctattgaaaagaaagcgaaagaattaaaaacatcaccaaaagtatggattgaaattagtccagacttatacacagcaggaaaaggaacatttatgaatgaaatgctagagcttgctggaggaactaatatcgtaacagaatcaggtttcattccttacaatgaagaaaaagtagtagaactgcaaccggatatcattttatctgtctatcctgatgccaaatcaactatccaaaaacgtgcagcatggaaagatattccagcgataaaaaacgataaaatctatgaaatggatgccaataaattaagtcgtccaggaccaagattgcttgaaggagcagcagatattcaggctgttcttgaaaagaataactaa

SEQ ID NO: 24396 - DNA, 201 bp, Listeria monocytogenes
atgccaaaaatgaaaacccaccgcggttccgctaaacgtttcaagagaacaggatctggaaaattaaaacgcagacacggcttcactagccatatgttcgctaacaaatcccaaaaacaaaaacgtaaattgcgtaaatcagcaatggtatcagctggcgacttcaaacgtattcgtcaaatggtcgctaaaatgaaataa

SEQ ID NO: 24397 - DNA, 1260 bp, Listeria monocytogenes
atgaaatttagtacatgggacatcaatttaaaagtaaggctttttggggaagcactactcgatatttctttttggatggtcttcccctttctaacgatttacttttcggaaagtattgggcgcgaactgacgagccttctgctaattatctcgcaagtgttggcagtcttcacagctttgcttggcggctattttgcagataactttggtcgtaaacggatgatgagtatttctgtcatcggagaaggctttggctttcttgtttttgcaataggtgcacttcatgttgtggattctccttacttaagttttgctggtttcgcgattgcgagtgtttttatggctttttatcagccagcaagtcaagcaatgattgccgatgtggttcctcctgagcatcggacacatatttattcggtgttctatatgatgattaatattgcggtcgttattggtccaattcttggctcggttttattttataatttcacgacagaaacactacttgcaattgtttgcgcggatttattactactctttttactgcaaaaatttggtcatgaaacagcaccacttttggttaatcctgatttacaaaaagaggttgttcggaaaagtatcggcgctgttttaatggaacaactgaaaaactataagattatatttaaagacaaaattttctttctttatattgttgccggaattattgtttctcagtcgtttatgcaactggatttacttttcccgctctatattaaagaagttatcggtgcctctaacttgttcgcatttcattttacaggtgagcaattgttcggggttattgtttctattaatggcttctttgttgcagcgcttacggtcgttgtcactcgttggatgagccattttagagaaaaatttgtctttatgaattcttcttttctctatgcgattgcgattttcttatttggtatttcgacaggaccgtggggagcgatttgtgccattattctctttagcttcgcggaactcatgactgttgggttacaacaaacttttgtttcccagttagctccagaagataagcgcgctatgtacttttctgctgctggacttcgttacactttgggtaaagtcattgctccacttgcgattacactttcgactttaattggctatactggcacatttactattattggtattttagcgctcattagcgggctcatttattactatatgtactcagaatttgaaaaacagcggcaagtttcctaa

SEQ ID NO: 24398 - DNA, 567 bp, Listeria monocytogenes
atgaaaagtgaaaacaaatttttttctggggcatttggatggataaaaataattcttatcgcgcttatacttgcttttggtattcgctattttttaatttctccagttactgttaatgggaaatcaatggacccgacacttcatgatggggagcatttatttattaacaaagtatcagatccgaagcgttttgacattattgtatttcctgcgcctgatgaggaaaatgcagagtacattaaacgcgtcattggccttccaggagataaagtggagtataaagaagatcaactttatattaatggaaaaaaatatgatgaaccttatttagattcagaaaaagcagctctaaaaaatggttttttaaccactgatgcagaaggcgatcctaattttacaatggcagacattccaaactctgacggctctctcactgtccctaaaggagaactttttgttttaggagataatcgtcaagtaagtaaagatagtcgctacattggctttatatcacaggataccgtgcttggaaaagtaatttcatttggaaaatccttagaacgttaa

SEQ ID NO: 24399 - DNA, 519 bp, Listeria monocytogenes
atgaatgttaagaaaaacattgcacttcctgcaatcatggttgtaacctttattttagagggtgtttttagtcttcagtttgcgaatggtctttttaatgatagacatctttttattccgcattttttacttattatgttgacgattatgacttgtttttataaacgaaatacgactttagcatatgcttttattctaggcttgctgtttgatatttattatactggcgtgatgggcatttattttgctatcttcccgtttactgtgtatatcacagataaatttatgaaagtgttacaaaataatatacttttggttgggttaattgcgatatttaatattattcttacagaaagtttagtatatgcgttttattatttaatcggtacgacaaccatgtctatcccagtttttattgatcagcgtttatggacaaccattttgattaatttagcattctttttagttgtctttttcccattccgattgtttcttgatcgtttggttaaatcagaataa

SEQ ID NO: 24400 - DNA, 501 bp, Listeria monocytogenes
atgagtaaagttcttgaagctaaacaaagtgcagtagaagaaattaaaacaaaattatcagctagtgcgtctacagtaattgttgattaccgcggcttaaacgttggcgaaatcactgacttacgtaaacaattgcgtgatgctggtattgagtttaaagtttacaaaaactcactaactcgccgtgctgttgaagctaacggttacgaaggtttagaaggagctctaactggtcctaacgcaatcgcattcagtaatgaagacgtagttgcgcctgcgaaaattcttaacgatttcgctaaagatcacgaagcactagaaatcaaagccggtgttattgaaggtaaagttgcttctcttgaagaaattaaagcacttgcaacacttccatcacgcgaaggattgctatctatgctttgcaacgtacttcaagctccagttcgcggtcttgctatcgctactaaagctgttgctgaccaaaaagaaggacaagaagcataa

SEQ ID NO: 24401 - DNA, 1017 bp, Listeria monocytogenes
atgacacagaaaaaagtagctattcttggcgctggaagttggggaacaggtcttgcacttgtcctagctgataataatcataaaccagttatttggggaaacttagataaaattgtgaatgaaattaacgaatcgcacacgaatagtcactatttgccagatattattttaccaactgaggtaaaagcgacattgtcacttgatgaagctattgatggtgcagaaattgtcgtaattgctattccaacaaatgcgatgcgtatcgtttgtaagcagttaaatgaagcgctaaaagaacccacaattttagttcatgtgagtaaaggtattgaaccagaaacaaaccttcgaatgtctgaagtgattgaggaagaaattgatgcagctaaacgtaaagcacttgtggttctttctggaccaagtcatgcggaagaagttgcccttcgtcatccaacaacactttgtgcgagctgtaaagatttatcagctgctgagattgttcaagatcgtttcatcaataataacttgcgtatttatacgaatgatgatgtgattggtgcagaaattggtggcgcgcttaaaaacattatcgcacttggcgcaggaatctctgacggccttggttacggcgataatgccaaagcggcactaatgactcgcggaatggcagaaatcactcgtctcggtgttgctgttggctctaatccacaaaccttttacgggctgactggtattggtgacttaatcgttacttgcactagtgtgcattcacgtaattggcgagctggaaatatgctaggtaaaggcgagaatttagatgaagtattagaaaaaatgggtatggtcgttgaaggtgtacgaacagccaaagcagtacatggctgggcgaaaaaactagatattgatatgccaattactgaatcgatttacgcgattttattcgaaaataaagatgctcgcgaagcagttgatttattaatgggtcgcgaaaagaaaatcgaaaaagaatcattttaa

SEQ ID NO: 24402 - DNA, 471 bp, Listeria monocytogenes
atgcctcgtaaaggtcctgttgctaaacgtgacgtgttaccagatccgatttataattcgaaactagtaactcgtttaattaataaaatgatggttgacggaaaacgtggaaagtctcaagctatcctatattccgcattcgatatcattgcacaagaaactggtaaagatccgatggaagtatttgaacaagctatgaagaacattatgcctcttcttgaagttaaagctcgccgtgtaggtggtgctaactatcaagtacctatcgaagtacgtgctgaccgtcgttctactcttggtcttcgttggttagtaaattatgctcgccttcgtggagagaaaacaatggaagtacgtgttgctcgcgaaatcatggatgctgccaataatactggtgcttctgttaagaaacgcgaagatacacacaaaatggctgatgctaacagagcgttcgctcactatcgttggtaa

SEQ ID NO: 24403 - DNA, 219 bp, Listeria monocytogenes
atggcaaaggaagatgttattgaagtagaaggcgtagtacaagaaactctaccaaacgcgatgttcaatgttgaactcgaaaatggtcataaagtactggcaactgtttctggtaaaatccgcatgcattacattcgtattttacctggagataaagtgacagtagagctttctccatacgacctgacacgcggaagaattacttatcgttttaaataa

SEQ ID NO: 24404 - DNA, 1476 bp, Listeria monocytogenes
atgaagttaaatgaactaatgcaagctatcccggtttttactggcgaggtaagtgaaacaattgaaattagccatatcgcccaagatagtagaaaagtaaaaccagggacattgtttatttgtatagacggagaagtagtggatggacacaagtttgcgtctcgtgcagtagaactaggagcagtagcaattattgcagaaaaacaagtggatgtatcaattcctgtcatatatgtaagagattcaaaacgtgccatggcgatgttagccgattacttttatggatctccgacccaagcgttaaaactcgttgggattactgggacgaatggtaagacgaccgtgagccacttagtggaacaaatcgttcgcgaaaatggtgagcaaacaggtttgattggcacgatgtatcgtaaaattggcgaccaaattttagaaacaaaaaatacaacgccagacagcctaactttacaagaaacattccgggacatgttactcagcggagtaagcacagctgtgatggaagtctcctcgcatgcactcgttcaaggtcgcgtatacggttcagactatgatgtcgctgtgtttatgaatttgtctcaagatcatttggattatcaccatacaatggaagaatatgccaatgcaaaaagcttattgtttgcccaactaggcaacagctaccatacaagtaatccaaaaattgctgtattaaacgcggatgacgcggaaagtgtgcgtatgcaaaaagcaacagccgctcacattatcacttttgggataaaacaagaagctgacttccaagcaagtaatatcaaaattactagccatggttccacatttgatttagggacaccagttggtaatttcacattaaaaataaaaatgattgggaactttagtgtttataacgtattggctgcgattgcaacaagttttgcgctacatatccctatggaaaaagcaattaaaacagtggaaagcataccgggtgtcaaaggacgttttgaacttgtacatgcaggacaagagtttcctgttatagttgattacgctcatactccagacggcttgctaaatgtattagaaacaattgatgaatttgcagaaaaacgcgtttttgtcgttgttggttgtggcggggatcgtgataaaggaaaacgtccacaaatggcgaaaatcgctgtagattatgcaacaaatcctatttttacatcagataatccgcgtagtgaaaatccacgtgcgattattgaagatatgattcaaggtgttccagaaagtgatgcttacgttgttcatgaaaaccgccgagatgcgattcgttttgcagtaaatcaagcagaagcaggggatgttattctgattgctggaaaaggtcatgaagattatcaagtggttggtgacgaggttattgatttcgatgatcgagtagaagctcgaatagctattgaaaaaaaactcggactcgcataa

SEQ ID NO: 24405 - DNA, 984 bp, Listeria monocytogenes
atgaaaaagagacaattaggaaatgctggcttagttacttcagagcttggattcggctgtatggggctaaattatcatcgtggacctgcgaaagatcgaaatgaaatgattgaagtcgtacgcactgcaatggatgcagggattacgatgttcgatacagctgaagtgtatggaccttatactaacgaagaacttgtcggagaagctttggttggcaaaagaaaccatgttcaaatcgcaacaaaaggtggttttaaaattaatggtttaaataacgaagtcgatagccgtccagaaagcatcaaggccgcggttgaaggctctctcaaacggctaaaaacagattacattgatttatattacattcatagaattgacccctctatcccaattgaagaggttgccggcaccattcagaatttaaaacaagaagggaaaattctacactggggactctccgaagccagcgcaaagacaatacgccgtgctcataaagtagagccactagctgcggttgaaagtgagtattctatctggtggcgagaagctgaaaaagaagtattcccggttttagaagaacttggcatcgggcttgtcgcatacagcccactaggtcgtggttatttaactggaaaattagatataaatgctgacttcaatgcaaacgacaaccgtggtggcttaccaagattccaaaaagaagccatggaagccaaccaagtactactagatttcatgaaagaaatcgccgacgagcaaaacgtcacaacagcccaacttgccctcgcttggatacttgaccaaaaaccttggatcgtgccaattcccggaacaacaagaccaagcagaatagaagaaaatatcgcctccactgaaattcattttgatgatggagcacgacaaaaaatagctgatgctttatcgcagattgaaattgttggtgatagatactcagccgccgaaaataaacgtatcggaaaataa

SEQ ID NO: 24406 - DNA, 933 bp, Listeria monocytogenes
atgcaaaaacacgctcgagttatttataatcctacatctggaagagaaatcattaaaaaaaaccttgcagatgtcctttcgatattagagcaagcaggctacgtaacatctgcgcacgcgactacagcagagccagatgatgccaaacatgccgctgaagaagctgtaagaaatcgatttgatttagttgtagcagctggtggagatggaaccattaatgaagtgattaacggtattgccgaaaaagaatatcgccccaaagtagggattataccaaccgggacaaccaacgattttgcaagagccttacacgtgcctagagatgtgattaaagcaacgaagattatagcagctggtcaaagtgtagcaatggatataggtaaagcaaacgaaacttattttattaatattggtggcggaggtcgtttaacagaactcacttacgatgttcctagccgcttaaaaacaatgctaggacaacttgcttattatttaaaaggaattgaaatgttaccatccttaaaagcaaccaaagtaaaagtagaatatgatcaaggcgtgtttgaaggggaagtgatgtttttcctattaggattaactaattccattggaggctttgaaaaaattgctccggatgctaagctagatgatggtaaattttcgcttattatcgtaaaaaaagtcaatttagccgaatttatccgtttagtcacactggcgctccgaggagatcatattaaggaaccaaatgttatctatgtaaaatccgaaaaagtaattgtcaattcagaagacaagatgctgattaatcttgacggcgagcttggcggggaaaccccgatggaattccgcaatttaagacaacatatcgaattttttgctagtgtggatgatattccagcaactgatttattcataaaagaaaatagctga

SEQ ID NO: 24407 - DNA, 600 bp, Listeria monocytogenes
atgaaaaaaacattgtatttaatgcgccacggtcaaacattatttaatcaacgtaaaaaaattcaaggtttttgcgatgcaccacttaccgatctcgggattaaccaagcaaaaatcgctggtagttactttaaagaaaacaatataacattcgatcaagcttacagttccacatcagagcgcgcatctgacacgttagagctgattacggacaaaagctatctacggttgaaaggattgaaagaatggaattttggtacttttgaaggcgagagcgaagacctaaatccaccgctcccatatggagatttttttgctacctatgggggagagcgagaagtggatttcagagatcgtttagtagcaacaatggaacatatcatgagtcaagataatcatgatactgtccttgccgtttctcacggagcagcctgtgcccaatttgccaggcattggggaaaaacaagcactatcggtaaggtaacaggactgaaaaattgttgcattttaaaatttgaatatgaaaacggtagatttactttagttaattttataaatcatgattttgataagggtacgcatatagaaagcactaaataa

SEQ ID NO: 24408 - DNA, 996 bp, Listeria monocytogenes
atgaaaaaagtaatattttccggaattcaacctagtggacaattaactttaggaaattatattggggctttaaaacagtttgggcagtttcaagatgaatatgaatgtttttattgtatcgttgacgaacatgctattacggttccacaagatagattaaaacttcgcgagcaaacaagaagtttagcagctctttatttagcagttggactggatcctgaaaaatccactctatttattcaatctgaagtggcggcacatgcgcaagcggcatggattttacaatgtaacgtctatattggtgaattggagcgtatgacacaatttaaagacaaatcagctggtaaagcaggagtgagcgccggactattaacctatccaccattaatggctgctgatattttactttatcaaacagatttagttccagttggtgaggatcaaaaacaacatatcgaattaactcgcgacttagctgaacgatttaataaaaagcatgcagatattttcacgatgccagaagtattcattcctaaacaaggcgcacgagtaatgtccttacaagatccaacgaaaaaaatgagtaaatctgatgccaatttgaaaaatgctatctttttacttgatccaccagcaactattagaaaaaaaatcaaaagcgctgtgaccgattctagtggtattattgaatataataaagaagaaaagcccggcgtatctaatttgctaactatctattcggttattaccggcgaaacaattgctagtatagaagaaaaatatgttggaaaaggctatggtgatttcaaaacagatttagctgaattagttgtttctgaacttgagccaattcaagaaagatactatgcttatctcaaatctgaggagctggacactatattagatgcaggagcagaaaaagcagctcgcgtggctaataaaacattgaagaaaatggaaaatggcgttgggcttggccgtaaacgcagaaaataa

SEQ ID NO: 24409 - DNA, 432 bp, Listeria monocytogenes
atgttcatgggagaatatcaacacaacatcgatataaagggcagattaattgtgccagctaaattccgtgagcttttgggggataattttgttataacccgaggacttgataagtgtttatttgcttatccacaagaggaatggaaaaagcttgaagaaaagctccaaaccttaccacttactaagaaagatgctcgttcctttacacgtttcttcttttccggtgcgtctgaatgtgaactagacaaacaaggtcggattaatattccatccaacttactacagtatgcggatttggaaaaagaaacagtaattattggagtttcaagtcgtattgaaatttggagtaaatcagagtgggatgatgtctttaatgaggcagaagaatcttttgctgatttagccgaaaatatgattggctttgatatttaa

SEQ ID NO: 24410 - DNA, 447 bp, Listeria monocytogenes
ttgacactgcttgacaagttaaatgaagatatgaaacaagcgatgcgcgataaagagaaagaaaaactttccgttattcgtatgttaaaagcagctttacaaaacgaagcaattcaccaaggtgtgaaagatcttactccggatgatgaagtaaccgtgatttcccgcgaactcaaacaacgcagagattctctagcagagtttgacaaagctggacgtagcgacctttctgataaagtccgttccgagattgtcattgtggaggactacgcgccaaaacaattgactcctgaagagcttgagaatattgtgaaagcaactatcgaagaagttggcgcatctagtaaagctgatttcggcaaagtaatgtccgcaattatgcctaaagtaaagggcaaagctgacggcggtgctgttaaccaattcgtaaaaaaatatctttcataa

SEQ ID NO: 24411 - DNA, 207 bp, Listeria monocytogenes
atgtttatggaaaaaaagcatttcgatttaaacgatgtagtggaaatgaaaaagccgcatccttgtggtaccaatcgttttaagattatacgcatgggtatggatattcggattaagtgcgaaggttgtggtcatagtgtgatgattccccgacgcgaattcgaacgaaaagtgaagaaaattttagttaaagctgaacaagaataa

SEQ ID NO: 24412 - DNA, 942 bp, Listeria monocytogenes
atggaaaaaagattattagattttgaagttggagaaacagtagacctattcttgctaattaaatcaagtgtaaaaggaacggctagcaacggaaagccattcttgagtcttgttttacaagataaatcgggtgaattagaagcaaaactatgggatgttaaagaaagtgatgaagcgaattacggggtacaacaaatagttcaccttatgggtgatattcaaaattatcgtggtcgaaaacaattgaaaatccgccaaattaggcaagctacagcactggacggtgttagtgctagtgaatttatggaaaccgcgccaattaataaagaagaaatggccgatgaaatcacacaatatattttcgaaatgaaaaatgcgaatttgcaacgaattacgcgcgcattgcttaaaaaatatcaagatgatttttatgattatccggcggcaatgcgtcatcatcatgaatttgtttccggtttgagttttcatgtagtttcgatgttacgacttgcaaaatcagttgccgatctttacccatctgttaatcgagacttattatacgcaggtgtgattttacatgatttaggaaaagtcattgaactttcaggcccagtatcaacgacgtatacactagaaggtaatttaattggccatatttccatcgtagtagaagaggtgagcaaaattgctgacgaactttcgattgatggtgaagaagtcgtggttttaaaacacgttcttctatctcatcatggtaaaggtgagtgggggagtccaaaaccaccgcttgtgcgtgaagccgagattttacaccaaattgatttaatggacgcttccttgaacatgatggataaagtactaaaacatacaaaaccgggcgaattcagtgaacgagtatttggattagataatcgttcgttttataatcctacatttgaataa

SEQ ID NO: 24413 - DNA, 447 bp, Listeria monocytogenes
atgaaaattgctattggaaatgatcatgttggaatcgagcttaagccagttattgttgcgtatttacaggatttaggtcatgaagtagatgattttggtgctttctcaaatgaacgaactgattatcctgaatatggtaaaaaagttgcagaaagtgtagcggcgggaaaatcggacttaggaattttaatttgtggttcaggagtgggtatttcaattgctgctaataaagtaaacggaattcgcgctgttgtttgtagcgaaccatactctgcaaaactatcacgcgagcacaataatactaatattttagcttttggttcaagagttgttggtgcagaacttgcgaaaatgatagttcaaaactggttggatgcagaatttgaaggtggaagacatgcgaaacgcgtcgaaatgattgctagaattgaagatgaaaatgattaa

SEQ ID NO: 24414 - DNA, 1077 bp, Listeria monocytogenes
atgcagaagaatgatgacttattaagagaacgtcgaaaagacgaacacgtggctcttggagtaaaacaaaatgagcaattagcgccctcgagtctaaaagatattcagttgattgggacatctatcccgcgctataatgtgaaagatattgatttaacaactactattttcggaaaaaacgttccttttccattttatattaatgctatgacaggcggaagtcggcatacgaaaaaaatcaatgccgaacttgctgaaatagcacgcgaagtagctatcccaatggccgttggttcacagtctgcagctctaaaaaacagttcgctaatagatacgtataacattgttagagaaatcaatccaaatggaatgattctagcaaatgttagtccggaagtagccattcaagatgggcttcaagcaatcgaaatgttagaggcaaatgcacttcaaattcatattaacccagcacaagaattagtaatgcaagaaggtgaccggtctttcagtcattggctaactagaatagaagagtatgtcaagctttcaccagttcccattgtagtaaaagaagttggtttcggaatgacgcgagaaacagtaaaaacgctagctgatatcggcgttcaaaccgtagatttagctggaaaaggcggaacaaactttgcccaaattgaaaatgaccgccgccgtgatcaagcatatgatttcttacttgattggggtatttccaccggacaagctttaatagacatgcaacaccaagacgcgccaaagattgcttatttagcgtcaggtggtattaggaacccgttagatatcatcaaagcattagcgctcggagcagatagtgtaggtatggcaggacaaattatttattcactaaaaaaagaaggcgtcaccaaaaccatcgaaaaattggagttatggaaagaacaactacgtggtttatttgttctagctaatgcgaaaaatattgcggaattgaaaacaactccattaattgtaagtggcgaacttgctaaatggggaacgttgcgagaaatcaatttagtcaaactagctaatagaaaataa

SEQ ID NO: 24415 - DNA, 3213 bp, Listeria monocytogenes
atgcctaaacgcgacgatataaaaacaattctagtaatcggttctggcccaattgttattggacaggcggcagagtttgattatgctggaacacaagcttgcctgagtttgaaagaagaagggtaccgggtagttttagtgaactcgaatccagcgacgattatgacagatgcagaaatggcagataaagtttacattgagccaataaccctcgattttgtatcacgcattattcgaaaagaacgcccggatgccattttaccaacgcttgggggacaaacggggttgaatatggcaatggaactttctgctgctggaatcttggatgaatgtaacgtagaagtacttgggacggatttaacggcgattaaaaaagcggaagaccgtgaagcattccgagacttgatgaatgagctaggagaaccagtgccagaaagcgacattattcataatttggacgaagcttatgcttttgttgaacgtatcggctacccagttatcgttcgcccagcatatacgcttggtggctcgggtggcgggatttgccacaatgaacaagaattaattgaaacggtgacaagtggtttaaaactgagtccagtaacacaatgtttactagaaaaaagtatcgctggttttaaagaagtggaatatgaagtaatgcgtgatgcgaacaataacgcaatggttgtttgtaacatggaaaatattgacccagtcggcatacatacaggcgattcgattgttgtcgcaccaagccaaacgctttccgaccgcgaataccaattgttgcgagatgtgtcgttgaaaattatccgcgcactagaaattgaaggtggctgtaacgttcagctggcactcgatccagatagttataactattacgttattgaagtaaacccacgtgtgagtcgttcctctgcgctagcttccaaagcgacaggctacccgattgccaaacttgcagcgaaaatcgcagttggcttaacacttgatgaagtgagaaatccagtaacaggaacaactttcgcccactttgaaccaacgctagattatgttgttgcgaaaatcccacgctttgctttcgacaaatttgagcaagcggatcgtcgccttggaacacaaatgaaagcaactggtgaagtcatggcaattggccgttcatgggaagaagcacttctaaaagcagttcgctccctagaaattggtgctgaccatttgttgcttgaagaagcggaaaatgctgacgaagcaacattagaacgcaagatttgcttcccagaagatgatcgtttattcttcctagcagcagctttgcgccgtggtcaaacaatcgaacaactccacgagaaaactaaaatagatttattcttcttatataaattaagtaaaacaatcgaacttgaaaatcgtatcaaagaaaatccgcaaaaccaagaaattttggcagaagcgaaacaggcaggtttttctgacgctttccttgcaacttgttggaatgttgatgaacaagcgatttatgacttaagaaaagcgcaaaatcttttcccggtttacaaaatggttgatacatgtgccgcagaatttgaatcgacaacaccctatttttacagcacatatgaagaggaaaatgagtctacacgatcagcaaaagaaagcgtgattgtactcggatctggaccgattcggattgggcaaggggtggaattcgactatgcgacagtgcattcagtgtgggccattcaacaagcgggctatgaagcaattatcattaataataatccagaaacagtttcgactgactttagtatctcggacaaactttactttgagcctttgacattagaggatgtaatgcacgtcattgaaatcgaacaaccattaggagttgtcgtgcaatttggcggacaaacagcgattaatttagcagacggtctagcaaaacgcggcgtgaaaattctaggtacaagtttagaagataccgaccgcgcggaaaaccgtgatgcctttgaaaaagcgctagaaatcttacaaatcccacaaccagctggtaaaacagctacatcggtagaagaagcaattacagtagcgacagacattggctatccggttctagtacgtccatcttacgtacttggcggccgggcaatggaaattgtggaatcagaagaggcgttaaaacattatatgacaaatgcggtaaaagtaaatccaaaacacccagttttagtagaccgttacgtaagtgggcaagaagtagaagtggacgcaatcagtgatggtgtaaacgtcttaattccaggaattatggagcacatcgaacgtgctggcgtccattcaggagactcgattgcggtttatccagcgcaacgtttaagcattcaagtgaaaaacacgattgtcgattatacaacgagattagcaactggattaaacatcatcgggatgctaaacattcaatatgtcgtggacggcgaagaagtttttgttattgaagtaaatccgcgttcaagccggacggcgccatttttaagtaaaataacggaaattccgatggcgaatgtggcgacaagagtgattttaggagagaatttaatcgaccttggttacacgccagggcttgccccagaaaaacaagaaatttttgttaaagtgccagtgttctctttcgcgaaattgcgtagtgttgatacatcgctaggacctgaaatgaaatcaactggtgaagttatgggtaaagatgtgacacttgaaaaagcactctataaaggttttgttgcgagcgggacaacgatgcatgactatggaaccgtacttttaactgtagctgaccgcgataaagaagaagcagtagaactagcgaagcgatttaatcgcataggctttaccattatggcaaccaaaggaacggcaagcacattagaagaagcaagcattccagtgtcacaagtgaaaaaaattggtgagaatcaagaaacgttaattgattacatccgaaatggacaagttacgctcgtagtaaacaccttaacaacaggtaaacgtccagaacgtgatggcttccaaattcgtcgcgaatctgtcgaaaatggcattccagtttgtacatcacttgatacagcagaagcaatcttacgtgtacttgaatcacgctcttttgaactcgaatcgatgaatgccagcgaagtaaaacaaccgaaatcacgtgtataa

SEQ ID NO: 24416 - DNA, 783 bp, Listeria monocytogenes
atgaaagataacttttttgggagagaatatgacatagccccggccggaggggaaactggccaagcattcgttgcaacacatgaagacgaaaaattctttttaaaaagaaattcttcgccttttttagctgcgctttctgtagagaatatcgttccaaaattagtttggacgagacgcgtggagaatggggacgtaataacagctcaaaaatgggtgaattgtcacattttgacacgtgaagaaatggttggaccgcgagtggcaaaactattagcgaaaatccatcgttcagaaaatttacaacacatgctagcgaaaatcgaaaactgctatttctctgcagatcaacttttgagtctcgtaaaagtaaacacaagagctaataacaatctatcaaaagaaataattgaagcagtccactatttagaacagaatctctctgctgctcagacgaacaattatgtggtttgtcacggagatgttaaccataataattggattatttctgaagaaaacgaactgtttctagttgattgggatggagcaatgcttgcagaccctgcgaatgatatcgggatgattttataccaatatatcccacgcgaagattgggtaagttggctgtctaattacggcaccacattaaccgaagaattacatcgcaaattaaaatggtatacgatttgtcaaacggttatgcaactcacgactaatcaaacagacgaagcgaatgaacgagcaaaacaaatttttcaaaatgcaatagaagatgatgaggtgtaa

SEQ ID NO: 24417 - DNA, 1248 bp, Listeria monocytogenes
atgacggaactcattaaaaaaggaagtgcagctaaagaagcagcccaatttttagcgcaagcatcaactaagcaaaaaaatgcagctttgctaaatctaagcaatgatttacttactcatacagcttcccttcttgaagaaaacaacaaagatattatacgtgctcgggaaaaaggtacacctgaaacaatgattgatcgcctccgtttaacagaagaaagaattaaagaaatttctgaggctgttaaacaagttgttgctttgaaagatcctatcggagaagtaacaaatatgtggaaaaatgaagccgaactcactattggaaaaacgagagtaccacttggagttataggtatcatttatgaatcaagaccaaacgttacagtcgatgcttctgtactttgttttaaaactggtaatgctgttattttacgtggtggtagtgatgcaattgattcgaataaggctcttatgtccgttattcaggattcactagaggcatctggattccctcgttctagcgttcaattaattgaagacacatctcgtgaaacagctcgtgatatgatgcgcttaaatcgctttttagatgttcttatcccgcgcggtggagctaaattaattcaaactgttcttgaaaatgctactgttccagttattgaaaccggcacaggaaattgtcatatttatgtcgataaagctgctgaaaaacaaatggcaatcgatattttagttaatgcaaaatgttcgcgtccttctgtttgtaatgcagcagaaacattacttattcaccgggatgtagcagatgcctttcttcctgaaatagaaactgctttaaaggaatataacgttgaattacgcgcggatgaacgtgcacgagaaattctaaaagattctaaagcagcaacagagtcagactgggaagatgaatttttagactttattttggccattaaagttgtagattcagtagatgaggcaattaatcacattaataaatacgggacaaaacattccgaagcaattatttcgaatgattatgcaactggacaagcttttcatcaaaaagtcgatgctgcggcagtatatattaacgcttctactcgcttcacagatggttttgcaatgggatttggtgcagaaattggtattagtactcaaaagctgcatgccagagggccaatgggcttaacggagcttacttctactaaatatattattttcggggacggtcaaatccgcaattaa

SEQ ID NO: 24418 - DNA, 459 bp, Listeria monocytogenes
atgattaaacgaactggtgagatagtactcgctattattggtcttgttttaagtctactcgcacaagcatttattgctattattggtctattaatgataagcggttcaaaaggaaaggaaggtttaacaactttctacaacaactactacaaaacaatgactgaatgggaaatcccgaaaaaagaggttcctgatcccgatcgtgtattggattttgtgcaaacattatcttggacagcattaacgggaggcttaattacgctcgctctaggtatctttgggatttactacatcttcaaaaataaaaaaccagtttttgcaggatatttatttttagcagcaggcgttgtatcgttgctttctacagcactaattagtttcattcctgcgttactattcattgttgctgctatactttgttttgtccgcaaaccgaagagcactttttctggattataa

SEQ ID NO: 24419 - DNA, 2358 bp, Listeria monocytogenes
atggaaaaaaaagtagaagccattttagaatttgataaaataaaaaaacaactcaccgaatttgcttcttcgtcactaggggagcaagccattttagaactcgctccagcaactgattttcaagtagttcaaaaaacgcaacttgaaacagaagaaggagccaagattattcgtttacggggaagtgcgccaattactggtctaacagatgtttttgcacatttgaaacgtttagagattggtggcgatttaaacgggctagaaatttaccaaataggtagtaacttgcgcgttagccgtcaaatgaagaattttatgaacgatttactggaaatcggtgtcgaattgcctatactcggggccctttcggatgaacttttagtactaaaagaagtagaagaggatattgcgatttcagtagatgaaagcgggaaagtgttagatactgcgagtgaagcgcttagtacgattcgccgaacactccgacgtaccgaagaccgcgtacgtgaaaaactagaatcttatttgcgcgatcgtaatgcctctaaaatgttaagcgatgcggttattacaattcgaaatgatcgttatgttatcccagttaaacaagaatacaaaggtcattatggtggtatcgttcatgaccagtctgcttccggtcaaacacttttcattgagccgcaaagtgtagtggatttaaataacgaacgaaaagcacttcaagcaaaggaaaaacaagaaatagaacgcattcttgctgaaatttctgcttctttagctgcttggattaatgaaattcatcataatacattcatattagggcgctttgattttattttcgcaaaagcacgtttcgggaaagcgatgaaagccgtaacaccgcatttgagtgatgctggtgtcgtgcatttaattgcggcacgacatccgctgttagatgctgcaaaagttgtggcgaatgacatttatttaggggaagatttcactaccatcgttattactggtccaaacacaggtggtaaaacaattactctaaaaacgttgggattactgacgctcatggcgcaatccggactgcaaatcccagctcaagaagattctactattgctgtttttgagcatgtatttgccgatattggagacgaacaatccatcgaacaaagtttaagtacgttctcgtctcacatgacgaatattgtttccattttggaaaaggtaaatcagaaatcacttattttatatgatgaacttggggcaggaactgatccgcaagaaggagcggctctggccattgcaatacttgatgcgagtcacgaaaaaggcgcaagtgttgttgcaacgactcattatcctgaattaaaagcatatggttacaaccgtgttcatgcaaccaatgcatctgttgagtttaatgtcgaaacacttagtccaacttacaaattattaattggtgtacccggtcgaagtaatgcttttgatatttcacgccgcttaggattaagcgaaaatattatcacagaagcaaggagccttgttgatactgaaagcgctgatttaaatgatatgatttctagtctagaagaaaaacgaaatctagcagaaaccgaatatgaagaagcgcgcgaattagctcgcggggctgataaccttttaaaagatttacaaaaagaaatcactaattattatcaacaaaaagataaattaatcgaacaagcgagtgaaaaagcggcaactattgtggaaaaagccgaagctgaggccgaagaaataatccgcgaattacgcaccatgcaattaaacggagcggcaggaatcaaagaacatgaacttatcgatgccaaaacaagacttgggaatgctaaaccaaaaacaatcaacaaaaccattccacaagcaccaaaacaaaagccacacgtattccaagaaggagacaatgttcgcgtcctctcacttggccaaaaaggcacacttttaaacaaaattagcgataaagaatggaacgtccaaataggcataatcaaaatgaaaatcaaaaccgctgacttagaatatattcaaccagaaaaaccaaaaaaacaacgaatcattacatcggttcatagtagtggttctccagctaaaagcgaactcgatttgcgcggcgaacgttacgaagatgctttgcaaaaagtcgacaaatacttggatgaagcactgctcgcaggatatcctcaagttgccattattcacggtaaaggaactggtgcccttagaactggcgtcacagagtatctgaaaaatcatcgcatggtcaaatcgattcgtttcggtgcagcagcagaaggcgggaacggcgtaaccatcgttgagttcaagtaa

SEQ ID NO: 24420 - DNA, 1365 bp, Listeria monocytogenes
atgattaaaaaagtactggtagcgaaccgtggagaaatcgctgtccgtatcattcgcgctgcaaaagaacttggagtggagacagtggcgatttattcggaagcagatagagaagcgctacatattcagctggcggatgaagcttattgtgtaggtcccgcggcaacaaaagatagttatttaaatatgtcaaacattattagccttgctgttttaacgaactgtgatgctattcatcctggctatggtttcttagccgaaaatgcagatttcgctgagttatgcgaagactgcaatattacttttatcgggccaagcgcttccgctatttcgcaaatgggaacaaaagatgttgcccgtgaaactatgcgtaaagcaggtgttccaatcgttcctggttcacaaggaatcgttgccgatgtggaagatggtaaaaaaatcgccaaaaaaatcggttatccggtgatcattaaagcaacagctggcggtggcggtaaaggtattcgtgtagcagaaaatgaagaaaaattaatctctggtattcatacgacgcaacaagaagcagaagcagcatttggagatccaggcgtttatcttgaaaaatacattcaagatttccgccacgtagaaattcaagtacttgctgataaccatggtaacgtgattcatttaggagagcgtgattgtagtattcaacgtcgcttgcaaaagctaattgaagaatcaccatcacctgccattgatgaaaaaacacgccaaaaaatgggtaaagcggccgttaaagctgccaaagccgtgaattattctggtgcaggtacaattgaatttatttatgatcatcatgaaaataatttctactttatggaaatgaatactcgtatccaagtagaacaccctgtaacggaacttgttaccggaattgatttagtcaaacaacaatttttagttgcttcaggtgaagagctacaaattaaacaagcagatgtgaaattaacaggttgggcaatggagtgtcgtattaacgctgaaaatccggagaaaaactttatgccagctccaggagaaattaaattttatcttcctccaggtggcttaggcgttcgaattgactcggcagcatatccaaactacaaaattccgccatattatgattcgatgattgctaaagtaatctgttatgcagaaacacgtgaagaagttattcaaaaaatgaaacgagcgttgtctgaatttgccattgatggcattccttcaaccattccattccatttacgcgtgttagataatgatgtatttttatcaggcgacttcaatacaaaattcttggagcaaaatgatgtaatgaatctttctaaggagggctaa

SEQ ID NO: 24421 - DNA, 447 bp, Listeria monocytogenes
atgttattggaccgagtaactttagaggatattgaggtaaatttaaaagcagaagactggcgggaagctatccaaatgtcagcgagacttttactagaacgaggcgctatcaaagagagttatattgatggaatgattcaaagtgtagaaaataatggaccatatatagtgatcgctaaacatatcgcgttagcgcacacacgaccagagtttggcgtcattcacggtggcttaacctttgcaacattggctgatggagtggcttttggcagcgacatgttcgacccagtgaaactaattattacccttgcggcaacggattcagaaagtcatttagaagtgttgtcagagcttgcagaagtactcatggatgaggaaaaggtaacccgtttaatcgaagcaaattcaagccaagcattttatgatgaattaacaaaagaaggataa

SEQ ID NO: 24422 - DNA, 1050 bp, Listeria monocytogenes
atggctaaccaaaaagaacaactgacacgtattaaaattttagaacctttatttcctaatcgttctacttcaatcataaacggagaaactagtgggattttaaattggaacgacatcccgtatccttctttctaccgtgcgtataaagaactttctactaactactggattccagatgaagtagacatgaaaagcgatgcaaaacaatatcccgctctttctgaacaagaaaaatatgcttttgatgcgattattggcttacttgcaacactggattctccgcaaacacgctttatttataacattgcggaatatattaccgatccagcagtccatgcaaacgcagcaattatcgcacaacaagaagtaattcataatgagagttactcgtatgtacttgcttctattacaaatttacaagaacaaaatcgtgtctttgaacttgcaagaacgcatccgacaattatcaagcgtaatgagccaatcatggacgcatatgatgatttcatgaataataaaacgggtgaaacacttgtaaaagcattaattcaatcttctattttagaaggaattaatttctacagtggctttgcttacttctacaacctggttcgtcaaaataaaatgactggaacaggaaaaatcatcagctttatcaatcgcgatgaattagctcactcaaaatttatctctgaagtaatccgagcaatccttggggaaaacccagaattacaaacagaagagctagtggaatatacacatgaagctttccgtcacgctgttgaacttgaaacagaatggtccgaagaagttttacaaggtattgaaggtatagatgtggaagaaatggttgactacgtgaaatatcgtgccaacaaaatgctaggaatgcttggtattccagaactttatccaggacatagtgacaacacaatgacatggattaaagcctatgcagataactttacagaaacaaaaaccgactttttcgaaatgcgcaattcaagctataaaaaaacgaacatggataacggattcgacgatttatga

SEQ ID NO: 24423 - DNA, 825 bp, Listeria monocytogenes
atgactcaaccagccgtatacgtggtttccgattcaacaggagaaacggccgaacttgtgacaagagcggcacttagtcaatttggtcagacaccgaaatttatccatcgttttcaccacgtcgattcttctcatatgattgaagaaattgtcgacttagtggccgtgaataatggtattatcgtccatacgattgtactagagagcgttcgagaagagctaaacaaaacagcccaagctttcggtgtgccaattatcgacttatttggtccgcttttaaaccagttagaggaaacgtataaaatcaagccactttctgaaccaggacgcgttcgttcgatggatgaagcgtatttcaataaagtagcagcaatcgaatttgccgttgaaaatgatgacggacgtaatccaagaggtattttacaagcggattatgttttaattggtatttcaagaacatcaaaaacgcctttatcacagtatttagctctaaaaggcttgaaaatcgttaatattccaatcgttccagaagcacaaatcccagatgaactttttgaaattgatccgaaaaaaattattggcctaaaaatcagcaaacaaaaattgacgaaaatcagacaagaacgattaatttccattggtctgcctggtgcaggtacgtatgcaagtaatcaacgtattgatgaggaactagccatttttaataaactagcgagcaaacttaattgtttcgtcttagatgtgacaaataaagccattgaagagactgcaaatgagattttaatccatattggtgaaattgttgatgaaaatttagaattataa

SEQ ID NO: 24424 - DNA, 6042 bp, Listeria monocytogenes
ttgattagaaaaatctttatagggattttgtcatttactatcttaatacaaactgtaattgtttctaactttaatgttgtttatgcaactaccgaagagcataaacaagaagctattaagttagaaaaaaaatcaactaataataatataatatgtataaaaggtgctgtgaaagataaagaatataaattatctttaccaaaatcttttaatttagatgagaaaaagacaggaaaagaagttgaatataacaaagaaaaaaatgagctaacaattataggaacaggggaagaaataacgctatatttacttgcttctcaaacaggaaaatacgaactagaactaaaagaaggggacaaagtacaagccaagttagatttaattataaaaaatgtagatgaagaagtcgcaaaaactgtcgaaaaatcaaatagacagttactacgttcatctatttcggataaattatttcttcaagcggattcaagtaaagccacattagctaattatacagaacaaataacttttaactattctattaattttctagatggctcaacaaatttgaaaaacggtaaattagtaatagattttaataactctaatcttgaactagtgaattatcctaaagacacggcagcaaataggaatataaaattaacatcttatagtgcgcttacaggtaaattaaccattaacttagtggataatatatctagtggtgctccatttgacattccaatcgttgtaagagctggttatggtgcaaagccaggattaccaatgaacctaaaagctacactatcaggtgagaacagttcaggtggcacgtatacaccatcagaaaaaacaaccacagttaatttagaggaaagtagctccaaccaagactatagtccaattacagcaggtgataatagctgggcttttaatttgaaagaactctcatactcacttaaaccaggtggatatactatccaatggcctgaaatccagaagaaaagtttggaaaataaaagtttcaaaaatttaaaattagaatatcttaaagaaaatggtggggatgttatatctgttaatacagcagacccttacgtaattagattcggagagcctttttggtcacagcttagcacagttaatggtaaagcaaatgtacttgttaatgatgatgagaaacaagtagtcgaatatggaccaattaacgctaatatttaccaaaaaatacaggtatcaatggctgcgaaaataccggcagatggggttgaaggaacagagtatactggtacggtaaatgtatatgatgaagatgttttcatcacctccattaaaattaaggccgaagttgctgattcagctacatcaatagcagttgatagcaaggtttctaaaacaagcatatcagaaggcgatatatttgaatggggattcatgcctagagtatcttctgcggcaccaggtgtaaatgatttagaaattgtagcaccaattcctgaaggtatcaaagcattatcatacatccctaataataactcaatggccagtataaaaaaattagagtactatcagaatggtaaatgggtatcaatggccccacaaacatctagtggttgggatttttcaaagattgaccagtccgttaatcgtattgaaaagctaaaacttacatcaagagacggaattattaatgataaagatatgccgccttatactcatggaacaattcgaatgcaaaatattggtgtgaaagcaggagaaagctttacactccgaccagaatctatcacttatacagacccagacaaaaccagtaaaacaattgatacaacgacaaatagttatggaaagaacgttcaagtagtagaaaaaacctctgctccagcgaaaatcaatggcgaagttttcttatcttcaactgctggtacttctggcaagggatttggaagtacaattttctttaatggcgacaaaattgcacagtcagttcgtttaggctcatacggaagtaaactagaaaatccatatatttttgtagtagtaccaaagggtatagatctagaaactatgagaaatttcattcaacaaccttatagaagtacattaaattacacgtatgctcctgctaatggaacgaatactctttaccctaaatctagtgcagatgttaaggggaaagaaactttatcagatggttcaacgttgtattactgggaagcaccggatactggtttagcaccgggcatggaaaattgcgaaatgttagcattagatttagttttgaaattaaataaagcaaacagtggtgctaataaagtagaatttggtatgggttcaatgacagattccagttggaatttaaatggtgctgctaattcaggacttgaaacaaaagaattatctagtgaattacaatccaaacttcccggagtaacatctactaaatacttgtctacaacgagaacagcaaatataggtgtatctaatagtattgcaactaaaatgaaaattaaaggaagtcaagataacgactttgtggatgttagtgcgaatacaggcactacaattccaggtaaaagagtagattataatttaacatttgaaaataatggtacaagaagtatgaagaacttagaaattattgatatacttccgcacaaggatgatcagtatgttctaggcactggtccacgcggatcgaaattttcagttatcccaactagtgaaatcgaagttcttgttaatggaaagaaaagtgattcagcaactttagaatattcaactagttatacgccggaacgtttcgatacaaacggggaggacgtagcaggtgattcttggcaaatcgtggctccaacaaatatggcagatgtgaaaagtttccgtattaagctaccaaatacagaattcaaagtaggagacgaaatcacactaaactttgaagcaatagttccaacagatgctccgagaaatgatgaaatagcgtataattcgattgcttaccggattgataaagaaacaggctctggtacaagcaaattagcatcagaacctcctcgtgggggagtaaaaagtacaaatccatcaacagatttaaacatagccggtaactctttctccgatcttaacaaaaatggtgtaaaagatgcggacgaactaggtttaaacgctgttaaattagatttatacaaaaaaaataacaatgaatttgagaaagtggaaaccgtttatacttcctcggatgctctagataaagaaaaaggtttatttgattttaatggcttgaataatggaacatataaaatagctgctcatctaccaaataaaaatgcagactttattactaccggtccaaataaaatcgtaaaagactcaaaagatgattcgattggctggataacagtcaataactctacagaattcacaattgatgatttggctaacggaaatcctaaaaatctagttgggattcaaattcctatttatatggcaacacctataaaaggcgctgttgtttttgtaaataaagacggagaaccaaaaatcacatcttatggtcaagattatgaaatagctttatttgataaagatggaaaagaagtacaatcagcaattaaaacgaatagtaagggagaattttcttttaatgatgtagccattaaaaatccagctgattttaaattaaaagtaactgcaccaactggaacgaattttgtctattcagcaaagaatcctttatttaacatgtctacaaaggaatatactttaaatagtgtagttccaggcgtgggtggggtagcagaaatttatattactgaaactagtaaaccaactacaaagattatactagataaggcagttactccaaatgcaattacaattgaatcaagtgatgaagctacagaagtaacaaatgaatggacattagaagatagtgatggaacagtcgtttatactggaactggaaatacgattcgtattccaaacgatgaaggaacatatatcgctaaaaacacagcaacagatgaggctggaaacaccgcttctgatgaaaaaacgtttgatatagattatacagttccgacattaacagttaatcaagatgcatcagcagaagtgaatagtacggaagcaaatattggttggattaagccgctaaatgtagcagcaacagatacgcatgatggaaatatcacgccagtagtagattatagtaaagttaaatgggatgtacttggaacatacccagttactgttacagcaacagatgcaagtggcaataaagctactcaaacagtaaatttacgcatagtagatactacttcacctacaattttaataacgaataatccattaacgtattctatcgaaaacatgcggaaattaacggaacaagaattgtacacagcggcaggacttatcggtggagataattatgatttagcaccaggtcaagcagtccaaccaaataaacagccaatggtatttactagcaactttagtactatttttggtgatatagctagtgtgaaagctgggcaatatcaagttcaagtgaatttagcagattctagtggaaatcaagctattccacaaacaattactattaatgtagtagatactgtgggaccagtaattaaagcagataatgtatcttatcacgttaatacaacaaaaacagaagcagaattcttccaagatgctcgtttagatgtgacagataacaatgatgatacaactgatttaattattacttctaattttgcagaaaaagtaaacttgaataagcctggtaagtatgaagtaaccatcactgctacagatactaaaggcaatcaaacaacaaaagaaataacagttcaagtaagcaaggataaaccagtcattactgcagatcccaaaataagttatcaaggaaaaatcgaagtaacagaagctaactttttaagtggtgtccatgcagaagtaacagatgaattagatggtgatgttaaaattactagcgattttgcagaaaaagtagattttaacaaagtaggaacatatacagttactttaaatgcgaaagatgaatatggtaatactgcagaacctgtaaaagtgtcagtaagcatctttaataagatcgcaccaactttcaataatgctgataataaaacaatcgaagcagtaaatgagttaccatcattagaatctatattcaaaattgaagcaaaagattatctttcaggtaataaattaaaagtaacttatacaccagaacaaacaattaaaggcaatgttccaggtgagtactctattaaagtaacaacgaaagatgattcaggcaacatagctgaaacaactgttactttaacaattaaagatacaacaggaccaagcataaaaatgactaaatcaacaaaaaaattagaagtacaaagcaaagaaccaaattggataactttctttggaataaaagcgactgatattgttgatggtgatgttacaaaaaatattaaagtagacagtagtgaagtcaatcttaataaagtaggaacttatcctatctactttacagttacagatgcacttggaaatgaatctagtaaattaaagagcacagtgcagattgtagatacaagtagtcctgagctaacaatcgacaaactagaaattagttatccaacaggaaaaacaatttctgataaacaatttttacaagatattggtactaaagttacaaatagttatggaacagtaaaagtaactactaatctaagtaaaattgttgattggaacaaagctgggaagtataaagtaactgtaacagcgacaaattcatctggaggcgttgctgagaaaacgattctattaacagtcaaaaatagtgattcatcgtttatagcagtaccaagtaaggatgataataagaacaaaccagcaaaaaatatcccaaaaacaggagatactttaaatacagagctaattgtcatgggtatgatgttgctacttgttggaggatggatgttcttaagaagaaaaacgaaagtaaaaacaaagtaa

SEQ ID NO: 24425 - DNA, 690 bp, Listeria monocytogenes
atgacaaaacaagctaatttacaaaaagtaactgcacaaatcgagcatgcctgtgaagaaagtaatcgtcagtcggaagatgtaacattggtagctgttacgaaaacgattgatgtaactggaatcacggagctttatgatttaggtattcgccactttggtgaaaatcgtgccgatgttttcctagaaaaaacagtcgaacttgcagataaagacgacatttgttggcattacattggctctttgcaaacgcgcaaagtaaaagatgtgttaccacaaatcgattatttgcattcgcttgatcgatcatcgctagcaaaggaaatcgaaaagcgtgctactaaaccagtgaaatgtttccttcaagtaaatatttctggcgaggaaagtaaacatggtttttccaaagaagaagcgctatcttttttacaagaagcgaattttacgtttattgagattgttggcttaatgacaatggcacctattacaaatagcgacatagagctgcatcacgtatttcatgagttaaagcaattgcagcaagaaattcatgcgcttcagttaaaaaatattccatgtacagagttatctatggggatgacaaatgactacggaattgcgattacagaaggtgcaacatttatacgaataggaagagctttggtgaatgacgataatatggaggtgtaa

SEQ ID NO: 24426 - DNA, 1503 bp, Listeria monocytogenes
atggacgagaaagaaaagaatttaaatgaaaacagcgagaatgaaagcacgccgaaaagagaggtcgaggatactttacatacaccggagagcgcgcaaccagtccaagaaactcctattgtagaaggcgtgaccccagaaggggagaaatttgccggagcgacagaagatgcagccgaggcgagttctacaaatgcattttttgaagaagcaagtaataaagaatcagaacctgctagaccggctccagggccaagacgcgctggtacaactggtggcggggcagttccacctaatagagtgaataatggcggaagtggtaacgggaatggtgaaccaccgaaacgcggcaaacactttattggttactttttaacagcacttattggtgttattatcggaggacttattattttctttgtcgcttgggataatggcgataacgcagatacaacttcaaactcaaataataaagctaccaaagtagaaaaagtttcggtagatacaacatcagatgtaacaaaagcagtagacaaagtgcaagatgcggtagtcagtgtactaaattaccaatcatcttcatcccttgatggaacaacgacttctgaacaagaagcttcctcaggatctggtgttatttataaaaaggcaaatggaaaagcctacatcgtaacaaataatcacgttgttgcggatgcaaataaattagaagtaacttttacaaacggtaaaaaatccgaagcaaaattacttggaacagatgaatggaacgatttagctgttcttgaaattgatgataaaaatgttactacagtcgctgcattcggcgattcagattcattaaaacttggtgaaccagcaattgcaattggtagcccactaggaacggaattttccggttctgtaacacaaggtattatttctggtctaaaccgtgcagtaccagttgatacaaatggcgacggaacagaagactgggaagcagatgttatccaaacagatgcagcaatcaatccaggtaacagtggtggagctttaattaacattgaaggccaagtaatcggtattaactcaatgaaaatttcgatggaaaatgtagaaggtattagctttgcaattccaagtaacacagtagaaccaattatcgaacaactagaaacaaaaggcgaagtagaacgtccgtctctaggtgtatccttacgtgacgttgatacaattccagaaacacaacaaaaaaatatcttgaaattacctgatagcgtagattacggcgcaatggtacaacaagtagtatccggttctgcagcagacaaagcaggcttgaaacaatacgatgttattgttgaactaaacggccaaaaagtaacaaactccatgacattacgcaaaattctatacggtaacgacgtgaaaattggcgataaagtcaaagtaaaatactatcgtgacggtaaagaaaaatccacagatattaaattagaagcagcaaaaacaactacatga

SEQ ID NO: 24427 - DNA, 1797 bp, Listeria monocytogenes
atgtcagttaaatcaaatatcgtaaaaattggggtatgttttgccgtacttgcagtcccagtttcgcaaacaacattaccagtatttgctgcagagcaacctggattaaaagcaagtcaggataacgtaaatattccagattcaacatttaaagcctacttaaatggactactaggacaagcgagtacagcaaatattacagaagcgcaaatggattcattaacatatattactctagcaaatataaatgttactgatttaacaggcattgaatatgctcacaatataaaagatttaactataaataatattcatgcaacaaactataatcaaataagcgggcttagtaatcttgaacgcttacgcattatgggagctgatgttacatccgataaaattccgaatttaagtgggttgactaatttaactctactggatctttcacacagtgctcatgatgattctattttaaccaaaataaacacactgcctaaagttactagcatcgaccttagttacaatggtgcaataacagatattatgccacttaaaacaatgccagaacttaagagcttaaatattcaatttgatggtgtgcatgattatcgagggattgaagattttcctaaattgaatacactgcttgcatatagccaaaccataggcggtaaaaaactgattaactccgatattaaaagtagcaaattaacttataacgcagaaaatcaaacattatacgtcccattcagcttgatgacggaacggactgttaattatgatggctatgtaccagattttgtgaaatcaactgctagcagcgacacttactttacaatgaatgagcaacaagtaaatggtaatcgcctaacaattacaagcgacggtttaacagtaagtgatgtgagtaaaactgattttgataatcttgaaaaaatggaatacaatgcgagaatcgatttgagttatcaatcttacaacactccggaacagttccaaaatggtggatcttatactatctcgatgccaatctatgatcattacttcactgttgaccattctttgaatatcacagctgatagtgaaaaaacatatatagaaaatcaactagttacagaagcaacatttttatcagatattcatgcgaaaactgatgacggatcgaccgttacaagtgatttcgctgataaagtagatttcaatactcctgggacgtacacagttactctacaatccgagaataatgccggattaaaagcaacacctgttcaagtaaacgtaacaattaaagcgaagacaacgattactgcagatgaaaaaatcacttataaagtagacacatctaaaacagaagcagcatttctagcagatattaaagcaacaacaaatgatggaacagcgattacaagtgattttgcgactgttgtagatctttccaaacctggaaaatatgtcgttacactaaacgcagaaaatgatttacaaaaagctttgccagtgcaagtgatggttattgttgaaaaagaaacaccaataccagacccgacgcctacaccaacaccggacccaacaccaacaccagatccaagtccaacacctaatccggttatcaacccaaacgtaaataaaccagaagtgccaagttacaaaattccatcgttaactgtaaatgagaaaaaagctaaagcagaaccaagtaaagaggctttacctaaaacaggggattccttacctgtagcaggtgcaacagtaggatttctattaattggcttaagttggtttgtttctaggaaaaaataa

SEQ ID NO: 24428 - DNA, 717 bp, Listeria monocytogenes
atgaatccagagcaattccaaatggcgctcgctgaaaaaggaatagaactaagcgacgaccaaatgaaacaattccacgattacttcgaaatgttagtagaatggaatgaaaaaatgaatttaacagctattactgacgaaaaagaagtgtatttaaagcacttttacgattctatttctgccgcgttttatgtagactttactaaattcgatactatttgtgatgtcggtgctggcgctggttttccaagtctcccaatcaaaatctgcttcccgcatttaaaagtaagcatcgtagactccttgaaaaaacgcatgactttcctagatgcgctagcagaaaaattaggtctaaccgatgtgcatttctaccatgatcgcgctgaaacatttggtcaaaacaaagcgcaccgcgaaaaatacgaccttgtaaccgcacgtgccgtagcaagaatgagcgtattatccgagctttgcatgccacttgtcaaaaaaggcggttcgttcctagtaatgaaagctgcccaagccgaacaagagctgcaaacagccgaaaaagccatcaaactatttggcggaaaagtcgaggaacacttctctttctccctaccagtagaagaaagcgaacgcaatatctacgtcatcacgaaaacaaaagaaacccccaacaaatatccacgcaaacccggaacacccaacaaattaccaatcgaataa

SEQ ID NO: 24429 - DNA, 384 bp, Listeria monocytogenes
atgaaaaaggttattacatatggaacatttgacttgcttcattgggggcatattcacttattaaagcgcgctaaggctcttggtgattatttaatagtagcaatttcttccgatgaatttaatcgaattaaacataaagaagcttatcatagttacgaacaccgtaaattaattattgaagcaatacgttatgtggatgaggtgatcccagagaataactgggaacaaaaaagagatgatatagagaaatacggaattgatgtttttgtaatgggtgatgactgggaaggcgaatttgattttctaaaagatgtgtgtgaagttgtttatcttcctcgaacagaagggatttctacgtctcaaataaaagatgaactaaaataa

SEQ ID NO: 24430 - DNA, 333 bp, Listeria monocytogenes
ttgtttgagaagacaaaccgtatgaatttattatttgatttttaccaggaattactgacaacaaaacaaaaagcgtatgtttcgttttattacttagatgattactcactgggcgaaattgccgaagaatttgaagtgagtagacaagccatttatgataatattaaaagaaccgaggaaagcctagaaaaatacgaagaaaaactagggatgctaaaaaaatatcaacaacgagaaaaactctttactcaattagaagcacaattaaccaagaagaattttctggacgagcaagtgaaagatacgctcgaacagcttaaaaatatcgattag

SEQ ID NO: 24431 - DNA, 894 bp, Listeria monocytogenes
atgaatgatttaattgaagattttttacattttttaattgtagagagaggtttatccgcgaatacaatcaaagcttatgaacgagatttacactattttgtttcttatatggatgtaacgaaggagttaactgatccgaatacacttgaacgaagcgatatagttggttttatggcatttgcaaggcaagaaggaaaatcaccaagaagtgtagcgcgatatattgcttcactgcgatccttctttcattatttaatgcatgatgggaaaatgtcacatgacccaatgattcaaattgaaacgccaaagcaagcccagggattaccaaaagttttgaaccttgatgatgtcgagaagttacttagctcttctgatacaagtacacctctcggactgcgtgatcaagcaatgatggaaattttatacgcgacggggcttcgtgtaaccgaacttgtcagcttgaaaatggacgatttgcaccttcatatgggttttatccaaacgattggtaagggggataaagagagaattatcccactgggaaaaacggcaacaactgtgttagaaaagtatttagaggaagcgagaccgaaacttcgtagaccgaaataccgaaatgattttgtctttttaaatcatcacggtcaaggacttacaagacagggtttctggaagattttaaaaggtattgcaaaagaatcgggcattgaaaagccgattacaccgcatactttgcgtcattcatttgccactcatttgcttgaaaatggggctgatttaaggtcggttcaagaactccttggtcacgccgatatctccactacacaaatttatacacacgtaacaaagctgcgtttgaaagatgtctacaaacaatttcacccacgcgcttaa

SEQ ID NO: 24432 - DNA, 1758 bp, Listeria monocytogenes
atgaaaaaaacgaaaattgtttgtacaattggtcctgcaagtgagtcagttgacacattagttcagttgattgaagcaggaatgaacgtagcacgccttaatttctctcacggagattttgaagagcacggtgcgcgtattgtaaatatccgtgaagcatcgaaaaaaactggtaaacaagtggctatcttacttgatacaaaaggtccagaaatccgtacaaacgacatggtcggtggaaaattagaattccaaacaggtgatgttgtacgtgtttctatgactcctgttgaaggaacaaaagaaaaattctctgtaacttacggagaactttatgatgacgtagaaattggttcttccattttacttgatgacggcttaatcggtcttgaagtaatcgaaaaagacgaagctaatcgcgaactagtaactaaagtacttaaccctggcgtacttaaaaataaaaaaggtgttaacgtacctaacgtttctatcaacctaccaggaatcacagaaaaagatgctgctgatatccgctttggtttagaacaaggtatcgactttatcgctgcatctttcgtacgtcgtgctacagatgttcttgaaattactaaaattttagaagagcataacgcaactcacgtacaaatcattcctaaaatcgaaaaccaagaaggcgttgacaatatcgacgaaatcttgcaagtatctcaaggcctaatggttgctcgtggtgaccttggtgttgaaattccagctgaagaagttccgattgtacaaaaagaacttatcagaaaatgtaataaacttggtaagcctgttattactgcaacacaaatgcttgattccatgcaacgtaacccacgtccaactcgcgctgaagcaagtgacgtagcgaatgcgatttttgatggaacagatgctattatgttatccggtgaaacagctgctggggattatccagtagaagcagttaaaatgatggcgaaaatcgctgttcgtacagaagaagtactagttgctcaagataaatttgcacttaaacttcacgaaaatacggatatgacagaagctatcggtcaagcagttggccatactgcgaaaaacttaaacgttcaaactatcgttgctgcgactcaaagtggtcacacagcgcgtatgatctctaaatatcgtccaaaatctcatatcgttgctgtaacattcaacgagcatgtataccgtggtttagcactttcatggggtgtttatcctcgtctagctactccagttagcaacacagatgaaatgttcgaccttgcagtgaaagaatctcttgcttctggcgttgcaaaacaaggcgacttaattatcatcactgctggtgttccagttactgaaagtggaacaacaaacgtaatgaaaatccaattaattggtgaaaaagtagttaaaggccaaggaattggcagcaaatctgttatcggtaaagcaatcgttgctaaatccaatgcagaagcacttgaaaaagcagaagaaggcggaatcttaatcgttaaaacaacagataaagaaatccttcctgcattcgagaaaagtgctgcagttgttgtggaagaaggcggcttaactagccacgcagcagttgttggaatcaaccttggcattcctgttatcgttggtgctaaagatgcaacatctcttgtaaaagatggtgaaatcatcacagttgattctcgtcaaggtgttgtatataacggcaaaacagcaacacattaa

SEQ ID NO: 24433 - DNA, 894 bp, Listeria monocytogenes
atgctaagactaggttctcatgtatcaatgagcggaaagaaaatgcttcttggcgcaagtgaagaagcagcttcttacggctcaaatacgtttatgatttatactggtgctccgcaaaatacgcgcagaaagccaattgaagagttgaatattgaagctggcttagaacacatgaaagcacatgatatggctgacatcgttgttcacgcgccttatatcattaatattggaaactccgttaagccagaaacctttgaactaggtgttaatttcttgcaatctgaaattgaacgtacgcgcgcgcttggtgccaagcaaatcgtacttcaccctggtgctcatgttggcgaaggggcagataaaggaatcaaacagattattcaaggtcttaatgaagcattaatacatgatcaagatgtacaaattgctttagaaacaatggctggaaaaggttctgaatgtggtcgtacttttgaggaactcgcacaaattatcgatggcgtaacgcacaatgaattattatccgttacgtttgatacttgtcatacgcatgatgcaggttacgatattgtgaatgactttgacggcgtattaaatcaattcgataaaattgtcggcattgatcgcttgaaagtattacatatcaatgatagcaagaatgaacgaggcgcacataaagaccgacatgcaaatatcggttttggtcatattggctttgatgcccttcattatattgtgcatcatccgcaactagcagatgtgccgaaaatccttgaaacgccttatgttggtggagataaagcatcaaaaaaagcaccatacaaatgggaaatcgccatgttaaaaaatggcgaatttgacccagatttattaaataaaattcaaaacagctaa

SEQ ID NO: 24434 - DNA, 2256 bp, Listeria monocytogenes
atgaaacggcgtataggtaacatgagaaggggagctcttgtgctttttatctttttcacaattctctttctcttggtttctggccgttttctttatttgcaaattacgggagaagcaaatggggtacctcttgcagcaaaagcatctaaacaacatttgaaaagcagtgttctcgaagcaaagcgtggctccattttagatcgtaaaggagaagtgctagcggaggatacggcttcttacacggttgcagcagtagttagcgataaactttccaaaacaacgaagaatccaatgcgtgttgttgatgaagaaaaaacagctcgaatccttgccaagtatattcctatggatgaatctgacattctagataagctccacgaaaaaggaaaataccaagtcgaattcggcgctgctggaaaaaacatttctacagaaacgaaagcgaaaattgacaaggaaaatttaccaggtattgaatttactcgtcaatcagaacgtttctatcctaatggaacatttgcaacacaattaattggttttgcgcaacaagaagaagaaaagaatgctaccgttctagaaggtaaaatgggtattgaatcccgttataatgatattttgacaggcaaaaatggcaaaattgattacagtacagacagaatgggttatattttgcctaattctaaaaacaaagtaacggaagcaaaagacggcaaagatattacgctaacactagataaaaaaattcaaacctttttagaagatacgatgacaactgttgatgcaaagtataaaccgaaaaacatgatggcagttgtagctgatccgaaaacaggtgaaattttagctattagtcaacgtccttccttcaaccctgctgatcgatctactattaccggaaacagctccagcatttggcaagatttacctgttgagtatgcttatgagccaggatcagtaatgaaaattatttctcttgcatctgcaattgatacgaacgcttataatgccaatgaatattatcaatcgggttcttataaagtaggagatatcgcaatccatgaccataacaacggaaacggttggggctctattacgtatcgtgaaggagtagaacgctctagtaacgttgcatttgccaaactcttaaacaaaatgggaaccgatacttttaaaacatatttagacaaatttggttttggtaagaaaacaggtattgctttacctaatgaaacaagcgggaaaattttgtataactatccaattgagaaagtaacaaccgttttcggacaagggacaaccgtttcaatgatgcaaatgattcaagctgcttcggctatcgcaagtgacggcacgatgaaagaaccatatgttgtttcaagtgtcaaagatccaaacacaggcgaagaaaccgacactaaaacaaaaattgctggaaaaccaattagtgcagaaacagcgaagaagacgcgtgatgaattaaaaaacgttattagcggcgaacatggtactggtaaattatacgcgattcctggatacgatgtagctggtaaaaccggtacatcacaaattccagatcccaaaacaggtaagtatatgactggagcagataattatatattctctttcttaggaatggcaccggcggataatccggaattagttatctatgtgacaatgcaacaaccgcaattgtccggcagtcagactggcggagaagcagtctcggaagtttttaatcctgtaatgaaaaatagtctgcaatatatgaacatcaaaccaggcgatgcagaaaaactagcttctgaaaaagtaccagtcctagcaggaaaaaaagtagatgaagctaaaaaaatagtgaaggataaagggttggaaccaattgtagttggtaatggcaaaaaaattgtccaacaacttccacaagcgaacgccgaaatcatgcaaggtcaaaaagttattttaatgacagatggtgacatgactgcccctgacatggtaacttggtcgaaagacgatgcgttaaaagtttctgaaataactggtattccatttgagtttagtggaaatggttacgtgaagagccaaagcgtatctgcgggtagcgttattaatagtgaaacgaaaatgaaaataaccctcgcgccaccagaagaaataagtgcatttaatcaaaatcacgatcaagatacagcggaaaaaaataaaaaagcaactgacatccaagagaatgccggtatcggtgatttgctcaattaa

SEQ ID NO: 24435 - DNA, 447 bp, Listeria monocytogenes
atgaaagttattttcttgaaagacgtaaaaggtaaaggtaaaaaaggtgaaactaaaaatgttgctgatggttatgcaaacaattttttaattaaaaatggttacgcagttgaggctaacaatgcggctttaagcactctttcagcgcaaaagaaaaaagaagataaattagctgctgaagaactagctgaagcaaaagctttgaaagaaaaaatggaaaatttaacagtggaattaaaagcgaagtctggtgaaggcggcagattgtttggttctattacatctaaacaaattgctcaaacgcttgaaaaaacacatggtattaaaatagacaaacgtaaaatggacttaccagaagcgattcgagctttaggacatacgaaggtgccggtgaagttgcaccatgaagtaacggcaacacttgatgtacatgttagtgaagaataa

SEQ ID NO: 24436 - DNA, 465 bp, Listeria monocytogenes
atgccaaaaggtgatggtaagctagtcgcgcaaaataaaaaagcgcgccacgattacgcaattgaagaaacttttgaggctggcattgtcctgcaaggtactgaaattaaatccgtaagaaacgcacgggtaaacttaaaagattcctatgcacgtatcgacaaaggggaaattttcttacacaatatgcatattagtccttatgaacaagggaaccgctacaatcatgatccactaagaacgcgcaagttgctcttacataagaagcaaatcagccgtttaattggagaaacgaaagagtccggttattcgattgttccactaaaaatgtatattaaagatggctacgcaaaagtacttatcggtgtagctcgaggtaaaaagaaatacgataaacgccaagacttaaaacaaaaagaagcaaaacgtgatatcgaacgcgcttttaaagagcgccaacaataa

SEQ ID NO: 24437 - DNA, 624 bp, Listeria monocytogenes
atgaagaaagttttagtttttgctgcttttatcgttttattcagtttttcgtttctttctactggattaacggcacaagccgcacttaaggatggaacctattcggttgattatacggtgatacaaggggatagtgattccgcatctatggcgaatgactattttgataaacctgcaacggtaacagtaaatggggggaaatcaactgttagcttgcaagtgaaccatagtaagtggattacgggcctatgggttgaagggaacgcggttagtgtgacttcgaaaaatgcatcaagtgacactagaaaagtttcgtttcctgtgtcgactttaagcaatcctgttaatgcgaaaattaaagtggatattgatgatgacgacttgaattatcatcatgaatatcaaatcaagttacgtttcgatgaaggatctgcaaaagcattagctggagcggtgaaatcttctgataataatacaacaacacccgcaacaaagagtgattcaagtaataaagtaacaaatccaaagtctagtgattctagccaaatgtttttatacggaattatttttgttgcaactggggcagggttaattttacttaaaagacgtgcgatttttaaataa

SEQ ID NO: 24438 - DNA, 1203 bp, Listeria monocytogenes
atgtttaaacgaattttaaaatcttatgattatgcatttattgcggtatttatcgtgctatgtttatttgggcttattatgatttatagtgccagctggtctttagcaattggcaaaggcttaccggcagattatttttatgctcgtcaagtaaagaactttataattagttttattttctttattctttttgctcttttgccatttaaattttatcaaaataataaggtgttaatgttaattgtatttgggtctatcggtgttttattactgattttcttagttggtaaaactgtaaataatgcgaatagttggctcgttttagggccacgctcacttcaaccaggcgaatttgctaaattagcagttattatttatatgtcggctatctatgcgaaaaaacaaagctatatcgatgatttcaaccgcggtgttttaccgcccatattctttttagcatttgtatgtttcttaattgccatccaaccagatactgggacagcttttattattttcttagttggttgttgtattatcatcacttctggaatgcgacttcgaacgattatgaaattaattgggattggtatgggtattattattggactcacgctcatcttattcgcactacctgatagtgtgaggaacgaaattgtttctccaacaaaagttgctcgtattacaacttttatgaatccttttgaatatgcggataaggaaggacaccagctaattaattccttctatgcaataggttcaggtggcgtttctgggcaagggcttggcgagagcgttcaaaaacttggttacttaccagaagcacataccgattttattattgccgttgttgcagaagaattaggtgtgtttggtgttatgtttattattttggcactattcttcattatctttaagactatcaccaccggactcagggcgaaggacccatttgcctcattaatgtgctatgggatcgctagtctgattgcaattcaagcatttattaatcttggcggagctagtgggctgattccgcttactggtgtaacactgccatttattagttatggtggctcttctttaatggtgctgtcgatgatgcttggtatcgtagcgaatatctcaatgtttactaaataccaacgtgtttataaagcagatggttccacgaaagagttaccaaagaaacaaaaaagacgttaa

SEQ ID NO: 24439 - DNA, 1251 bp, Listeria monocytogenes
atggttgttgcagattatttagcattattcgcggtaatatgtatttggggacttttgctaattaatattgtgttaattgtcgcaggatatgtttattatttgaaaaatgaagcgcgaaaagtgcccgaaataccagtggaagtaccatttgtttctgtcatggtgccggcccataatgaaggaaaagtaatcgtgaaaacggtggagtccctactggcgtttgattacccggtcgatcgctacgaaatcattgtgattaacgataattcttcggataatagcgcggaacttttagctgccattcaagcaaaaaatccgacacggtttttaaaaattattaataccgataatattacaggcggaaaaggtaaatcgaacgcgctcaatatcgggtttgcggaaagtcgcggggaactggtggcgatttatgatgctgataatacaccggaacggcaagcgctaagaatccttgttggcgagattacaaatgatgcgaaacttggtgccgtcattggtaaatttagaacccgaaatcgaaatgcgagttggttaacgcgatttatcaatatcgaaacgcttagttttcagtggatggctcaggccggcagatgggccctgttcaaactatgcacgattcctggaactaattttattgtgagaaggtcgctcctagaagaaatcggtggctgggatgtgaaagctgttgcggaagataccgagattagttttcggatttacatgatggggtaccgaatcaaattccaagcgaaggctgtcacttgggaacaagagccccaaacattgccagtttggttcaaacagcgctcaagatgggcaaaaggcaatatttatgtaattttaaaaaacgttccactcctttttaaacgagaaggtaggcgcgttcgctttgatattttatactttttatcgatttactttttactattaacttccttgattgttagtgatgttttactcgtattatatgcgcttggactagtacatacaacacttgctggccttagcggggcgctttggttgctagctattttactttttgtcgcaggtacttttattacactcaccacggaaaaaggcgaaatcagtttttcgaatttgttatttattatgttgatgtatgtgacgtattgccagctttggatggtggtagccgcatatgggttctttattttcttaaaagataccgtactaaaaagggaaaccaaatggtataaaaccgagcgtttctaa

SEQ ID NO: 24440 - DNA, 1176 bp, Listeria monocytogenes
atgttagaatttgacactagttcagaaagtttggcaacaattaaagtaatcggtgttggcggtggcgggaacaatgctgtaaaccgtatgattgagcatggtgttcaaggagtagaatttatctccgttaatacagacgctcaagcacttaacttagcaaaagcagaaacaaaattacaaatcggtacaaaattaacgcgtggtttaggtgcgggagctgtacctgaaattggtaaaaaagctgcagaagaaagccgcgaacaaattgaagaagctttaaaaggctctgatatggtattcgtaactgctggaatgggcggcggaactggaactggggctgcacctgttatcgctcaaatcgcaaaagaaatgggcgctttaacagtaggtgttgttactcgaccatttggttttgaaggaccaaaacgtacgaaacaagccttaactggaacagaagcaatgaaagaagcggtggatacgttaattgttattcctaatgaccgtttacttcaaattgtggataaaaatacaccgatgcttgaagctttccgtgaagcagataatgttttacgtcaaggtgtacaagggatttctgatttgattgccgttcctggtttaattaacttagactttgccgatgtgaaaacaattatgactaatcgcggttctgcccttatgggaatcggtattgcaactggtgaaaaccgtgctgctgaagctgcgaaaaaagctatctcttctccacttcttgaaacttctgttgatggtgcaaaaggtgtgctaatgaatattacaggcggatctaacctaagcctttatgaagtacaagaagcagcagaaatcgtatcaagcgcatctgatgaagatgtaaatatgattttcggttctgttattaatgacgaattaaaagatgaactgattgtaactgttattgcaacaggttttgatgaagcaaagcaagcgcaacaacaagcgcaagcaaatcgccgtccaaatcaatctattcaagtaaatcgtcctaattatgctgtacaggacgaacaacaaaatgattatgcgcaaaatgcaccacaacaagcaaatgcaccagttcatgaacaacaagctgaaccacaacaaaatagttcagatgttgatgtaccagcatttatccgtaaccgtaaccgtcgcggataa

SEQ ID NO: 24441 - DNA, 189 bp, Listeria monocytogenes
atggctaaagaatgtgttattacaggccgcaaatcacgttccggtaacaaacgttcccacgcaatgaactccagcaaacgtacttggaaagctaacttgcaaaaagtacggattctggttaacggcaaacctaaaaaagtttgggtatctgctcgtgcgcttaaatctggtaaagtggaacgcgtttaa

SEQ ID NO: 24442 - DNA, 1089 bp, Listeria monocytogenes
atgacagagctactaaaaacaccgattcatccactttatgcaaaatatggtgcgaaaaccattgattttggtgggtgggatttaccggtacaatttgctggtataaaagcagaacatgaggccgtgcgaactgatgcagggttatttgacgtgtctcacatgggagaaattctagtaaaaggacctgatagtacttcttatttacagtatttgttatcaaacgacatagaaaaaataaaaatcggaaaagcgcaatataatattatgtgctatgaaactggcggaacagtggacgatctagtagtttataagaaatcagaaacggaatacatacttgttgtcaatgcagcaaacacggacaaagattttgaatggatggttaaaaatattcgcggggatgtttctgttaccaatgtatcttcggaatatggacaattagcacttcaagggccaaacgccgaaaaaattctctcgaaactaacggatgtagatttaagctcgattagcttctttggatttgtggaggatgcggatgtagctggagtgaaaacaatcatttcaagaagtggatatactggagaagatggatttgaaatttatatgccaagcgcagatgcaggaaaagtatttgaggcgattttggctgaaggtgtcgctccaattggtttaggcgcacgggatacattgcgtttagaggcagtacttgcgctttatggacaagaattaagcaaagacattactccacttgaagctggcctcaattttgctgttaaattgaaaaaagaagcagattttataggcaaagaagccctaattaaacaaaaagaagcagggctgaacagaaaattagttggtattgaattaatcgaacgaggtattccacgtcacgattatccagtatttttaaatgaggaacaaatcggcgttgtgacttcaggcacgcaatcaccaacacttggaataaatattggtctcgctttaattgatacagcttacacagaattgggtcaagaagtagaagtaggcataagaaataaaaaagtaaaagcaaaaatagtaccaacaccattttataaacgcgcaaagtaa

SEQ ID NO: 24443 - DNA, 1740 bp, Listeria monocytogenes
atggcgtatcaggctttgtatcgggtttttcggccgcagtcgtttcaggatgttgttgggcaggaacatgtgacgaaaacgcttaaaaatgccattgtgcaaaataaaacttcgcatgcttatttattttctgggcctaggggaacagggaagactagtgcggcgaaaatttttgcgaaggcgattaactgtgaacacggccatgacggggagccttgcaatgaatgtgagatttgtaaaggtacgacggacggttctataccagatgttcttgaaatcgatgctgccagtaataacggggttgaagaaattcgagatatccgggaaaaagtaaaatatgcgccaactgtggcgaaatataaagtatatattatcgatgaagtgcatatgttgtcgacgggagcgtttaatgcgctactaaaaacgctggaagaaccgccgaaacatgtcatttttattttggcaacaacagaaccgcataagttaccgctaacgattatttcgcgggtacaacggtttgattttaaacgaatcacgacacaagatattattggtcgtttgaaatttattttggaagaagaaaaaatcccttatgacgaaaaagcgttgatgattgttgcgcgtgcggctgaaggcgggatgcgagatgcgctaagtttgcttgatcaagttatttcttatggatccgaagaagttacggtggaggatgcactcgaaattaccggatctgttgcacaaaatttacttaccaaactagtaagtgcagcatttgatggtgacgcagcggaagcaatttccacactaacggctttactagcagaagggaaagacccagttcgcttagtggaagatttactcgtattctttagagatgtgttgctataccaaaaagcaccgaatctggaagaaacaatggaaagggctttaattgatgatgattttgttgcgttggcaaagcgagcagattcactcaaagtatatgagttcgtgaagattttaaatacagcgcaacaacaaatgcgtttttcgaatcatcctggtatttatgttgaagtggcgcttgttcagttaactcaggcgggtcaatcagttgcaggtggcgggaatgtgccagcagatgcggcttctggaagcgacgtctctgacttaaaacgtcaaatggagcaaatgcatcaagagatacaaacgctgaaaaaacaaattgccagtggggccggagcagcaccagctgataaaccaacccaaaatcgcggcggctctaagaaagcgatcaacaacggaaagcaatttaaagctcctattggtaaaatcaaccatgtgttaggtgaggctaaaaaagagaatttacaattaattcgtggttgttggggtgaattattatcgatgttgatggcatctcaagcagctcttttaaatgacgcagaacctgtagctgcatctcaggacacttttgtgttaaaatttaagcatgagattcactgtcaaatggcgatggataatccgaattttgttgaaaccatcacatcaagtattgcacgactgacacaagtaaattatacttttattggaatcccagaagatcaatgggctgatgtaagagagaatttcctgcatagtcatggtagtgatgctgatgcggaggacggcgcaaatccagaagctaaaaaaccagcggaagatccttttgttgcagaagccgcaaaactcgttggtgaagatttgcttgaaattaaagattaa

SEQ ID NO: 24444 - DNA, 1719 bp, Listeria monocytogenes
atggctaaagagttgaaaggtatcgcagcatctgatgggattgccattgcgaaagcttatctgctcgttgaacctgatctttcctatgaaaaaacagaagttacggatgttgagagtgaagtaaagcgttttgaaagcgcgttagaagtttctagaacagaactttcaatgattcgtgagaaagctgctaaagacttaggcgaagataaggcacaaatttttgacgcgcatcttctagtgttaaatgatcctgaattaacaggaccgattgaagaaagtatcaaaaattctaaaacgaatgcagaaacagctttacaagaaacgacagacatgtttattggtatgtttgaatctatggacaacgaatacatgcgtgaacgtgcagcggatattaaagatgtgcgtaaacgtgttctttctcacttactaggtgtaactattcctaatccagctttaattgatgaggaagtagttgttgttgcagctgatttaacgccttccgataccgcacaacttaaccgtaactttgttaaaggtttcgtgacggatattggtggacgtacttctcactccgctattatggcgcgctctcttgaaattccagcagtagttggaacgaaagaagttactgctagcgtagcgaaaaacgatattgttattattgatggtttggaaggtaatgttatcatccacccaacagaagaacaaatcgctcactatgaaaaaattaaatctgattttgctttacaacaagcagaatgggataaacttaaaaatgaaaaaactgtttctaaagacggtgttcacgtggagcttgcagcaaacatcggaactccgaatgatttagaaggtgttatttctaacggcggggaagcagtaggactttatcgtacagaattcttgtacatgggtcgcgacaatttcccaacggaagaagagcagtttgaagcgtataaagctgtagtatccggaatggacggaaaatctgtggttgttcgtacattagatatcggtggcgacaaaacgttaccatacctagaacttcctgaagaaatgaacccattcttaggattccgtgctattcgtctttgttttgcgaatgaagaattattccgtacacaacttcgcgccttacttcgtgcaagtgtatatggtaacttaaaaattatgttcccgatgattgcaacagtaaatgaattccgtcaagcacgtgatattttactagacgaaaaagcgaaattaaaagctgctggaacagaagtatccgattccatcgaacttggaattatgattgaaattcctgctgctgcagttttagctgatcaatttgcaaaagaagttgatttcttctctatcggaacaaatgacttgattcagtatacaatggctgcggaccgtatgaacgaacgcgtttcttacctataccaaccttacaatccatccatcttacgtttagtaaaaatggtaattgatgcttctcataaagagggcaagtggactggtatgtgtggggaaatggctggagatcaaacggctgtaccacttcttttaggcttaggcttagatgaattttcaatgagtgcttcaagcattcttaaatctcgttcgttaatcaaacgtttagatcaatctgaaatggtgaaattagcggaagaagctttaaataaatctacagcagaagaagttgtagaattagttgaaaaatatactgcagaataa

SEQ ID NO: 24445 - DNA, 276 bp, Listeria monocytogenes
gtgacgattacgattcaagatttaaactacgagattatcaccaattatcgcgatgcttttgacgaggagaagttaaatgaacggtttagcgatattcttggacgatatgattatatagtgggcgactggggttacgatcaacttcggctgaaaggctttttcgaagacgataaccgcaaagccgcatacgacaacaaaattagcacgttaaaagaatatatttatgaatactgcaattttggttgtgcgtattttgttattaaaaaagtaaaatag

SEQ ID NO: 24446 - DNA, 876 bp, Listeria monocytogenes
atggcttctaaacaattaaaattagtaatcattactgggatgtctggggcaggaaaaacagttgcaatgcagtctttagaagatctcggttatttttgtgtagataatttaccgccaagtttacttccgaaattctgggagttaatgaaagaaagcgataaaatggataaaatcgcgctcgtaatggaccttcgcggccgtgagtttttcgattccattgaaccagcactagatgagctagataataccaattttataacaacgaaaatcctctttttagaggctgatgataaggtacttgtttcgcgttataaagaaacgcgccgccaccatccactggagcctaatgggtctgtgcttgacgggattaatgcagagcgcgaactgcttagcgatttaaaagggcgttcgcagttagttattaatacgtcaaatatggcaccgcgcgaactcagagaacgaattaacaatgaattccaaaccgaagataaagatatattcaatgtgcaattgatgtcgttcggtttcaaatacggcattccaattgatgctgacttagtgtttgatgtacgctttttaccgaatccgcattacattgacaaaatgcgtccgctgacagggcttgatgaagatgtttatgaatacgtgatgaaatggccagaaacgcagacctttttagataagttagtagatctattaatgtttacactccctttttacaaacgagaaggaaaaacacaattagttattgccattggatgtactggaggacagcatcgttcggtagccttgacagagtttgttggtaagacaattcaacaaaaatatgagacaacgatttcgcaccgagatatgaaacgtagaaagggtcgttaa

SEQ ID NO: 24447 - DNA, 984 bp, Listeria monocytogenes
atgttggatccgaatttttggaacgaccaacaagcagcgcaaaaagtaatcaatgaatccaatggatataaagaaacataccaagcgttccatgcgctagaagaagaacaagaaagcatggaaattagtctggaactgttaaaagaagaagcggatgaagatttacaagaagaattagaaaaagatattaaagcttacatggcgactattagtgcatttgaattaaaactgatgctaagtgacccatatgacaaaaataatgctattttagaacttcatccaggtgctggtggtacagaatcacaagactggggttcgatgttacttcgtatgtatcaacgttggtctgagaaaaaaggctttaaagtagagatgctcgattaccaagcaggggacgaagctggaataaaaagtgttacgctacttataaaaggccacaatgcttacggctatttaaaagcggaaaaaggagtacatcgtctagtgcgtatttcaccatttgactcatctggcaggcgtcatacatcattcgtttccgtggatgtaatgcctgaattagatggcgatattgaaattgaagtacgtacagaagacttgaaaattgatacgtaccgcgcaactggtgcaggtggacaacatatcaatacaactgactcagctgttaggatgacacatattccatccggcatcgttgtaacgtgtcaatcagaacggtcgcagcttaaaaaccgtgaacaagcaatgaaaatgttaaaaacaaagctgtatcaaaaagaacaagaagaaaaagaacgcgagctagcagaaattcgtggagaacaaaaagaaattggttggggaagccaaattcgttcctatgttttccacccttactccatggtgaaagatcatcgcacaaattacgaaaccggtaatattcaagcagtaatggatggagacttagatgactttatcaatgcatatttgcgttctaggattggataa

SEQ ID NO: 24448 - DNA, 540 bp, Listeria monocytogenes
atggaagacaaacgactgatacgcgagaaaattctacggaatttgaatagcattgataaagtagaacatcgcgaacgttctattaaattagcagaaaaactatttttattgccagaatgggaaaacgcaaaggttgttggtatcacattagcaagacaccctgaaatcgaaacagaagcaatcattctgcaagcgaaaaaagaagggaagactattttaattccaaaaacatattatcctagcagaaaaatggagtttaaaaagatggattccatacaccctttaataaaatcaaagtttggtattttagaacctaacgaattagcagaaacagttgataaaaaagtaattgacttattaatcgttcctggggttgcttttaataaagaccattatagaatcggttttggcggaggattttacgatagatttttaacggattttcaaggccatacagtgtccttgtacctttatgaacaacaaatagagtttacacctgaaacgcatgacgaacctgtttctattttaattggaggataa

SEQ ID NO: 24449 - DNA, 1125 bp, Listeria monocytogenes
atgagtgataaaacaaaaaacacaaaaccagttgctgaactaagtgttgagcaagtaaaagaagccctgatagaagaaggtaagaaaaaggggattttaacttatgcaaaaatcgctgccagattagctccattcactttggattccgatcaaatggatgagtatttagaacatgttggtgaagcaggaattgaagtttctgacgatgcagatgacgaggatccagatgaaacagaacttgtaaaagaagaaaccgaatcctttgatttaacagatatgagtgtaccaccaggcgtaaaaattaatgaccctgttcgcatgtatctaaaagaaattggtcgagtagacttacttacagcggatgaagaaattgccttagcaaaacgtatcgaagctggcgacattgaagccaaaggacgtcttgcagaagctaacctacgccttgttgtaagtattgcaaaacgttatgttggtcgtggtatgttattccttgatttaattcaagaaggtaacatggggctaatgaaagccgttgaaaaatttgactttaataaagggtttaaattcagtacctatgcaacgtggtggattcgtcaagcgataacccgtgcgattgcggaccaagctagaacaatccgtattccggtgcatatggttgaaacaatcaacaaactaatccgtgtacaacgctccttattacaagatttaggccgcgatccttcaccagaagaaattggtgaagaaatggacttaccaactgaaaaagttcgggaaatccttaaaatcgcacaagagccagtttcccttgaaacaccaattggtgaagaagacgattcacatctaggcgattttatcgaagaccaagatgcaacttcaccgtccgatcacgcagcatacgaattactaaaagaacaactagaagatgtgcttgatacattaactgaccgtgaagaaaatgtacttcgcttacgttttggtctagatgatggtcgtacgcgcactttagaagaagttggtcgtgtatttggtgtaactcgtgaacggattcgtcaaattgaagccaaagctttacgtaaattacgtcatccaagccgcagcaaacaattgaaagacttcctggaataa

SEQ ID NO: 24450 - DNA, 1284 bp, Listeria monocytogenes
atgaatatagggatttttacggatacctacagtccgcaaattagcggtgtagctacatcgataatgattatggaaaacgaactaagaaaacaagggcacactgtgtatatatttacaacaaccgacccaaacgctgatagagaaagcgaagagggacgtgtatttcgtttaccaagtattccgtttgtcttttttccagaacgtcgcgtagcaattgctggaatgaataagtttattaagctagtaggtcgcttggatttagatattattcacacacatacggagttttcattaggtcttttaggtaagcgaattgctaaaaaatatcatattccatctatccatacctaccacacaatgtatgtcgattacttgcattatattgcgaaaggtaaaattttgacaccttctatggtgggtaaaatgacaaaatcattctgtgatagctatgatgccataatcactccaactgcaaaagtaagacaccacttagaagaacaaggtatccacaaattaatgtacactgttccaacaggcacagatatttcatcgttcgcgccagttgagaaacagcgaattctagacttgaagaaattacttggtattggagaaaatgatccagtgatactttcacttggaagaattgcgcatgaaaaaaatatcgatgcgattattaatgcaatgccagaagtccttcaaacaaaaacaacagccaaattggttattgttggcgatggccctgtgcgtaaagacttagaaaaattagtagaagaaaaacaattagcagatcatgttattttcactggagctgtagactgggaaaatattagtttatattatcaattaggggatctgtttgtgagtgcttcaacgacagaaacacaaggtttgacttatgcagaagcaatggccgcttctttaccagttgttgccaagcgtgatgaaagcattgaaggctttttaagcgacagagaaacagcctttttattcaatgaagatgatgagcttgcatcactgttaataaatatactttcagacaaaaatacagccacattggtcgctacgaatggtcgagtaaaagtggaatccatttctgcggatcaatttggaatcaacattgaatctacatacaatgaagttcgtgaaatataccgagtaaagcgacaaaatgggacgattaaagtaaagcccacactaataaaaagtaaaatagcttcacaagtattttcactatcatcttctacacacgttcaaaggaaagagaggtcatcgcggcgtgattaa

SEQ ID NO: 24451 - DNA, 1953 bp, Listeria monocytogenes
atgatattattacaagttcagcaaatttctaaattcttcggtgcagaagttattttagataatattaaattagaagtaaaaacaggtgatcgaatcgctctagttgggcgaaatggtgcaggaaaatctactttacttaaaatcattgccggcaaaatgagttatgatggcggaactatttccaaaccaaaaagtgtggaaattggctatttggctcaaaataccggtctagaatcttccaaaaccatttgggatgaaatgctaagtgtgtttgattcactgcgaaaaatggaagctgatttgcgcaaaatggagcttcgtctcggcgaaccggaactctataatgatccagaaaaataccaagcactgatgacggattatgatacgttacaacatacttttaaagaaagtggcggctatacttatgaagcagaaatccgttctgttttaaatggattgcgtttttatccagaagattatgaagtagaaatcgcttctctaagtggtggccaaaaaacgcggcttgctttagccaaattactacttgctaaacaagatattcttgttcttgatgaaccaactaaccatttagatatcgaaacactagcgtggctcgaaacctatttacaaaattatcatggttcgttactcatcgtatcccatgaccgctacttccttgataaagtcgtgaatcaagtatacgaaattagccgaaccaaaatcgattactacaaaggaaattacagttccttcgtgaatcaaaaacaagcgaaactagaacaaatgtggaaagagttcgataaacaacaaaaacagattgccaaactagaagattttgttgctagaaatatcgtccgcgcatcgacaacgaagcgcgctcagagtagaagaaaacaattagaaaaaatggatgtgcttggtcgcccgcaaggtgatgaaaaagcagcgcattttggtttccaatttgaaaaacaaacgggtaaagatgttttaatggtagatcaactaagcattggttacgcgaaagataaacgcattgcttccaacctaacgttcgaaatgaaacgccaagatagccttgcccttgttggtccaaacggaatcggcaagtctactctgcttaaaacacttattcgcgatattccagctctaagtggcgaattccacttcggcgctggcgtgaaaattggttactatgatcaagaacaagccaaactgacatccaacaaaaccgtattaatggaactatgggacgattatccagagctgaatgaagtgaacgtccgtacaacactaggtaatttccttttttcagatgatgatgtactaaaaaatgtccaatctttaagcggtggcgaaaaagcgcgccttgctcttgctaagctcactttacttgaagccaatgtacttatccttgatgagccaaccaaccatttagatattgaaagtaaagaagttttagaagcagctttaattgattttgaaggcacgattctcttcgtttcccatgaccgctattttattaacaggattgcttctaaaatcgtcgaactagcgcccgaaaaagcaaccgttttccttggagattacgattattatcaagaaaaattagcagaagaaaaagaactggcacgacttgatgccgaggaccgacgcaaaaaaggcgaacaagttgaagcaaccgcctccgtcagaaaattaaactaccaagaagaaaaagaacaacaaaaactacttcgccaaagaaaacgaaaactagaagaaatagaaaaatccatggaagaaacggacgaaaagattgccgaactcgaacttcaattaacgaatccagaagttttccaagaccatgaaaaagcccttgaaatcactcaagagctagacgccgtaaaagctgacggagagaaattaatggaagaatgggaacaaataagcgaagaactggaatccatataa

SEQ ID NO: 24452 - DNA, 1371 bp, Listeria monocytogenes
atggaaaaactatggggcggacgttttcaagggaaaagtgaagcatggattgatgattttggagcttcgatttcttttgatcaaaaaatggcaaaagaagatttggcgggtagcttagcgcacgtcgccatgctcggcaaatgcgggatcattcctgcttcagaagcagctgaaattacggccggattaaaaatcctccaagaaaaattagcgtttggtgagctcgaattcagcactgttaacgaagatattcatctaaatatcgaaaaactattgcacgaggaaattggttctgttgctggaaaacttcatacggcgcgtagtcgaaatgatcaagttgcgacagacatgcatttatatttaaaacaagccgtggcggaaattattcagtcgctaaaacatttacgtgtagtgcttgttcaaaaagcagagttgcatgttgaaacaattatgcctggctatacacatttacaacacgctcagcccctgtcttttgcccatcatttgcttgcttactttggaatgtttacgcgggatttggagcgtttggaagaaagtgtcaagcggattgatatttcaccgctcggttctgcagcgcttgctgggacgacatttccaattgaccgggcttatagcgccgaattacttggcttttctgctgtttatgaaaatagtttggacggcgtgagtgatcgtgattttattattgagtttcttagtaacagttctatcttgatgatgcatttatcgcgtttttgtgaggaattgatactttggacgagtcatgagtttcaatttgtcgaattaacggacgctttttcgacaggaagttcgattatgccgcaaaagaaaaacccagatatggccgagttaattcgcggaaaaactggtcgggtttacggaaaccttttcggcatgctaacggttttaaaagggttgccgctcgcttataataaagatttacaagaagataaggaaggcatgtttgatacgcttgagacggttcagacaagcttagatatattcgcgggaatgattgaaacgatgaaggtcaatacagaaataatggaagaatcgacgcaaaaagatttttccaatgcgacggaactagcagattatttagcgaaaaaaggcgttccatttagagaagcgcatgagattgttgggaaattggtgcttgaatgtacgcaaaatgggatttatttgcaagatgtagcgcttagccactatcaggaaataaatccacttattgaggaagatatttacgtggtgctttcctctaaaactgccgtgcaaaaaagaaattcttacggcgggactggatttgatcaaattaaagtcgctctcgaaaacgcgaaaaaaactttgtaa

SEQ ID NO: 24453 - DNA, 1089 bp, Listeria monocytogenes
atgagaaaattaggaatatccgtatttccacaacatgtagcgcttgaagaatcattggaatacattgaaacagctgcaaaatatggttttagccgtatttttacttgtttgatttctgctaatgacgaagctgaatttgctaaattagaaaccatttgcaaacgagcaaaagatttaggatttgacgttattgctgacgttgatcccactgtatttgaatcgttaaatatcacttataaagaattagatcgttttaaagagcttggtctagctggattacgcctagatttaggtttctctggttccgaagaggcagcaatgtcctttgatgatacggacttgaaaatcgagctaaacatcagtaatggtactcgttacgtagaaaatatcctatcttaccaagcaaacgtaggaaatatcattggttgtcacaacttctatccaagaaaatacactggtctttccagagaacatttcttgcgtacgagtaaacaattcaaagacttaaacttacgcacagcagcattcgtttcttctaacagcggcgaatttggcccttggtttgttgtagacggtggacttccaacaatggaagaacatcgcggagtggaaattactgttcaagcaaaagatctttggaacactggcctgattgatgatgtcattgtcgggaatatgttcgcttctgaagacgaattacgcgctttaagtgaattaaatcgtaatgaattacaattagcagtagagtttttagatggtgcaactgacgtggaaaaagaaatcgttttaacacaaaaacatttcaatcgtggcgatgcttccgagtacgtgttacgttcaacaatgacccgtgttaatttcaaacaattcgatttccccgcacacgacacaaatactattgcaaaaggcgacgtgactatcgacaacgacggctacgagcgctataaaggcgaaatgcaagtagcgcttcaagaaatggaaaactccggcaacacaaatatcgttgctcgaattgtcccagaagagcgttatttactagataccattctaccgtggcaacattttagattggttgagaagaagaaataa

SEQ ID NO: 24454 - DNA, 1263 bp, Listeria monocytogenes
atgagtcaaaaaattcaagtagaaaacggtgtgctaaaaacaccaaacaatccagtcattccttttattgaaggggacggaactggtccagacatctgggcagctgcgaaacgcgttttagatgccgcagtaaaaaaagcttacaatggtgaaaaagaaattgcttggaaagaagtattagctggcgaaaaagcattcaagcaaacaggagaatggttaccacaggcgactttagatacaattgacgaatatttgattgctattaaaggaccacttactactccaatcgggggaggcattcgttcactaaacgttgccctgcgccaagagttagatttatatgtttgtttacgtccagttcgttatttcaaaggtgttccttcaccagtgaaacgtccagaagacacagatatggtcattttccgtgagaatacagaagatatttatgcagggattgaatttaaagaaggtagcatagaatcgaaaaaactaatcgacttcttaaaatctgaatttggtgttgataaaatccgtttcccggaaacttctggaattggtatcaagccgatttccaaagaaggaacggagcgtttagtgcgttcggcgattgaatatgcaattaaagaaggtcgtaaatcattaacgctcgtacacaaagggaatatcatgaagttcacagaaggagctttcaaaaattggggctatgacttatgtgaacgcgaatatggtgataaagtatttacttggaatgagtatgatcgaattaaagaagcagaaggaacagaagttgctgacgcgaaacaaaacgaagcgcttgctgctgggaaaattttagtcaaagattcgattgcggatattttcttgcaacaaatcttaactcgcccagctgaatttgatgtagttgctacaatgaacttgaatggagactacatttccgatgcgcttgctgctcaagtaggtggaatcggtattgctccaggagcaaacattaactacttaactggtcatgcgattttcgaagcgacgcatggtactgctccgaaatatgccggtcttgataaagtaaatccgtcatcggttattttatctgggacacttctgcttgaacacattggttggggtgaagcggctgccttaattaatcaatcaatggaaaaaaccattgctgcgaaaacggtaacctatgattttgctcgattaatggatggtgcgacagaagttaaatgttcggaatttgcggacgaattaataaaaaacttctaa

SEQ ID NO: 24455 - DNA, 417 bp, Listeria monocytogenes
atgagaataatgggtttagatgtcggctcgaaaacagtcggcgtagcgataagtgatccacttggttggaccgcgcaaggtgtggaaacaattcagattgacgagaatagaaagcaattcggctatgaccgcgtaaaagagctagtgcttgaatatgaagtggaaaaagtcgtagttgggcttcctaagaatatgaataacaccataggacctcgtgctgaaagttctaaaatatatgctgaagtacttgaggcgagaatcggtttgcctgttgtgctttgggatgaacgtttgaccacttctgccgctgaaagaactttgattgaagcagatgtttcgcgtaaaaaacgaaaagaagtaattgataagttagctgcagtaatgattttacagtcctatttggacactactaattaa

SEQ ID NO: 24456 - DNA, 1134 bp, Listeria monocytogenes
atggctaataaagtaattactaacgctacaatttatactggtaaaggtgttctagaaaatgctttcgtacgttttgataaacaaattttagaggttggctcgatggctgattttcaagcggacaaagcagaagaagtaatcgatgcaaaaggacaaaaacttgttcctggtttcattgatgttcattcacacggtggttatagttttgacgcaatggatgcagatccagaagcacttagaaaacaagtgaacggaatgttaaatgaagggattactacttacttcccaacaacgatgacgcaatcacacgaaaatatcgaaaaagcgctaaaagtgattaacgaagtcgcacaaacagaacctgttattggtgggattcatctagaaggcccatttgtttccaaagtctttaaaggagcgcaaccagaagaatacatccaagcgcctgatttggaacttttcaaaaaatggtttgatatttctggtggcttaattaaattagtaacatatgcaccagagcatgatacttctgctgattttgaaaatttgtgtttcgaactaggggttgttccaagtattgggcactctaatgatgtgcgtgaacacttgaaaacaagtaaagcgacacatgcgacacatttatataatgcttgtcaccgtatgacacaccgtgagccaggcgttccaggtcacgttttactagaacgcggtattaatgcagaactaatcgttgatggtattcacgttcatcctgatatggtgaaattagcttatcaaatgaaagggccagaacatttatgcattatcactgactccatgcgagcaaaaggtatgccagaaggaaaatccgaacttggcggtcaaactgttatcgtaaaagataaacaagctcgtttagaagatggaactttagctggaagtgtgctcacttatgacgacggcttccgcaacatgattaaatttactggatgctcggtagaagaggcagttcttatgtcttctggaaaccaagcacgcgaatttaatttaacacaaaaaggtgcaatcgaggctggtaaagatgcagatttcaacttactagacgaagatttacacattacagcaacttattcattcggaaaaaaacattcttga

SEQ ID NO: 24457 - DNA, 1146 bp, Listeria monocytogenes
atgtctgaagatttatttgatgtggaagttagaaattttgaagaaggagacaaagtcactggcacagttacaagcgtggaagataaacaagtttatgttggtattccaggtagcaaacttgatggtgtcgttccaataagtgaactttccaatatacatgtggagacagcttctgacgttgtgagcgttggcgacacacttgatttgattgtcacaaaagtagaagacgatatacttgttttatctaaacgaaaagtggatgcagaaaaagcatctgatgatattaaagctaaattcgaatctggtgaagtttttgaagcggtagtcagtgatgttgttaaaggtggattagttgttgaccttggtgttcgtgcgtttgttccagcttctttagtagaagaccattttgtggaagatttcgcagattacaaaggaactactcttactttcaaagtagtagaatttgaaccggaaaataaccgagtaattttaagccatcgtgcagttgtggaaacagaaaaagctagtcaaaagcaagcgctactaagcgaaatcaaagaaggtgacgtgattgaaggtacagttcaacgcttagccaactttggtgcattcgttgatattggtggcgtggacggattagttcacatttcgcaaatttcttataaacatattgcaacaccacaagaagtcttagaggaaggtcaaaaagtaacagttaaagttattggaattgaccctgaaaatgaacgtatttctctttctattaaagcgactttacctggaccatgggacggtattactgagaaagcgcaagttggttctgttttagaaggaaaagtagtacgtctagttacttttggtgcatttgtggaaatattccctggagtggaaggtttggttcatatttctcaaatatcccatgaacatattgggacaccacaagaagtgctttcagaaggccaaactgtggaagtaaaagtacttgaagtaaacgaagcagacaaacgtttatcattaagcatcaaagaattacaagatgctccagtagaagaggctgattatgaacttccagaagaaaatactggattccaaatgagcgatttaattggtgataaattaaaaggtcttcaaaacgacgataaataa

SEQ ID NO: 24458 - DNA, 984 bp, Listeria monocytogenes
atgccagtcatttcatatattgatgcaataaccatggcgcttaaagaagaaatggagcgcgatgataaagtatttattttaggagaagatgttgggaaaaaaggtggcgtatttaaagcgactgctggtctatatgacgaatttggtgaagacagagtacttgatacaccacttgctgaatctgcccttgccggagttggaattggcgcggcgatgtatggctaccgcccagttgcagaaatgcaatttgctgactttattatgccagctgtcaaccaaatcatttcagaagctgccagaattcggtaccgttctaataacgattggtcttgtccaatggttattcgcgcaccttttggcggcggggtacacggggcactttaccattcacaatctgttgaaaaagtgtttttcggacaacctggtttgaaaatcgttgttccttcttcaccatatgatgcaaaagggcttttaaaagcggcgattcgcgataatgatccagtgcttttctttgagcataaacgtgcgtaccgcttgctgaaaggcgaagtgccagaaactgattatatcgttccaatcggcgaagcaaatgttgttcgtgaaggtgatgatattacagtaattacttacggacttgcggttcaatttgcccaacaagcagcagaacgtttagcagcggaaggcgtagaagcacatattcttgatttacggacaatctatccactagaccaagaagcaattattgaagcaacgaaaaaaacaggtaaagtacttcttgtaacggaagataacaaacaaggaagtattatcagtgaagtggcagcaatcatttcggagcattgtttatttgacttagacgcaccgattgctagactcgcaggacctgataccccagcgatgccttttgctccaacaatggaaaaacattttatgatcaatccagataaagtggcggatgcaatgaaagaattagcggaattttag

SEQ ID NO: 24459 - DNA, 3540 bp, Listeria monocytogenes
ttgaaaggattacaacaattaatatatgaacaaaaagatattcgggcggtcttaaatgcgctggatgaaaaagaaaaagcacaacttgtcacagggctcacaggttcttcgcgcgcattatttgcaagcgtggtagaaggtgcgtcaaagcgtccggttgtatttgttacgcataatttataccacgcacaaaaattatatgacgatttactttctttaatggatgtcgatcgactgtttttatatccagctgatgaattaatttcttctgagttgagtatttctagcccagaacttcgtggtcagcgtgtggaagcacttgacttcttgctatccgggaaaccggggattgttatcgtcccagtagctgggttaagaaaaatgcttccgccagtatcgctttggaaacatttcaacatatccattgtagaaggtgaagaaattgatccagatgtactgcgtcaaaaattagttacaatgggatacacgatgagtggaatggtaaatactcctggagaattcagtgttcgcggcggaattattgatatttatccaattaccgaagagtttccaattagaatagaactttttgacaccgaagtggattctcttcgtttctttgatgtggaaacgcagcgctcaacaacacgcgtggaagaatttcgcctgctacctgcaactgaaatcattttagatcaaagctattacccggatatcgtcaagcgcttagaaaagaaaatgatgcttactttaaatgaactaaaagaacaggaagataagcaagcgctcattgaaaatttagaagaagaccttgaaatgcttcgttctggcgtgaaaccagacatgttctttaaatatatcggtctggcgtatccggacccagcctcgctttttgattatttaccaaaaaacacggcaattttgctggatgagtttgggcggattttggaaacagaagaaagcttggagcgagaagaagcggagtggcaaacggaaacattaagtcgaatggaaacagttcgcgacgtgcaagtaagccattctttcaaaaaattattagaaggaaatcactcgccaaaaatatacttatcacttttccaaaaacaaatggcgagcatgcgcgtttctaaaacaaccaacatcgtctataaacaaatgcaacaatttcacggtcaaatgaatgtgttaaaaaccgagctggaaagttggcataagaacaattatgcggttgttatattagctccaaacttagaacgcgcagaaaaaatgcaacaaactttgactgactacgatatggaaagcacgattttgaaaaaagaatcggatgtgccgaaatatggaatggttcaatttgtcatcggaacgttccagaatggttttgaacttccgcttgccaaagtagctattataagtgaaactgaactgttcaataaaaaaatcaaaaaggtgaagaaaaggcaaaaactctcaaatgcagaacgaattcaaagttattctgagttaaaagtaggcgactacgtagttcacgttaaccatggtatcgctcgctatgttggcatggaaacgctagatatcaacggcgtgcataaagattatttgctacttgtttaccaaggtgaagataaactatttatccctgttgaccaacttgacttagttcaaaaatatgttggtgcagaaggtaaatcaccaagattaaacaaacttggtggggctgaatggaagcgagtgaagaaaaaagtacaagcttccgtccaagatatcgcagacgatttaatcaaactatacgccgaacgtgaagctgaaaaaggctatgcgtttagtgcggatgatgaaatgcagcgcgaatttgaagaagctttcccgtatcaagaaaccgaagaccaactccgctcgatttcagaaatcaaaaaagatatggaacgaccgcgcccgatggatcgtctgttggttggagatgttggttacggaaaaaccgaagtggctttacgagctgctttcaaagcgattatggatggcaaacaagtcgccttcttagttccaaccactattttagcgcaacaacattttgaaacaatgaaagaacgtttccaaggctttccaatagagattggacttttaagccgttttcgcacgaaaaaacaacaaacagaaacattaaaaggcatgaaaaacggcacagttgatgttgttgttggtacccatcgtttgctatcaaaagatgtggaatatcaagatttaggtttattgattgtcgatgaagagcaacgattcggcgtaactcacaaagaaaaaatcaaacaaatgcgttccaaaatagacgtattaacactgacggcgacgccaatcccaagaactctacacatgtccatgctcggcgttcgtgacctctccgtcatcgaaactccgccagcgaaccgttttccagtgcaaacatatgtggcggagcagaataacgttttagtacgagaagcaattgaacgtgaactagcgcgcgacggacaagtttattatctatataatcgagtggaatccattacgcaaaaagcagatgaaatttctgcgatggttcctgatgctagggttgccactgcgcacgggcaaatgggcgaatcggaattagaatccgttattttaagtttccttgaaggggaattcgatgtgcttgtaacgacgaccatcattgaaaccggcgtagacattccaaacgttaatacactctttgttcaagatgccgatcggatggggctttcacaactttatcagttgcgcggacgagtaggacgttggaacagaatcgcctacgcttatttcatgtatcaaaaagataaaatattgcgtgaggaagcggagaaacgcttatcggctattaaggaattcactgaattaggttcaggtttcaaaatagcgatgcgtgacttatctattcgtggtgccggtaatatcctcggagcgcaacaacatggctttatcgattcagtcgggtttgatctctactcgcaaatgcttaaggaagcaattgaggcgaaaaagccaaaagaagaacaaaaacaaattgtccctgttgaaattgatatccaagcagacgcctatattccggaatattatatcactgacggacgccaaaaaatcgagatgtacaaacgtttccgcaatattgaaacgttaagcgaactcgaagatttacaaagcgatatgattgaccgttttggtgaatatccggaagaagtagaatatctattcacaatgacagaactcaaagtccgtgcgctcgaagttggtattgagtctgttaaacaagaacaaaataaaattaccatgctattttcggaaagtggaaccgcgggcattcgcggagatatcgtcatgcaaatcattggtgaatttggtcgaatggtcggcgtgggtatggaaggcacacaactaaaaatcacgataaacgtccaaaataaacctttaaaagaatggttataccaagtcaaaagtttggctgaaaaacttcgcggagctatgaaagaaaaagcatctacagaaaattga

SEQ ID NO: 24460 - DNA, 1182 bp, Listeria monocytogenes
atgaaaatttccaaacgcttgcaaaatttaccagatcagtttttttctagccttgttgaaaaagttggaaaaaaggtggcagaagggcatgatgtcattaacttaggacaaggaaacccagaccagccaacacccaaacatattgtggaagcgatgaaaacagcttcagaaaaaccacttaaccacaaatattctttgtttcgtggaaaacaggagcttaaacaagccgcggctgatttttatgcgcgtgaatataatgtaacgattgatccaaacacagaagtagccattttatttgggacaaaaactggtttggtggagttgccgatgtgtttaatggacccaggtgatacgatgcttttacctgatccgggctaccctgattatttgtcaggagtagtgttaggtgaagttcaatttgaaaaaatgccactaattgctgaaaatgactttttaccagattttactaagattccagaagacatagctgaaaaaactgaattaatgtatttaaattaccctaataatccaactggcgctgtggctacggcagatttctttgaagaaacagtcgcttttgccaagaatcataatatcgttgttgcgcacgatttcgcatatggaggtattggatttgacggtaaaaagccaattagttttttagaaacaaacggtgcgaaagaagttggaattgaactttatacactttcgaaaacgtataatatggcggggtggcgcgttggttttgcagtggggaacagcgaagttatcgaagcaattaatcttattcaagatcatatgtatgtaagtctttttccaggaattcaagatgctgcaatagaagccttaacaggagatcaggcttgtgtgcgagaattaaccgcacggtatgaaaatcgtagggatgcctttatttctgcttgtagggagatcggttgggaggcagttgcgccggccggttcgttctttgcttggatgccagtccctgaagactttacaagtagcgaatttgctgattatctgctagaagaggtgagtgttgccgttgcggatggtagtggttttggggagtttggtgaaggttacgtccgcgtaggtcttttaatggatgaagagcgcttggaagaagcagtaacgcgagtttccaaattgcatttgttcgataaagttacacagcagtag

SEQ ID NO: 24461 - DNA, 1968 bp, Listeria monocytogenes
atgaatcggaatgagtataatgatgattctattcaggtgcttgaaggactggaagcggtccggaaacgcccagcgatgtatatcgggtcaacagatgtacgcgggctgcaccatttagtatatgaaatagtggacaactcggtcgatgagacccttgcaggttttggtaagaaaattgttgtgacacttcatgaagacggtagcgttagtgttagcgatgaagggcgtgggatgcctgttggaatgcacaaaacaggaaagtccacagtagaagttattttaaccgtacttcatgctggcggtaagttcggtcaagaaggcggctataaaacaagtggtggactccacggcgttggttcctcagttgtaaatgcactttctgaatggttagtagttacaattaaccgtgacggcgcaacctaccaacaaaaattcaaagacggcggaaagcctgatggaacactgaaaaaaattgggaaatcaaaagccacagggacaacgattcgctttaaaccagatccagcgatttttccaaccacttcatttaactatgaaaccttatcggaacgtctaagagaatctgcattccttttaaagggcatgttaattgaattaattgatgaacgtgtaggtatggcagaggctttccactttgaagaaggtgtgaaaaactttgttgaatatattaatgaaggcaaagatgtgcttcatccagtagccagttttgaaggagaaaatgcgaccattgaagtagaaatggcgttccaattcaatgatggttactctgaaaatatcttgagtttcgttaataacgttcgaactcgcggggcaggttcccatgaatcaggtatgaaagcggcgatgacacggattttcaatgattatgctcgtcgggtgaatcttttgaaagaaaaagataaaaacctcgaaggtagcgatattcgtgaagggttatccgcggtgctttctatccgtgttccagaaaaaatcctccaattcgaaggtcaaacgaaagagaaactagggacacaggaagctcgccaggcggtcgatgctgtagtggcggaacatttagcttacttccttgcagaaaacccagaaacaagctcacttctcgttaaaaaggctgttaaagcccgcgaagcaagagaagcagccagaaaagctcgtgaagaaacgcgtaacggcaagaaaaagaaacgttctgaaacattgctttctggaaaattaacgccagcgcaatcaagaaaccctaacaaaaatgaactttatctagtcgaaggtgactcggcgggaggatcagccaaacaaggccgtgaccgtcgtttccaagctatattgccacttcgaggaaaagtaattaataccgaaaaagcaaaactacaagatatcttaaaaaacgaagaaattagcacgattattcatactgtaggtgcaggcgttggtaccgaatttgatgtcgaggattgtaactatgacaaagtagttatcatgaccgatgccgataccgatggcgcgcacattcaagtattacttctgacatttttctatcgttacatgcgtccacttgttgaagctggtaaagtttttattgccttaccaccactttacaaagtaagtcgcggttctggtaaaaaagaagtaatcgaatatgcttggacagatgaagaattagattctgccatccaaaaaatcggtaaaggctacatgatccaacgttacaaaggtcttggtgagatgaatgctgaccaactttgggaaacaacgatgaatcctgatacgcgtacgttaattcgtgtacgagtagatgattctgcacgtgctgaacgccgcgtggcaacactgatgggtgacaaagtagaaccaagacgtcaatggattgaaaagcatgtcgagttttctatggaagatagccaaaatattttagaaaatgaaaacatgatggttgaggaggcgaaagacatttga

SEQ ID NO: 24462 - DNA, 1722 bp, Listeria monocytogenes
gtgattgatacgacgaagacaaatgaaaaagcgacaaaaaagcaaaataaaagtggagcggaacttttaattgacgccttgaaaaaacaacaagttgacatgatttttggttatccaggtggcgctgtgttacctctctatgatgctttttatgactgcgatatcccgcatattctaacacgacacgagcaaggagcgattcatgctgcggaaggttatgctcgcgttactgggaaacctggtgttgtggttgtaacgagtggccctggtgcaaccaacgtactaactggtatcgcggatgcaatgagtgactcgattccattagtaatttttaccggacaagttcatacgcctggtatcggaaaagatgctttccaagaagccgatatgattgggctaacgattccaattactaaatacaattaccaagtgcgtgatgttcgtgacttaccaaaaatcgtcaatgaagcttttcatattgcaagtactggtcgtaaaggccctgttgtcgtggatattccaaaagacatggggattatccaaacagagtctgtccggccagatacgattgatctgccgggttatcaaccgacttattcaccgaacccacttcaacttgaaaaactaatgcaatctctttccgccgcaagtaagccactaatacttgccggagctggcgtcaatcatgcgagagctacagctgaattactagaattcgctgaacgctatcaaattcctatcgtgaatacactgcttggtctaggaagtttcccgcaaagccatgatttattccttggtatgggtggtatgcacggttcttatgcagcaaatatggcgctaacggattgcgacttgctgattaattttggctccagattcgacgaccggcttgcaagcgcgccgaaagaatttgccacgaaagcaaccattgctcatatcgatattgatcccgcggaaatcggcaaaattatcgaaacgcaaattccaatcgtggcggatatcaacgaaacgctcacgcaactactacaaatggaacttccggttcatccggatacatcccattggtacaaattaaatatgacgcgcaaaaaccgtcatccttttaattttgatagaacgaaaaaagcggaaattaaaccacagcgtgtcattgagctaattggtgaaattacgcaaggtgaagcgcttgtttctaccgatgttggacagcatcaaatgtgggcggcgcagttttatccattccaattcgatcatcaaattattacaagtggtggtcttggcacaatgggctttggattccccgcagccgttggggcacaactcgctttcccagataaaacggtagtcgcaattgttggcgatggcggtttccaaatgaccaaccaagaactcgcgattttaaacgattatcaaatcaatgtaaaaacggtcattatcaataatggttcgcttgggatggttcgtcagtggcaagaaaaattccacggtgaaagatattcccattcgattttcacgagccaaccagattttgtcaaactatctgaagcttacggtgtcaaaggtgttcgcctaacaaatccggaaacactagaaaaagatttaagaaaagcgttcgctcacccagggccaatcgtaattgatgtccatgtagcaaaagacgaactagtacttccaatggttccaagcggcaaaccaaatcaccaaatggaaggggtggaataa

SEQ ID NO: 24463 - DNA, 1893 bp, Listeria monocytogenes
atgaaacaattaaaagtggaaaatttaacaaaaacatatggtgaaaaaagcctgtttgaaaatatctcgctaacgataacagagggcgaacgtattggtttaatcggtgtaaatggtaccgggaaatcgacgttattgcaaattatttctggaagtgaatctggggataaaggtacagttacaaaagcaaaagattatacgattggttatttggcgcaagatcctgcgtttaatgaagaagatacagttctcgcggctgtttttgacggggatactgcggcgcttcgggcaatgcgcaagtacgaagaagtgttactcgcgatgtcacttgatgcggaaaataccaaattacacgatgcttataccgccgctagccaggaaatggatgctagtgcggcttgggatatgaacacagaagcgaaaacaattttggaaagacttggcattacggatttaacagcaaaaataagcgcgctttctggtgggcaacgaaaacgggttggtttggcacaagtcttaatcgaaacgcctgatttacttattttggatgagcctaccaaccatttggattttcagtcgattcgttggttagaagaatatttaaatcgctttaaaggagccgtattgctcgttacccatgatcgttatttccttgaccgtgtgacaaatcacatggtggaactggaccgaggttcggcttatcgatacgttgggaactacgagaagttcatggaatctaaagctattcggatggaaaatgaagttcgcgaatccgagaaaaataaaaacctttatcgtaaggaactggcttggatgcgccgcggtcctcaaggtcgtgccaccaaacaaaatgccagacaagaccgtttccacgatttagagaaaaaagtgaaaataaaaaccgatgactcagaactggcgattgactttgttactagtcgtcttggaaaagatgttttcgaactgaaaaacttagaaaaacgctttgatgaaaaacaagtattacaggatttcagcttgattatccaacccggtgaacgccttggtattacagggaacaacggaactggtaaatccactttactgaatatgttagctggaaaactagcgccggatgctggggaagtagtcaccggacaaaccgtacaaattggttactatacacaacaaaatgaagaaatggatccggatatgcgaatgattgcttatttgcaagaagcaggcgagcaagtaacgacatccggtggcgaagtgattagtgtgagcgcgatgttagaacgatttttattcccgcctaattcacacgggaagaaaattggtagcttatcgggtggagaaaaacgtcggttattcttactacgcattttgatggaacgaccgaatgtcttattactagatgagccaactaatgacttagatacgcaaacattaaccgttttagaggactatttagaatcattcaatggtaccgtaattacggtcagccatgatagatatttcctcgataaagtcgtgaacaaattgctcgttttccgggcgattggtgaagtagaaattttctacggagaatatagcgattatctgaaagagctggaggctaaaggaaaaccagcgaaatcaatgaaaaaaatggcgaatacttcggtcgaaaagtcatcgcctgagaaaaaagaaaaagtcaaactaacctaccaagaacaactcgagtgggacggaattgaagatgcgattagcaagttagagaaagacattgaatcgctcaacgaaacattagaacaaaccggagccgactttacaaaagcagcagaaattagtggattcattacagcaaaagaaactgagctggaacaaatgatggaacgctgggaatttttatcacaatacgcggaataa

SEQ ID NO: 24464 - DNA, 1452 bp, Listeria monocytogenes
ttgggtttatttgatttttcagtaaaagagctacatgataaattagttaaaaaagagatttcaccatttgatttagtatctgaatctttcaaccgaattgaatctgtagaggacaaagttggttcctttattactttaaataaagaagcagcatttggtgtagcagaagagcttggagatgctggcatagatccaaacaacatgcttgcaggtcttccaattggaattaaagataatatcgtgacaaaaaatttacgtacaacagcagcaagtaaaattttagaaaacttcgatccgatttatgatgcgaccgtcgtttctaaattaaaaaacgcgcaaacaattaatatcggaaaattaaacatggatgaatttgcgatgggttcctcgacagaaacatcgtatttccacaaaacacataacccatgggatttatccagagttcctggtggttcttcaggcggcagtgcatccgcagtcgcagccggcgaagtattattctcgcttggtagtgatactggtggatctattcgtcaaccagcagctttttgtggggtagtcggaatgaaacctacatatggtcgtgtatctcgttttggtttaattgcctttgcgtcttctttagaccagatcgggccaattactaaaaatgtagaagataatgcgtatttactagaagcgatttctggtttagatgcaaacgattctacttccattaatcaaccagtagagcgtttctcagatagcttaacaggagacattaaaggcttacgcataggtgttccaaaagaatatcttgcggaaggggttgaccctggcgtaaaacaagctgtattagatgcgcttaaaacacttgaaaaacttggtgcgacttgggatgaagtttctttaccgcattctgaatacggtgtagcaagttattatattttagcatccagtgaagcatcttctaacctttctcgctttgacggcgttcgttacggataccgttctccaaatgcgactactttagaagaactttatacaaaaacacgttctgaaggatttggcgatgaagtaaaacgtcgtattatgcttggaacatatgcgttaagctctggttattacgatgcttactacaaaaaagcacaacaagcacgtacgctaattaaacaagattttattaacgtatttgaaaactacgatgtaattatcggaccaagttctccgacaacagctttcaaaattgacggcatgatcaatgatccaattacaatgtattccaatgatattttaactgttccgattaacttagctggcgtaccagctatttctgttccttgtggattctcagatggcttaccagtaggcttacaaattatcggtaactactttgaagaatcgttattatacaaagtagcacatgcttttgaacaggaaacaacattccataaagaaaaaccaaacttatag

SEQ ID NO: 24465 - DNA, 990 bp, Listeria monocytogenes
atgacaattaagcaaaaaagttcttttggcgctgtgattgttttattgattgggactattttgtgggcagttcaagcggggagtttgtcgatgtccatcccagcttttttaagtgggatatttagtggtggaaatgaaatggtggatgtcgttattgatttgcgctttccgcgaattattattgcccttcttgctggtgcggcgctttcggtttctggtttgttgttacaagctgtaatgcggaatccgcttgctgatgctggtgtgattgggatttcagctggagctaaattttttagttttgtcatcattttatttttaccagaattgtatttttggttgccgcttttttcttttattggtggtgcgcttgcttgttttctagtctttttgtttagttatcgctctgattttaatccgcttcgttttattattattggtattgcaataaatgcagtttttacaggattgagtgatgcattatcttcgcaagtggcgcttgtttctagtcaatctgccagtagtgcagcgagtttggcaatgaaaaaatggtctgatgtggaaactttattaatatatgtaacgattggactgatttgtgcgctcttacttgctaaatggtgcaatgtgttaggtcttgaaaataaaatggctagaggattcggtgtgccagttaataaaacgcggatatggctagcgttgattgctgtactccttgcatcgattaccacggcagtagtgggtgttattgcttttgttggtttacttgtaccacatattgcaagaaaactagttggtggaaattatcaaatacttgtgccgttttcgatattatttggggctttattgctacttttcgcggatactataggcagaacgttatttcaacaaatggaaatccctgcgtctgtgattatgcttattattggtggtccgttcttaatctttttaatgcgaaagggtgatttttatggaagtaagggacgttaa

SEQ ID NO: 24466 - DNA, 876 bp, Listeria monocytogenes
atggtgaaaagcatgacgggatttgggcgtgccacaaaagaatttgaagcgttcaaagtaaccattgaattaaaagcagtcaaccaccgctactccgaattcctttttcggatgccaaagcaactcgcttatttagaagggaaattaaaaaaaactataagtaagcaaatcaaacgtggtagaattgaagttttcttttccatcacgggagagcaaatcgcaaaacgtgaactacatattgactgggacctcgcagacagctattaccgttttatcaaacaagcaagcgctagatatgaattacaagaattaccaactatgggtgatttactgcaagaacaagcctatctttctattgaggaagaagtggaagcaagtagcgaactagagcgattagttttagaaacactagcccgcgcaaccgagcgactggatgagatgagaagtatggaaggagcagaactgctgctttatttcaaacaacatctcgccgcacttgagaatagcttggagatcatccaagctgaaattccaaatacagaaaaacattatcaagaaaaaatcgaaacacgtttacaaaacgttgtaggcgaccaatttgatccaagtatcgttcttaccgaagtcgcaatgctacttgaaaaggcagatattaacgaagaagtcgaacgaacaaagagccatttaaagcaattttatggtattattttactcgaagaaccaatcggacgaaagctagattttctgattcaagagatgaaccgcgaagtcaacacgattggctccaaagctagttctctaaaaatcactgaacaagtggtagaaatgaaaacgacgcttgaaaaaattcgagaacaagtgcaaaatgtggaatga

SEQ ID NO: 24467 - DNA, 2409 bp, Listeria monocytogenes
ttgtcatttcttcatctagcaattgttctgccatttattgtggcactgctaattccacttttttatcggtggacaaaacaagttcatactggctggttagtacttccgattccagtgattttgtttatttacttcttaacatttatcccaaaaacgatggaaggggcgacgattgtttcaatgccttggattccgcgacttgagattaattttacggtagtagtagatggccttagtttgctgtttgcgctacttattactgggattggctcactcgttaccttttactctatttattatttagggaaaaagaaagaacgacttagcaatttctatacatttttatttatttttatgacggcaatgcttggggttgtcttgagtgataacttgattgtgctgtatcttttctgggagcttacttcgattagttcattcttattgattgggtactggtatcatcgtgagcgttcacggtacggagctcgtaaatcgatgatgattacagtcttcggtggactaatgatgctcggcggttttattttacttcatattatgagcgattccttttccattcgtgaaattattagtaacgcggatgtaattagtaataatagtttattcattcccgcgatgattcttgtcttgcttggtgcgtttacgaaatccgcgcaagttccatttcatatttggctgccagatgcgatggaggcacctactcctgttagtgcctacctccactcagcgacgatggtcaaagccgggatttatatagtggctcgatttaccccactatttgcaagttcgggcgtctggttttggacggtatcactcgttgggattacgactcttttctggggttcacttaatgccacgaagaaaaatgatttaaaagcgattttggcttattcgacaattagtcaactcggcctcattatggcgcttcttggtgtcggtgccgcatcacttcactttgatacgctaagtgacgatatttatgtgatggccattgtagcggctgtatttcatctatttaatcacgcgacgtttaaaggtagcttgtttatgatggttgggattgtcgatcacgaaacaggcacgcgagatataagacgacttggtggtctaatgcgtatcatgccaattacggcgacgattgcatttatcggaacgttcgcaatggctgggattccgccgtttaatggatttctaagtaaagagatgttttttgaaagcatggtaaatattacgcaattgcaattgtttgatgcaagtacttggggcgttctgctcccagttgtagcttgggttgctagtgtgtttacgtttgtttatagtatgattattttctttaaaacatttactggaaaagtgaaaccgtacttacttccgaaaaaaccgcatgaagcgccattcggactccttttaccgccgattattttatctatatttgtggttgggattggtcttttccctaatttaattgcagagccaattttggaacctgctgtaagagcaatagttcctgggcttgctactgatttttcgattcatattagtttatggcatggatttacgccagccctattaatgacgtttggcgttgtggcggttgggattgtcttgttccttacacataaatactggaaaccttggattacaacccgtgttccaaaagcactgcgaattgggaaaacgtatgataatgggatgtattatttggaacaaggttcgtaccgaatgacaatgtttattatgactggttggctccggacttacttgaattacatgttatcggcctttattttgatgatggcttcggtcatgattttcacgcaagcacttgatttcaatttttcgagtatgacgaaagtgacggttgttgattttgttttagcggcagttattttagtgacattggttgggattgtcttttccaagtcgcggattacttcgattattttactgggagcgatgggttacacgattagtattttcttcgttatctccagagcgcctgatcttgctttaacgcagcttattattgaaactatttcagttgtgctttatctacttgtgttttatcaccttcctcagttcagtaatattgaggaaaagccgaaatggttatcaatgaagacatttttgagtatcggggttggtgtgattatcacgctcgtttccctttcagcgtataatacgacattttatgattcgatttcgaaatactatgtggataatgcttacgtggaagcggcgggacgaaatattgttaatgttatcttagttgatttccgtggctttgatacgatgttcgaaacggctgtactttcaattgcggcgattggtatttacgcgatgattaaattacgactgacgaaacgaggtgagaatgatgaaaacgaatga

SEQ ID NO: 24468 - DNA, 1995 bp, Listeria monocytogenes
ttgttcgataacacagatagtttagcagtgaatacaattcgtacattatcaatggacgcaattcaaaaagcaaattctggtcatccgggattaccaatgggagcagctccaatggcttacgcgctttggtctcgcgtattaaacacaaaccctaaaaattcacattggtttaaccgggatcgttttgtactttctgctggacacggctcaatgcttttatatagtttattacatttaagcggattcaaattagaattagaagatcttaaaaatttccgtcaatgggaaagtaaaactccaggtcacccagaatatcgttatacggatggtgtagacgcaactactggtccacttggtcaaggtattgcgatggctgttggtatggctatggcagaaagacatttagaagcgaaatataataaagatggtttcccagtggtggatcattatacttacgcactatgcggagatggtgacttaatggaaggtgttgcttcagaagcggcttcttatgcaggtcatcaacaattaggaagattagttgttttatatgattccaatgatatctctcttgatggtgatttagacaaatctttctctgaaaatgtaaaacaacgctttgaagcttatggttgggaacatttattagtaaaagacggtaatgatacagctgaaattttagctgcaattgaaaaagcgaaacaaaacacttctcaacctactatgatcgaagtgaaaactgttatcggttttggtgctccaaatgccggtacaagtaaagttcacggtgctccactaggtgatgaaggtattttagaagcgaaaaaagcttatggttggaactacgaagagaaattctttgttcctgaagaagttactgctcgctttaaagaaactattggcgaacgtggcgaaaaagcagaaaaagcttggaatgaattattcgcttcttataaagctgaatatccagagcttgctaaacaattagaagatagtttaaacaataagttaccagctgattgggatgcggatcttcctgtatatgatgattctaaagcacttgctagccgtgcttcaagtggcgaagtaatcaatgcattagctgggaaaataccaactatttttggtggatcagctgaccttgcgggttctaataatacaacaattaaaacagatggtgaatttacaaaagcaactccagctgaaagaaatatttggtttggcgttcgtgaatttgcgatgggtgctgcattaaacggtatggcacttcatggcggattacaagtatatggtggaacattcttcgtattctctgactatgtacgtgctgccattcgtttatctgccattcaacatttaccagtaacttacgtaatgacgcatgatagtattgctgtaggtgaagatggaccaacacatgagccagtcgaacaacttgcaagcttacgtgcaatgccaggtctttctgtcattcgtcctgctgatggaaatgaagtagtggaagcttggaaacttgctatcacttctacatctacaccgcatgtacttgttcttactcgtcaaggtttaccaacattaccaaattctgctaaattaactgcagaaggcgttaaaaaaggtgcttacgtaatttcacctgcaaaaggggaagtaccggaagcaatcattcttgcgagtggttctgaagttaacttagctatcgaagcgcaaaaagaacttcaagctcaaggaacggatgtatcagttgtcagtgtgccatcatttgatctattcgagcaacaatctgcggaatacaaagaaagtgtattaccgaatgctgttagaaaacgtattgcagtagagatgggcgctagctttggctgggaacgctacgttggattagatgggaaagttatcggaatcgacaaatttggcgcttctgctccaggtgaaactgttattaagaattatggctttactgttgaaaacgtcgttaatacagtaaaatcactttaa

SEQ ID NO: 24469 - DNA, 1047 bp, Listeria monocytogenes
ttggcgaaggataataaaacggaaaaagcaacgccgcgccgcattaagaaagctcgaaacgaaggtaatgtggcgaaaagtaaagaactaaataatgctttttcactgctaattgtagctgggcttctttatttttttggagaaatgtttatcaaaaataccatccaagcttttgttgcccttttgaaacagcctccgaagctagcgaacatggaaagttatagtttgttttacttaatggagtttggcaaagtgttgatgccgattatggtgatggttgtgatttttggattgatgaactacggcgtgcaagtcgggattttattttccgcgaaagcagtgaagccacaattcaaacggctgaatccagcgaactattttaaacgagtgtttagtgtgaagggaattgtcgaggtcgtgaaagcgttattgttaattacgctactttcttatgtggcttacattggctttcgtgaccacttagatacgctcattagttacaccgggcaaaattggctttactcactcggacaaatttttgctttattcaaaaatgaatttctggcgctattcctagtaatcgcagtaatagggctgctcgacttcttttaccagcgctacgattataaaaaaggcttgcggatgtcgaagcaagaaattaaagacgagatgaaagattcagaaggtcgaccggaagtgaaacagcgccaaagaagcattgcacgaggacttctccaaggttcgattacgaagaaaatggcggatgcgacctttgtggtgaacaacccgacacatatttccgtcgtgatgcgctatgacaaaacaaaggatcacgcaccaaaactgctcgttaaaggggaagacgagctggcactgtttattcgtcaggtggcggatacggacggggtgccgatgattacaaatagacagctggcacgaagtatttactatacgacgaatccagatgaatacatacaagaagatttatataaagatgttattgaagtgatgaaagaattgatggacgcagacaaaatcaagttctaa

SEQ ID NO: 24470 - DNA, 840 bp, Listeria monocytogenes
gtggcagaaagttttgtgagattagagcacgttttttataaatatgaggatacggaaaaatatgcagtgaaagatgtatctatttctgctcaaaaaggggaatgggttgcacttgttggtcataatggttcaggaaaatcaactattgcaaaattgctaaacggcttactttttccggaagatggcttaattaaaatcgggcattttgttttgtctgaaaaaaatatatgggaaattagacgacaagtaggcatggttttccaaaatccggataaccaatttgtcggggctactgtgcaagatgatgtggcatttgggcttgaaaatcacggtgttccacatgatacgatggtcgaacgtgtggaatcggctttgaatgaagttggtatgcaaagctacgcgctacatgaaccggcgagactttctggtgggcaaaagcaacgtgtcgcaattgcgggcgttttggcgctgcagccggatgtgattattttggatgaggcgacttcgatgcttgatccaagaggacgcgctgaagtaatggaaactattcgaattatgcgcgaacaggaagatattacggtgatttcgattacgcatgatttggatgaagtcctttttgcagatcgggtaatcgtgatgaataaaggtgagattcatagtgaaggtacgccgaaagaaattttccagcaagcagatgcaatgcgagaaattggcctaggggttccatttattattgaattacaagaaaaattagttgcaggcggctttgaaactggaagcaccgtgctatcggaaggagcattactagatcaattatggaaattaaactcgaacaactag

SEQ ID NO: 24471 - DNA, 2640 bp, Listeria monocytogenes
atgaaacaattatcaagcgctgaagtaagacagttatttttagatttctttaaagaaaaagggcatactatcgaacctagtgcaccacttgtaccaaataatgatccaacaattctttggattaacagtggtgtagcaaccatgaaaaaatactttgacggttccgttattccggataatccaagaatggcgaacgctcaaaaatccatccgtacaaatgacattgaaaacgtcggtaaaacagcgcgtcatcatacattctttgaaatgctaggaaacttttctatcggtgattattttaaagaaggagcaattgtttttgcttgggaattcttaacaagccctaaatggattggctttgatccagataaattgtatgtgactgtgtatccagaagatgaagaagcgaaaacgttatggcgcgaaaaaattggtttaagtgatgatcatatcgtcgaaattgaagataatttctgggatatcggtattggaccaagtggcccagacagcgaaattttctatgaccgtggacctgcttttggtgatgatgcaagtgatccagaattatatccaggcggagaaaatgagcgttatttagaaatctggaacttagtattttcccagtttaaccataatccagatggaacatacacaccgcttccaaaacaaaacattgatacagggatggggcttgaacggatggtttccatcatccaagacgcaccaactaactttgaaacagatttgtttatgccaattattcgtgaagttgaacaaatcgctggtgtgaaatatggccattcacaagaaaatgatgtggcatttaaagtaatcgctgaccatattcgtactgtagcttttgcaatcggtgacggtgctttaccatccaacgaaggacgcggatatattttacgtcgtttacttcgccgtgctgttcgttatgcaaaagttctaacaatcaacgaaccatttatgtacaaattagtaccagtagttgggaaaatcatgaatagtttctatccagaagtagaaaaccaaacagactttatccaaaaagttattcgcacggaagaagaacgtttccacgaaacattaaacgaaggtctagcaattttggaaacaatcctaaaaactgcgaaagaaacgaacgaacaagttatcaaaggcgcagacattttcaaattatatgatacattcggtttcccagtggaattgacggaagaatatgcggaagatcatggcttaaaagtggatcacgctggcttcgaagcagaaatgaaagaacaacgtgctcgtgctcgtgctgctcgtgctgatgtgaaatctatgcaagtgcaaggcgaactgcttgctaatttaaccgaaaaaagtgcatttgttggctacaactcaacagagcacgtttcagaaatcttgtatttaatccaaaatgacacccttgttgacgaggtagccgctggaaacgaagcgcaagttatattcaaagaaacaccattttatgcagaaagcggcggacaagttgctgacaaaggaacaatcgagagcgaaacgggtcttgcttatgtagaagatgtacaaaaagcgccaaacaaacaaaatttacatcgtatttctgtcaaagaaggcgtattaaaaacaggcgacacagtgaaacttgctgtcgataaggtaaaacgtcgcgaaacaatcaaaaaccatacagcaacacaccttttacaccgtgcattaaaagatacattaggcgaacatgttaaccaagctggctctcttgtttccccggatcgtttgcgctttgacttctctcattttggtcaaattacagaagaagaactaacaaaaatggaagaaatcgtgaatgaaaaaatctgggaacaaatcaatgttgtaattgaagaaatgcctatagcggaagcaaaagaacttggcgctatggcactattcggcgaaaaatacggtgatattgtacgagttgtacaagtaggcaaatacagcattgaactatgtggtggtgtccatgttcgtaatacagctgatattggtctattcaaaattgtatccgaaacaggtatcggagcaggaactagacgtatcgaagctgttactggaaaagaagcatatcgctttgtaacagaacaagaaaatacattaaaacaggcagcaagtctactaaaaacaacaactaaagaaactccacaaaaagtagaactattacaagctgacttgcgcgaagtgaaacgtgagaacgaatcattattaagcaaattggcaagtgcagcaagcgctgatatttttgaatcaccagaagaaatcggtggcgtcaaagtgattgcaaaacaagtgaatgcaaaagacatgaaccaattacgtcaatttgtggataactggaaagataaaaaaattggtggaattcttgttttaggcgctgttcaaggcgataaagtaaacttaatctccgcagtctctgaagaagcaatcaaagcaggttaccacgcaggtaaattattaaaagaagtggcaacacgatgcggcggtaacggtggtggacgccctgacatggctcaagctggcggtaaaaatccagcagaactaggaactgctcttgattacgtttccacatgggtaaaagaacaacaagcataa

SEQ ID NO: 24472 - DNA, 225 bp, Listeria monocytogenes
ttgaagtattgtcttgtcgaaaaagacacttgtattgcttgtggcgcttgttccattcacgcacctgatgtttttgattatgatacagaaggtcttgcctttaatatattagataataacactggaacaaaagagattcccgaagatttggtcgaaatggtgattgatgctgaatttgcttgtccttctctttctatcaaagtttctgatagttcgtttcattaa

SEQ ID NO: 24473 - DNA, 1434 bp, Listeria monocytogenes
atgacagaatcaaaatttcctaaagactttttatggggcggagcagttgctgccaaccaatgtgaaggagcttatcttgaagacggtaaaggactttcacttgttgatatccttccaacagtagaggacggacgttgggaagctttattcaatccatcgaaagcgcttgctacagattatggtttttacccaagtcacgaatcaattgatttttatcatcgttataaagaagacattaaattaatggctgaaatgggattcaaatgtttccgtatgtccatcagttggccacgtattttcccgaatggtgatgaaacgacaccaaatgaaaaaggtttagcattttatgatgcagtttttgatgaatgtcacaaatatggtatcgaaccagttgttacaatcaaccattttgatactccgctagaagttttcaaaaaatatggtggttggaaaaatcgtaaatgcatcgacttttacttgaatttctgtgaagcaattttcacgcgttataaagataaagtaaaatattggatgacatttaatgaaattaacatgattcttcatcttccatacattggtggaggtttagacgttactaaagaggataatccagaggaagttaaatatcaagctgctcatcatcaattagttgcatcagcacttgcaactaaacttggtcatgaaatcaatcctgaaaatcaaatcggttgtatgcttgcagcgggtaacacatatccaatgacttgtaatccaaaagatgtctggaagtctatcgaggcggaccgtgaaggctacttcttcattgatgttcaagcacgcggatactacccaagctacactaaacgtttcttcaaagaacataacatcaacatcaaaatggaagatggcgacttagacgcattacgcgatcacacagttgattatgtggcattcagctactattcttctcgtctaacaagcgcagatccagagaaaaacaaagaaacagaaggcaacgttttcgcaacactaaaaaacccatacctaaaagcaagcgaatggggctggcaaattgatccactaggtctacgtattactatgaatacaatttacgaccgttaccaaaaaccacttttcatcgttgaaaatggcttaggtgcagtggatactgtggaagaagacggctcaatcactgacgattacagaatcgactacatgcgtgaacatgttcgcgaaatgggcgaagcaatcgaggacggagtagaacttcttggctatacaccgtggggctgcatcgatcttgtcagcgctggctctggcgaaatgaaaaaacgctacggcttcatctatgttgaccgcgacaacaaaggcaacggaacattaaaccgctcgaagaaaaaatcattcgactggtacaaaaaagtaattgaaacaaatggtaaagatatcgactag

SEQ ID NO: 24474 - DNA, 2529 bp, Listeria monocytogenes
atggcagaaacaccaaatcaacgaataacagagataaacttaaataaagaaatgcggacatcattcctagactatgcgatgagtgtaattgttgcccgtgccctacctgatgttcgtgacgggttaaaaccagttcaccgtcgtattctatatgcgatgaatgacttaggtatgacttctgataaagcctataaaaaatcggctcgtatcgttggtgaagtaattggtaagtatcacccccacggcgatacagcggtttattttacaatggttcgtatggcgcaagattttagttatcgtaatatgctagttgatggacatggtaactttggttcggttgatggcgatatggcagcagcgatgcgttatacagaagctcgtatgtcaaaaatttcgatggaactactgcgcgatattaataaagacacaattgattacgctgataactacgatggttctgaacgtgagccagttattttaccagcgcgtttccctaacttattagtcaatggttcgtcaggtatcgcggttggtatggcaacaaatattcctacccaccatcttggtgaagtaattgacggcgttttagcacttagtcacgatccagaaattactattcgtgatttaatggaatatattccaggccctgacttcccaactgctgggatgattatgggacgtagcggaatccgtcgcgcttacgaaagtggccgtggttcgattactgttcgtggtcgtgtcgatattgaagaaaagaaaaatggtaaagaaactatcgttattaccgaaattccttaccaagtgaataaagcacgcctagttgaacgtattgccgaactagctcgtgagaagaaaatcgacggcatcacttccctaaatgatgagtctgaccgttcaggaatgcggattgttattgaggttcgtcgtgatattagcgccagtgttatcgtgaataatttattcaaaatgacagcacttcaaactacttttggtattaatatgcttgcacttgtcgataaccatccaaaagtgcttaatttaaaagaaattctttattattatttggaacatcaaaaagtagttattcgtcgacgtacagaatttgagcttcgtaaagcagaagcacgcgcacatattttagaaggtttacgaatcgctcttgataacattgacgcgattattaaattaattcgtggatcaaaaacttccgatgttgctaaagaaggcttgatgacacaattcaacctttctgacaaacaagcgcaagccattctggacatgcgtttgcaacgtttaacaggtttagaacgcgaaaaaattgaagaagaataccaaaacttagtagcattaattaatgatttaaaagctattttagctgatgatgagcgtattcttgaaattattcgtgaagaattagaagaaatcaaagttaaatatgcggataaacgtcgtacagaaatcttggctggtgatttagtaagccttgaagatgaagacttaatccctgaagaagaagtagcaattacgctaactaaacgtggttatattaaacgtttaccactgtcgacttatcgtagtcagcgtcgaggtggtcgtggtattcaaggtatgtcaacacatgaagatgacttcgtagaacacctagttgcaacgagcacgcatgatacgttactattcttcactaacactggtaaagtttaccgttcgaaaggttatgaagtacctgaatacggtcgtaccgccaaaggtatcccaataatcaacttacttggaatcgaaagccaagaacaagtgaacgccgtgataaatctatccgaattcaccgatgatagctacctattcttcacgacgaaacatggtgtcgtgaagcgtacaaccctttctcaatttgcgaaaatccgtcaaagtggccttcgtgctgtagaacttcgtgaaaacgatgaactcatttctgttcaaatgacagatggtagcaaaaacatgattatcgcaacgaaacatggtcaatctatctacttcccagaagaaaatatccgtgtaatgggccgtacagctgctggtgttcgtggtattagacttcgtgaagacgatgaagttatcggcatggaagtactggaggacgatgaaaaagtactcgttgtaacggaaaaaggttatggtaaacaaacgccagcctcccaatatccgcttcgtaatcgtggtggtatgggtgttaaaaccgttacaatcacagagaaaaatggtaacttagtagcaatgaaaactgttactggtgaagaggacttaatgctaatgacagtaagtggcgtattaattcgtttcgaaattgatacagtatcacaaactggtcgtagcgcaatgggtgttaaactaattcgtcttgatgaagatgaaaaagtagccactgttgcaaaagtaccaaaagaagaagatgaagttgagcttgaggaagaaatcgacgaaacattaatcacgcaagttcctgatgaaagttttgaagatgctcctggaagcgacatagaagaataa

SEQ ID NO: 24475 - DNA, 504 bp, Listeria monocytogenes
atgcctgagcaaattgatggaaacaaattagatttagaagaacgcgttgttacaatcaaccgtgttgctaaagtagttaaaggtggacgtcgtttccgtttcacagcacttgttgttgttggagacaaaaatggtcatgttggtttcggtactggtaaagcgcaagaagttccagatgctatccgtaaagctgttgaggatgctaaaaagaacatggtgcttgtaccaactgtagacacaactattccacacactgtagtcggacattttggtggcggagaaattcttcttaaacctgctagtgccggttctggtgtaactgctggtggtcccgttcgtgcggtcctagaacttgctggtgttgctgatgtatcttccaaatcgcttggatctaatacaccaattaacatggtacgtgctacaatcgacggaattaaacaactgaaaaacgctgaagatgttgcgaaacttcgtggcaaaacagtagaagaattgttaggataa

SEQ ID NO: 24476 - DNA, 1374 bp, Listeria monocytogenes
atggaatttgatactattgctgcaatctcaacaccgccgggagaaggggccattgctattattagattaagcggtccagaggcgattcagatagcggatcgtattttttatgccaaaaatagcttgagtgaagcggaaagtcacaccattcactacggtcatataaaagaagacggcgaagtaattgaggaagtaatggtcacagttatgcgtgcgccgcgtacttttacacgggaagatgtggtagaaatcaacgcgcacggcggaattgtttccgtgaaccgcgtgttacaactgttacttcgaaatggggctaatttagctgaaccaggtgaattcacaaagcgagcatttttaaatggaagaattgatttgtcgcaagcagaggctgtgatggacttaattcgcgcgaagacagaccgggcgatgggcgtggcaattcggcaaatggacggaaatctttcgcggttaattcgcaatttacgtcaagaaattttggatgcactagcacaagtcgaagtaaatatcgactatccagaatatgacgatgtggaggaaatgactcagcgaatgttactggagaaaaccgagttagttcgcgcttccgtcgagcaacttttacggacagcaagccaagggaaaattctccgcgaaggactggcaacggctattattggtcgaccaaatgtgggtaaatcgtccttgcttaaccaactaattcaagaagaaaaagcgattgtcactgatattgctgggacaacgcgagatattatagaagaatacgtcaatgttcgcggtgttccgctgcgtttaatcgatacggccggaattcgggaaacagaagatattgtggaaaaaattggtgtagaacgttcaagaaaagcattggcggatgctgattttatcttgctagtattaaatcaaaatgaagagctgacggtggaagatgaagcgttatttgaagcagccgcgggtcataattatgtggtcgttttaaataaaacagatttggaaacaaagcttgatatagatagagtgcgtgaacttgctggagaaaacccaattgtctccacttcgctagtaaacgatgaaggtttagaggctttagaagaagcgattaaaacactattttttgctggtgacattgatgctggtgatgctacttatgtatcgaatgttcgacacattgcgctccttcatcaagcactggaagcgttaaatggcgttacaacaggaattcagcttggtatgccggtagatattgtccagattgatatgactcgtgcatgggatttactaggtgaaattactggtgattctgtccaggatgaattactcgatcagttgttcaatcaattttgccttggaaaatga

SEQ ID NO: 24477 - DNA, 477 bp, Listeria monocytogenes
atggcagaaccaatttcaacgattcgtgatacaaaaaagaccccggaagaattggaaaaagaacgtttagaacaaatgaaagcggatattgctgaacaagattctggttttatcgaaatcttagaaacggtaaagttactgcaggagtcgggggcacttgaagctttgaatagtgcgattaaagcgcgcggagatattacgaaaacttttctgaatgaatggcgtaaggaaccgatgacgaatgcgattaataacatgatgatttcgagcaagctattaaccgatacaaaaccagagcaaactgaggaaatgatagccaatttgaaaaatgctgcgaaaaaagcagaggaaagcgcgaaaaacgatgaaatcatgggaatgttagcgatgatgaaggcgctgaaagaccccgatatcaaccgcgcactccggtatggtgtgacctttttaaaagaagttgggcaaacattaaaataa

SEQ ID NO: 24478 - DNA, 942 bp, Listeria monocytogenes
atgactaaaattgcatttgtatttcccggtcaaggagcacaaaaagttggcatgggacaagatgtagcagcggaatatcctgaagcaaaaaaaatctatgatgatgctgacgaaagactagggttttcaatcacagaaattattacagaaggtccaattgaattattaacgaaatccgaaaacgcacaaccagcattagtttccacaagtgtcgctattttacgtgcactggaaacgtatggtgtgaaagctgattacgtagcgggacatagtcttggtgaatatagtgcacttgttgcaggcggatttttagaagcaagtgatgcgatttatcttgtacgtaaacgcggtgaattaatggaagcagctgtaccaaatggtgctggcgcaatggctgcagttcttggtgtagaccgggaaacattaaaaacaatcaccgaagaagtaactaaagaaggcgatgcagtacaacttgctaaccttaactgcccaggacaaatcgttatttccggaacaacagctggcgttgaaaaagcaggcgaaaaagcaaaagaaagtggcgcaaaacgcgtattaccacttgctgttagcggacctttccactctagcttaatggaaccagccgcacttgctttccgtgatgttttagcagaggttaaaatttctgatggtcagattccagtggttaataacgtggatgctaaagaaactacggataaatccgaaattagcgataaactaatcaagcaaatctattctccagtattatgggaagatatcgtcgaagaattaattaaaaacggcgtagatacgtttgtcgaaattggttctggaaaagtcttagcaggtttaattaagaaaatcaatcgtgatgtaactgtactgtcagcaggtgacgctgaatcagtgaaaagcgttgcagcaactttgaaaggagaataa

SEQ ID NO: 24479 - DNA, 489 bp, Listeria monocytogenes
atggaacaaaagacatttattaaggtgacttgtagtattttgacgattagtgatacaaggaatttggatacggatactagtggtcaactgattcaatctgccttagaaacagctgggcatgaggtgatttcacgggttgtcgttcctgatgatgttacgctcattaagcaaaaaataaacgagttagcagctaatgggtccttttgtcttatcacaaatggtggtaccggcattgctaggcgcgatgttacatatgaagcattattcgcaacgattcagcaagaaatccctgggtttggtgaaattttcaggatgctcagttacgaagaagttggtagtcgtgccatggtgtctcgtgcattcgctggcttttcagaaagcggcttactgctttttgcgttgcctggatcaagtaatgcttgccagctcgcggttcaaaaattgattatcccagaattacctcatttaatagcagaacgacaaaaataa

SEQ ID NO: 24480 - DNA, 837 bp, Listeria monocytogenes
atgagcgttttaaacattgaaggagcaaaattatcgtatcagaaagtcggacaaggtcctattcttatttttataccgggagcaaatggaactggagatatctttttaccactggcagagcaattgaaaacatctttttctgttgtaatggtagatcgtcgtgggtatggggacagtgagttaacagcagctataccggagcgcgctagtcatgcatatgatgattaccgagtgactagagatgctgctgatattgctgcactcgcaaaagcgttaagcgacgtgcctgtttatattttagggtcaagctcgggttcgattgttgctatgcatgtcttgaaaaatcacccagaagttgttaaaaaaatagcctttcatgagccaccaatcaatacattcttaccagattcggagatgtggcaagaagcgaatgaaaagattgtacaaactgccctaactaaaaatatggcagaagcaatgcaactttttggcgaaacacttcatattgcccccattgacgcagaaagcatgtcgaaaccagccgtaacaatagacgaagtgacaaaagattcaaccacgcaacaaatgaaatactggttcacttatgaaatccgccaatatactagctctaatatatctttagacgatttcaaaccatatgttcatcagattacgttacttaatggtaccgattcaaaaggctcattcccacaagatgttaatgcctttatagccaaacaactcggattaactatcgtggatattccaggcggtcatttaggttatattcaaaaaccagccggatttgctaaagtacttttatcaatctggggataa

SEQ ID NO: 24481 - DNA, 2601 bp, Listeria monocytogenes
atggatttacaaaaatttacacaacaagtccagcaaacaattgcggacgcacaaaatctagctattgcatcagaacatcaagaaattgacgttgcacacgtttttaaagtgttattaacagaaagcgactttgcaaagcgagtctatgatgtagcggaagttgatacagatgcacttcaaaaagtaatagagaatactttggaaaaaatcccagtagtttcaggaagtggcgtgaattatggccaagcaatgagccaagctcttttccaactaatgagggatgcagaaaaagaacaacaacaattagaagatgattttgtctcaacagaacatcttatcttagctgttatggatcaaaaatcgaatccaattacagccgagcttaaaaatcaacataaagctaaaaaacaaattaaagaagcaattttaaaaatcagaggagggaaaagagtgacttctcaaaatgcagaagaaaactatgaagctttaacaaaatatggtcgtgatttagtcgcggaagttagaagcggcaaactcgatccagtaatcggacgcgatgcagaaattcgtaacgttatccgaattttatctagaaaaacaaaaaacaatccagttctaataggtgaaccaggtgttggtaaaacagccattgtcgaaggattagcgcaacgtatcgttcgaaaagacgtgccagaaggactgaaagataaaacgattatctcactcgacattggttcccttattgctggagctaagtaccgcggtgaatttgaagaacgattgaaagcagtactccaagaagtaaaacaaagtgatggtcaaattttactctttattgatgaaattcatacgattgtcggcgcaggtaaaacagacggcgcaatggacgcaggaaatatgttaaaaccgatgcttgcccgcggagaactgcactgcatcggtgcaactacattggatgaatatcgccaatatatcgaaaaagatgctgcactagaaagacgtttccaaaaagtgcttgtcccagaaccaacagtggaagatacggtttccattttacgcgggttaaaagaacgttttgaaattcatcacggggtaaatattcatgacaatgctttagttgcagctgcgagtctttctaatcgttatattactgaccgcttcttgccggacaaagcaattgacttagtagatgaagcatgcgcaactattcgtgtcgaaattgactcgatgccaagtgaactcgatgaagtaactagaaaagtaatgcaattagaaattgaggaagcagcactaaaagaagaaaaagatccagcgagtgaacgccgtttagaaatattgcaacgcgagctggctgactacaaagaagaagccaaccaaatgaagtccaaatgggaatccgagaaaaacgaaatcagtaaaattcgtgaggtccgggagcaaatcgaccatttacgccatgaattagaagaagcagaaaataattatgatttaaacaaagcagcagaattacgccacggtagaatcccggctgtggaaaaagaattgcttgagttagaagcagaaaatcgcgaaaaaacagcacaagaagatcggattttacaagaagaagtaacagaaaatgaaattgcagaaatcgtcggacgttggacagggattccggtgactaaattagtagaaggagaacgcgaaaaactgcttaaattagcagatgtccttcatcaaaaagtaattggtcaagatgatgccgtccaattagtgagtgatgctgtcttacgagctcgtgcaggaattaaagatccgaaacgcccaataggctcctttattttcttaggaccaacaggtgtgggtaaaacagaacttgctaaagcacttgcatttaatatgtttgattccgaagatcacatgattcgaattgatatgtctgaatacatggagaaacattccgtatcaagacttgtcggagctcctccaggttacattggttatgaggaaggtggtcaacttactgaagctgtaagacgaaacccttattcgatcgtcctacttgatgaaatcgaaaaagctcatccagatgtatttaacatactattacaagtacttgacgatggacgtatcacagattcacaaggtcgattaattgattttaaaaatacagtaattattatgacgtcaaatattggctctaatttattacttgaaagaaccgaagaaggcgaaatttcaccggaattagaatcagatgtaatgcaaattttacaaagtgaatttaaaccagaattcttaaaccgcgtagatgatattattctatttaaaccactaacacttgctgatattaaaggtattgtggagaaattagtagaagaacttcaaatccgtttagccgaccaagaaattacaatcactatttccgatgatgcaaaagcctttattgcggaggaagcttatgatccggtatacggagcacgaccacttaaacgctatattgtgcgtcatgtcgaaacaccacttgcaagagaaattgtctctggtaaaatcatgccacattcatccgtggaaattgatttagcagataaagaatttacttttaaagtcacagaataa

SEQ ID NO: 24482 - DNA, 852 bp, Listeria monocytogenes
atgacgcaaattagtcaattgttaaaaaaagcggaggccatcctttttgaaaaagggctggaccaaaatgcggcggaaattttactagaaaccagaatggggctttctcgttctgagctttggatggaaataagtcgtgaacttgaaccgaatcatgaaaagcagtttgaggaagattttgctaggtatttggctggcgagccggtccagtatattttaaaaacagcccctttttatggctatgattttttagtaacagaagatgtccttattcctcgccccgaaacagaagagttagtcgcttgtgcggaagcttttttgaaaaaacatccagttaaaaatgtgctagatgtttgcactggaagcgggattatagcgattgcactcaaaaaagcatttcctgagatttcagtgacggcttctgatatttccgctccagcacttgtagtggccagaaagaatgcgttgttattaaatgcggatgtgcgttttgtggaaacagatttacttgaagcatttaaacaaaacgaagaacgattcgatatgattgtcgccaatccgccctatatttctgaagcagaaaaagcagaaatgtcggattatgtgctaaaaaacgaaccttcattagcattgtttgctgaaaatgatggacttgctatctatgagcgatttgtggataacttaaaatatgtcctaaattcttcattttgggtgggtgtggagataggttatacacaaggtgaacgtgtaaaacaattatttgaaaaaagttatccacatactactgttgttatccacaaagatatcaattccaaagaccgctatgtaacatgctctaatatattggtatag

SEQ ID NO: 24483 - DNA, 1374 bp, Listeria monocytogenes
ttgaaaaaaacagtaggcgaagtagtagcaatgttagatagttccatccatgtagatgcatttcgcgatgtcgtcattactggcgtttgttttgacacaaggcaaataaagtcaggtgatttatttgttccgtttgtagggaatgtgcgcgatggacatgaatttgtggggcaagcacgagaaatgggtgctgtagctactttctggcaaaaaaatgtaccaaatccaccgacggatttcccggttattttagtagaagatactttgctcgcgcttcaagaactagcggcgaaatatatccaacaagtaaaaccaaaagtcattgcgattaccggaagcaatggtaaaacgacgacaaaagatattatggcagcgattgtagaaacaacgtacaaagtgcattatactggtgggaactttaataaccatatcggcttaccatatacgattttaacgatgccagaagatacggaagttgctgtacttgaaatgggcatgaatcatcgtcatgaaatcgaagtgctttccaaaattgccaaacccgatatcgcgattattacgaatatcggcgaggcgcatattgaatatcttggttcgcgtgaagaaattgccaaagcaaaactggaaattactgccgggcttaatccaagcgggattttaatttatccacatgaagaaactttgctgctaggaaatattaatggcgatttcagacagctcacttttggcaagtcggaagctgcggaaatttatccgttagaaattcgtgcggaagcggaaggcacttcttttataactaattgggagccggagctagaaatttttgtccctattattggtgaacataatgttttcaacacaatggcggcgatgcttgcggcaagagaaattggaattgaaggcgaaaaaattcaatctgcgctgaaaaatatggaacgttctaaaagtcgtttagaatggattacaacgaaaagtggcgcgcgtattttgaatgatgcctataactctagtccgacagcgctcaaaacggttttaaaaacattcatgcatatggattcgagcggcaaacctaaatatttggtccttgctgatatgctggaacttggcgatttgtcgacaaaactacaccaagaatcagctgaggtgttagaaaatgatacgattcagaaagttttcttatatggtgatgcgatgaaagcatttggagaagtagcggaatcgaaaattggtcagggaaaagttcatcattttgacacgaaagaatcgcttgagacggcgcttctttctgaaataaaaggaaatgaatggatactggtcaaaggttcttacggaatgggcttgaaagatgtggtagaaaatcttattattaagtaa

SEQ ID NO: 24484 - DNA, 1974 bp, Listeria monocytogenes
atgtcaggctattttcaaaaacgaatgcttaaatatccattatacggtctgattgcagcgacaattattttgagcgtaatcacgttctttttttcgtggtggttatcggcgttagttgttgttggcggaattattcttacggttgcgatgttttattttgaatatcgcttgaatgaagatgtgcaactatatgtttctaatttaacgtatcggattaagcgtagtgaagaagaagcgcttgttgaaatgccgatgggaatactgctgtatgatgaacattacaaaatcgaatgggttaacccgtttatgtcaaaatactttgataaggcagagttaatcggggaatctttggaagaagtaggaccggaatttttggacgttattactgggaatgatgaaaaggggattatgtcgattgcttggcgtgatcaccgttttgatacgatagtaaagcgtaaggaacgaattttatatttatatgatcgcacagaatattatgatttaaacaagaaatttcaagcgaataaatctgtatttgcggttattttcttagataattatgatgaatgggcgcagggcatggatgatagacgtcgcagtgctttaaataatttggtgacgtcgatgttgaccaactgggccagggaacatcgtatttatttgaaacggatttcgacagaccgatttatggcctttttgacggaggaaatgttgaagcggttggaggaagagaagtttcaaatattggaccggattcgcgaacggacgtcgaagcaaaatattccattaacgcttagtattgggattggttataaggaagatgatctgattcagttggcggatttggcgcagtcgagtttggaccttgctttagggcgcggcggagatcaggtcgtaattaagcaacctgaaggaaaagtgcgtttttacggcggcaaaacaaacccgatggaaaaacggactcgggttcgcgcgcgtgtgatctcgcaagccttgcaagagttgattacgcaaagtgaccaagtttttgttatggggcaccgctatccggatatggacgtaattggttcgagtcttggagtgatgcggattgctgagatgaatgatcggaatgcttatgtggttgtggaacctggcaaaatgagtccagatgtgaagcgactaatgaatgaaattgaagaatatccgaatgtaattaaaaatattgttacaccgcaagtcgcactggaaaatatcacggagaagagtttgctcgttgttgttgatacacacaaaccttcgatggttattaataaggaattgctggactcagctacgaatgtggttgttgtcgatcatcaccgtcgttcagaggaatttgttgggagtccggttcttgtttatatcgagccatatgcgtcatctactgccgaattgattacggagctatttgagtatcaaccggatttagagcaggttgggaaaatcgaggcaacggcgcttctttccgggattgtggttgatacgaagaactttacgctgcggactgggtcgcgaacgtttgatgcggcaagttatttacggtcgcttggtgcggacacgattttggtgcagcaatttttgaaagaagatattactacttttacacagcggagtcgtttagtggagtcgcttgaaatttatcatgatggtatggcgattgcgactggacatgaggacgaggaatttggcacagttatagctgcgcaggcggcagatacgatgctttcgatggaaggcgtgcaggcatcctttgttattacgctacgtccggataaattaatcgggattagcgcgagatcgcttggccaaatcaatgtgcaagtcattatggaaaaactaggcggtggcggacatttatcgaatgcagccacacagcttaaagatgttacaattgcagaagcagaaaaacaattaattagcgccattgatgcgtattggaagggagaaacataa

SEQ ID NO: 24485 - DNA, 1476 bp, Listeria monocytogenes
gtgagtgaaacaaaacgagtgcgtgtacgttatgcaccaagtccaactggatttttgcatattgggaatgcacgtactgccttatttaactatttatttgcaagacataatgatggagattttatcattcgtattgaagacactgatgctaaacgtaacatagctgacggtgaagaaagtcaaatgacaaacttgaaatggcttggtatggactgggatgaaggtgttgatgttcctggaaaatacggaccttaccgtcaatccgaacgtcaatcaatctatgagccgctaattcaagagcttttggataaagatttggcatataaatgctattgtacagaagaagaattagatgcagaacgtgaaaaacaaaaagcaaatggtgaaatgcctcgttatagtgggaaatgtcgtcatttaacaaaagaacagcaagcggagaaagaagcgcaaggttttaaaccgagtattcgtttcaaagtgccggcaaatgaaacgattactttcaacgatatggtgaaagacgatgtttcgtttgaatcaaatggaataggcgattttgttattgcgaaaaaagacggaattccgacttataactttgctgtggcagtggatgatcatttaatggaaatttctcatgttcttcgtggggatgaccatatttcgaatacgcctaaacaaattttgatttataatgcatttggctgggagccaccaatttttgggcatatgacacttattgtgaatgagagcagacgtaaattaagtaaacgtgatggttcgattattcaatttatcgaacaatatcgcgatttaggatatttaccggaagcattatttaactttatcgctatgcttggttggtctccagaaggcgaagaagaaattttctctaaagaagaattcattaaaatgtttgatccaaaacgtttatctaaatcaccagcgttgttcgataatgttaaattaacatgggtgaataaccaatatgtgaaaaaattaccgctaaatgatgtagtagagctttctttacctcatttacaaaaagcgggtgttgtatctgctgagctaaatcaagctgaacttgattgggtgcacaaattagtgtcactttatcatgagcaaatgagctatggtgcggaaattgtgccactttcagaaatgttctttgcggatgcagagtcaattacgtttgatgaagaagagacagcggtgttagcggaagagacagttccaactgttatttcggcattcaaaaaagaactagaagcactagaagttcttgaagctgcggaagtaaaagctgcaatcaagcgtgtccaaaaagaaacgggcgtaaaaggtaaaggtctatttatgccaattcgtatcgtaactacgggtgaaatgcatggtcctgaattgccacttgcaatcgaagttcttggtcgtgaaaaagtgctgaatcgtttggacacatggttgaaaaataattaa

SEQ ID NO: 24486 - DNA, 1515 bp, Listeria monocytogenes
ttgacgagtaaaccatacataatgggcgtagacattggaacttcaagcacaaaggcagtactttttaatcaacgaggagaagtgattttccggcaggcgacgcattatgaactaataactgatgaaactgggaaagcggaagagagccccacggaaatttttgatgccgttttgacttccattcaagctgtcatgaaaaatattaatacagaggagttagcggggatttcgtttagttctgcgatgcatagtttaattatggttggaagtaatggagagcttttgactgaatgtatcacttgggcggacggacgaagcagtgagacgcttgaaaaagtaaaaagggataattacttattccaactgtatgaggccacaggaacgccgatacaccctatgagcccctttgccaaaatttgttggttgaaggaggaaaagcctactttatttaaacgtacagaaaaatttgttgatattaaatcgtatattttgtatcgcttgtttggtgtttgggtgatggatgaatcgttagcatcggggactggactatataacattatggagcacgactgggaatttgaagcaatggaaattgtaaaattaaccccggatttcttaccgaaagttgtaccagaaacatatcaattagcgggtgtgaaaaaagaatatgctgaattaatgggaatcccagaaaatttaccattcattataggaggtagtgacggggcgctagctaatattggtattcaagcgactggtcaaaatgatgtcacgattacagtaggaacaagtggtgcagtgcgtaaacttaccgaccaattccaaatagattcacgtggccggacgttttgttatggagctggtgatggatactttatcgcaggtggcgcagtgaataatggtgggaaagtagttgagtggggtttgcaacaatttggctctgaagctgaaattagtaggcgggatttcgcaagctttattgcaaaaatagaggaagttcctccgggcgctgcgggtcttttattccagccatatttgttaggcgagcgtgcaccattttggactaatgatattcgaggaggttttgttgggctgacaattaatcatacaaaagcccattttattcgagcgattttggaaggtgttgcttttaatcttgcagaagtttatgaggcggtttcggccccagatgatattatttatgtcacaggcgggatttcagcgcacgatgcttggtgtaaacttctggcggatattttgaaccgtgagatacgtgttccgcatacgatagaaggctcaagtttaggagcagcgattattggtatgcgatcactagggattttgaaggatcttaatctaaaacatacactgccaattaaagcggtatatcatccaagcgagaatgtccttaaatacgcggaattacgtctgattttcaaacaggtaaccacacagttaatgtctagctacagccaattaaatagttggcaaaagaagtttgatattaacagctaa

SEQ ID NO: 24487 - DNA, 633 bp, Listeria monocytogenes
atgaatgtcacttcttacaattggaaagaagaagtagccaatgctataacgcatggtattgggtttattcttagtattcccgcgctcgtcttacttataatattcgccgccggaaaagataatcctctctatttaacaagttttttaatttatggaatttccctcatgttgctttatatttgttccaccctgcttcatagttttaaaccttgcaaggcgcggacgatttttaacattatggaccacgctgcgatttatgtattaattgctggcagttatacgccatttgttttgattacaattcaagggacactcggctggacgctatttggtgtcatatggggcctcgcaattgctgggataatttataagatatttatgaccggcaaattaaaacttttgtcgacaagtgtctacttacttatgggatggatggttatgtttgccattaaaccgctttatgccgggcttactccaactggattttggttacttgcaactggcggaattatgtttactgtaggtgccgttttttacagtattcctcgcgtcccgtacatgcacgcgatttggcatttatttgttatcgcgggaaccgcttttatgtatttctgtattttattttatgtttaa

SEQ ID NO: 24488 - DNA, 435 bp, Listeria monocytogenes
atgttagttcctaaacgtgtaaaataccgtcgtgaattccgcggaaacatgcgtggacgcgcgaaaggcggaactgaagttgcatttggtgaatatggtcttcaagcagttgaagcttcttggattacaaaccgtcaaatcgaagcagctcgtatcgcaatgactcgttacatgaaacgtggcggtaaagtttggattaaaattttccctcataaatcttacacttctaaaccaatcggggttcggatgggtaaaggtaaaggtgctccggaaggttgggtaagcccagtcaaacgtggcaaaattatgtttgaaatcgcaggtgttcctgaagatgtagcgcgtgaagcattacgtctagcagcacacaaactgccggtcaaaactaagatcgttaaacgtgaagaaattggtggtgaagcaaatgaaagctaa

SEQ ID NO: 24489 - DNA, 1059 bp, Listeria monocytogenes
atgagtttttcgaaactgatgatggctgtttgctcaggtttactgcttgttgcaacagctatcggtacggtcggttactatttttttagtgaaggctcttggtataaaattctcatcgaacaaaaaatcttttacattccctttgtggttttcgttccgcttactgccatttcgattggtttaattattggcggtctgatcggttattttgttaaacaaaaatttgaatcaattgacttctcgattcgattgcttggacaaggtgatttggagaaaaagattacgagtgaagaagacgagaactttttagaagtgcagcaagtatacaagcaaatcgaccgcttacgtgataaaatgaaagcacaaacgattttgacgcaaaaacttgcaagcgaccgtgctgaatcaactggccaaacgaaagaagctattttgtcagaagagagacaccggattgctagagaattacacgattcagtgagccaacagctttttgcagcaatgatgcttttatcagccttgaatgaacagagtgaaaaaagcgcgacaccggcgatgcaaaaacaactaaaaatggttgaatctatcgtaaatgaatcccaatcagagatgcgtgcgcttttacttcatctgcgtccaacgcaactcgagggtaaatcattaaaaactggtattgagcaattattaaaagaattaacaaccaaattgccaatcgaagtagaatggcaaatcgaggatattagtttgcaaaaaggcattgaggatcatttgttccgtattgttcaagaattactttccaatacattacgacattctaaagctaaattattagaagtacgcttagtcacgatggataatttagcggtgatgaaagtagtagatgacggcgttgggtttgatatggataatgttcgacaaggctcttatggattacaaaatatgcgagaacgagttgccgaattcggcggcaccatcaaaataattagtttcccaggaagaggaactagtgtagaaataaaaatcccacttgttgcgaaaaaggacgtggaaagcgaatga

SEQ ID NO: 24490 - DNA, 1029 bp, Listeria monocytogenes
atgaaagtagaagatttcgattttgatttaccagaagaattaatcgcacaaaccccactattagaccggacttcaagccgactaatggtgcttgataaagagtcaggtgacataaaagaccaacatttcacagatattatcagctatttaaacgaaggggacgcactagtgttaaatgatacacgcgtcctcccagcaaggctgcatggtattaaagatgaaactggcgcacacattgaagtgctccttttgaaacaaaaagaaggcaatgcatgggaaactttagtaaaacctgctaaaagaattcgaaaaggtgcaaccattacttttggtgatggcgctttaaaagcgacttgcttggaagagcttgagcatggtggtcggattttagaattttcttatgaaggcattttttatgaggtattggagcaacttggcgaaatgccacttcctccatacattaaagaacaactggctgaccaagatcgttatcaaaccgtttatgcgaaagaaaatggttcagctgctgcgccgactgcgggtcttcattttaccgaagatttactggaacaaattagcgcaaagggtgtagaaattattttcgtgacacttcatgtggggctcggaacattccgcccagtggacgtagaagatactaccaatcataaaatgcattctgaattttatcgtttaactgaagaatctgctgagcgaattaataaaatcaaagcacaaggcggaaaagttgttgcagttggaacgacttctatccgaacattagaaacaattgcgagtcgtcatgacggcaaactagtggctgaatcaggttggacagagattttcatttccccaggatatacttttcaggcagtagatgcactaataacgaatttccatttaccgaaatcgacattaattatgcttgtgtctgctttatcagaccgcacgaaaattttagcagcctataatcatgctgtagaagaacaatatcgcttctttagttttggcgatgcaatgtttattcattaa

SEQ ID NO: 24491 - DNA, 972 bp, Listeria monocytogenes
atgtcatttgcatcggaaaccaagaaagaattaacccatatggacgtaagtgatagcgatgcaaaagtggaactcgcagcttttattcgaatgaatggcgccatctcgttttcgagtcaattagtcatcatggatgtccaaacagagaatgccgctatagctagacgaatgtatcaattactgaaagacttatatgaagtgccaattgaacttcttgtacgtcgcaaaatgaagctgaaaaaaaataatgtttatatagttcgattgaagtctggtacacgggggattttggaagatttgcggatactagagccaccgatgacgtttacgaaatcgattgataggggatttgttaagaagagaagcgccaaacgtgcttatttgcgcggagcctttttggcaagtggatcagttaataatccggaaacttcttcctatcatttagaaattttttctgtttatgaggagcacaacgaggcaatttgcgctttgatgaaccaatttgatcttaacgcgcgaacgcttgaacggaaaaatggttttattacctatttgaaagaagcggaaaaaatcacggaattcttgagtattatcggagcaactagcgcgcttcttcattttgaggatgttcggattatgcgagatatgcgaaattcggtgaacaggctagtaaactgcgaaacagcgaatctcaacaagacaattaatgcggctgttaggcaaatcgataatatcaaatatatccaatcaaccgttggactagaagctttaccagaacgattgcgtgagattgcagcgcttcgtatagctaatgaggatgttaccttaaaagagctaggcgaaatgctgacaacgggtcaagtaagtaaatcaggtattaatcatcgtctccggaaactagatcagattgcagagcgccttagaagcggagaaacaccagcgcaagtagggctgaaaatcagtaatagttaa

SEQ ID NO: 24492 - DNA, 1077 bp, Listeria monocytogenes
atgtatgatcgattacaggcggtggaagaccgttatgatgaactaaatgaactactaagtgatccagatgtagtatctgatccaaagcgactacgcgacctttctaaagaacaatcaggtattacagcgacagtggaaacataccgcgaatacaaaaatgtgaacgaacaaattaacgaaacaaaagaactcctaggagaaaaactagacgatgaaatgcgcgaaatggccaaagaagaattcgcggaacttcaaaaagaaaaaacagacttggaagaacgactaaaactattactcgttccaaaagatcctaatgatgacaaaaacgttattttagaaattcgcggagcagctggtggagacgaagcagctttatttgccggcgatttattccgtatgtacagcaaatatgcggaatcacgcggctggaaagtagaaattatggacgcaaatccaactggtattggcggttacaaagaaattattgcgatgatgaacggaaatgatgctttttctcgaatgaaatatgaaaacggggcgcaccgtgtacaacgtgttcctgaaacagagtcaggcggtcgaattcatacatcaacagcgactgtagcaattttgccagaagcggaagaagtggaaatcgagttgcatgacaaagatatccgtacagatacattcgcatccactggtgccggtggacaaagtgtcaatacaacgatgtcagctgtacgtttaacgcatattccgaccggaattgtcgtttcgatgcaagatgagcgttctcagttgaaaaacaaagataaagcgatgaaagtattgcgcgcacgtgtttatgataaatttgagcgtgaggctcgtgaggaatacgatgccaaccgtaagtcagctgttggaacgggtgaccgctccgaacgtatccggacttataactatccgcaaaaccgcgtaaccgaccaccgtatcggcttaaccattcaaaagctagatcaaatcatggaaggcaaactcgatgaaatcattgacgcgctcatcctagaagatcaaacaagtaaactggagcatttaaatgacgcaaattag

SEQ ID NO: 24493 - DNA, 1209 bp, Listeria monocytogenes
atggaaaattggaagaagaatttgtatgttgtctgggtggggtgttttctaaccgggactggattaaatttaatcatgccatttttaccattatatattgaagaattaggcgtacataatccggatcaagtaagtatgtggtcagggattgcgctcagttcgacctttttagtatcagctattatgtcgccgatttggggtaaattagcggatcaaaaaggacggagaattatgcttttacgagcagcactgggaatggcgatagcgatgattttgatgggactcgtaagcaatgtataccaattcgttggtttgcgcttattaatggggattttttcaggatatatttcgactgccaatgcgctaatcgctacacaagttcctcgtcatcgtagtggctgggctcttggggcactatcaacggcagcggtttcgggcgtgctaattggcccgttaattggtggagcgttgtcggacacatttggtgttagaccagtattttacatcacaggagtacttcttttaggtagttttttcttaacacttttctttgtaaaagagaaatttacgccagtagaaaaaaaggaaatgcggtcggggaaagaagttttcttatcgcttaaaaacccgggcttaattatttccttgttcattacgacgatgatgattcaaattgcgtccaactcagttaatcctattttgacattatatgtacgtgatttggcaggaaatgcacaaaatattgcttttattagtgggatgattgcatcggttcccggagttgcggctcttattgcggcaccaaggcttgggaggtggggtgaccgaattggctcggagcggatattgttaggtgcgctcatcggctcaatgttactacaaatcccaatggctttcgcacaaaacccactacaacttggtattttgcgtttcttattaggtcttacagatggtgccttgcttccggcggttcaatcattgcttacaaaaaatacaccgcgtgaggttgcaggtcgaatttttggttataatcaatcttttcaatatattgggaatgtcatcggaccgcttgttgggtcaagtgttgctgctcattttggttacggagatgtcttcctcgtagttgctggctttatttttatcaatgtactaatcagtttttatttcaaccgaaaaatgcatggagagaaggggaatcatgccaactaa

SEQ ID NO: 24494 - DNA, 2628 bp, Listeria monocytogenes
gtgaataaattagtattaattgatggaaatagtattgcgaatcgcgctttttatgcgttaccacttttaaataacgataaaggtgtttacacaaatgcggtgtatggattcgcaatgatgttgatgaatgtactcgaaaaagaaaaacccagccatgtgctcgttgcatttgatgctggaaaaacaacttttagacatacaacatttaaaggttataaaggcggacgtcaaaaaaccccaagtgagttatctgaacagtttccattcatccgagagcttttaacggcgtatgatatcccgcaatatgaactggccaattacgaggcagacgatattatcggaacattgacgaaaaaagcggaagcagatggaatggaagttgcaattattaccggagaccgcgatttaacacaattagcttctgaaaaaacaacggtttatattactaaaaaaggcatagccgatatggaaaccaacacaccagaaacactaaaagaaaaatacaatctaactcctgaacaaatcattgatatgaaaggtttaatgggagattcctccgataatattcctgggattccaggcgttggtgaaaaaacagccttaaaactcttacatgaatttggcggaacggtggaaagtgtgttagagcacgccgaggaaatttccggtaaaaaactaaaagaaaaagtactagaaaataaagaattagctattttaagtaaagagctagctacaatcaatgtggattcaccgattgaatgcacagtcgaaagcacgaaatatgacgggtatcaaactgaaaaagttatccctttattaaaagaaatgaattttacaacacttttgaaaaatatcgaaggagatacaccggaggaatcgaaagaactaaaagaattgtcttttgaaatagtaacggaattaaaagaacaacattttggtgggaaaaccgcactttatgtggagctagaaaatgataattaccatacagcaaacttcatcgggctgacagtacattccagccaaggaacgtatttctttacaaaagaaacagctgaaagtagtgaggcattccgcaaatgggtagaaagtgatcaaacaaaagtagtgtatgatgcgaagaaaacaatagttgcaatgaaccgcattggtttggcaatttctggtatcacatttgatatcatgttagcatcttacttgttaaatccatctgattcaattgatgattttacaagtgttgcagtaagacatgattacacagaagtagaaacagatgaagcagtctacggaaaaggtgctaaacgtagcactcctgaagaaagcattgttgcggcacacttagctaggaaagcagtggccattgctgacttagagaaaagactagttgatgatttagagaaaaatgaacaactagctttgatggaagacctagagctaccactaacatttgttttagcagaaatggagatgcaaggagtcagcgtagatacagatcggcttgaagatatgaaagtagagctgggtggaagactaaaaacattagaagcatccattcattcactagctggcgaagaattcaatattaattcaccgaaacaactaggtgtaattttatttgaaaagctggaacttcccccagtcaagaaaacaaaaacaggctattcaacagctgcggatgtactggaaagtttgtctggaaaacacgcgattattgatgaaattttgttatatcgtcaacttggtaaaattcagtccacttatatcgaagggctgcttaaagtgacggataaagaaacacataaggtccatacacgtttcaaccaaacattaacgcaaacgggacgtttaagttcagtcgatccgaacttacaaaatatcccgattcgtttagaagaaggtcggaaaatcagacaagtttttgtgccgagtaaacctggttggaaaatgttttcagccgattattctcaagtagagttgcgagttttagcacatatttctgaagatgagaatttaatttatgcatttaagcacgattacgatatccatacgaaaacagccatggacgtgtttcatgtggagaaggaagaagtggattcactaatgcgccgtcaagctaaagcagtaaactttggtattgtatatggtattagtgattatgggctttcgcaaaaccttggtattacgcgtaaagaagcaaaagactttattgatcgttactttgtgagttatccagccgtgaaagaatatatgcaagacattgtccgttttgcgaaagaaaaaggctatgtagagaccattttacatcgtcgtcgttatattccggagattgttagtcgtaattttaatgttcgcggatttgcagaaagaactgcgatgaacacacctattcaaggtagtgccgctgatattatcaaaaaagcgatgattctgatgagcgagcgtttagtatctgaaaaattagaagcaaaattattacttcaagtgcacgatgaattaatcttcgaagcacctgaagctgaaatagctaaattagaagaaattgtcccagatgttatggaaaatgcagtagagctttctgtgccgcttaaagtagatagcgcctttggtgacacttggtacgacgcgaaataa

SEQ ID NO: 24495 - DNA, 1128 bp, Listeria monocytogenes
ttgttcgaactagttaattcatacatagatagtttagcgctctttcttgctatcctttttatccaggggatgtcttttcgaaaaataagacaatatcgccctaattggttccaaaatggtagtagacggctttttctttccattctactcggcgtctattatggtttagcgggtatttattttatttatgaaggtgcttacgaaaataatcccgttatttacacgaatatgcggattttgattttgatggtaacaagtgtttttggtggccggattccactcatattcgcctatttagttatgctttttggtcgaattagtttcgatatagcctctcctactactagtcggtatgttattttaatgacactcatttttgctgcttgcttactagtgaccttttggaaaaaacaacgcttttcgagatttgttgcgttgattattttaaacttcccggcgattctttattatttcgtaaataattttgacgaagggcgcattttgcgaggttttgagattatcgagtatttcttgctgttctttgtaactgccttactcgtgttttatgcatgtaactatatcgataaaagtaatcttgttatccaaaatctgactgaaacagcaatgacggatagtttaactaatttgccaaatatgcgctttttcacccagcagtttggctggatttttacgaaatcacagaaaagaaaaaagtcattatctcttttcattattgatattgatcattttaaagaaataaatgattttcatggtcatcaagctggcaatacagttcttgcgcagtttagtagcattcttaaaaatcgaacctttccgccaaggactatgtttgcgcgaattggtggcgaagaatttgccgtattacttcaaaatgttggtaccgagcaagccgctttaattgcagattttttccgggaagaagtggagcgggctaaatttccttataatcccgcaagtggcaaagttactgtatctatcggtgtcgcttctgctagttccaacttttcaacaaccgaatcacttttcgaagctgctgaccaagcgctctatcaagcaaaacaaaacggccgtaaccaaattgctgttcatcagggggaactcgaatga

SEQ ID NO: 24496 - DNA, 414 bp, Listeria monocytogenes
atgcctacaattaaccaattagtacgcaaacctcgtcaatctaaaattaaaaaatctacatcacctgctttgaacaagggcctaaacagttttaaaagagaattaacagacgttaactctcctcaaaaacgtggcgtatgtactcgtgttggtaccatgactcctaaaaaacctaactcggcgcttcgtaaatatgcccgtgtacgtttgagtaatggtattgaagtaacagcttacattcctggtattggtcacaacttacaagaacatagtgttgttcttattcgtggtggacgtgtaaaagatttaccaggggtacgttatcatatcgttcgtggagcgcttgatacagctggtgttgaaaatagaggacaaagccgttctaaatacggtacgaaaaaacctaaaaaataa

SEQ ID NO: 24497 - DNA, 1467 bp, Listeria monocytogenes
atgaatttagaagaaacgatgccattagtgtttgaacgttctattccgggaagaattggctttagtttgccagaaagcgatgttccagaaacaaatgccggtgattattttgatcaagcatatattcgttctataccagcagatttgccagaattaagcgaacttgaaatcatgcgtcattataccaatttatccaatcataattttggtgttgattctggtttttatccgcttggatcttgtacgatgaaatataaccctaaaatcaatgaaaaagttgcacgttttccaggctttgcgaatatccatccaaaccaaccagaaagctcagtccaaggcgcactagaactactatatgatttacaaacaagcttagttgaaattacaggaatggatgaagtaacattacaaccagctgctggagcacatggagaatggactggattaatgctcattcgcgcgtttcatgaaaaaaatggtgatacaaaacgcacaaaagtaatcatcccagattccgcacatggaacgaaccctgcatccgcagctgttgctggctttgatgttgtcacggttaaatcaaatgaaaaagggcttgttgatgtggctgatttgaaaaaggtagtaggcgaagatacagccgcattaatgctcacaaacccgaatacactcggtcttttcgaaaaagatattgttgaaatggcagaaatcgtccatgaagctggtggtaaattatattatgatggcgccaacttaaatgctattatggcaaaagttagaccgggagacatgggctttgatgtagttcatttaaatttacacaaaacatttacaggtcctcacggtggtggcggtcctggttctggcccaattggcgtgaaaaaggaattaataccgttcctaccaacaccagtccttacgaaaaaagaagacatttacacatttgattacaattatcctgactctattggacgcgtgaaaccttattatggtaactttggtatcaacgttcgcgcgtatacgtacattcgtacaatgggcccagatggcttgaaattggtgacagaatatgccgttttaaatgcgaactatatgatgcgtaaattgcaagaagcttatgatttaccatttgatcaagtgtgtaaacacgaatttgttttaagtggtaatagacagaagaaacttggtgtaagaaccgttgatattgcaaaacgattgctagatcataatttccatccgccaaccgtttatttcccgctaattgttggtgaagcaatcatgattgaaccaactgaaacagaatcgaaagaaacactagactctttcatcgatacaatgttaaaaattgctaaagaagcagaagaaaatcctgaaatcgtccaagaagcgccccatagcacttatgtaaaacgactagacgaaactcgtgctgctagaaaaccgattttacgttatcaaaaagaagtataa

SEQ ID NO: 24498 - DNA, 855 bp, Listeria monocytogenes
atgattagtcgtaatttaaaaatctattttcgtgatagaactgctgtatttatgtcattacttactgttttaattattattggactgtatgcgatttttttaggaaataatatggaagagatgttcaaacaggcttctggaaaaacggtaggcatacaagaattagtgaatacgtgggtgatagcagggattttatccattacacctgtaacggtatcgttggccgttttttctttgaaagtgcatgatgaagaattaagtattgcgagaagctttgcgataacatctgcttccagatggcgtattgttattagttatattgttagtggactagttgcttctttcttgttgtctgtcataacactttttgttggggaaatgtatatttggttgactggcggagaatttttaccgtttgagagctggattcgtttaattgggattattttaattaatgttttatgttgtagcagtattatgttctttatcgccagtttggtgaaaaaagcgagtgcctttagttccgtttcgacgattgttgggactgttattggttttattgccgggatttatttaccaattggttcacttccggccgcggtgcaaacagcgatgaaatgttttcctttcacatacggagcttctactattcgagaaatcatgacaaaagagcctttgaaagaagttttcgcggggaatacaggtgcgatggatgcgacaaaagaaatgattggaattacgatttattggggcgataaaacagttacaacagggcttagtttacttattttaagtgcctttgcagtcgtgtttggtgtgttatctgtcatcctcatgaaacgacaaacaaaataa

SEQ ID NO: 24499 - DNA, 114 bp, Listeria monocytogenes
atgaaagtaagaccatcagtgaaacctatgtgcgaaaaatgtaaagttattcgtcgtaaaggtaaagtaatggtaatttgtgaaaatccaaaacataaacaaaaacaaggataa

SEQ ID NO: 24500 - DNA, 531 bp, Listeria monocytogenes
atggaaataacaattgtaaaaggtgatattacggaacaagaagtggacgtcattgtaaatgctgctaactccgggctgttaggtggcggcggagtggacggggctatccatcaagcggcggggccggatttattaaaagaatgtcaagaggttattaatcgcatcggctcatgtccagcaggtgaggcggtcatcacgtctgcgggtgatttaaaagcaacttacattatccatgctgtgggtccgatttggaaagatggagagcatcaagaagcgaataaactggcatcttgttattggaaagcgttagatttagcggccggaaaagacttaacttcgattgcttttcctaatatttctactggtgtatatggctttcctaaaaaactagcagcagaagtagcgctttataccgttcgtaaatgggcggaagaagagtatgacacaagtattaaagaaatacgctttgtttgtttcgatgaagaaaatttgaagttatacaacaaattaataaatagcgaagtcgtttaa

SEQ ID NO: 24501 - DNA, 840 bp, Listeria monocytogenes
atggcagaaattagtgaagagttacgacttggcgaagttgtattgaatgttggacatttaaaagagatggcaggcttttatcaagaagtaattggtttgaagttattagaggaaaatgagcgaatggttcggctcggcgtgagtgggtctgatgaagctttacttgttcttaaaaagatagataatgcggtcgttccagaagtgccgcggattggcttgtttcataccgcctttcttctaccaacgcgagaaagtttagcggatgtgttacttcatttagctaagtcaggttatccgattgatggcgcgggagatcatgcttatagtgaggcgctttatttacatgatattgaaggtaatggcattgaaatttatgcggaccgtccaaaagcggaatggatgcgtgatagcgatggtaatttaccaatggtcacagaacaagtagatgtggattcgttgcttcaaattgcgacagacgaaccgtttacaggaatgccaaacggaacgattattggtcatgtgcatttacaagtggcagatgctgataaagcggaacaattttataaagaggcgcttggaatgaagttaacgaccgctattccctcagcaaggttttttgcggctggtgattatcaccatcacatcggttcaaacgtctgggcaggtcgcaacttggaacttctgcaagaaaatgaaacaggactagcttggtttacaattattacccctgataaagatgcaataataaccaccttagaagaacaaggatatgatgtgaaacgatttgaaagtaccatttcagtgacagattctaacggaattaagattcactttaaataa

SEQ ID NO: 24502 - DNA, 996 bp, Listeria monocytogenes
atgacgattcgatttagtattttggaccaaagtattattaatccgggcgagcaaccaagtgaagccttgcgaaatacagtagaacttgcgcaactcgcagaacaactcggctatcatcgtttctgggttgccgagcatcataattcagacgaaatagctggcgcagctccggaggttcttttagggtatattgctgcaaaaacgagcacaatcaagcttgcgtctggcggaataatgctacaacactatagtccatataaagttgctgaacaatttcatgtgcttgaaaacttagcgccaggtcggatttcacttggcgtcggaaaagcgccaggtggatttcagccagcaaccgatgcccttcaaaaagacttcgttaaacctactcgtacatttgatgctaaattggaagaactagtcgattttgtcacccgtcattcagatacaactattgcagcaaaaccacttccagaaaacaaaccagagatatttttgcttggaggaagtgcatcgagcgcgaaacaagctgccaaactagggatttcctttgtatttgcttattttattaacggagaagaagctgttttaaaagaagcacgcgagctatttgaacagtaccaaataaacacaaaagctagttttcaactagcaccaattgttgtagtagctgagactaaaatcgcagcagaccgacatattccagagcgagagtcaatcaaagtcgagcttgcagacggacgtagagttaatgtcggatcgcgcgaacaagccgaagcctacgtaaaagatatcgaccaaacataccggtttattacccaacgaattggtgcgataacaggaaccaaacaagaagtcggagtagagattaaacgcctttcaaaagaatataatatccaagattttgttgttttaactccagtcaaatctgctgaaattaaacgttattcctatcaactattaagtgaatcgataaaggaggaagttgtccatggctaa

SEQ ID NO: 24503 - DNA, 492 bp, Listeria monocytogenes
atgcgccgaatcattaccgctacagtaaacaactcttctggcgtattaaatcgtatcactggggttatctccagacgccaatacaatattgatagcatctctgtcggctggaccgaaatcccaaatgtttcccggattaccatcgtcgtccatgtcgattccttatacgaaatcgaacaagtaacaaaacagctcaacaaacaaattgacgtgctcaaagtgagcgatattactgacgatgcgcatatcgaacgcgaactagctttacttaaaatcaactcccccgccgccttacgatctgagttaaacgcagtcatcgaaccatttcgcgcaaccgtcattgatgtcggcacaaaaaatgtcgtcattcaagtaactggcacaagcgaaaaaattgatgctttcgttgacacggttcgtccctacggcattaaacaaatggcaagaactggtgtaactggctttacaagaagccctaaaaaaatgggttaa

SEQ ID NO: 24504 - DNA, 714 bp, Listeria monocytogenes
atgacggaaactaaagaagaaaaagtacataaagtatttgaaaaaatttccccaagttatgaccgaatgaatagtgttattagttttaaactacatgtgaaatggcgcaaagaaacaatgaagctaatgcgtgttcaaaaagggacgaatgttcttgatgtttgctgtggaacggcagattggtcgattatgatggcggaagaaattggcccagaaggtcatgtgacagggcttgattttagtgaaaacatgctgaaagttggccgcgagaaagtgaaggaagcggatttgcataatgtggaacttattcacgggaacgcaatggaattaccttttccggataatagttttgattatgtgacgattggttttgggcttcgaaatgtaccggattatatgcaagtgttgcgtgaaatgtaccgcgtgttaaaaccgggtggacagcttgcgtgtatcgatacgtcgcaaccaaatattcctggatggaaacaagtatttaatgcgtatttccgttacgtgatgcctgtttttgggaaattttttgcgaaaagttataaagaatatagctggttacaggaatcaacgcgtgagtttccaggaatggcacgacttgcggaaatgtttcaagaagccggattttcatacgtaagatatatttcacacagtggcggcgcaagtgcaacccactttggatttaaaaagaaggaacaataa

SEQ ID NO: 24505 - DNA, 2382 bp, Listeria monocytogenes
atgagtaaaaacggaaactttttaaaaaaagttgggttagctttcttaagtattttaatcgttgctagcacaatcttccaaacgacagttgtgaaagcagcaacgagttatggttctcagtttttaaacacagtagaacttttagacaaggacggtgtgccgcaaacggattttggctactatgacaacatggatgtgcattacacttggtctatccctaattcaacaaacgtaaaagcgggcgacacaatggatttcacgctgccaagtcaattggcgctggcaaccgatctcgcttttgacgtgaaagatagtaaaggtcaagtagttggaacggccactgtaaaaaaggcaacaaatcaagtaacactagttttcagtgattatgtagaaaaacattccgatgttaagggcgaactggatttctggactgctttcaaccaaaaagtaattactggaaatgaaacagttgatttagtattccctcttgaaaatggaacaaccgtaatagatgtagaagttggtgaaaaaacaccagttagcccgacagaaacgcttttcaaatatggttgggtagatgctagtaatccaagtttgattcattgggttgttcgcgtgaattacgctaaagttaatatcccaaatgctgttttcaccgacatcattggcgcaaaacaaacattaaattttgattctattaaagcctttcacggaacgtactcagcggaccgagtatttacagcaggtgcgccgatttccagcaccaatttttctgcgacaagtgacgggtttagtgtagctttaggaaatctaactgattcagtgcaaatttcttacacaaccactactacagatggtgggaagtccactcagtatgataatactgctaaattagccggaactgattttgtgacaaagcaaacgtctacttggacaccagcatcaggcggtggcggtgaaggaggaggaacaactggttcagtaacacttacgaaagaagatgcgaaaacaaaagcaaccctcgaaggtgcggaattcaagttggtggattcaaaaggcactgtgctacaagaaaacattacaacaaatgcgagcggacaacttagcattgctgacctgaaatttgacacctaccaattaatagaaacaaaagccccgacaggctataaacttgatacaacaccagtagaattcactattggtgaaaacaaccaagcaattacagtaacaaaagaaaacacacttaatacaggctccgtagaattaacaaaactagatgccgcaaccaaagcgaccttagccggagcaacatttgaattacaagataaagaaggaaatacgctccaaacagacttgaaaacagatgaaaatggcgttctaaaagtaactgatttagtaccaggcagttaccaatttgtcgaaacaagtgctccaacaggctacaagttagacaacagtccagtaagttttgaagttatcgctggtgagacagaccaagtagtaaaagtaacaaaagaaaacacactagaagttggctccgtggaactaacaaagttagactcggcaaccaaagcaaccctagccggagcaacatttgaattacaagataaagaaggaaatacgctccaaacagacttgaaaacagatgaaaatggcgttctaaaagtaactgatttagtaccaggcagttaccaatttgtcgaaacaagtgctccaacaggctacaagttagacaacagtccagtaagttttgaagttgtcgctggtgagacagaccaagtagtaaaagtaacaaaagaaaacacattagaagttggctccgtggaactaacaaagttagactcggcaaccaaagcaaccctagccggagcaacatttgaattacaagataaagaaggaaatacattacaaactggtttaactacggacgaaaatggcgttctaaaagtaactgatttagtaccagggacataccaatttgtggaaacaaaagccccgattggatatgaacttgatacgaccccagttagttttgaaattgtcgctggtgagacagacccaatagtaaaagtaacaaaagaaaacacattagtaccaccaacaccagtaccaccaacaccagtaccaccaacaccagtaccaccaacaccagtaccgcctactccgttaccaccagtaccatatgaaccaactgtgccaccaacaaaaccagaagtaccagttacgcctaagaaaacagaaaacagcgaggatagtccaaaaacaaccccgataagaataactcaaagtcttcctaaaacaggagatacaaatagttttgctggcttaggagtaatcctgatagccttgtcattaagcggtcttctgctgaagcgcaaatag

SEQ ID NO: 24506 - DNA, 2571 bp, Listeria monocytogenes
atgaaaaaactacacgtaaaaaagcaaggtaataatttgctcaaagaatcacaaatgggcaaggaaaaagttttggaaaagttaggtgttatggaaacggggctcacaaacgtagaagttacagaaagattagcggaatttggtcccaatcaaactgtggaagaaaagaaagtatcaaatttgcggctctttattcgggcgtttaatgatccgtttatctatattttagcgatgttaatggttgtttcgtatttgacggacgacatggaagcgactgtgattatggcactaatgatacttgcgagcgggatacttggatttattcaaacaagtagagcagaacgggcgagttacgcgttaaaaaatatggtgaaaaatagagtcaatgttattcgaaatggctccatggatctggtgatgcaagacgcaatcgtacctggagatttaattgaaatttcggcgggagatattattccagcagatgcgcgagttatttcggctacggatttattaattaatcaatcggcgctcacaggagaatcgattcctgctgaaaaatttgtggaagacaaacgtgccgatccagaaatttttgaacgggaaaacctattatttatggggacagatgtgttaagtgggcatggccgggcagttgttttacggactggaagctcgacattctttggttcattgtccatcgcagctactgaacgccgaggcgatactagttttgataaaggtgttaaatcaatttcgaaattactattttattttatgatggtgatggtgccgattgtatttatgattaacgggcttatgaagggcaattggttagaagcatttctatatgcagtagcgattgcggttggcctcacacctgagatgctacctatgattgtcagcacgaacttggcaaaaggtgcaatcaatatgtcgaagaaaaaagtaatcatgaaagaactgagcgccattcaaaatattggtgcaatggacattttgtgtacggataaaactgggacactcactgaagataaactagaacttataaaatacattgatagtgctggcgaaacctcagagcgcgtcttgaaaatggcttatttaaatagttacttccaaactggttggaaaaatgttttagatcatgctgttattgctaaattagatgagagtactgcatcaggttggaaaaaagttggcgagattccattcaattttgatcgacgccgtttgagcgtggtggtcgaaaatagggcagaaacaaggatgattacaaaaggcgcggtggaagaaatgctcactgtatgcactcataaggaatttggtggtgctgtttcgacactatctgaatcagaaaagagcgaacttcaagacatgtgtgcagaaatgaatcgttcaggaatccgcgtgattgctgtggcctataaaactggaaaagtcggagaagcatttactaagaccgacgaagaacaaatgattattgcggggttcctaggtttccgcgatccagtaaaagcatcgacgaaagaagcaattgctcatctttttaaaaaccaaattaacgtaaaagttttgacgggtgataacgaaattgttacgaagcggatttgtcaggaagtcggcattccagcgaacggatttttactaggtgcggatatagaagagctttccgatgaagaacttacgcgcgaactgcgaaaatatcacatttttgctaaattaaccccaatgcaaaaatcacgaatcattggtttgcttaaaaaagcggggcatacggttggattcctcggtgacggaattaatgatgctccagctcttaggaaagcagatgttggaatttcggttgatacagcagcagatattacgaaagacgctagctcagtcatcttacttgagaaaagcttaacggtcttaaatgatgcggtgatggaaggccggaatgtattcggtaatattttaaaatacttgaaaatgacggccagctctaactttggtaatgtgtttagtgttttggtggcgagtgcgtttattccgtttttaccaatgctatcgttacaccttttactgcaaaatttattgtatgatttctcccaattaacacttccttgggacaaaatggaccgttcgtttttgaaaaagccgcatcaatgggaacaaaaaggaatgttgcgctttattctgtgcattggcccggtaagttcgatctttgatattgcgacgtttctaattatgtggtttgtatttagcgcgaatacggtggcggagcaagcattattccacagtggctggttcgtggttggcttacttacgcaaacattagtcgtacacatgattcgtacagagaaaataccgttcattcaaagccgagcagctgcacctgtcatgattgcaacgcttagtgtgatggcgcttgggattattattccatttacaggattcggccacagcattggttttgtcagcttgcctggtagttatttcccttggttgatattgattttggttggatatatggctacgatgcaactggtgaaaactatatacattcggaaattccgggagtggatttaa

SEQ ID NO: 24507 - DNA, 1773 bp, Listeria monocytogenes
atgatagagcaagcaagagctattttacagcaaaattttggttatcaagattttcgaaatggacaagtagacgttatttcgaaactttgcgcaggagaagacacgctagcaatcatgccaacgggtggcgggaagtcactttgttaccaaatcccagcacttctttttgacggtttgaccattgttgtttctccactaatttcacttatgaaggatcaagtagatgcgctagtctccgaagggattgcagctacttttattaatagtacactgactaatagagaaatagatattcgactggatgctgcattttcaggtgagttaaagatgctatatattgccccagaacgcattgaaacgccaggttttcagcgtttaattgagcaggtgcctatttcattatttgccatagatgaagcgcactgtatttcgcagtggggtcatgactttcggcctagctatttgaccttgtgcgatagtttggataaaatgaccaggcgtccgctcgttatcgcgcttactgctacagcgacgcaggctgtttcagacgatatttgccgattattaaaaataagggctgattcagtcgttaaaactggattttccagagataatttagctttccaagtagtgaaagggcaagataaagataaatatttaatagattatttaacaaaaaatgtaacggaatccggaattatttatgcttcgactcggaaagaagtagagcgtctgcacagttttttgcaaaaaaaaggtgttgaatccggtatgtatcatggcggaatgaccgatttagcacggaaagactggcaagagaagtttctatacgatgatattcgagtgattgtggcgacgaatgcttttggaatggggattaataagtctaatgtgcgttttgttattcattataatattccgcgtaatatcgaagcgtactatcaagaagctggtcgtgctggtcgagacggcgttccaagtgattgtattttgctattttctccgcaagatagccgcattcagcagtttttaattgaacaatccgaaatggacgatgagcgcaaacaaaatgaattcgccaagctacgccaaatgacgggttatggttatacagaaatttgtttgcagaaatatatcgtccaatattttggtgacgacgagccaaactgcggaaaatgtagtaattgcttagatacaagagaagccacagatattacgattttagcacaacaagttttttcctgtataaaaagaatgggagagcgtttcggaaaagtattaatcgccaaggttttgacaggttccgcagaccaaaaagtgaaagattggcgctttgatgaactcagtacttatggattgatgaaagatgcttcccaaaaagatgtgttacaactaattgattatcttacagcagaaaaatatttacaaccaactgatagtcaattcccttcgttaaaactgacggatagagccgtttcggttttacgaggcgagctaaaagtggaaagaaaacaagcgaaacgagctgaaaaagttaaaatagatgtgaatagtgaccttttcgagaaattgcgggaagtgcggcgggaactggcagcaaaacacaaagtgccgccatatatcattttttcagatgaaacgttacgtgaaatgtgtgcatatatgccgcaaacggaagatgcactgcttgaagtcaaaggcattggtgcgatgaaacgcgataaatacggtgcagaattcttggctgtactgcaacaagaggcatcgaaataa

SEQ ID NO: 24508 - DNA, 720 bp, Listeria monocytogenes
atgggccgtaaatgggcaaatattaaagagaaaaaagcgtcaaaagataaaacaaatagtcgtatctatgcgaaatttggaattgaaatatatgtagcggctaaatcaggcgacccagatccacattccaaccaaaaattacgttttgttattgaacgtgcaaaaacatacaatgtgccaaaacatattattgaccgcgcaatcgaaaaagcgaaaggcactggcgatgaaacttattcagaactgcgctatgaaggctttggtccaaatggttcgatgattattgtagacgcactgacaaataatgtgaatcgtacggcatccgatgttcgcgcagcttatagcaaaaatggcggaaatatgggcgtaagtggctctgttgcttatatgtttgataatacagctatttttggcgttgaaggaaaagatgcggacgagctattagaacttttaatggaagcggatattgatgttcgtgacattttagacgaagatggccaagcaattatttatgcagaaccagaagatttccataaagtacaagagggcttgaaagcggctggaattgaagaatttacagtagcggaaatcgaaatgatccctcaaaatgatattcaattatcaggcgaggacttagagaaattcgaaagactaattgatgctttagaagatctagaagacgtgcaaaaagtatatcataacgtcgaattagaagattaa

SEQ ID NO: 24509 - DNA, 825 bp, Listeria monocytogenes
atggaaatcagagaaagaattttagcagatatgcaagtggcagaaacgattgatgcacacgaagaaatccgaaaaagtgtcgagtttttaaaagcatatttaaaaaagaatacgttcttaaaaagctttgttcttgggatttctgggggacaagattcgactttaacaggaaaactagcacagatggcgataagcgaaatgcgagcagaaacgggcgacgatgagtaccgattcttcgctgtgagcttgccatacggaacgcaactagatgaatcggaccgtcaagatgcactgaactttatggaaccagataatcgtttaaccgtaaatattaaagcctcagtggatgcgagtgttgcggcgcttgcggaagcgggagtggaactatctgatttcgctaaaggtaatgaaaaagcgcgcgaacggatgaaagtgcaatacgcaattgcagcgatgcataaaggcgtagtggttggaactgatcactccgcggaagcagttactggcttttatacgaaatacggcgatggtggaacagatattaatccactgttccgcttgaataaaagacaaggcaaggcgcttcttaaagagctaggctgcccagaacatctatatttgaaaaaaccgacagcagatttagaagataataaaccggcacttcctgatgaggtcgcgcttggtgtgacttatgaccaaattgacgattacttggaaggcaaagaagtcccagcagatgctgcggcaaaaattgagaattggtttattaaaaccgaacataaacgccatatggcaattaccatatttgatgatttctggaaatag

SEQ ID NO: 24510 - DNA, 1815 bp, Listeria monocytogenes
atggataaagattatttcactatgcgcgcgcatttatacaatataactaccgatttagaagtgcctttcaaattaaatgatgtggcaaatatttggttttgtacgactaaaaatgccaagcgtaaattgcaacaatatcaggcgaaaaaaatgcttacttatcttcctggattaggccgtggaaatgtttcacggattattttccctaaacagttagaactagaggttcttgacgttttggaacaaagtttggctgaagatgcatttagcaatattttatttttgctacaattgcctatccctaaaagctggttcacaagtatttctaccgaaattcaacaaatgttcggtttgcaagtaacagagaatcaacaagaagttctgcgctctatcgttcgtcgcaagctcactaccttagatccacttcaaacttctgtatccatggaagcttttctcatcacccaaattagtgactctctcgtcaaatatgatgaaaagaaaaagagaattatacctcatatagcacaccactggaaagtttctgatgattttacggaatggacattttatttacgaaaaagtgttttatttcatcatggacgcacgcttgatagtgaggatgtaaagtacaccttgatgcgttctatgcaagcagaatcggtttctttctggcaattacaggatattcaatccatctactgtcctaataaattcacgctctccattcagttaaaaaaaactgacccttttttcattcgttatttatgcacagcgaatatggctattttaccgcgtgatattatttttgatgaatataaatggatttctactggtccctttcgagttgcagagcggaatgacgagcgcttgatcttagaagcctttgatggatattttctcgagagaccgattcttgatcgagtagaattttggaccgtccaaactggaaacaatttaaaaaccattccaatgcagttcacttccgttgattacgaggaaaatcccgcctatgtggaacgtcgtaaacctggtgttggcgttaattttatttgtttcaatacgcaccgaaatggcaccccgcaacatccggcatttcgagaggcaatctaccatctcatcgattgtcaaaaagcaagtgatcaacatttcgaaaactatggtacagtcgcatctaactattaccctgaaaaatcccttccacctaaaaaacatcctgagaaaatcactactttattaaaaacagcaaactaccaaggtgaaaaagttgtttttggaactacccaacaccctaccgctgtaaaagagtcaaaatggatccaagagcaagctgtcaaattcggaattaacctagaaagaaaaatcatttcgcatcaggaagcttcctattccaatgttccagcagaagaaaccgacttcatgatgatgggagaaatcccagcatcagatgacgaaatggcctatttagattttttaaataacccctatctgttgccgcaacaacttttcaatcaagtaattatcaaagaacttacggaaaaactggttgcatttaaaaaagagaaagacgcctccaaaagagacgccttacaaacgagtattgatagctggctaacagaaaatcattatttaatttacttgcatcatccggaaaaaagccaatcgcttcattcaatgataaaaggaattgcagaaaatccttatggttattttgatttaagcaaagtgtggattgaaacaagcccgcttaaaacattaaaaccagactataaacaatcccatagaggtaaagcgccacatacaataaagcaaaaatga

SEQ ID NO: 24511 - DNA, 852 bp, Listeria monocytogenes
atgaaaacagtgaaattaaacaatggtgtagaagtacctattttaggatttgggacatatcaaattacagatgctgctgaagcggaacacgcggtaaaagatgcgattaaagcaggctatcgtcacattgatactgcgcaaagttatatgaatgaagaagctgtaggtcgcgggattgcggcatccggcgtcgatcgcaaagaactattcatcacgacaaaaatatgggtggaaaatgtgagttataaaggtgttatgagctcatttgaccggtcgttaaagcgtttagggttggattatgttgatttactgctaattcatcaacctttcaatgatgtctacggggcatggatagcgatggaggaattacaggcgtctggaaaaattagagcaattggcgtatccaattttagcccagatcgcgtaattgacctagctgcgttcaatgaagtaacaccgcaagtcaaccaaattgaagttaatcctttccaacaacagacagcgaatctagctattttacgaaaagaaggcgttgcaatagaagcatgggcaccatttgcggaagggaaaaatgatatctttaataacccagttttaacaaagattggtgcgaaatatggaaaatcggccgctcaagtaattttgcgttggctagtagagcaagatattatcgtcttagctaaatctgtaaaaccagaaagaatggcgcaaaatttggctatatttgattttgaattaacggaagcagataaggaagaaattgccggcctagatcaaggggaaagccagttcttctcacatgcggatccagaaatggtgaaatggatggctagtcgcaaactgaatgtataa

SEQ ID NO: 24512 - DNA, 174 bp, Listeria monocytogenes
atgtcaaaaacagtagttcgtaaaaacgaatcgcttgaagatgctcttcgtcgctttaaacgtactgtttccaaaagtggaactttgcaagaatccagaaagcgcgaattttatgaaaaaccaagcgtaaaacgtaagaaaaaatccgaagcagcaagaaaacgcaaattctaa

SEQ ID NO: 24513 - DNA, 885 bp, Listeria monocytogenes
ttgctaggagacttgtttacaaaaccaaaaaagagaaaatatgccacaattccttctgatggaacgaaagcagatgttccagaaggtattatgacaaaatgtccagaatgtaaaaaaataatgtataccaaagaattgcaaaaaaatcttatggtatgtaattattgtggttttcaccatccaattggggcaaaagcacgaatcgatatgcttgttgatgaaggctcttttgaagaaattgatgctagtttaacgacagcaaatccacttggttttgaagattatatggatcgaattgagaaagataagcaaaaatctggtttaaatgaagccattgttactggtcatgctactattggcggtaatccacttgttattgcagtgatggattctcgttttagaatggcgagtatgggctctgttgtcggtgaaaaaattcttcgtgctgtggaagatgctgataaaacaaataaaccatttgttattttcactgcttctggtggtgcgcgtatgcaggaggggatgctttcccttatgcaaatggcgaaaacttctgctgcatttaaacgatttagcaatcacggaggactgattattacggtaatgacgcacccaactactggtggggtttctgctagttttgcgtcacttggagactataactttgcggaaccaggcgcacttattggctttgctggacgccgtgtaattgaacaaaccgttcgtgaagaattaccagaagacttccaaacggcggagtttttattaaagcatggacaactagatgattgtatttcacgtcttgatttgcaaaataagttaagttttattttaagcattcatgtgaaagcacctggagtagggggtgaagttgatggcgaatga

SEQ ID NO: 24514 - DNA, 3606 bp, Listeria monocytogenes
ttgttagatgttaataattttgagtatatgaaaatcggtctggcatctccagataaaattcgttcatggtctcatggtgaagtaaaaaaacctgaaaccatcaactacagaacgcttaaacctgaacgtgacggcttattctgtgaaagaatttttggaccaatgaaagactgggaatgttcttgtggtaaatacaaacgtgttcgctataaaggcgtagtttgtgaccgttgtggagtagaagtaacgaaatcaaaagtccgtcgtgaacgtatgggccatattgaactcgcagctcctgtttctcacatctggtacttcaaaggaattccaagccgtatgggtcttgttatggatatgtccccacgtgcattagaagaaattatctactttgcatcctacgtggttacagaaccaggcgatactccacttgaaaagaaacaacttttatctgaacgtgaataccgcgtttaccgcgaaaaatatggtaaaggtttctcagctggtatgggcgcagaagctatcaaaaaaatcttagccgatatcgacttagaaaaagaaacaaatgatttaaaagaagaactaaaatccgcacaaggtcaacgtcgtactcgtgcgattcgtcgtttggaagttatggaagctttccgtaattccggcaacaacccaagctggatggtacttgacgtgctaccagttatcccaccagaaattcgtccaatggtacaacttgaaggtggccgttttgcaacaagtgatttgaatgacttatatcgtcgggtaatcaaccggaacaaccgtttgaaacgccttcttgatctaggtgcaccaaacattatcgtgcaaaatgaaaaacggatgctacaagaagctgtcgatgctttaattgacaacggtcgtcgtggtcgtccagtaactggtccaggtaaccgtccgcttaaatccctttctcatatgcttaaagggaaacaaggtcgtttccgtcaaaacttactaggtaaacgtgtcgattattctggtcgttccgttatcgtagttggacctaacttaaaaatgtaccaatgtggtcttccaaaagaaatggcgcttgaattattcaaaccatttgttatgaaagaactagttggacgcggcttagcacacaacattaagagcgctaaacgtaaaatcgaacgtatggctccagaaatctgggacgtattagaagaagttattcgtgaacatccggtattacttaaccgggcgcctacgcttcacagacttggtattcaagcatttgaaccaacgctagttgaaggtcgcgcaatccgtcttcaccctcttgtatgtacagcttacaacgctgactttgatggtgaccaaatggcggttcacgttcctttatccgcagaagcacaagcagaagcacgtattttaatgcttgcagctcaaaacattttgaaccctaaagatggtaaaccagttgtaacaccttcccaagatatggtgctaggtaactactaccttactttagaacgtgaaaaagctgtcggcgaaggtactatcttcaaagatatcaatgaagcacaacttgcgtatcaaaatggctatgtacacttacactctcgtattgctgtatttgctggttcgattccaaatgaacgtttcactgatgaacaacgcaaccaattattaattacgactgttggtaaattgattttcaacacaatcttaccaaaatcgttcccttatattaatgaaccaacgaaatttaacttagaaatcgaaacaccagctaaatatttcgttgatacaacaactgatgttcgtgctcatattgctgcacaagaactaattgatccattcaagaagaaaatcctcggtaacattatcgcggaagtcttcaagaaattccatattaccgaaacttcaaaaatgcttgaccgtatgaaagatcttggtttcaaaatctcgactaaggccggcatgacagtaggtattgcggatatcttaacacttgaagaaaaacatgaaattcttgaaaaagcacatgatacagttgaaaaaatcactaaatcattccgtcgtggtttgattacagatgatgaaagatacgaacgcgttatcgctgtatggaatgctgccaaagatgaaatccaaggaaaactgatcttgagtttggatcgcttaaacccaatcttcatgatgcaagattccggagctcgtggtaacatctccaactttacacagcttgctggtatgcgtggactgatggctgacccatccggacgtatcgtagaattgccgattacatctaacttccgtgaaggtttaacggtcttagagtacttcatttctacccatggtgcgcgtaaaggtcttaccgatacagcccttaaaacagccgattccggttaccttactcgtcgtcttgttgacgtggctcaagatgttatcattcgtgaagacgattgtggcacagaccgcggtcttacaattaaggctattcgtgaaggtactgaaatcatcgaaccacttgaagaacgtctggaaggtcgttattctcgtaaaacaattcgtcacccagaaacaaaagaagttattgcacgtgaaaatgacttaattacagaagcaattgccactcaaatcgttgacgcaggcattgaagaagtaactatccgttctgcattcacatgtaatacaaaacacggcgtatgtaaaaaatgttatggtaaaaacttggcaactggtacagaagtcgaagttggagaagcagttggtatcatcgctgcccaatctatcggggaaccaggaactcagcttactatgcgtacattccatacaggtggggttgccggagacgatatcacgcaaggtcttccacgtattcaagaaatctttgaagcacgtaatccgaaagggcaagctatcatcactgaagttggcggtgaagttgtttctatcgaagaaggtcgtgatcgtcaacaagaaatcactatccaaggtacagatgaccgccgttcttacaacattccttacactgctcgcttacgtgtagaagaaggaactattgttgaacgtggggaagctctaactgaaggttctgtggatcctaaagccttgattcgtgttcgtgacgtattatccgttcaagaatatctacttgcagaagtacaaaaagtttaccgtatgcaaggggtagaaattggcgataaacacgttgaagtaatggttcgtcaaatgttacgtaaaatccgcgtaatggatactggtgatacaaacatcttaccaggtacattaatggatattcatacgtttacagaagccaaccgtgaagctatcttaagtggtagccaaccagcaacaggtcgtccagttcttctagggattacaaaagcttcccttgaaactgattccttcttgtctgccgcatcattccaagaaacaactcgtgtcttgacagatgctgcaatcaaaggaaaacgtgacgaacttctaggacttaaagaaaatgttatcctaggtaaacttgttccagctggtacaggtattggtcgttaccgcaaactgaaatccgaagttatcaaggaaacagctgaagtaactgacgaaatcacaaatatttaa

SEQ ID NO: 24515 - DNA, 732 bp, Listeria monocytogenes
ttggataaagagataaaatatgcttttgtaacaggggctagcggagaaattggacaagcaatttgtatgtcacttgcgagagctggttggaacttgtatcttcactattatcaaaataaagaaacagtagaaaaattacttccgctcctacaagcagaagaagtagatgttatcctgattcaagctgattttgatgatttagcaagtttgacagagatagaaaagcaagttttccagctagatgcctttattcatgcagcggggcacgcccattatagtttattccaggatactacagatacaaatattgctgaattatggaacgtgcatatgtttatgccaatgagattaatccgtacttttatgccaaaattaatgaaaagtagccaaggaagaattattttcattagttctatatggggagaagtcggtgcatcaatggaagtagcgtattcaactgtaaaaggtgcacaaatagccttttgtcgtgcgctaagccaagaggtgggactttctggaataacagttaatgcagttacgccaggagttgtagaaacaaaaatgatggaccagttttctgaagaggagaaagacaatcttcgtcaagaaatccctttaaatcgttttgcacaaccagaagaaattgcagaaactgtagcatttttgacaagtaaaaaagcaagctatatcactggagaagttttgcgcttaaatggcggttggcttatgtaa

SEQ ID NO: 24516 - DNA, 423 bp, Listeria monocytogenes
ttggacggaattagtagtttatcaggagcgagtcaggatacaaacaatgcagtgacatcaagcgtatcgaaaacccttggcaaagatgactttatgaaactatttttaacgagtttacaatatcaagatccatcgagcccacttgatacgaatgaaatgatgtcgcaaatggcgcaactttccttaatggagcaagttgccaatatgaccactgccgtagataagctttctgaacaagcgcaaaactccgccttgcaatccgcggttaatttcatcggtaaggatataaaaggtgtttcactaaacggcgaagtaattagcggcaaagtcgaaagcgttcaacaaacaacaaatggtgtcatgctgaaattaaaagataacgatagccttgtgccaatgacatatgtaacagaaattaattaa

SEQ ID NO: 24517 - DNA, 1026 bp, Listeria monocytogenes
ttggcatcaaccatatatgatatagcaaaacatgcgggagtttcaaaatcaacggtatctagagtactaaacaatcaagctaatatctccgaagaatcacgaaaaaaagtactagcagcgattgaccaacttaactaccaaccaagcaaactagcacgcgcacttacctcttcgggctttgatgctatcatggttatttcaaatcgctctactacaaccacaaccggaaacccatttttttccgaaataattcaatccatttccactcaagctgagttggaaaatttcgacctaattcttcaaactgctaaaaacagcgaagacgaacttaaaaaatgcctctccaaaattcaagaaaaaatgataaaaggcattattatgctaagttctcccgctgatgaagatttttttcaccaattagacccatataatatccccatcgtcgttaccggaaaagtagaaggtcattacaaaaatatatactctgttgacaccgacaattttggcgacagttatgctctaacaaaacatttaatcaagcaaggccatcaaaaaattgcttgtatccatgctccactcgattatcacgtttcgattgatcgtcttgccggtttccgtagctgcctgtttgaccaccaattagacctacgtaatgactggattatagatagtggttatagcatagaagatagctataaagccgcactacgactaatggaaggccctgataaaccaaccgctgttttcgcaaccgacgacctaaaagttcttagcatttacaaaatggcagccgataaaaacttacaaatcccaacagatttttctgttatcggctataatgataaagtagcgtcatctttcctatcaccaccacttacttctatcgacattccaatcaataaactaggaaaaaaagcgactaacttattattccggctaattcatcaagataaaaatgttccaaaaacaaccattatccaaaccgaaatgattgaacgtgaatccattcagaaaataaatgcctaa

SEQ ID NO: 24518 - DNA, 993 bp, Listeria monocytogenes
gtgggattacaggatgaacttacaatgatgcaaccagtggtcatgaagattttttcaaaaagtgtccgcgaaaatcgattatctcacggctatttattcgaaggaacaaggggtacagggaagaagcgcacagcactttggttagctcagagccttttttgtttagaaagcactgaaaccgagcttgcttgtggaaagtgtaccaattgcacgagaatagcgagtcataatcatccggatgttcatttgctagagccagatggggctagtattaaaattgatcaggttcgcgcgcttaagcaagaacttagtaaacgtgggatggaatcggatcaaaaagtagttatcatttacgatgcagaaaaaatgactgttcaatcagccaatagtctgctgaaatttatagaagaaccagaaggcggtttgttattattatttttaacaacaaatcccgggcaaattttgccaacaatccagtcaagactgcaaccggtcacattcaaatcactgacttttgatagtttactcgcatcactaacagcagcaggcatttccgaacaaaaagcgcggatttatgctagcattactgggagtgtggaagaagcgaaggcttttgaagagagcgagtggtttagtgaggcaagaaatgttgtcatcaagttatacgaaggaattcaccatcaaggaaccagcccattaattatcattcaagaatcatggatgccactttttaaagagaaagataagatggcgcttgggctcgaattgttgttactgctgtaccgcgaccggctacaccttacacttgacgagaactacgaaccaatttgtacagcgcaaaaagaaatgctcggacaagatgcgctgcgcaagtcactgtccgaaaccacaggggaaatcgagaagattctcgctgcgaaatcaaaactggattccaatatgaacacgcaacttctaatggagcagttagttctggaaatccaagggaggtaa

SEQ ID NO: 24519 - DNA, 3555 bp, Listeria monocytogenes
ttgtcaggacattcaggacatgatgtaaaatatggacggcatcgtacgcgtagaagttttgcgcgaatcagtgaagtacttgaattaccaaacttaattgagattcaaacagcttcttaccaatggttcttagatgaagggctacgtgagatgttccgcgatatttcgccaattgaggattttgcgggtaatttatctttagaattcattgattacgatcttggagagccgaaatattcggtagaagaatctaagaaccgtgatgcaaactatgcggctccactgcgcgtgaagttgcgcctaatcaacaaagaaaccggcgaagtaaaagaccaagaagtatttatgggtgatttcccactaatgactgaaatgggtacgttcattattaatggggcagaacgtgttatcgtttcccagttagttcgttctccaggtgtttacttcaatggaaaactagacaaaaatggtaaaaaaggctttggttctactgtcatccctaaccgtggggcttggcttgagtatgaaacagatgctaaagacgttgtacacgttcgtattgaccgtacacgtaaattaccagtaactgttttacttcgtgcactaggctttggttccgatcaagaaattattgatttaatcggggacaatgactacttgcgcaacacgcttgaaaaagacaacactgacaatgctgaaaaagcacttctagaaatttacgaaagattacgtccgggtgaacccccaacagttgataacgctagaagcttactagtttctcgtttctttgatccaaaacgctacgatcttgcaagcgttggacgttataaaatcaacaaaaaattacatctgaaaaaccgtctattcaaccaaacattagcagaaactttagtggatccagaaactggtgaaattatcgcttctaaaggtgacatattggatcgtcgtaatttagatcaaattattcctaatttagaaaacggtgtaggtttccgcacacttcgtccaactgatggagtgatggaagatagcgtactcgttcaatctattaaaatttacgcaccaaatgatgaagaaaaagaaatcaacatcatcggtaacgcgtatatcgaagaaaacgtaaaacacatcacgccttctgatattatttcatccattagctacttctttaacttgctacatggtgttggcgatacagatgacatcgatcacctaggtaatcgtcgtcttcgttctgttggtgaacttttacaaaaccaattccgtatcggtttatctcgtatggaacgtgtggttcgtgaacgtatgtctattcaagatatgactacaattacaccacaacaattgattaatattcgtccagtagttgcatctatcaaagaattttttggtagctcgcagttatctcagttcatggatcaaacaaatccacttggcgaacttacgcataaacgtcgtctttcagcgcttggacctggtggtttgacgcgtgaacgtgctggttatgaagtacgtgacgtgcattactctcactatggccgtatgtgtccgattgaaacgccagagggaccaaacattggtttgattaactccctttcttctttcgcaaaagtaaataaattcggctttatcgaaacgccttaccgccgcgtagatcctgaaacaaaccgtgttacagataagattgattatctaactgcggatgaagaggataattacgtagtagcgcaagcgaactcgaaattagacgaacaaggtactttcacagaagaagaagttatggctcgtttccgttcagaaaacttagcggtagaaaaagaacgtattgactacatggacgtatcgcctaaacaggttgtatctgttgcgacagcatgtattccgttccttgaaaacgatgatagtaaccgtgcgctaatgggagcgaacatgcaacgtcaagcagtacctcttatgcaccctgaagctccatttgttggaacaggtatggaacacgtatctgcgaaagactctggtgctgctgtaactgccaaacatgacggtattgtagaacacgttgaagctcgcgaaatctgggttcgtcgtgtatctctagtggatggcaaagaagtaactggcggaatcgataaatatactttacgtaaatttgttcgttctaaccaagggacttgttataaccaacgtccaaacgtagcagaaggagaccgcgttgttaaaggagaaatccttggtaacggtccatctatggattccggtgaacttgcacttggtcgtaacgtactagttgcgttcatgacttgggatggttataactacgaggatgcgatcatcatgagtgaacgtcttgtaaaagatgacgtttatacttcgattcatattgaagaatttgaatcagaagctcgtgatacaaaactcggacctgaagaaatgactcgtgatattccaaatgttggggaagacgctttacgtgaccttgacgaacgtggaattatccgtgttggtgcggaagtaaaagacaacgaccttctagttggtaaagtaacaccaaaaggagttactgaattaactgcagaagaacgtttattacacgctatctttggtgaaaaagcacgtgaagttcgtgatacttcattacgtgtacctcacggcggcggcggaatcgtgcttgacgtgaagatctttacacgtgaagcaggcgacgaactaccacctggagtaaaccaattagtacgtgtttatattgtacaaaaacgtaaaatccatgaaggcgataaaatggccggacgtcacggtaacaaaggggttatctcccgtattttacctgaagaagatatgccatttatgccagacggaacacctgttgatatcatgcttaacccactaggggtaccatctcgtatgaatatcggacaagtacttgagctacacttaggtatggctgctcgtgctttaggaattcacgttgcaacaccagtatttgatggtgcgaatgaagaagatgtttggagcacagtggaagaagccggtatggcccgcgatgcgaaaacaattctttatgacggacgttctggtgaagcattcgataaccgtatctctgttggtgtaatgtacatgatcaaacttgcccacatggttgatgataaacttcatgcacgttcaactggaccttactctctagtaacgcaacaacctcttggtggtaaagcacaatttggtggacaacgttttggggaaatggaagtatgggcacttgaagcatatggtgccgcttatactcttcaagaaatcctaacgattaaatccgatgacgtggttggtcgtgtgaaaacttacgaagcgattgttaaaggcgaaagcgttccagaacctggtgtgccagaatccttcaaagtactcatcaaagagcttcaaagtcttggaatggacgttaaaatgctttccgcagacgaagaagaaatcgagatgcgtgacatggatgatgatgactttactaatcaaaatgatgccttcaatatcgtacaaccggaaaatgcagccgctgaaaagactgagtaa

SEQ ID NO: 24520 - DNA, 1296 bp, Listeria monocytogenes
atgtttcaaacgttagttaacttcttcaaagtagcagacatccgtaaaaaaatactatttacattagcaatgctagttattttccgtattggtacattcgtgccagtaccgggagttaacgcagcagctttacaatctagtatggatggcggtattttggggttcttaaatacatttaatggtggggctttaaaaaacttctcaatttttgccatgggtgtaatgccttacattacatcttccattattgttcagttacttcaaatggacgttgttcctaaattgactgagtggtcgaagcaaggggaaatgggtcgtaaaaaactcaatcaacttactagatacatgacaatcggacttggtttagtggaagctttcggtatggcatacggatttaaccgcatgtcttcagctggcttagtaattgaaccttccattggtagatatgcaattatcgctattgtattgactactggtacaatgttcttaatgtggctaggtgaacagatcactgttaaaggcgttggtaatggtgtttccatcattatctttgcaggtatcgttgctcgtattcctgatggagttcgtcaattatatgtttcgcaaattgaaaacgctggtgatcaacttttcctacatgttctgacattagttggtgtaggggttgcgattttagctattgttgtagctgtaatcttcttccaacaagcattacgtaaaattccaattcaatactctaaacgtgtagcaggagcaaaacaatcgggcgcgcaagcaacgcacttgccgttaaaacttaactctgccggagttatccctgttatctttgcaagtgcatttattattacaccacaaactatccttactttctttgatcaaagtaacgatgttgtaaaagtattgaaagacgtgtttgattacacaaaaccaattggtatgattttatatgttgcactaattgttgctttcacttatttctatgctttcattcaagtgaaccctgagaaagttgcagacaacttgaaaaagcaaggtgggtatattcctagtaaacgtcctggtcgggaaacacaagcttatcttacatcggtactttaccgtctaacatttgttggtgcaattttcctttcagcggttgctatacttccaactatcggtactactgtgtttagtttaccgcagtcacttgccgttggtggtacaagcctactaattgttatcggggtagcattagatactacgaaacaactcgaaggacaacttgtaaaaaggaactatcggggatttatcaaataa

SEQ ID NO: 24521 - DNA, 723 bp, Listeria monocytogenes
atgagtaaaaaagttgttttaacaagagaagcgagtaaaaacaaaccatggcaaacctatttttcacaaaatggttatgaggtgatgtccatcccgcttattaaaacacaacctataaaaattaatttgacccgagaacaacaagaaacagactggctttttttaacaagtgctaatgctgtagaatatttcttcacgaaccaatatgagagatccaattacaaaatagctgtcatcggcgaaaaaacaaaagaaaagttggcagaatttggtcacgaaccaagttttgtcccatctatctatcagtcagaagtatttttagaagaatggttaaacgagaacccagagaaaacaagtatcttactaccacaaagtaatttaagcagaacaataataaaagatacattgatagaaaaaggttatatcgttttttcgattgagctctacgaaacaatttttccagaggcttctaaaaaactgttaaccgaacaactgaaactaaatgaaacacaaataattgtttttgccagcccatctgcatggaaaaacttctattccatcgcgaaatcattccctgctcaaaaagagaagtggcatatcgcatcaattggtagtattacaacagaggccattctagcagatggatgggaagtaaaatatcaaccaaaaaccttcaccatgaagcacctagctgatttgataatacaggaggaattaaaatga

SEQ ID NO: 24522 - DNA, 822 bp, Listeria monocytogenes
ttggaaaaatatgttgttatcggaaatccaattcgtcactcgttatcaccagctatgcaaaatcggattttccaagaacttggaatgaacgcggagtataactctgttttaatagaagaagacgcttttgaaacagaaatcaaaaaactaatggattctggagtgcgtggttttaatattacaacaccatttaaagagcgtattttaccatttttagatgaactagataatctcgcagcagcttctggcgcagtgaatacggtgcttaaaaaagaagacaaatggtacggatttaatacagatggcaaaggctacttagaaggattagaagaaattcgctcaattacagaagatgattctattttaattaccggtgcgggtggtgcaagtaaggcgatttacctagcactctcaactcacaccgatgctaaaataaccgttgccaatcgtacaacggaaaaagcgatagaaatgacgaaagataataataaccatcacgctatcacactagaagaagcagaaaagcaattggctgattttacgattatcattcaaacaacatctattggtctagaagcttccaaaaacaaaagtccaatttcgctggctaatgtaaaacaaggaacgatttgttctgacattatttataacccagccgaaacagcttttttaaaagaagcaaagaaaaatggagcaattacccaaaatggcttaccgatgtttgttaatcaaggggcacttgcctttgaaatatggactgggataaaaccagagcgatcactgatgaaagaagcagtactcgaacaattaggaggaaactaa

SEQ ID NO: 24523 - DNA, 843 bp, Listeria monocytogenes
atgacaaaacaactacttgttttacaatctgattttggtattagtgatggtgcagttagcgccatgtacggcgtgattaatagcgttagcatagatttgcaaatatatgatttaacacatcaaattcctcaatttaatatttgggaagcatcctatcgtttactccaaaccgtgacttattggcccgaagataccatttttgtttcgattgttgatcctggagttggttcgaagcgtcgaagcgtcgccgttttaacagaagatggtcattatattattacgccagacaatggaaccctaactcatatcgcgcattacggaacaattaaagcagttcgtctcattgatgaagaaaaaaatcgtcttccaaagtcaggtgcatcccatacatttcacggtcgagatattttcgcttataccgcagctaggctcgcagccggtgtaattaattttgaagatattggcccagcagccaaccccgactccattgtctcccttagtttaagcgactcttatttggaaggagatcaagctttcggaaccattgatattatcgatcgcccatttggtaacctttggacaaatattcgtcggaccgatttttttgagctgggcgcaaactatggcgattccattgaagtcctcataaaacaccacgaccgtatagtttataagaatttcgttacttatagccgctcatttgcagacttacggatcggcgaagcactcatctacgtcaactcactcgataacctcggactcggtatcaatcaaggttctttcgtagacgcttattcagtcggcaccggcaccagctggaaagtcacccttaaaaaagtataa

SEQ ID NO: 24524 - DNA, 1482 bp, Listeria monocytogenes
atgggaaaagttatgttaattggtgcagggcctggggatgcgcaactactgacagtgaaaggtttagctgcactacaaaaggcagatgttattgtttacgatcgcctcgtcgaaccagcgatgctccaagaacgaaaagctagttgtaaactaatttatgttggaaaagaaccacttcatcatccaattccacaagatgaaatcgaacgaattcttgtaagagaagcggcaacgaatgagcttgtcgtccgtttaaaagcaggtgatccttatgtatttggacgaggtggcgaagaaggagagacactccataaagcaggaattccgtttgaagttatccctggaatcacttcagctattggtgggctcgcctatgctggaatccctgtaacacatcgtgattttgcttcaagttttcatgtcattaccggacatttgaagaaagggcgcgatccactagattgggaagcacttgctagactggaaggtacacttgttttcttaatggggatgactaatttacctaatatctgtgcgaatttattagaacacggtcaaaagccagaaactggtgttgcaattgtacaatgggcaactcgaggcaaacaattaacagtaactggaaatttgcaaaccatcgaacaaaaagtagctgagtcgggtatttcctctccagcacttatcgttgttggcgatgtagttagcttacgaccacaactgaacttttttgaggaaatgccactttttcataccaaagtattacttccaagagcacgagcaggaaagagtatgctcgcggaacaaattcgtgatttaggcggagaagtaacaatgtacccaaatattcaagtattagatgttgcgccaacgaaaacaaaagaacaactaagcgaagtaagcgaactgcttttcacatcaaaagaagctgtagaacgattttttgattatttagccaagcttgatttagatattcgttctcttaaaaatagccatctgacggctattggaaagcaaacgaaggaagcatttagcgaaaaaggaattattccagatagttttattaaaagacggagcacggaattgattttagagcatttaccacgattacagaaaaatgtgagtaatttaattatcggaagcgtagttgatacgaccgaagttaatgttattttagctgatgtaaaagctattgaaatgatgccgttatatgatatgcgcccagtgacagaacgaccatttgatctcgaaagctttgaacaagtatgtttttcaagttcgcgttccgtccaaaatctacttgatgtactaacaatagaagaaaaggcgattttacaaacgaaaacaatcctttcgattggaaggttcacgagcgcaactttagcgtcattcggtatgaacaatttcatagaagccgaaagcgccacaccagagagcttaatcgaactaatccaaaaaacaaaattagaaggagtaccacaatga

SEQ ID NO: 24525 - DNA, 834 bp, Listeria monocytogenes
atgaaaagaccagtagacttttttgctatgaaggaaaacggagagaaaatcacgatgatcaccgcttatgactatccttctgctaagaatgtagaacaagcagaagcagatatgattttagtcggagattcactcggaatggtagtattaggctacgattcaaccgtaccagttacaatcgatgatatgattcatcatacaaaagccgttaagcgaggtgccacagacacatttattgtcactgacatgccgtttatgacttaccatggttcagtgaatgaaacaatccaaaatgcacgtaaaattattcaagaaagtggcgctcatgcagtgaaattagaaggagcaggagaagtcgttaacaaaattgctcgtttaaccgaagcaggtgctccagttgtcgctcatcttggcttaacaccccaaagtgttggtttaactggaagctataaagtacgcgctaaatctgcccaagaagcacaagagttaatggataatgcattagctgtagaagcagctggagctattgcaatcgtgctcgaagcaatacctcgccaattagctgaaaaggtaagtaaagcactttcaattcctacaattggtattggagcaggtttagaaacagatggacaagtactcgtttaccacgatattatcggttatggaatcagccgccgtgcaaaatttgtaaaagcttatgcagatattgacgagacaatcgaaccagcactcgcaagctatgtaaaagaagtgaaagccgagacatttccagaagtgaaacatagctttacaatggccgaagaagacttaaaaggcctctatggaagggaatag

SEQ ID NO: 24526 - DNA, 1269 bp, Listeria monocytogenes
atgcttactttcatcacagaaattttttctacgccagcttttattttaggaattatagccgctattgggttaattgccttaaggaaaaccggttctgatattgtaaaaggaacattaaaaacgatttttggttttattatgctacaacagggatccgcgattattgttggaagtttaattccatttagcacaatgtttgaaaatgcttttcaacttaaaggggtggttgcagaagataatgctattgcagctgctgtccagcaaattttaggaacggaaacgtctttaattcttgtatttggttttattattaatgttattcttgctagaacaaccagatggaaatatattttcttaacagggcatatgatgttttccttcgcagctacaatggccatagtattcgatcaaatgggctttaatagctggcaaattattttgtttggttctatcgcacagggtatttcgagtattgtttttccagcactcgcacaaccttttgtacgcaaagtgacaggaaatgatcaagtcggttttggcttttggggcagttcccttgtctgggcgaccggttggcttggagggaaattaggaaataaagctaattctacagaagacttaaaagtacctaaaaaactagattttttgaaagaaatgtctgttttaatggggattgttatggcagtgatttatatatttacttctttctttgtggatgaaccggtgatgaaagaattagctggcacacaaagtaatgtattattcgcaatattgcaatcattcacttttgttgtcggaatattgatactacttcaaggggtccggatgtttttaggtgaattagttccagcgtttaaaggtattagcgagaaaattgttcccggcgcaattccagctcttgatgttcccgttttctattcattcgcacctactgcaacgaccattggttttttatgcgcagtagttggagggcttggagcgacactagtttctaccatgcttcccgttgtcgtacttccgtctgttatcggattgttttttatgggcggagcggctggtgtatttggaaatgcaatgggtggtagacgaggagccattattgctggtttattattaggatttatttttcaaatgattgtagcaattgcttatccaattttaggattagatggttatggcattcaaggattatggtttgcttcgacggatgcaatcattgttatcgtcattattcgattaattggagcattatttggaatagcactttaa

SEQ ID NO: 24527 - DNA, 1563 bp, Listeria monocytogenes
atgacaatcgcaatcacgatcatctccagtttgcttttcttaatcgtcggtctagttgttggttctctaatttttaaatctagtacagagaaaaaactggctgctgcaagggggactgctgaattaattgtagaggatgcgaagaaagaagcagaaactacaaaaaaagaagcattgcttgaagcgaaggaagagaatcataggttacgtactgaaatcgaaaatgaacttcgtgggcgaagaacagagacacagaaagcagaaaatcgcttattgcaaagggaggaaaacctcgaccgtaaagatacttctttaagtaaacgagaagctacacttgaaagaaaagaggagagtatcagtaaacgtcaacaacaaattgaagagaaagaaagcaaactagctgagatgattcaagcggagcagacagaactcgaaagaatttctgcgctcagcaaagaggaagcgaaatctatcatccttaaccaggtagaagaggaattaacgcatgatacagcaatcatggtcaaagaatcagaaaaccgggccaaggaagagtcggataaaaaagcaaagaatattctctcactagctatccagcgttgtgcagctgatcatgtggcagaaacaacggtatctgttgttaccttaccaaatgatgagatgaaaggtcggattatcggacgtgaaggccgtaatatccgcacgcttgagacgttaacggggattgatttgataattgatgatacaccggaagcagtaattctttccggatttgacccaattcgacgtgaaatcgctagaatcgccttagaaaaacttgttcaagatggaagaatccatccagctcgaattgaagaaatggtggacaaagcccgtaaagaggtggatgaacatattcgcgaagtcggggaacaagcaacatttgaagttggaattcattccatccatcctgatttgataaaaattcttggccgcttgcgttatcgtactagttacggacaaaacgttcttaaccattcactcgaagtttcgaaacttgcaggaattcttgcaggagagcttggcgaagacgttacgcttgctaaacgggccggactacttcatgacatcggtaaagcaattgaccatgaaattgaaggaagtcacgttgaaatcggcgtggaacttgctaccaaatacaaagaaaatgatgtggtaatcaatagtattgcttcccatcatggagatacagaagctacttctgttatcgcagtattggtcgcagcggcagatgcactttctgctgcaagaccgggagctcgtagtgaaacgcttgaaaattacatccgtcgtttagaaaaattagaagaaatttctgagtcttacgatggtgtagaaaaatcttatgctatccaagcaggacgtgaagtacgtattatcgttgagccagatacaattgatgatctttcatcttaccgccttgcacgcgacataagaaaacgaattgaagaggaattagattatcctggtcacattaaagtgaccgtcattcgtgaaacaagagcagtagaatacgctaaataa

SEQ ID NO: 24528 - DNA, 267 bp, Listeria monocytogenes
atggaacaagcaagttttgtagtaatcgatgaaacaggaattcacgcacgcccggcaactctattggtgcaggctgcaagtaaatacagctctgacgttcaaattgaatacactggtaaaaaagtaaaccttaaatcaatcatgggcgttatgtctcttggtattggtaaaggcgctgacattactatctacactgaaggtagcgatgaaaaagaagcaattgaaggactaactgaagttcttaagaaagaaggattggctgaataa

SEQ ID NO: 24529 - DNA, 1476 bp, Listeria monocytogenes
atgacagatgagttagaacaaaaagcactgattactatttttggcggtacgggagatttggcaaatcgcaaactttacccttcgctatatcatttgtacagtaagggatctcttggcgacaattttgctgttattggaacggctcgtcgtgaatggagtaacgatttcttccgtgataaagtaaaagagtctatcaaagacattgacggttctgaaaaagacgcagatgcatttgcttctcacttctactatcaatctcatgatgtgacaaataaagaatcttatctaactttaaaagatttgtctgatgaattagatgcaaaatacgaattagatggcaatcgccttttctatcttgcaatggcgccaaatttctttggaactatcgcaagtcgcattaaatctgaaggctttgttgatacagacggtttccatcgtttaattatcgaaaaaccattcggccatgatttagctagtgcggaagaattaaacaattcacttcgtcaagctttcaaggaagatgaaatttatcgtattgaccattatttaggaaaagaaatgatccaaaatatttcggttattcgttttgcaaattctattattgaatcgctttggaataatcgttacatcgataatattcaagttactttaacagaggtacttggagtcgaagatcgtggacgctattacgatgaaagtggcgcacttcgagacatggttcaaaatcatatcttacaaatcgtttctttacttgcaatggagccaccgattaacttatctactcgcgagattcgtcatgaaaaagttcgcgcgcttcgttctttacgcgtttttgaaggaaaagaagtgcatcaaagctttatccgtggtcaatatggtcccggtgaagtggatggtaaagagttaaaaggttatcgtcaagaagataatgtggatccccattccaatacggaaacatttgttgcagccaaacttgaaatcgataatttccgctgggctggcgtaccattttacattcgcactggtaaacgtcttgcgaagaaaacaacgcaaattgcgattcagtttaaagatgtcccactaaacttattcgggcaacaacaatcacttggtggtaatgtgcttgttattcatatccaaccggacgaaggtattacacttcatttgaacgtaaaagaacctggtcaaggtatggttacgatgccagtcaacttgaattatattcattcctctccagacggcatgaacacacctgaggcttacgaaaaattgattctagactgtcttcgcggtgacgcgacttacttctctcactgggatgaagtatcgctatcatggaactttatcgaccatatagcagatgtttggacaaatacgaaagatcatttcccgaactacaaatccggttcaatggggccaaaagaagcagacgacctcattcaacgtgacggattccagtggttcccgatcgattaa

SEQ ID NO: 24530 - DNA, 564 bp, Listeria monocytogenes
atgaaaacagaactagaaaagatgattgcaggagaaatgtatgatcctagcgacagagagcttgcacacggaagaaatcgtgcgcgtaagttctgcagagagattaacgatgcgatggattcagagtcccgtgcaagcgtgctgaagcgtctattcggcggaacgaaagaaaatgtttatgtggaacctgatttccgtgtcgattacggttctaatatttatgtaggcgaaaatttttacgctaattttgattgtgttattttagatgtttgcgaagtacatattggcgacaactgcatgatggcgccgggtgttcatatctatactgcgacacatccgcttgatccagtagaacgtaatagtggattagagcttggtaaaccagttgaaattggcgacaatgtttggattggtggacgagcaattattaatccaggcgtaaaacttggaaataatgttgtcgttgcttcaggtgcggttgtcacgaaaagtttcccggataatgtcgttgttgcgggtaacccagcgcgcgttattaaaacaattgaggttgaggaaaaatga

SEQ ID NO: 24531 - DNA, 987 bp, Listeria monocytogenes
atgaccttttttaaaaaactaaaagataaaataacccagcaaaccgattccgtttctggaaaatttaaagatggcttatccaaaacacgcggcaacttttccggaaaaatcaacgaaatggttgctcgctatcgtaaagtcgacgaagatttctttgaagaactagaagaaatccttatcggagcagatgttggttttgaaactgtcatggagctagttgatacgctgcgtcgcgaagtgcaacttagaaatattagcgatccaaaagatgtccaagaagtgattgtcgaaaaattagtcgagatttaccaaggggacgaaaaagaagatgaagcactgcatatcgaagaagacggactaaccgttatcttatttgtaggtgtgaacggggttggtaaaacaacttccatcggaaaaatggcccatcgctttaaacaagaaggcaaaaaagtcatgcttgctgctggtgatactttccgagctggcgcaattgatcaacttgaagtctggggcgagcgcaccggcgtggatgtcattaaacaagccgagggaagtgaccctgccgctgttatgtttgatgccgttcaagccgcaaaagcacgtaaagcagacattttactttgcgacacagccggccgtttacaaaacaaagtcaatctaatgaacgaattagaaaaagtaaaacgtgtcattacgcgcgaaattcctaatgcgccacacgaagttttactagtacttgatgcaaccactggtcaaaacgccttcgttcaagcgaaacaatttaaagaaacaacggacgtaacaggcattatccttacaaaactagacggtactgctaaaggtggtattgtcatcgccatccgtaacgaactggacattccagtgaaattcgtcggtcttggggaacaaatggatgacctacaagcctttgatgcaaatgaatatgtgtatggcttatttgctgatatggttgataacgaaaaataa

SEQ ID NO: 24532 - DNA, 1494 bp, Listeria monocytogenes
atggaaaagaaatatattttagcactggatcaaggaacaacgagttcaagagcgatgattattgacgaagaaggagaagtaattggcgttgcacaagaagaatttgatcaaatttttcctaaaccaggttgggtagaacataatgctaatgaaatctgggcttcgattttagctgttattgcaggtgtattgttaaaaacaaatatttcttctaaagaaattgctgggattggtattacaaaccaacgtgaaacaaccgttatttgggataaagaaagcggaaatccgatttataatgcgattgtttggcaatctcgtcaaacagaagatatttgtaaacaattacgtaaagatggctatgaagataccattcgttctaaaactggtcttttaattgatccgtattttgcgggtacaaaagctcgctggattcttgaccatgtagatggtgcacaagaacgtgctgaaaaaggagaacttcttttcggaactattgatacttggttagtttggaaattaactggtggtcgtgctcatattaccgactattccaatgcttctcgtacacttctttataatatttatgatttagagtgggatgatgagcttttaaaaatgcttaatatcccgaaagcaatgctgccagaagttcgtccatcctctgaagtatatgcggacacagtgccttatcacttctttggtgaagaagttccggttgcaggtattgctggtgaccaacaagctgcattattcggtcaaggttgtttcgaaaaaggaatggcgaaaaatacgtacgggactggttgcttcttgctaatgaacactggggaaaaagcagttcgttctgaaaacggcttattaacaacacttgcttggggaattgatggtaaagtagaatatgcacttgaaggtagtattttcgttgctggttccgctattcagtggttacgtgacggtttacgaatggttcgtcaatcaagcgactctgaaaactatgcaagtcgtattgaatcaagtgacggtgtatatgttgtaccagctttcgttggtttaggcgcaccttactgggattcagatgttcgtggggctgtatttggcttaactcgtggtacggaaaaagaacaatttatccgtgcaactttggaatctctagcctatcaaacaagagacgtactttatgcaatggaacaagattccggaattagcttaaaaacgttacgtgttgatggcggagcttctgctaataatttcttaatgcaattccaatctgatattctaggcgttcctgtagagcgtccagaaaacaaagaaacaaccgtgctaggtgcggcgttcttggcgggacttgcagtaggtgtttggaaagataaaaatgaaattaaaaaacattggaaactggacaaacgttttgaagtagaaatgaaagaagaacaaagagaagatttatatgaaggctggcataaagctgttaaagcggcacaagcttttaaataa

SEQ ID NO: 24533 - DNA, 1272 bp, Listeria monocytogenes
atggctaaactctccattgcatacttagaaagcttaacaattaaagatatatattccctagctaaagaacataagattgcttattatagtaagcttaccaaacgagaacttatttttgctttacttaagtcaaacgccgaaaaagaaggtttcttttttatggaaggtgtcttggaaattattccgaatgagggatttggttttttacgacctattaattattcctctagctcggaagatatttatatttccgcttctcaaatcagacgttttgaattaagaacgggagacagagtttcaggaaaagttcgtccaccaaaagaaaatgaacgttattttggtttactgcatgttgaggcagttaacggagaaaacccagaagtagcgaaagaaagagtgcattttcctggtttgacgccactttatccggatcgtcaaattcatttagaaacagaaaaatatccaatttcaacacgtacaattgatttgattgctccaattggatttggacagcgtggacttattgtagcgccaccaaaagcagggaaaactgttttgctcaaagaaattgcgaatgcgattacgactaatcatccagatactgaattgattgttttgctaatagatgagcgtccagaagaagtaactgatattgagcgctctgtaaaagcggatgtagtcagttccacatttgacgaagttccagaaaatcatattaaagttgcagaacttgtgcttgaacgcgcaatgagattagtggagcaaaaacgcgatgtagttattttgatggacagtatcacgcgtctcgcacgagcgtataatttagttataccaccaagtggccgaacactttcaggggggattgacccagcagcttttcatagaccaaaacggttttttggagcagcacgaaatatagaagagggcggtagtttaacaatccttgctactgcgttagttgacacaggctcacggatggatgatgttatttacgaagaattcaagggtactgggaacatggaattgcatcttgatcgtcaacttgctgaacgtcgtgtctttcctgcgattgatatgcgtcgatctggaacaagaaaagaagaacttttattatccaaagaacgcttagaacaactatggaaaatccgtaaagccatgccaaaacaaggtgatggacttgatatttcagaacgctttgtccgttacttaaagaaaaccgacaacaatgaagctttttatgaattactacaagaggaaatgtttaaaaaataa

SEQ ID NO: 24534 - DNA, 930 bp, Listeria monocytogenes
atgaaacggaaaataattgttggttctagacgaagcaagttagctttaactcagtctaattgggtgattaataagctcaaagaaaattatcctgaattcgattttgagataaaagaaattgttacaaaaggggaccgtattttagatgtaacacttagcaaagtaggcggaaaaggtctatttgtatctgaagtggagcaggctttaagtgatgaagcgattgattttgcggtacatagtatgaaagatgttccttcaagtttgaaagaagggttaattattggcgcgattccaaaacgtgaatctccattagattgctttgttttcaatcaagtgaattctctagatgagttaccacaaggctcggtcattggtacaagtagcctccgtagagcggcacaacttctaaaacatcgacctgattttgtgattaaaccgattcgaggcaatatcgatacacgtcttcaaaaattacatgcagaaaattttgatgcaattatcttagcaaaagctgggttagctcgtatgggttggttagaaaatactacattaaaactagaagacatcccaccagaagtatgtttgccagctgttggacaaggtgcacttgctatcgagtgtcgcgaaagtgatcaacaaatccgcgatatgttaacttctattcatcacgaagaaactggaatttgtgtagaagcagaacgtgttttcttgaaaaaattaaacggtggctgtgaaattccgattgcaggctttgctacaagagctaatgaattcgttcagtttaaaggtttagttggtaatgcggatggttccatcattcttgaatccgaacaagtcggtgcaaatccaagtgaaattggaaataaagtagcagaagatttgctaagtgaaggtgcagatactattatcaaagaactgagaaatgtatga

SEQ ID NO: 24535 - DNA, 1668 bp, Listeria monocytogenes
atgaaatttgttaaaaataatgagacagctgttttcgctcttggtggactaggcgaaatcggtaaaaacacatatggcgtacaatttcaagatgaaattattctaattgatgcaggaatcaagttcccagaagacgaacttttaggtattgattatgttattcctgactacagttacctggttaaaaacaaagataagattaaaggactttttatcacccacggtcatgaagatcatatcggtggcgttccttacctacttcgcgatcttaatatcccaatttacgctgggaaacttgcgagtgcacttatccgcaacaaattagaagaacatggcttgcttcgtcaaaccaaaatttatgaatatgaagaagatgacgtttttaaattcagaaaaacaagtatctctttcttccgtacaacccatagtattcctgatacgtatggtattgttgtcaaaactccatctggtaacatcgttcatactggtgacttcaagtttgattttactccagttggcgaaccagcaaacctaacaaaaatggctgaaatcggtaaagaaggcgttctttgtttactatctgatagtacaaatgcggaagtaccaaatttcaccatgagtgagcgtgtcgttggcgaaagtattaaaaatattttccgcgatgtagaaggacgaattattttcgctaccttcgcatctaatatctaccgtttacaacaagtagtggaatcctctatcgaaactggtcgtaaaatcgctgtttttggtcgtagtatggaatctgctatggaaatcggtaaacaattaggctatattcaagcgccaaaagacacatttattgatgtgcatcaacttaataaaacacccgctggaaatgtgactatcctttgtacagggagtcaaggtgaaccaatggctgctctttctagaattgctaacggtacgcaccgtcaaatccaaattcaaccaggtgacacggtagtcttctcgtcttccccaatccctggtaatacaacgagtgtaaaccgaacaatcaatttactttatcaagctggtgcagaagttatccatggtaaagtaaacaatatccatacttctggtcacggtggtcaacaagaacaaaaactaatgctacgtttgatgaaacctaaattctttatgccgattcatggtgaattcagaatgcaaaaaattcatgcagagtctgctgaagaatgtggtgttccggaagaaaatagctttattatggcaaacggagatgtactcgcattaacgagtgaaacagctcatgttgctggtaaaatccatgcagcaagcgtctatattgatggtagcggtattggcgatatcggtaatattgtccttcgcgatcgtcgtattctttctgaagaaggcctcgtaatcgttgttgtatccattgatatgaaaaattctcgtgtgatggcaggacctgatattatttcacgtggcttcatttatatgcgtgaatccggtaatctcatcggagaagcgcaaggcctcctaacgcgacacttaaacaaagtaatggaacaaaaaacaacgcaatggtctgaaatcaaaaatgaaattacagatactttgcaacctttcttgtacgaaaaaacaaaacgtcgtccaatgattttaccaataatcatggaagtatag

SEQ ID NO: 24536 - DNA, 588 bp, Listeria monocytogenes
atggctaaggttgtggcaattattggtgatccacgagaaaaaggtacatcaagggatttatttcagaagtatttgtcattttttcaagaacacccaacaatcgaagtgaaaatctatgatattcgcgaattagcttttgaccctaatttacctgaaggctatcgtactgagcagacacctgaaataattgcgcttaaaaatgatgttcattccgctgatttacttctattttcttatccagtttggtggtttaacgtcccagctgtcttgaaaggtgtcattgatcatttattttggcgtggggagagctatagttttaaagataaaaaatatttccttactggaccttggcgaaaaaaacgagcgcggttgatttatacgattggcggaatggaaatacagcatcgtcttttcggtcgtccagcacttactgccttacgctatcctttatggatgagcggcgtgttttcagtgaaggtcacttcgattgatcgactagatctttctattagaagaaccgataactactataataaaaaagttactcatgcagcaaaaaaagatattcaattcttgctaaaaaagtaa

SEQ ID NO: 24537 - DNA, 1416 bp, Listeria monocytogenes
ttgtcgatacaaatttttaatacgttaaaacgagagaaacagccttttaaaccactcaaagatggtgaagtgaaaatgtacgtttgcggacctactgtgtataactacattcatatcggaaatgcgcgaccaattattgtttttgatacggttcgacgttattttacgtatcgtggttatgatgtgaaattcgtgtctaattttacggatgtggatgataaattgattcgtgcggctaatgaacttaaattgacagttccggaagtggcagatcgctttattggtgcttattttgatgatgtcgatcagctgaatgtggcgaaagctagcgtgaatccgcgtgtaacggaaaatatggatgaaattatccaaatgattagtacgctaatcgaaaaaggctatgcgtatgagtcggctggtgatgtgtatttccagacgaaaaaattcaaagattacgggaaactctctggccaagaattatcggaattgcagcacggggctcgggttgaatataatgagcgtaagcaagatgagcttgatttcacgctttggaaagcggctaaaccaggtgaaattttctgggaaagtccgtttggtaatgggcgcccgggttggcatattgaatgctcggcgcttgcgaaaaaatatctgggtgacacgattgatattcatgcgggtgggcaagatttagtatttcctcaccatgaggatgagattgctcaatctgaagcggcaactgggaaaacgttcgcgaactactggatgcataatgcctttttaaatattgatggggaaaaaatgtccaaatcacttgggaattttattacgcttcatgatgtgctgaaagataatgacccaaatgtgattcgtttcttcatgttatctgtacattaccggaagccaattacgctgaatgatgcgattttagaagatgcgaaaaatggtttggaacgattaatgattgcataccaaaatattgatcatcgtattcaaacagatgacggtgaatatgtggaagaagcgcatgaggacgagtggctagaacaactaacggaattaaaacaagcttttgaagatgatatggatgatgatttcaatacagcaaatgcaattactactttccacgaacttgcaaagcgtgccaatatttacttggcgaaagaaactgtttctatcaacgttctgcgcgaattcttaagcatgatgcgtttgtttgcggaagtgctaggtttaaaattagagaatacgcaaacagattcgctggacgatagcgaggtagaagcgttaatcgaagaacgtctgcaagcgcgaaatgaacgcaattttgcacgtgctgatgaaattcgagacattttaaaagaaaaaaatattatcttggaagacactgcgcaaggcacgcggtttagacgggggtaa

SEQ ID NO: 24538 - DNA, 1323 bp, Listeria monocytogenes
atgatgaaaaaaacaggatttcgctcatttatactaaccattttagtcgtactcagtattgtcctaagctactttatttggaagggacaacctgattacgaagcaattaatgtaaaagaagttgaaaaaacaacaattgacaagacaatgacaacctcgcaagtattcaaaccatacaaactagctgtaaacgcaaatgaaaataattaccaaagtttagatgctgatttattaaacgaactaatggcgcaaggtaaagcctttagtttctcggaagtagtattagctagtaaaaaaagtagtgaagactatgagaaattaatccataaaaatggaactatcgagattattttccccaataatattccgttctctatctttgctcaaatttttcaagtagaaggggaagggcttgagtcagcgttctttaatcgaattgtttttgatattaacaaaacggatacagggctacattcggtttatttcacaaatgacgatcaagaaaatatttaccaaagttctttgcaaaataaagacattgataaaatcgaaaaaattgttaaaaagaatgaaagcaagctgactcaaaatgataagctaatttcaaacaaacgcaatcttttcctaagctctgaaaaaacgaaactaaatcgcaaaaaatatatcatcgattcgcttgaaattaatttattcacgtccgcactattccaagattctggtactgttaaaagtgaaggaaacacatacacagatggttcaagtgtcattgaaatggatacagataataaagtattagagtatgtaaatccatcacaagaacgtactaatccagaagacctcagcagtgttaaacgagctggacttattcaagatagttttaactttgtgaacgaccatgctggctggactggtgacggcgcttactatttcacaggttatgccgcggaaagtgcgacgactaatttcagtttattcatcgataatttacaagtgtacaatgagaatggtatggcggatatttctgtaacagaaggacttgaagctgtttataagtacatgaggccatttttccgtttagatacagatgttccgggagagaaaaaagaagttacgttaccatcatcttattctgtctatagtgctcttgcccaaaatcctaacgttaaagcagaagaaattgaagatattgttcctggttatcatatgactaggagcgaatcttcaggcatgaatcgtcttgtgacattagagccgacatggctgtataagtatcatgacaaatggttcatcttccaaccagacgcagaaaaggcgggtgaataa

SEQ ID NO: 24539 - DNA, 459 bp, Listeria monocytogenes
atgaacaatgagcaaaacatgaatcaacaaatcgctttattttacttcggctataaagcatttacagagaccgctgatttaattattgccaaacattcactcaaaagattacatcatcgtattttatttttcacagcgcggatgcctggacttacaattaatgaactcttaacttttttagagatatcaaagcaagccttgcaccagccgctcgctgaactgaaagagcgcgaacttctcacgattgagcaaggcagacgcgacaaacgccaacgctgcatcttcctaacttcggcaggtaaagaactcgaaaacgaacttggcgctgcacaacgcaaacaaatgtccgaaatattcaccaattccgccgatacagacggaatgcattttactgaagtaatggaaggctatgcgaaaaaccgaccaggtgccgcttttataaaagattttaaggagtga

SEQ ID NO: 24540 - DNA, 675 bp, Listeria monocytogenes
atgttgacacatgaaatatcagagaatgaaaaaccacgcgaaaaacttcagaattatggtatagaagcactttcatcttcggaactggttgctttaattattgaaacaggaactaaaaatgagtcagttttgacgatagctaatcgaatcatcatgaagttcaaaaatgtgggtgaaatgcaatatgcttctatagaagaatttcaattagttaatggtattggaatagcaaaagcttctaaaatcatggctgcgattgaactaggaaggcgtatcagcatcgtaacggagcaggaagaagtggttgttaggtgtcccgaagatgcagtaaaacttgtaatgccagagcttgcttttctgtttcaagaacatttccattgcctatttttaaataccaaaaatcaagtaatatatcggcaaacgatttttgttggtggtctgaatgcttccatcgttcaccctagagaagtttttagattggcgctcagaaaatcagcagcgtcaattatgtgctttcataaccatccatctggcgacccgactccttctagtgaagacttacttgtaacaaaaagattagctgaagctggcaatattgtcggaattactttactagatcatattatcattggcaagaataagtatattagtttgaaagaaaaaggttacttttaa

SEQ ID NO: 24541 - DNA, 273 bp, Listeria monocytogenes
atggattcaaaagatcaaacaatgttttacaacttcggcgatgattcaattgaagaagatgtaaaaaaattaatgaaacaagtctacgttgctcttgaagaaaaaggctataatcccgtaaatcaaatcgttggctatttactttcaggcgatcctgcttatattcctcgtcacaaggatgctagaagtatgatacgtcgtttagaacgagatgaaattatcgaggaacttgtcaaagcgtatctgaaaaataacgaaattggtgagaaatga

SEQ ID NO: 24542 - DNA, 3201 bp, Listeria monocytogenes
atgaaatggattatgaaactccgctgggccattttagcgttttggcttgcagcagcagtcgtactaatgtttattgcaccacccatggcagatcttgtacgcgaaaaaggcgaattaaagctgcctgatggctatccgtcatcactagcaacggaaatgcaaaagaaacataatccagatgacaagggttcagcttacattgctgtttatacagccgaccataagttaactggaacagaattaaacgatatccagaaatcactcgactctatcgaaaaagataaagacgaacttcacgtaacaaacgtgttatcaagctttaaccaaccagagcttaaagataagtttttagcaaaagatggtaaaacaatggtagcaagtttaaccgtagatgatacggatgcttcggttaaaagcatacgtaacgcactagacaaaaaaatggatgtaaaaggtgttgacacgtatttaacaggtaataaactaattcaagaagacgtagttcaagggtctgaagacggtttacataaaacagaaggcatcactgttgtctttattttagtcgtattattccttgtattccgctcagcagtggcaccgtttattccacttataacagtaggaattagttacctcgttgcgcaaagtactgtagcattcttaattgatatctttaatttcccagtctctacgtacacgcaaatctttatggtttgtattatgttcggaattgggaccgactattgtattctcttaatgagtcgatttaaagaagaaatgggagccggtctcaacccacgagaagctgttcatgcaacgtatcgtacagctggaaaaacagtcatctatagtggtgtagctgttctagtagcatttacttcactttattttgttcaatttgatttatatcgttctgcagtggcagtcggcgttggaattgtcgttttactagctgcactttacacgctcgtaccattctttatgagtacgctcggaacccatttattctggccattaaataaaaatattagccataaagaaaataaaatttggggcgccgctggtaaatttacttttgcaagaccgtggattgctttattaatcgttgcagctatcacgttgccgccaatcttactgcatacaggaacagaatcattcaactcactagacgaaattagtgacaaatatccttccaaaaaaggttttgaaatcgtatcggatagttttggagcagggcaagttgcgccaacacaaatctttattgaaaatgacgataatatgcgtacaacagattacatcgctcaaattgaaaaaatttccgatgatttatctcatttaaaaggcatcgatatggtcatgagtgcttcacgtccagccggaaaacgagtagatgatatttacattaaaaaccaagctggacaagtaaacgacggcgtaggtcaagcgactgatggcgtaggagaagtgaaaaaaggtttagattcagcaagttcagaactcaaaaaatcagagccggcccttgataaagccgttgcaggagttggtgacttacaaaaaggcactgtcgcaacacaagaaggaattaaccaattacaaacagcccttgcacaaattcaaaaaggcattgaaagcggagcaactggagctggcgacttaaaacaaggtgtagcagaagccaaatcacaactagctacgttacaaaatggagaagcgcaaatccaagctggatacgctgagattcagaaaaacttacaaaatgtagctgaccaactaaaaggttttgaaaacccaagctctcaagcaattgatacttccaaactagaagagcaattcaaaaaaatcggtgcctctttccaagcattcgcagcagcgcatccagaagtgagaaatgaccctcgtttccaaaaactagccgcagatattcaaggcttagaaacagctggaaacgaactgaaaacctctgctggacagcaaatggcagcacttcaagcaaaaatgaaagaactaaatcaaggtatccaacaactcgcaacagcgatgaatcaattaaacgagcagtccaaacaaatttcggatggacttagcgcttttagtacaggccttggtcaaatcgaaacaggactagatcaattagaaaaaggccttaaccaagcagcagttgggcaagggcaagtagtttccaaaatgccggaagtctctaatgctctaacgcaaatcgctgctggacaaggtgccttaaaagacggatttgcaggcattagcggtcaaatgggtcaattaacagatggtttaacttcaggtgcagatggattaggcaaagtagaaagtgggctaaacacagcgaacggactaattgatgattggtcaaaagttccttacgcaagttccggaatttatgtaccggatgcgctactaaaaaatgctgatttccaaaaagtattagatcaatacatctcatctgatggaaaactggcaactattaacgtgattttgactaaaaatccatactctaatgaagcgatggattcgattgatgacattaatgaccaacttgcagccagtatgaaagggaccaaactggaaaatgcgaaaataggtattggtggaatgacgagtgccaattatgatacgagagatatgtcaacagctgactatcatttggttcttgtgatcgttctagcgagtgttttcgtaacactagtcattgtcctacgttccctagtaatgccgatttatctgattgcatcactcgtattgacgtactttgctgcacttggatttgcagaaattatcttcatgcgaattctaggatacagtggtctaacgtgggcaacaccgttcttcggatttgtagtgctcgtcgcgctcggtatcgattattcgatattcttgatgtcgagatttaacgaatacaacggactttctgtacgcgatagaatgataaaagccatgaaaaatatgggtggtgttattttctcagccgtcattattctcgggggaacattcgccgcaatgatgccagctggcgtactttccttacttgaaatagcgactgtcgttctaatcggcttagtactttacgccgtagtaattctaccgctcttcgttcccgtaatggttaaactattcggacgaggcaattggtggccatttatcacaagaaaaggcgaccatcaagaaaacgtaccaccgaaaaaataa

SEQ ID NO: 24543 - DNA, 1122 bp, Listeria monocytogenes
ttgagcattaatgaaattattatttatttaatggtaatctttatgattctaggagccattgacaaaattatcggcaacaaatttggcttaggtgcacaatttgaagaaggtattatggcaatgggttcgctaactttagcaatggtcggtatcattacattagcaccagttttagcaaaaattttaagcccgattgttgtaccaatttatacggcacttggggctgacccggcaatgtttgcaacaacgttacttgcgaatgacatgggtggttttgcgctagctcaagaacttgcgctaacccctgatgctggtctttttgcaggagccattttaggatccatgatgggaccaacaatcgttttcacaattccagtagcactaggaattattaaaaaagaagatcacaaatatttagcaacgggtgtattatctggtattattacgattccaattggttgtttaatcggtggacttgtagctggattctctccaatcatgattttcaaaaacttagtaccaattattcttgtagctgcccttattatgttaggcctttggttcaaaccagaaggcatgattaaaggcttcactatttttggaaaaggggtagtaatcgttgctactattgggctagttgctggagctattcaacaacttactggtttaactattattccaggaattgcgccaattggtgaaggtattgaaatcgtaggtggaatcgcactagttctggctggggcattctgtttggtcttcgtcattacgaaagttttcaacaagccacttatgaaaatgggtaaattgctaggtatgaatgaagttgcggcagctggtatggttgctacacttgcaaatagtatcccaatgttccaaatgctaaaagatatggacgaacgcggtaaaattattaacgttgcttttgcagtatctgcggcctttgttttaggtgatcatctaggatttacagctggggttgcccaagatatgattttcccaatgattgtcggaaaacttgtcggaggagtaactgccgtagctgtcggtatctatatggctaaccgaatgatgaagaaaaataaagcaaaagaacaaacggcggtgaaagataatggctga

SEQ ID NO: 24544 - DNA, 1815 bp, Listeria monocytogenes
atgaaagaagtcaactaccgagaagacgactggcgtgaagccaaaagtgccctcgctccatttgccgcagcgaattgggtaggcggtttattcaataatttagaaaaagtatcgaaaaatatggaagaagcggaagaagatgtccaagagttggactcagaccacgcgatttcgtttcaacacaccaactatcgcgggaagtacagcgctatcgaagacgatttgatggtattgtataagtttagttgtcatgcaggggaaaagatggaaaccctggtagaccaaccgttctatgagaagttagacgcgtttgtggatggcatgcaagatttgagtatttcgacgtattctaccaccaaccggattggtgcgaagtcgaaacaaacctatacaactacatctggcggttcgcaagtcatcgagtccatcaaagaaggtgcgacgatcgaagatttgatgaatggcgataacttctacgcaaaccaaatgcaactacaatacagggactggcaacgagcgaatccagatcaagatgtgagtaagaaagactttcaaatgggaatgttacatagtcgggcatttgaatataaatcaattaaagatgaacaacaagagaaagaattttgggtcaacattgtggcaaccgtggtgattgtgggagtcagtattttctgcccacccgccggccttgccttagccgtaggatacgggagtttagaagctggttcggcaatcagtgggaaggactgggtatctggccgtgaactaagtacagaagaacgagcgcttcgtggcggtttagcactgctagatatcgttccaggtgtgaaagcattgagcacaggagcgaaagctgccagtgccggctcgaaacttgtccgcgtaggcgataatgttttagcaggtagcaagaacgtcggcaaaggaaccatcgacaatggcattcaagcaggaaaacaagcgatggatctccggttagccaatgcgaaaaaagtcagcgaagctgtccaaaagaaactcaccaaagaccttgacgatatcggcacgatggccaaaaccatccaaaacaaaaccaaagaaaccttcacacttccaccgagagagcaactcgcctttgcgagaggaggcagtattccggaacaaagcgccaccggagccgccgcgatagccgcgaagaaaaagctgaaagatattatgcagaacatggataatttgaatgtgaagggcggcgggaaagatgatataattgaacaaaataaaagccttaagtttacttcattagaggaatccgagaaatggggaattgatggtttttcagtatggagaaactctttatcttctcgtgaaatccaagctattagggactatacagacatttggcattatggaaatatgaatggttatttaagaggaagtgtcgaaaaacttgccccagataatgcagaaagaattaagaatctaagcagtgctttggaaaaagcagagttacctgataatataattttatatagaggaactagttctgaaatattggataactttcttgatttaaagaatttaaattaccaaaatttagttgggaaaacaattgaagaaaaaggatttatgagtacaactaccataagtaatcaaacgttctcaggaaacgttacaatgaaaatcaacgctcctaaaggtagcaaaggtgcatatctagctcattttagtgaaacacctgaagaagcagaggtattgtttaatatagggcaaaaaatgttaataaaagaagttacggaacttaacggcaagatagaaattatagttgacttattataa

SEQ ID NO: 24545 - DNA, 2463 bp, Listeria monocytogenes
atgatgtttggacgatttacgcaaagagctcagaaagtactcgcgttgtcacaagaagaggcgatgcgtttgaatcatagtaatttaggaacagaacatattttattagggcttgtaagagaaggcgaaggaattgcggcgaaagctctctatgaactgggaattagttctgaaaaagtgcagcaagaggtagagggattaattgggcatggggaaaaagctgtgacgacgatccaatatacacctcgtgcgaaaaaagtaattgaactttccatggatgaggctcgtaaattaggccatacttacgttgggacagaacatatcttacttgggcttattcgtgaaggcgaaggagttgcggcacgcgttttaagtaatcttggtattagtttgaataaagctcggcagcaagttctacagctcttaggcggcggtgatgctactggggcggggagacaaacaaatacgcaagctacaccgactttagatagtttggcacgtgacttaacggttattgctcgggaagataatttggatccggttattggtcgttctaaagaaatccaacgtgtgattgaagtacttagtcgccggacgaaaaataacccggtactcattggggaacctggtgtcggtaaaacagcgattgctgaaggcttagcgcaacaaattgttcgtaatgaagtacctgagaccttacgtggaaaacgtgtaatgacattggatatgggaactgttgtggcaggtacaaaatatcgtggtgaattcgaagaccgtttgaagaaagtaatggatgaaattcgccaagctggtaatgttattctatttattgatgagttgcatactttaattggtgctggtggggcggaaggtgcgattgatgcatcgaatatcttgaagccacctctagctcgtggagagttgcaatgtattggggcaacaacgctggacgagtaccgtaaatatattgaaaaagatgctgcgcttgagagacgtttccaaccgattaaagtagacgaaccaactgtagaagaatctattcaaattttacatggattgcgtgatcgttatgaagcgcatcaccgagttgcaattacggatgaagcacttgaggccgctgttcgtttatctgatcgctatatttcagaccgtttcttacctgataaagcgattgatgttatcgatgaatctggttctaaagtacgtttgaaatcttttacaacgccaaaaaatgtaaaagaaatggaaaataatttatccgatttgaaaaaagaaaaagatgcggctgttcaaggtcaagaatttgaaaaagcagcgtcattacgtgataaagaacaaaaactcaaaaaatcattagaagaaactaaagcgaattggcaagaaaaacaagggcttgaccatagtgaagtaacagaagatattgtcgctgaagtggttgctagttggactgggattccagttgcgaaacttgcggaaacagagacaaataaactgttaaatatggaaaaacttttacatgaacgtgtgattggacaagatgcagcggttaaagctgtatcgctagctgtacgtcgagctcgtgcaggccttaaagatccgaaacgtccgattggttcctttattttccttggacctactggtgttgggaaaacagaacttgcgcgtgcacttgctgagtcgatgtttggcgatgaggattcgatgattcggattgatatgtctgagtacatggagaaattttcaactgctcgtttagttggggctcctccaggttatgtaggatacgaagaaggtggacagctgacagaaaaagttcggcaaaaaccttattcagtagtccttttagatgaaattgaaaaagcacatccggatgtatttaatatgttgctacaagtactggatgatggacgtttgactgattctaaagggcgagtagttgattttagaaatacagttatcattatgacttccaatattggagctcaagaaatgaaacaagataaatcaatgggctttaatgttactgatccacttaaagaccataaagcgatggagcaccgcgttttacaagatttaaaacaggcgttccgaccagaatttatcaaccgaattgatgaaacaattgtattccattcgctgcaagaaaaagaattgaaacaaattgttactttactaactgctcaattaacaaaacgcttagccgaacgcgatattcacgtgaaattaactgaaggtgcgaaatccaaaatcgctaaagatggctacgatccagagtacggagctcgtcctttaaaacgggctattcaaaaagaagtggaagacatgctttctgaagaattgcttcgtggtaacattaaagtaggcgattacgttgaaattggtgtgaaagatggcaagttagaggttagaaaaaaagatgctcctaaaaagaaaacaacctctaaaaaagtaaaagctaaataa

SEQ ID NO: 24546 - DNA, 504 bp, Listeria monocytogenes
atgaaaaaagtatttatcacaacaggaacggagcactaccttcgtcaattaatggcgaattatactggcggaaatgtgacacttctgcaaaacttttcccaatcacttttgtatcaagagtcgactggtgaaaaacttttccaagaaggtgctgagtatcgagtattgcaaagcagtggttccataaaaggttttggagtagtcgtctttgaatatatccacctccgcgatgaagaaatccctattttcttgcaaatgtatcaacgagctagtcttcattttagtgaaacgcctggcttgcaaagtacaaaactcacaaaagcgatgaatatgaataaatttttaattatttccttttgggattctgaagtattctttcatgactggaaaaaatcacctttatcaaaagaaattacaaatatcatgagaaaaaataatactcaatctggattctcacatgaagatatttatcattatccagaattttcccatgatgctaaatag

SEQ ID NO: 24547 - DNA, 1671 bp, Listeria monocytogenes
atgaatgtcatgcaagagaaccaaatcaaactaattgaacatatcaaacaagcagttgttcaagcggttggtttagaagaaacagaagtaccagaaattttactcgaagtacctaaagataaaaagcatggagattattcgactaatattgcgatgcaacttgctagagtagctaagaaagcccctcgtcaaattgccgaaagtatcgttccagaactaaaaaaagacaacaaattaattaaagaagtagaaattgctggacctggttttatcaacttctacttagataatgcttatttaactgatttagttccagttattttaaccgaagataaaaaatacggagagtctgattttggtaaaggagaaaaattccaaattgaatttgtttccgctaacccaactggtgacttgcatttaggacatgctcgtggtgcagcaattggcgactcactagcaaatataatgaaaatggccggatttgatgtttcaagagaatactacattaacgatgctggaaatcaaatcaataatttagttctttcagcagaagcacgttattttgaagcgttaggcttagaatctgaattcccagaagatggttaccgcggtgcagatattatctcccttggaaaagatttagctgctaaatacggcgataaatatgtgcacacaagcgaagaagagcgccgttccattttccgtgtggatgctttagcatttgaaacagggaaattacgcgctgacttagaagaattccgcgtttcttttgatgagtggttttcagaaacatctctttatgaagaaaataaagtgctaccagcattagaacgtttacgcgaaaatggctatatttatgaacaagatggcgcgacgtggttaagaacaactgattttgaagatgacaaagaccgtgttttaatcaaatcggacggtagttatacgtatttcttaccagatattgcttaccacctaaacaaattagagcgtggctttgatgtattaattgatatatggggagctgatcaccacggttacattcctcgaatgcgtgcggcgattgaagcactgggttactcacccaatcaattagaagtagaaattattcaacttgttcacttattcgaagacggtgttcaagttaaaatgagtaaacgtactggtaaatctgttacgatgcgtgacttgattgaagaagttgggcttgatgcgacgagatatttctttgcaatgcgtagttcagatacacatatgaactttgatatgagtttagcgaaatccacgtctaatgataatccagtttattatgtacaatatgcacacgccagaatttctagcattttacgttctggtaaagaacaaggtctagaggtaacaaaagacgctgacatgagcttactacaaacagaagcagaatatgatttattaaaagtgttaggtgagttcgcggacgttgttgcggaagccgctgcaaaaagagcgccacaccgtattgtccgttacttaaatgatttagcatccgccttccaccgtttctacaatagcaataaagtacttgatatggataatttagaagtaacaaaagcaagactagcacttattaagacagcacaaattactcttagaaatggtttgacgcttttaggtgtatcagcaccagaaaaaatgtga

SEQ ID NO: 24548 - DNA, 714 bp, Listeria monocytogenes
atattaaatcaaaaatatcaattactacttcataatgaatatgacacaaaaagtggtgatttagtcaaaaaagaaatagttgcaactaaaaaaactaaaaatctcttggaagatctaacttcgcatttgttatgtgttacaaatcaaatagagtatggaaaatttatcacttggtatgaaatggaaattaaaaaagttctacaagttcatcccaatcagcactttattattaaaatttcctttcaacaattatattttcgggaaacaatgctgttgcttgagaatttacagaaagatagccggcgactaacgattgagctagttggagatagtcagattagcccttattcaaaggaacatttttccgcagaggacagtgatgcttttttgaaagggaagttaaaaatgttgaaaaagtggcattattttatttcaaagcatattgaaagtggtgccatcgaacaaacactgatttttacgccctatattgatgaattgaaatatagtttaacgcaaaagtcgaagctcttacacaatattactgaattaaagttttttctatcattttggaaaaattgggctgagcttcgatttgttgattttttagttttagtagatgaaaaaaacgaatttgtatcgcatgtgcttttaccagatgaattaaatgtacgttgcaaaatgtatgagaactttggaggaatggtcagtgagtaa

SEQ ID NO: 24549 - DNA, 312 bp, Listeria monocytogenes
atgcatgtcaaaaaaggtgataaagtaaaagttattactggtaaagataaaggcaaatccggcaaagtgctcgcagcatttccgaaaaaggatcgcgtacttatcgaaggaatcaatatggttaaaaaacatacaaaaccttccaacgtcaacccgcaaggcggaatcttgaatgttgaagcaccaatccacgtttcaaacgtaatgctaattgaccctaaaacaggtgaacctactcgtgtaggatacgaagttaaaggcgacaaaaaagtacgcgtagcaaaaaaatccggtgaagtaatagataaataa

SEQ ID NO: 24550 - DNA, 1557 bp, Listeria monocytogenes
ttgtttaaaattatgaaagactttaccgagcaagagaaaattatcgttctagattttggtagtcagtacaatcaactaattacgcgccgcattcgtgaattcggtgtgtacagtgaattacatccgcatactattacagttgaagaaatgaaagcactaaatccaacggggattattttttcaggaggacctaacagtgtgtatgacgaagatgccttccgcgctgacgaaagaatctttgacatgggaattccgattttgggaatttgttacggcatgcaattaatgacaacgcacttcggtggcaaagtagaacgtgcgaaagaccgcgaatacgggaaagcggacattcacgttgagaagccaaaccgtttatttgctggactaccaaccgatcaagttgtttggatgagtcacggcgatttagtcgttgaggagcctgctggttttgaagtaacagttactagtaaatcttgcccaattgcaggtattgcggacgaagaacgttcactttacggcgtgcaattccacccagaagtacgtcactccgtttatggcaacgaattactgaagaattttgcattaaatgtttgtggctgtaaaggcgactggacaatggaaaactttagtgaagtagaaatcgcaaaaatccaagaaatcgtaggcgacaaaaaagtcttgcttgccctttctggcggtgtagattcctctgttgttggcgtgttaattcataaagcaataggcgaccaactaacatgtattttcgttgaccacggccttcttcgtaaaggggaagctgaccaagtaatggagacattacaaggcgaattcaacatgaacatcatcaaagtagatgcgaaaaaacgcttcatggacaaacttgctggcgtttctgacccagaacaaaaacgtaaaatcatcggcaacgaattcatttacgtatttgacgatgaagccaacaaattagatggcgtagaattccttgcacaaggaacactctacacagacatcatcgaaagtggtacagcaactgcccaaacaatcaagtctcaccacaacgtaggcggcttaccagaagatatgcaatttaaactaatcgaaccattaaatacacttttcaaagatgaagttcgcgcactaggaaccgaacttggcatgcctgacgcaatcgtttggcgccaaccattcccaggcccaggcttaggaatccgtgtgcttggcgaaattacggaagagaaattagagattgttcgtgattctgattacatcttgcgtgaagaaatcaaaaacgcaggtctagaacgcgaaatctggcaatactttactgctcttccaaatatccgtagcgttggtgttatgggtgatggtagaacgtatgaccatactgtggttgttcgtgcagtgacgagtattgatggtatgacagccgattgggcacgtattccgtgggatgtactggagaaaatttcggtacggattgtgaatgaagtggatcatgtgaatcgtgttgtttatgatattacgagtaagccaccagctacggttgagtgggaatag

SEQ ID NO: 24551 - DNA, 1335 bp, Listeria monocytogenes
atggcaaaatatacaaaagaagacattttccgcttcgcagatgaacaaaatgtaaaatttattcgtttacagttcacggatattctcgggataattaagaatgtggaaattcctgttagccaactaaagaaagcactagataacaaaatcatgtttgatggttcctccattgaaggctttgtaagaattgaagagtctgatatgtatttattcccagacttagatacttgggttgtattcccttggacagctgaaaaaggaaaagttgcaagaatgatttgcgatatttataatcctgacatgactccattcgccggagacccacgcgctaacttaaaacgtgtacttaaagaaatggaagagttaggtttcacagaatttaacttaggacctgagccagagttcttcctatttaaattagatgaaaatcgtcgtccgacgcttgaattaaatgatagtggtggttacttcgatttagcgccaacagatttaggtgaaaactgtcgacgtgatatcgtgcttgaattagaagagatgggctttgaaattgaagcatctcaccatgaagtagctccaggtcaacacgaaattgattttaaatatgaagacgccgttacagcgtgtgatagtatccaaacatttaaattagtcgtaaaaacaattgctcgtaaacatggtttacacgcaacatttatgccgaagccactctttggtgtaaatggttccggaatgcacttcaatatgtcgctatttaatgaaaaaggaaatgctttcttcgatgaaagtggcgaactagaattgagccaaacagcttatcatttcttagcagggatgttgaaacatgctcgtggctatacagctgttacaaatccaacaattaactcattcaaacgattggttccaggatatgaagcgccatgttacattgcgtggtcaggtaaaaaccgtagcccgcttgtacgtgtaccaagttctcgtggactaagcacacgtcttgaattacgtagcgtcgatccatctgctaatccatatttagcaatggcggtactacttaaagctggtttatctggaattaaagatgaattaactcctccagcaccagttgatcgtaacatttacggcatgaacgaagaagaacgtgaagcaactggtatttatgatctaccagaaagcttaggacacgcattaatcgaacttgaaaaagacgatattatcaaagctggtttaggtgaacacattttcgaacactttattgaagcaaaaacaattgagtgtgatatgttccgcacagcagttcacccttgggaacgcgaacaatatcttgaaatttattaa

SEQ ID NO: 24552 - DNA, 273 bp, Listeria monocytogenes
atggcagttaaaattcgtttaaaacgtattggttctaaaaagaaacctttctaccgtattgtagtcgctgattctcgtttcccacgtgatggccgttcaatcgaaactattggtacttataatccattacttgatccggttgaagtgaaaatcgacgaagaagcaactttgaaatggatgcataatggtgcaaaaccatctgatacagttcgcaatcttcttagccgcgaaggtatcatggaaaaattccataaccaaaaattaggtaaataa

SEQ ID NO: 24553 - DNA, 2766 bp, Listeria monocytogenes
atggaatataaagatacgttattaatgccaaaaacagattttccgatgcgtggaaatttgccaaacaaagaacctgaatggcaagcaaaatgggaagaagaaaagctatatgagaaaattcaagaaaaaaatgctggacgtccgacgtacattttgcatgatgggcctccttatgctaatggtgagcttcacatgggtcacgctctaaacaaaacaatcaaagatattatcgttcgttataaatcaatggctggcttcagctccccgtatgttcctggttgggacacacacggactaccaattgagacagctatcgccaaaaaaggcgttaaacggaaagagatgtctattgctgaattccgcaaactttgtgccgaatatgcgatgaaacaagtagacggtcaacgtacaggattcaaacgtcttggaattaatggtgactgggaaaatccttatatcactcttttaccagaatatgaagcagagcaaatcaaagtcttcggtgaaatggcgaaaaaaggttacatctacaaagggaaaaaaccagtgtattggtctccttcaagtgaatctgcacttgcggaagcagaaatcgaatatcaagataaaacatctgcgtcgatttttgtggctttcaaagtaacagacggaaaaggtgtactagatgaaggaacgaatattgtcatctggacaactactccttggacaatccctgcaaacatgggtatcacagttaaccctgatttggactatgttgtgattgaatccgctggggaaaaatatgttgtagcagaagcacttttaccaagcttacgtgaaaaactaggctttgaagatgcgacagttgtgaaaacggttcgtggttctgaacttgaccgcgttgtaacaaaacacccattctatgaccgtgattccttagtaatgaacggggaacatgctactgcagaagcgggtacgggcgcggttcatacagctcctggacacggggaagatgactttttaatcgggaaaaaatatgatttagaaatacttgctcctttagatgatcgcggtgtatttacagaggaagcaccagggtttgaaggcgtattttatgatacagcgaataaaatggtgacagaaaaactagaagaagtgggcgcattactaaaaatggaattcatcactcactcttatccacatgattggcgtacgaaaaaaccagttattttccgtgcaacagcacagtggtttgcttcgattgacgcattccgagatgatttactagctgctgttaaaggtgttaactggactccagcatggggtgaaacacgtctatttaatatggttcgcgaccgcggcgattgggttatttctcgtcaacgtgcgtggggcgttccactaccaattttctatgcagaaaatggagaagcgattatcacagacgaaacaatcaaccacatttcggaacttttccgtgagcatggttcgaatgtttggtttgagcgagatgttaaagacttgctacctgctgggtttacgcatccaggtagtccaaatggcgaatttacaaaagaaacggatattatggacgtttggtttgattcaggttctagtcatcaagctgtgctgaatgctcgcccagaattaagtcgtccagctgatttgtacatggaaggctctgaccaatatcgtggttggtttaactcctctttaacaacagctgtagcaatcactggcgaagcgccttaccgtaatgtgctaagtcatggttttgcacttgatggtgaaggtcgtaaaatgagtaaatctcttggaaatacccttcttccgggcaaagtaattaaacaacttggtgcggatattgttcgtctttgggttgcttcagtagattatcaagccgacgttcgcgttagtgatgaaatcttaaaacaagtatccgaagtataccgtaaaatccgcaacacaatgcgtttcttactaggaaatatcaatgactttaatccaactactaatacggtttcttatgaaaacctacgtgaagtagacaaatatatgctaattaaattaaatgatttagtgaaaaatgtgaaggatagctatgaagctttcgaattctctactatttaccaccaaatcaataatttctgtacagtagaattaagccaattttatatggactttgccaaagatgttgtttacatcgaagcggctgatagtcatgatcgtcgtgctatgcaaacagtcttttatgaagcggttgttacgttaaccaaattacttgctccaattttaccgcatacaacagaagaagtttggaatagcttgatcggtgaaggcgcggaaagtattcatttgcaagacttaccagatgtaaaagtattagctaatagcgaagaaattacagcgaaatgggacgcgttcatgcaaatccgtgataacgttcaaaaagctttagaattcgctcgtaacgaaaaattaattggtaaatcaatgcttgcaaaagtaactttatatgttgatggcgaagcgaaaacactatttgattctttagaaggtgattttgcacaactgtttatcgtttctgactttgaacttgtggaaggtttggaaaatgcaccagaatctgcattcaaatcaaatcaagtagctgttcaaattactgtagctgaaggtgaaacttgtgaacgttgccgtgtagtgaaaaaagatgtaggcgtaaatccaaaacatccaacactttgtggccgctgtgcggatattgttgtaaaacactacgaagcttaa

SEQ ID NO: 24554 - DNA, 801 bp, Listeria monocytogenes
gtgaaacaagctattggctttattgattcgggagtaggcggtttgacagtagtgcgagaagtgctaaaacagctaccccatgaacaagtatattatttaggtgataccgcacgctgcccttatggaccacgcgacaaagaagaagtagctaagtttacttgggaaatgactaattttctcgtagaccgtggcatcaaaatgctcgttattgcatgtaatacagcaacagcagcagcattatatgatattcgtgaaaaattggatattcctgtgattggtgtaatccaaccaggttcaagagcagcactcaaggcaacaagaaacaacaaaattggcgtattaggcacacttggaacagtagaaagtatggcttatccaaccgcgctcaaaggacttaaccgccgagtagaagtagattcgctcgcgtgtcccaaatttgtatctgtcgtagaatcaggtgaatacaaaagcgccattgctaaaaaagtagtagccgaatctctcttaccactgaaaagtaccaagattgatacggtgattttgggttgtacacattatccacttttaaaaccaattattgagaattttatgggagacggcgttgctgttattaactccggagaagaaactgctagtgaagttagcgcgttactggattaccataatttattagatgctacagacgaagaaattgagcaccgctttttcactacgggctcgacacaaatttttaaagatattgcaaaagactggttaaatatgccagatatgactgtagaacatattaaattaggaaaataa

SEQ ID NO: 24555 - DNA, 720 bp, Listeria monocytogenes
atggacgcagttagaaaaaatcgattatttcagcattctacaatggcagcacttgttggtgggcttttcagcggaacaacgagtttcaaagaattattacagcacggtgaccttggtataggaacacttgaccaatttgatggtgaattaattattttagacggggaagcttttcaaattcggtcagatgggcaagcttataaagtaaaaccggaagatacgacaccttatgcgagcactacttttttcgatgccgatacttctttttctgtctccgaaccgacatcaaaacaagcggtggaagaaaaaatcgcagaattagtacaaggaccgaatgttttttatgcagtgaaaatgaccgggaatttccgttatgtggatacgcgcgttgtaccaaaacaacaaagaccttatccgccactcattgaagccgtaaaagaacaaccaacgtaccattttgaatatattacgggtacgattgttggtttttggacacccgcttatattagcggtattggcgtttctggttatcatgtgcattttattgatgatatgcgtaaaattggcggtcatgtatttgattatgaaatgcttgaaggaacggtagaagtggcgcaacaaacggaattcgaacttcaattacctcaaacgacggaattcttaagaagtgatttaagtacgccggatatgttggaacagattgaagctgcggaaaattaa

SEQ ID NO: 24556 - DNA, 2178 bp, Listeria monocytogenes
atggaacaaatgcaagataaaataatgaaattagtccaaaaatcgctaacgtataaaccagcgcaaattaatgctgttatcaaattaatggaagaaggtaacacggttccgttcatcgcgcgttaccgtaaagaaatgactggtagcttagatgaagtagaaatccgtgatattgaagaaacatttgaatatgtaacgaaattagaaaaccgtaaagaagaaatcattcgcttaatagatgaacaaggaaaattaacagatgaactgagagcggcaatcgtcaaagctgaaaaacaccaagcgcttgaagacttatatcgtccgtataaacaaaagaaacgcacgaaagcaacaatcgccaaagaaaaaggcttagaaccactggctgaatggcttatgagctttccaagcaatgccgatccactgacagaagctgcaaactacatttcagaagaaaaagaagtggaatcagcagaagctgcattactcggcgcgcatgaaattattgccgaacaaatcagtgatgagcctagtttccgtgaatggattcgtaactttacacgcaaattcgggatgattgaatccagagcgaaaaacgccgaagcagacgaaaaaggcgtgtacgaaatgtattatgaatttaacgaaatgattggaaaagtagctagtcaccgtattcttgcttttaaccgcggggaaaaagaagatattttacgtgtacaagtccaagtggatacaacaaaaatcttccaatatttatttgaaaaagttatccaaaatcgcaattctgcaactcgtccttatgtagaagaagctattttagatgcctataaacgctttattggtccagcaattgaacgtgaaattcgcggcgaactaacagacaaaggtgaagaacaagccatccacattttctccgagaacttgcgcaaattgctattacaaccacctttaaaagggaaaatcatccttggggtcgatccggcttttagaacaggttgtaaattctctgtgttagatcaaacggggaaagtgcttgaaatcggtgttgtttacccacatacggctaaagcacgtcgcccagaagcgaaacaaaaaattgcagaaattttatcaacatatcaagtagaagttatcgcgattggtaacggaacggcatcacgtgaaacagagcaatttattgtggaagtgattcgtgaatcgaactccaatgcttattattgtattgtaaatgaagctggtgcgagtgtgtattccgcgagtgaaacagctcgcgaggagttcccagattatcaagtagaagaacgtagcgcagtttcaattggacgccgtttgcaagatccactagcagaacttgtgaaaatcgatccgaaatctgtcggtgtaggacaatatcaacatgacgtagcacaaaaacgtttaaatgaaacactaactttcgtcgttgaaacggccgtcaaccaagtcggtgtcaacgtaaatacagcatccgcctctcttttacaatatgttgctggtttgaataaaacagttgcaaataatatccgtaaatatcgcgaggaaaatggttcgtttgcttctcgtaaagagttgaaaaaagttcctcgtctaggcgcgaaatcatatgaacaaagtatcggcttcttacgtattttagaaggcgaaaacccgcttgataaaacagcgattcaccctgaaagttataaagcggcagaacaaattgttaaagcagctggttttggcttaaaagatatcggcagcgaagatttaaaagcggcattacaagcgcttagtatcccagaagaagcagagaaattaaccattggtaaagaaaccatgcgcgatatcattgataacttaattgctcctggtcgcgaccttcgtgatgaacttccagcaccacttttaaaacaagatgttatttcgatggaagatttaaaacaaggaatggaattacaaggaacagttcgtaatgtagttgactttggcgcttttgttgacattggtgtgaaacaagacggccttgtgcatatttcaaaactaagtaattcatttgttaaaaacccgatggatgtcgtttcagtaggagacgttgtaacggtttgggtcgatgaagtggatacaaagaaaaatcgtattgctttaactatgctaaatcctaatggaagtgttaaataa

SEQ ID NO: 24557 - DNA, 2403 bp, Listeria monocytogenes
atgaagccaagtatgaaacgacaaattgcgcaaactggtattattcatcgaccactccctattgaaaccgagcacgcattagaaactttagcgaaaaagaaacaagttttatcaagtagaacattatttagctctaaacagcatgtttctttagagtttacacatcaaggagcaggagattttactatttctggccaagatgaaattaagctttcttcgcctgtggttatgccacattggcccgctggtgctccggatgacggtgattatactaattttggtaacgttaccatatcggcgtcgattggaaatgaggactggagcggctttaatcgtgtgcgaatccaagttttccctgattttcctggagtgacaaacccctatttaatgattagttttaaaaacgacggaaccgtgaaagtgcctgatatatatgggcgagaaggtgttcatggtgtgaatttaatcaaccatgaatggaatgatgtcatttttgaaattgaaggtttaccgcgcgaccgaatgactgaaatgagttttagctattacttgaatggcccagagcgactgactgctggaacgatggaattatttattaatgaaattaaattagaacaaatcagtgagccggagatttccaagggctggcttccgcaaaataacacgctaatctattctcataacggttactccaaagacatgccaaaagtggcgttttgtgcgaacaagcatgctgcgactacatttacaattcacgacaaagaaacagacaaagttgttttcactggaaaaagttaccaaaatgcaacagaaactggcaatttcgttattcttgatttttctgatttacaaactgtgggtgaatactatttaaaatttgcggatatgcaaacggaaattttccaaattgggacttccgaagtgatctgggaatcttctatctggaaatcgcttaactttattttctgcgaacgttgcggttgcccggtttttgggaaacatacgacttgtcacgcagatattatcgctgaacatgatgggaaacagttgtcatttaatggtggatggcatgatgcgggcgatgtttcgcagcagcttattcaaacagcagaagtaacgatggctttatatgaaatggctgcgagtttacctgaaaaagaggaaacgttgcggatgcgccttttagaagaaggcgagtggggcctagatttcattttgaaaacgcgcttcggagatggttttagggcgactagcgcaggtatgacgagatggacggatgggcttgttggtgggatggatgatgcaattgcgcgcgttcataaccaagcttatgagaacttttattgtgccgggattgaagcgtatattggcagccaaattgcggataatgctactatgcagaatcatttgctgagaatcgcggaagaggatttgctttttgcgataaaggaactggaaaaacacggaacaagtcaaaagccgattttctgggagcatacgtatcaaacctcagaaagtctatattatgcgactgcttcttgggcggcttcgatggtttatcaactaacaaacaaagaaatatatgcagaaaaagcggccgaatggttagatttgatgctagaagcgcaagaaaaagctggaattagagacagcgaaactagcgaactttacaaaggatttttctaccgcgataaatcacacaaggtcattcaacattttaatcatcaagcacgcgaacatctttatttactggcgctagaggcggcgcttgaaacgcaaccgagtcacgctgaaaaacaaacttggctacaagcggtcgaaatgtacggcgattatttgaaaaaagtaacacgtttcactaaaccatacccgctcattccagcaggactttacaaaaaagatgagtatttagacgaagcaagtttccacttacaacatttactcattgatgaacgagcgatagaagaataccaattacaattcgagcaaggtatcaaaataaacgacgaggtagctttgcggaaattcccaatttggttctcgtttagaggaaataacgctattttactttcggcaggaaaagccgcatcaattgctgggaaaattttgaaagataaggcgcttttagatattgcggaaggtcaattgcagtgggtaattggaatgaacccatttggacaatcaatgatgcacggtgaaggttatcgctacgcacagcaatacagtgtactaaatggcgaaatcacaggagaaataccagtcggaatggaaacctttagaaatgaagatgaaccatactggccggagtttaataatgcaacttataaggaagtttgggtcggtaatgccggcaaatggatgtcaattgtagcagatttaaacaaaataacaggaaagtcatag

SEQ ID NO: 24558 - DNA, 669 bp, Listeria monocytogenes
atgactttaatgatgaaaaatattactaaaaattatcaagatggcgagcaagtcatcgaagtgttgaaaaatgtatctttagaagtagcgcaaggagaattcgttgcaatcgttggaccttcaggcgctgggaaaagtacatttttatccatcgcaggtgcattattatccccaacagaaggagaaattgctataggtggaaaagtgttaaatgaccttacaagcaaagacttaacaaaagtgcggctcgacaaagtagggttcattttccaaggtgcgaacctaatcccgtacttaaatgtccgtgatcagttactcgtaattgcggaactatctggtgataaagggcgagtagcaaaagaaaaagcagatgaattacttaaagaattaggtttaactgctcgcgaaaacaattatccggaaagtttatcgggtggtgaaaaacaacgtgtcgccattgctagagcactaatgaacgaccccgatattattttagcggacgaaccaaccgcaagcttagatgcgagccgtggtcacaaagtagtccaaatgattgcggatgaagtaaaacgaaaaaacaaagctgccatcatggttacgcatgatgaacgagttttagacttagttgaccgcgtaattcggattgaagatggctatttgaaggattaa

SEQ ID NO: 24559 - DNA, 1293 bp, Listeria monocytogenes
atgtcttcagttgttgtagtaggaacacagtggggcgatgaaggaaaagggaagattacggattttctttccgagaatgcagaagcgattgctagatatcaaggtgggaacaatgcaggtcatacaattaagtttgatggcgtaacgtacaaattacacttaattccatcaggtatcttttacaaagaaaaaattagtgttattggtaacggtatggttgttgatccaaaggctttagtggaggaattaaaatatcttcatgataaaggtgtggatacttctaatttgcgtatttctaaccgtgcgcacattattttaccatatcacattcgtattgatgaagctgacgaagaacgtaagggcgcaaacaaaatcggtacaacgaaaaaaggtatcggcccagcttacatggataaagcagcgcgtgtaggcattcgtattattgatttattagataaagaaacatttaaagagaaattagagcataatcttggcgagaaaaaccgtttattagaacgtttttacgaacttgaaggctttaaactagaagatattttagacgagtactatgaatatggtcaacaatttaaagaatatgtttgcgatacatcggttgttttaaatgacgctttagatgatggtaaacgtgtgttatttgaaggtgcgcaaggggttatgcttgatattgatcaaggaacatatccatttgtaacttcaagtaacccgattgctggtggcgtaactatcggtagtggtgttggtccttcaaaaatcaatcatgttgttggtgtggcgaaagcttatacaacacgtgttggtgatggtcctttcccaacagaattatttgattctattggtgacactattcgtgaagtcggtcatgaatatggtacaacgactggtcgtccgcgtcgtgtaggttggtttgatagcgtagtggttcgtcatgcgcgtcgtgttagtggattaacagatttatcgttaacactacttgatgttttgacaggaattgagacacttaaaatctgtgtagcttacaaattagacggaaaaacaattacagagttcccagcaagtttgaaagatttagctcgttgcgaacctgtttatgaagaacttccaggctggacggaagatattactggagttacatcactagatgatcttccagtgaactgccgccattacatggagcgtatcgcccaacttacgggtgtgcaagtttctatgttctctgtaggccctgaccgcgctcaaacacatgttattaaaagcgtttggcgtttagcttaa

SEQ ID NO: 24560 - DNA, 264 bp, Listeria monocytogenes
atggctgaccgtaaccaacgtaaagtttatactggtcgtgttgtatccgacaaaatggataaaacaattaccgtggttgttgaaacgtacaagaaacatggtttgtacggtaaacgcgtgaagtattctaaaaaattcaaagcgcatgatgaaaataacattgcaaaaactggcgatgtagttcgtatttccgaaactcgtccattgtctgcaactaaacatttccgtttactagaagttgtagaagaagcagtaattatctaa

SEQ ID NO: 24561 - DNA, 315 bp, Listeria monocytogenes
atggaacgagtggcatctattatgtatttatatcctggtaataaagaagaatataaaaaaagacacgacgaactttggccagaaatgaaagaggctttaaaagcacatggagcagctaactattcgatatttctagatgaaaaaacggatacattgtttgcttatgtggaagtcgaggataaagccatttatgacaaaatagcagaaacagaaatttgtcaaaagtggtggaaatatatggctccaattatgaaatcaaatcctaataacagcccggttgcagtagatttaaaagaagttttctatttagcataa

SEQ ID NO: 24562 - DNA, 891 bp, Listeria monocytogenes
atgaatttacaaacaatgattagaacattacaagattattggtccgagcaaggttgtattatgttgcaatcgtatgacgtggaaaaaggtgccggtacaatgagcccgtacactttcttaaaagcaattggtccggaaccgtggaaagcgggttacgttgagccgtcgcgtcgtcctgctgatggtcgttacggtgaaaatccaaacagattattccaacatcatcaattccaagtagtaatgaagccttctcctgacaatattcaagagctttatttagggtctttagaaaaattaggcatcaatccacttgaacatgatatccgttttgtagaagataactgggagaacccttcacttggttgtgcgggtcttggttgggaagtatggttagatggaatggaaattacacaattcacttatttccagcaagtaggtggtttagaatgtttccctgttacttccgaaatcacatatggtgtagagcgtttagcaagttatattcaagataaagaaaatgtatttgatttagaatggacagaaggtattagttaccgcgatattttcttccaagcagaattcgaaaactcgacatatgcgtttgaaacttcgaatacagatatgttgttgacacttttcgacacatatgaaagagaagccactcgccaaatgcaagacggccttgttttcccagcatatgattacgtattgaaatgttcgcatacgtttaaccttttagatgctcgcggggttgtttcggttaccgaacgtgcgcagtatatcggtcgaattagaaacttagcaagacgcatcgcgaaaacattttatgaatcacgagaaaaattgggcttcccattactcaaagaagagggaggaaaacgtcatgagtaa

SEQ ID NO: 24563 - DNA, 1899 bp, Listeria monocytogenes
atgagaatcactgatttattaagcaaagatgttatgattatgtcattacaggcaacgacaaaagaagctgctatcgatgaaatgattgcttcgttaaagagcaacgggaaaattaatgatgaggtgctatttaaaaaagctataatgaaccgtgaagcacagagttctactggtgtaggtgaaggaattgcaatgcctcacgcgaaaacaaaagcagtaaatgaaccaactgttgtttttgctaagagtgagaagggattggactatgatgctttagatggtcagccagcacacttattctttatgattgctgccccagatggcgctaatgcaactcatttagaaactttagcagcgctttctagactattggttcatccagcatttgttcaatcgttaagagatgctaaaactccagaggaagtaatcaatttattcaacaatgaacaagaagactcagaagaaacagttgttgctccaacctcaaccaatgatactggtaaatcagtcgtagcagttacagcatgtccaacaggaattgcacatacttatatggctgcagaaaaattacaagaaactgctaataaattaggtgtacgaatcaaagttgagacaaatggttctagaggcgttgaaaaccgtttaacagataaagaaattgcagaagctgatggggttattattgcagctgatgtacaagtagatatgcctcgttttgacgggaagcatttaattgctaaaccggttgcagcgggaattcataaaccagaagagctaattaaagaagcaatttcaggcaatgctccaatttataaagcagaggaaggtagtcaagctacggagagcgcagacggactttctatcggtcaacaaatttataaacatttaatgagcggtgtttctcacatgttgccgtttgtaattggtggaggtatcgctatcgccatcgcgtttatgctcgatcaaatgttaggtgttcctcaagatcaactcgcaaaacttggttcatataacgaaatcccagcactattaaaacaaatcggtgatgttgcattcggcttcatgcttccagtattcgctggatatattgcctacagtatatcggatagaccaggacttgtagcaggttttgtagcaggtggagtagcatctgttggtggtgcaggcttccttggagcacttgttggtggtttccttgcaggttatgcagtagaattaattaaactagcacttaaaaagttaccaaaaacattagacggtatcaaagtagttttattctatccagttttatcggtgttaattgtcggacttttaatgttgctattaaatgtaccaatgagcgcattgaacacttggttgaatgacttcttgaatagtttaagcggaacgaacgcagttattttaggattactgttaggtgcaatgatggcagcggatttaggtggaccaattaataaagctgcttatatatttgcaacgggtacactcgcagctagtgtagcaacaggcggtagtgcaatcatggcagcaacaatggctgctggtatggtaccaccactagcaacatttgtagcaactcttatttttagaaataaatttacagctcaagaacgtgatgcaggcttaactaactctattttgggtgcttcattcattactgaaggagctataccatttgcagccgcagatccacttcgaatgattccgagttttattgccggaagtgccatcacaggtgcaatagtaatgttcttaaacattaaagtattagcacctcacggaggagtttttgttatcttccttgtatcccaaccgtggttctatattattgcaattattattggaacattaatcagcgcaggattaattggtgttctacgtaagaaaccaactgtataa

SEQ ID NO: 24564 - DNA, 537 bp, Listeria monocytogenes
atgatgaatcgtgtagtacttgtaggacgcttaacaaaagatcctgaattacgttacactccagctggtgtggctgttgcgacttttacattagctgtaaatcgcactttcactaaccaacaaggagaacgagaagctgactttattaattgtgttgtttggcgtaaaccggcagaaaacgttgctaatttcctgaagaagggaagcatggcgggcgttgatggccgtgttcaaactcgtaattacgagggaaacgacggtaaacgtgtttatgtgactgaaattgtagcagagagtgttcaattccttgaaccgcgtaattctaatggcggtggcggaaataactatcaaagtggcaataacaacaataattacaatagcggtggaaataacttcggacaagcacctacaaataacggtggattcggacaggaccagcaacaatctcaaaatcaaaattatcaatccactaataatgatccttttgcaagtgatggtaagccaatcgacatttctgatgacgatttgccattctaa

SEQ ID NO: 24565 - DNA, 1026 bp, Listeria monocytogenes
atgattaaccaagtatatcgcctagtttctgagagacaatttgaagaagcgaatattgaagaagcacttactgaagatgttgttgtagtaagacctacatatctttctatctgtgctgcagatcagcgttattatacaggttctcgcggaaaagaaatgctttccaaaaaattaccaatggcgctaatccatgaaggtgttggccaagttacgtatgacgcaactggcgagtttgaaatcggaacaaaagtagtgatgattccaaatacaccgacagaagatgatccagttattgccgaaaactatcgtcgctcttcgctatttcgttctagtggctatgacggcttaatgcaagagaatgttttcatgagaagagatcgcgttgttcgtttaccagaaaatatggacatggaagttgcggcttattctgagttaatttctgtagcgtttcatgcaattacaagatttaaacaaaaagcaaatgctaatcaatctgtatttggtgtatggggcgatggtaatttaggctttatcacttgtctattgctaaaaactatctaccctgaaagtaaagtgattatttttggtaaaacacaatataaacttgatttcttttcttttgtagatgaagctcatttagttgatgaaattccagaaggtctagtgattgataatgcgtttgaatgcgctggtggcaaaggaagtcagtacgcagttgaacaaattattgatttaattaaaccagaaggaacgatttctttattgggcgtttctgagaaccccattgaatttaattcacgtatggtattagaaaaaggattgacggtattcggtagtagccgtagtgggaaagaagatttccaaaacaccgtaaattttcttagtgaaaatgaacgtgctgtagaatacttatctagtctaataggccaacgtaaagtagttcgtaatttacaagatattattgaagcttttgagacggacttacgtaatccatttggcaaaactgtcatggaatggaaagtataa

SEQ ID NO: 24566 - DNA, 1254 bp, Listeria monocytogenes
atggaattagctaataaaatgttacatgcgttagagcatgaagatatggcgcttgcgaagaagtattttgatgaagtagtgcaagcgggaacagatgaagaacaatattatttagcagaagaattgtttacactcggctttttagatgaaacggaagatttgtacgaacttctgttagcaaaatacaaggatgaaggcgagttacttgtccgtgcagctgaggtcgcacttgagaaagacgatattgattctgcgcaagactatttagaaaaagtaaataaagaagacgaagcatatattgaaagtttgctcgtgttagctgatttatatcagatgcaaggcttattcgaagtaagtgagcagaaactactcgaagcgaaacaaatcgcgccaaatgaaccgattattgattttgcgcttggagaatattatttatcgcaggcaagattcgcgtccgcagtgcagtcttatcaaacggctgtagaggcaggattaacaattatttcgaatggtgcggtgtctgtatatgaacgtatcgccgaagcttttgcagctagtggggcatttgaagaagcattatcttactatgagcgggcacttgaagataaagaatccattgatacgcttttcgggatgggattgactgcataccaggcgaaagattacacgaaagcaattcatgcacttgaacatttgcgcgaacatgacccttcctacacaacgctctattcttacttagcgaaaagttacgaagagaatggcgaaccggaaaaagcgattgcggtactcaaagatggtttgatgcaagatgaatttaataaagaaatgttccttgaagctggaaaactcgctgttaagttacgtttgccagaagaagcagaagaattttatcgtcaggcgattgtgctagatgaggaatattcggaagcgattatgcagctgaataaattattaattgcgcaggaaaactatgaaggggtcatcgaattggtcgaagggcttggtgaagaagttatttctgaaccacaaattttctgggacgtaagtgttgcatatcaggaaacagaacaatataataaagcaaaagcaaattatgaactggcttactcgcactttacaaacaatcctactttcttaaaggaatatggtttatttttaagggaagaaggagaacacgcgaaatcacaagaagttttgcgtaactatttagaactggagccagaagacacagagattttatctttatttgattaa

SEQ ID NO: 24567 - DNA, 1122 bp, Listeria monocytogenes
atgacgttatctaaaggattagaaaatgtatatgttgctgaaacgtccattagctctatcattgatgatatgttaacttatgttggctatggtattgacgatttaatggaaaataacgcttcttttgaagaagtaatctacttattatggcatttacgcttgccgaataaagatgaatttaaaaaatttaaacgagaaatccaagaaaatatggcagtgtctgaaacaatcatcacaagtctaagaatgcaaaatcatcaaaaattacatcctatgagtgttttaagaacaactgtttccatgctcggtgtatttgatacagaagctgaattagacgacggggaagccgtttatcgtaaaggcttacgacttcaagcaaaaatgccaaccattgttgccgctttttccagaattcgtcgcggacttgatccaattccaccgagagaagatttaaatatggctgcaaatttcttatatatgattacaggagaagaagcagatgaattatcagtagaagcaatgaataaagcgcttgtactacatgctgaccatgaatttaatgcgtctacttttacagcacgagtttgtgtggcaacgctttcggacgtttattccggagtaacagccgcaattggcgctttaaaaggcccacttcacggtggtgctaatgaacgtgtatttgatatgctagaagaaattgatcaagctggagatgtgcgtaattacattcaagaaaaaattgatacgaagcaaaagattatgggattcggtcaccgtgtttatcgtggcggagatcctcgtgcgcaacatttgcgtgaaatgtccagaaaattaacagctgaaaaaggcgaagagaagtggtttgatatttctctgcaagtagaagaatctgtttgggaattgaaacatttaaaaccgaatgtcgatttctattcagcatctgtttatcatgcgcttggaattgaccgtgatttatttacattagtattttccgtaagtcgtgtatccggctggttagcgcacatttttgagcaatatcgtgataatcgtcttattcgtccgcgtgcaatttacgttggacctgaaaatagaagttatttacctgtagaagaacgaatttaa

SEQ ID NO: 24568 - DNA, 528 bp, Listeria monocytogenes
atgatattattagttatagatacacaaaaattaattatgacaaataatctgtataatttcgattcacttgtacccaatatagaacaattaatcgccactgctcggaaaaataaaatagaaatagtttatatacgacatgacgacggacctaatacagaacttacagaaggaaaagaaggcttcgatatttacaaaaaattccaaccaactacacacgaaagaatttttgataaaaccgtaaatagcgcttttaaaggaacaggcttacttgaatacttaaaagaaaaaggtacgaagaaaattgtagtagcagggttgcaaactgatttttgcatcgacgccacggtgaaatgtggctttgaacatggttttcacatgatcgttcccgcccatgctaattcgacggaagataaccactttatgtctggggagaatagttataagtactataatgaatggatgtggcctggccgttacgcgacctgcatatctatggaagaaacgattaaagaaatggaacataactga

SEQ ID NO: 24569 - DNA, 540 bp, Listeria monocytogenes
atgagtaaagatttggaagttgcaggtcgctatgccaatgcgctttttcaagtagctcaagataaagatttagtggacgttttttcagaagaattaactgaattaaaagcggccttaaaagctaataaagattttgtaaaactacttgaaaatcctactttcacgaccgagcaaaagaaaaatcttgccagcgctgtttttgaaaaaatcaatccgacattaagagattttatttatcttttaatcgaccgtagcagagaagattatctttctgttattgcggacgtttaccaaaaacgcgtaaatgacttgcgaggagttgcggatgcagatgtttattctgttgtcccactttccgaacaagaacttacggcgctctcgagagtatttgctacgaaaatgaacaaaacaaaattaaacattcaaaatcacattgataaatcccttcttggtggagtcaaagtggttattggaacccgtatatatgatgacagtctaaaaacgaaattaaaggacatggaacggcaaattaaagcctag

SEQ ID NO: 24570 - DNA, 714 bp, Listeria monocytogenes
atggcagaaaagaaaattcttgtagtagatgacgaaaaaccgattgcggatatagttaagtttaatctaaataaagaaggctttgatgtatattgcgcctatgatggcgatgaagcgttagaacttgtagaagaagttcagccagatttgattttactggatattatgcttccaggtcgtgatggtattgaggtatgtcgtgaagttcgtaaaaaatatgatatgccaataattatggtaacagcgaaagactccgaaattgataaagttatcggactggaacttggtgcggatgactatgtaacgaagccattcagtaaccgtgaattaatcgctcgtgtgaaagccaacttgcgccgtcacagccaagtaagctcaagcacagccgaggaagaagaaaacagcgaactagaaatcggttctcttattattcatccagacgcatatgtggcctctaaacgtggagaaacaatcgaacttacgcatcgtgaattcgaattactacactatttagcaaaacatatgggacaagttatgacacgggaacatttactccaaactgtttggggctacgactacttcggcgatgttcgtacggtggatgttaccgttcgtcgtttacgtgaaaaaattgaagataatccaagtcacccagcatggttagtaactagacgcggagttggttattatttacgcaatcctgaacaagaataa

SEQ ID NO: 24571 - DNA, 1197 bp, Listeria monocytogenes
atgaataagacaatagaaatggacggaacaacttacgattttacttatgaggatctagtttggagcattacgtttccaaaatcaaaaacacgcgctaaagaactcgcacaactagaactattagaaaaacctgcgacacattttactcctgcgaaaatttcgagtgatagcgattcatatacgatttcttatgagattgcgccacgtacttatggatttgaacaagttcgaaaaatgggacgtgaagataaactgcgcgcactgcggaatattgcggatttaggcgaattgttaaacacgcgctatacattctttttacacccggataatctgattttcgatattaacctagtgccaagtattgttcatcggggcattaaaaatatattaccgccttatgaactaacagaagaaacttttttcaaacaatatcaatgtttcgttattgcgatgttttctaagaaattctcttttgaaaacttgtacaatggctcgctatcaggggctagaggaacgcaatttgagaagagtatattagatgcaaaaacggtgcaagatattgctactattttagaagaagcatacatgaaagaacatgcggcggttcaaaaaaatatggcaagcgtaccgaagaaaaaatacagtactttccgtgggttagcggttggtttcattatcgtcgctattttacttgcaattccagtaagttattttgcattcgttaaagtccctttacaaaatgatttattaacagcaaacgagaatttcctgaagacagattacgataaagtgattacaggtctagaaaatgtggatccagaaaaaatgccgcagtctgtccaatatgaattagcttattcctatgttaaaggcgaaaaaatgagcgataaaaagaaagaaaacattatgaatacaatcagcttaaaatctgacgccaaaaacttactttactggatttacaatggtcgcggagaatttagtaaatcacttgatattgccaaacttttagacgacccaacgcttgcgatgtacagtttaacaaaacaaattgaacaggtacaaagtgatacaacattaagcggcgatgaaaaagtggaaaaactaaaaactttggaagaaagcttgaaagaatacgatgaaaaagtaaatgagtcaactacaactgaagatgaaacaacaaatacagaagcaaaataa

SEQ ID NO: 24572 - DNA, 2409 bp, Listeria monocytogenes
atgttagtatcatataattgggtcaaagaatttttccaagacttcccgttaacggcggaagagctaggagaagcgattacaagaacaggtattgaaatcgaaggcgtagaagaattaagcgctagtttgaaaaatgtcgtagttggtgaagtattatcatgcgaacgccaccctgatgcagaaaaattgaataaatgtctcgttcaaacagacgaagcagaaccagttcaaatcatttgtggagctccaaacgttgcagctggtcaaaaagtaatcgtagccaaagttggcgcaagacttccaggtggacttaaaatcaaacgcgcaaaactacgcggtgaagtgtcagagggaatgatttgctccctcgcagaacttggctttgaaagcaaagttgtgccaaaagcatacgcagaaggcatttatgtattacctgcgcacgtggaaacgggtgtaaatgcaatcacgttacttgggctagatgatgcgattttggatatggcaatcacaccaaaccgcgcagacgcattgagcatgaagggtgtagctcacgaggttggtgcgattattcatcaaaaaccagcacaacctaccgagcctgacgtatctgaaaaaggaaaagcagaagatttcatttctgtagaagtagaaaatccagccgaaacaccttactatgctattaaaatggtagaaaatatcgaaatcaaagaatcaccactatggcttcaaacgaaactaatgaaagccgggattcgtccacataataacgtggttgatgtcaccaactacatcaatttattatacggacaacctttgcattcctttgactatgataaaattggcagcaagaaaattgttgtacgctctgcaaaagaacaagaagagattaccacgcttgatggcgagaaaagaactttacaagctggacatacagttatcacaaatggcgtagaaccaattgctatcgctggcgttatggggggagaattttccgaagtaacagagaacacaacgactgtagcgctagaaggtgccattttcagcagctcttccatcggtaaagcatctcgcgaattatacctacgtacagaagcaagcatccgttacgacaaaggttctgacgcttggaaagtggaaaaagcacttgcgcatggcggagcgttaatcgctgaactaagtggcggaactctagtaggcggtgtcgtagaagtagataaccgtgaaaaagcagtgaataaaatcgaaacgagcctaacacgcattaaccgcattttaggaaccgcaattacgcttacggaaattgaaactatttttgatcgtttaggatttgtattagaagtaaaaaatgatgctctaatcattgaagtaccaacaagacgttgggatattactattgaagcggatattttagaagaagtagctcggatttacggttacgatgaaattccggtaacacttccggcgacaagcacaacaggaggcttatcagacagtcaaaaagctcgtcgtgtcatgcgcgcttatttagaaggagcagggcttaaccaagcattaacttactctttaacatctaaaaaagatgcaactcgtctagcactttctgatgaaaaaacagttgcattatcgatgccaatgagcgaagaacatagccatttaagaacaagtatcgttccacaattaattcgtagcgcaagttataacatcgctcgtaaaaatatggacgtggcactttatgaaatgggtaccgtattctacgcaacagaaggcgacaatttaccaattgaacaagagcacttggcaggtctaattactggaaactggcacattgcagattggcaaaaaacaccgaaaccagtagacttcttcgttttaaaaggaattgtcgaaggcttagtgaacaaattaggtatcaaatccgaacttcactggaaacaaactgaaaaagaagaactgcatccgggaagaaccgcgagccttgttttagaagggcaagaaatcggctatcttggggcgcttcatccagcagtagaagcgaactatgatttaaaagaaacgtatgtattcgaaatcaatgtggcggctttactagatgcaaccaaagaaaaagttgtgtatcatccaattccacgttacccagaaatgacacgcgacttagcattacttgtggataaagatactaaccacgcagcaatttcgcaagtaatcaaagagcacggcgggaaattacttgtcgatatcgagctatttgatattttcgaaggggagagccttggcgaaaataaaaaatcactcgcatacacattgactttcctagacagcgaaagaacactagtcgaagaagatgtacaaaaagcaaccaacaaagtagtagaagcattacaggaaaaactaaatgcaattattcgctaa

SEQ ID NO: 24573 - DNA, 2988 bp, Listeria monocytogenes
atgggcgcaaaagtatcggtgcaaattaatggcgtggcgcgggatgtggtggaaggaacgcgaatgctggactatttaaatgcagaaggaatacagcatccgcatatttgttatagtgagcaaattgggccaattcaatcttgtgatacgtgtatgtgcgaggttgatggggagcttatgcgggcgtgcagcacgaatctaacagacgggatggaaattaaaacaaactcagaactagcgaaagacgcacaattagaggcaatggaccggattttggaaaatcatttattgtattgtacggtttgtgataataacaatggtaactgcaaagtacataatacgacagaacttcttggtgtggaaaaacaagaacgtccttaccgcgaaaagggatatttgaatgatttttcgcatccgttttatcgttatgatccggatcaatgtattctttgtggacgttgtgtggaggcgtgtcagcaagtacaggtgaatgagacgctttcgattgattgggaacgtagtcagccgcgggttatttgggatgatgatcgtccggcgaatttatcgtcatgtgtttcttgtgggctgtgtgcgacggtgtgtccttgtaatgcgctgatggaaaaatccatgcttggtcaagccggctttatgactggtttagatgaagatatgctagaaccaatgattgatatggtgaaaaaagtggagccgaattatcaaacggtttttgctgtgtcggaaatggaagcgtcaatgcgggaaacacggacgaagaaaacgaagacagtttgtactttttgcggggttggttgtacgtttgaggtgtggacgaaggatcgtaaaattttgaaagtcgagccaaccggggaaggtcctgtgaacaaatttgccacatgtgtaaaagggaaatttggttgggattttgtcaatagcgagaaacggattacgacgccgctcattcgcgaaggtaatgagtttgtgccggcgagctgggaagatgcgattcatttagttgcgaccaaactgcgagaaattcaggctaaatacggcaatgactcacttggatttattagttcatctaagacgacgaatgaagagaactatttgatgcaaaaattggcgcggcaggtttttgaaacgaataatattgataattgttcacgttattgtcaggcgccggcttcggatggactgactcggacggttggtattggtgcagattcagggactgtggaagatatcgaatctgcggggcttgttattattgttggtgcatcaccagccgatgggcatccagtccttgctagtagaatcaagcgagctcagaagacacgcggtcaaaagctaattgtctcagatttgcgaaaacacgaaatggcagagcgttctgatttattcattcatccaaaacaaggaaccgattttgtttggttgacggcggttgcgaaatatatgattgatcagggatggcatgatgaagtctttatggagaatcgtattagtaatgtggcagattatctagcatttttagaaccatttacattggaatatgcggaaaaagaaacaggattatcagtagagacgttgaaaaaagtggcgcagatggttcatgaagcagacgggacagcggtttgttggggaatgggagttacgcaaaatattgctggatctcatacatcgtctgcaatcgctaacttgcttcttgtcactgggaacttcggaagacacggtgcaggcgcttatccgcttagagggcataataatgtacaaggtgcttgcgatatggggtcactacctaacgttctcccaggaattcaaccactaggaaatgatgaagttcgtgctcgttttgaagaagcttatggggtatcaatttcatcagaaccaggcctaaaaaataatgaaatgcttgatgcgattgaggcgggaacgctccattctatgtatgtgattggtgaggaaatggcttgggtggattctaactcgaaccatgtgcaagaaatccttgcgagccttgatttctttgttgttcaagatgtatttttatcaaaaacggcgcagtttgctgatgttgttttcccggcagcgccttcacttgaaaaagaaggaacattcaccaatacagagcgccgtgtacaacgactttatgaggtgttagagccgcttggagattcaaagccagactggtggattattcaagaggtggctagagcatgcggaagaacggactggaattatgatcatccgagcgagattatggatgaaattgctagcttggcaccattttttgcaggggttcgttatgaccggatgcaaggatttaacagccttgtgtggccagtgagcgcggatggaaaggatatgccgttactttatgaagaacgatttaattttccggacggcaaagcgcaattttcgacgttaccgtatattgcaccgattactttcccggaagaatataatttaacactgaataatgggcgtttgctggagcagttccatgaggggaatttgacagataagtcgaaagggctggattataaattaccggaagtgtttgtagaagtatcgcatgagttagcgaaagaacgcgatttggaaagtggttcgctcgttcgtctaagttcaccgtatggtcgcattaagcttcgtgctgtggtgactgataggatgaaaggaaatgaagtttatgtgccaatgcattctgtgagtagcgaaactgcagtcaatttgctgacttcaagtgcgggagatgttcggacgaaaacaccggcctataaacaaacaaaagtaaatctaactgtgcttgaaaaaactgggaaaaatccacttcctgaccacaatccgcgtaatcgtaaaagattcccgcaaaatggggctgaagtagcgcgcaaatggtcgagagaagattatcaaccgatttctaaagtgaactgcgcctgtggtggtaactgtggatgcggcgggaaagggaggaatcactga

SEQ ID NO: 24574 - DNA, 999 bp, Listeria monocytogenes
ttggaacgttatgatagacagatgcgcgttaaaaatattggaaaagatggtcaagaaaaattacttacgaaaacgattttgattgttggagttggggcgattgggtcatatgccgcagaaatttgtgcgcgaatgggctttggaaagttaattttaattgaccgtgactatgtggagctaagtaatttgcaacgccaatcgcttttcacggaacaagatgcgttagacaagcaagcaaaatcgtatgcggcatctaaagctttacaactcattaatagcgatattacaatcgaatatattgtagatgatgcgaacgtaacgagtttaacgccttatgttgggacaattgattacatactagattgtacagataattttatgacccgcgactttttaaatcagttttgtttcagccatcaaattccgtggattttcacctcgtgtgctggaaattacgcgaatctcatgccaattattccgcctgactctgcttgtttacactgtttacttggtgatattccccaaaccaacgcagcaagttgcgatattattggcgttgatggtgcgctgattccaatcgtcgccggcatgcaagtttccctacttactcaaatgattatcaaccctgatttcaaagcaaatacctactaccaactagataattggcacttttctttccaaactatcgaagtcaaaaaacgtcccgattgctctagttgcgcacctggaaaaatggtttcagaagttcctttttccgggcaaacggttactctttgcgggcgtgatacagtacaatttcgtttaccaaataaaagtaattaccgcgagattaaactactgctgacggaacaaaaaattatttataatgaaaaccccgctttactcagtttccaatacgaaaagtttcaatttgttatttttaaaaatgggcgtgtgttacttcatggatcagaaaatatagcagaagctaagaaaatatatcatttattttttaactaa

SEQ ID NO: 24575 - DNA, 1629 bp, Listeria monocytogenes
atggcaaaagatattaaatttagtgaagatgctcgtcgtgccatgttacgtggtgtcgaccaactagcaaacgcagtaaaagtaacgcttggcccaaaaggtcgtaatgttgttttagagaagaaattcggttctccgttaattacaaatgatggggtaacaattgcaaaagaaattgaattagaagacccatttgaaaatatgggagcaaaacttgtatctgaagttgcttctaaaaccaatgatgttgctggggacggaactacaacagctaccgttttagcgcaagcaatgattcaagaaggcttaaaaaatgtaacagctggagcaaacccagtaggcgttcgccgcggtatcgaaaaagccgtagcaacagctatcgaagaattaaaagctatttctaaaccaattgaaagcaaagagtctatcgctcaagttgctgctatttcttctggtgatgaagaagttggtaaattaatcgcagaagcaatggaacgcgttggtaacgacggcgttatcactattgaagaatccaaaggttttgcaacagaattagacgtagtagaaggtatgcaattcgaccgcggctacactagcccttacatggtaactgattccgataaaatggaagctgttcttgaaaaaccatacattttaattacagacaaaaaaatcaacaatattcaagaaatcttaccagttttagaacaagtcgttcaacaaggtcgtccaatgttaatcattgcggaagatgttgaaggggaagctcaagcaactcttgtactaaacaaacttcgcggaacatttaacgtagtagccgtgaaagctcctggtttcggtgatcgtcgtaaagcaatgctagaagatattgctattttaacaggcggacaagtcattacagaagacctaggattagaactaaaaacagctactgttgatcaacttggaacagctaacaaagtagtcgtaacaaaagatgatacaacaatcgtagaaggagcaggcgattccacacaaattagcgctcgcgtaaaccaaatccgtgcgcaaatggaagaaactacttctgaatttgatagagaaaaattacaagaacggttagcaaaacttgcaggtggagtagctgttgttaaagtcggcgctgcaactgaaacagagctaaaagaacgtaaattacgtattgaagatgcacttaactctactcgcgcagctgtagaagaaggtatcgtagctggtggtggtactgcccttgtaagtatttacaataaagtagcagcacttgaagcagaaggcgacgtagaaacaggtatcaacattgtgcttcgttctctagaagaaccagttcgccaaatcgcacataacgctggacttgaaggttcggttatcgttgaacgcttgaaacacgaagcagttggtgttggtttcaatgcagcaaacggcgaatgggtaaacatgattgatgcaggtattgtggatccaactaaagtaacacgttccgctctacaaaatgcatcatctgttgcagcgcttctattaactacagaagcagtcgtagcagacaaaccagacgaaaacggcccagcagctgttcctgatatgggaatgggtggcatgggcggcatgatgtaa

SEQ ID NO: 24576 - DNA, 813 bp, Listeria monocytogenes
atggctgaaaataaacgagtaatttccattgaaaatcgcataccagaactcaaaaaataccgcaaaaaaaaattagtaagacacctagccattttaatcggaatttttgtgattttgatcgccattacgctttatttcctctccccactcagtaagttagataaaattgctgtaagtggcaataagcaacttactgagaatgaagtaagaaaagaaagtggacttgaaattggtgagtttgtcatcgggataagtaatgggaaaaccgaagatgccctcaaaaaaaatacccttattaaagatgctaccgtttctaaagaagggttaaatgatgttcaaatcaatatcaccgaatttaaaacgataggttatcaacaacaagatggtaaatactatgatgtgctagaaagcggcattatgctaacagatcaaccaagacaattcccaattggaaatgatttgctatttcaaaattttaaaaacggtaaaacgcttgagaaaatggtagaccaaattaataagttaccaaaagatgttgttagttctatctcggaagtgatttatagtccaacaaaaagtgataaaaaccatattaaattatatatgaacgatggtaaccaggtttccgcagatattagtacctttgctgagaaaatgcaacattatccagcaattgtcgctcaactggcgaaaggacaaaaaggggttattgatattgaagtaggttcttatttccaaagttattatcaacagaatgcggagaaaaaagcaaccgaagaagcagctaaagagaagaaagaaacaaatgaataa

SEQ ID NO: 24577 - DNA, 1260 bp, Listeria monocytogenes
atgaagcgtttcaaaaaagtgggaatagtttcggcggttttagtaatggctttaagcttggcagcatgtggtggcggaaaagatactagcaaatcgggctcatctgatgaaaaaacattaactgtttccgttgacgcaggctacaaagactacgtgaacaaaataaaaggtgattttgaaaaagataatgacgtaaaagtaaaagttgtcgaaaaagatatgtttgaaacattagaagctcttccgcttgacgggcctgctggaactgctccagacgtaatgatgtccgcatttgatagaatcggaagcctaggtcagcaagggcatttggcagaagtaaaactaggaaataaagatgattacgatgaaaaagaccaaaaacaagtaacaattgacgataaaatttatggtgctccagctattattgaaactctagtactttactataataaagatttactcgacaaagctccagcaacatttaaagatttagaaacactttccaaagattctcgttttgccttcacttctgaaaaaggaaaaaatactggtttcttagcaaaatggactgatttctacttctcttacggactacttgcaggatacggtggttatgtattcggcgatgaaggtacaaatccaaaagacatcggtttaaacaataaaggttcggttgaaggaattacttatgcaacaaaatggttccaagatgtatggccaaaaggtatgcaagacaataagagtgcagatgactttatccaagatcaatttgttaaaggtaaagcagcagctattctaggcggtccatggtcagcagcaaattacaaagaagcaaaaattaattacggcgtagcaaaaatcccgacacttaacaatggcaaagagtattctccttttgcaggcggtaaaggttgggttgtaagtaactattctaaaaataaagatgtagctcaaaaatggttggattatgtaactaaccaaaaaaaccaagaaactttatatgatatgacaaatgaagtaccggctaacttaaaagctcgtgatacagcgaaatcgaaaaatgatgagttaactaatgctgttatcgaacaatacaaaaatgcgcaaccaatgcctaatattccagaaatgtcggaagtttggacaggtgccgaaaacttaatgtttgatgcagcttctggttcgaaaacaccgcaacaatcagcggatgatgcagtaaaagtaattgaagacaatgtaacgcaaaaatatactaaataa

SEQ ID NO: 24578 - DNA, 612 bp, Listeria monocytogenes
atgagtaaaattattatcgccaccgcaaacaaaggaaaagcaaaagaattcgaaaaaatctttgcgaaatttaatatcgaagtagcaacccttgctgattttccagaaattggtgaaatagaagaaactggaacaacctttgccgaaaatgccgctcttaaagcagaaacggtcgctagcgtgttaaatcaaaccgtcattgctgatgattctggtttaatcgtagacgcgcttgacggagctcctggcgtctattccgcacgttatgcaggtgtcgcgcatgatgatgctaaaaataacgaaaaactacttaaaaacttagaaggcgttgaaccggacaaaagaacggctcgtttccactgtacacttgctgtagcaacaccttctgagaaaacatctttttatacaggtgaagtagagggtgttattgccgaacaactttgcggcacaaatggctttggctatgatccactatttttcttaccagaattcggtcttacaatggcagaaattccagcagagaaaaagaacgaaatcagccaccgagctaatgccattaaacaactagaaaaagatttagtagaagtagtagaaaaagtaaccaaaaagtga

SEQ ID NO: 24579 - DNA, 861 bp, Listeria monocytogenes
atggagaaaattggatttgttggtacaggcgtaatgggttcgagtatggcagggcatttactggaggctggttatgaagtattggtgtatactcgcacaaaaacaaaagcagaagatttacttgataaaggagcactctgggtagaaacaccaggagaattggctaataaagtggatatattaatttcaatggttggttatccaaaagatgtggaagagctttacttaggcgaaaatggctttttagaaaatttagcagttgggacagtagcaatcgatatgacaacttcctcaccggcattagctaaaaaaatggctgaatttggccgtgaaaaaggtattggtgtattggatgctcctgtttcaggtggcgacataggcgcgaaaaatggcacgctatcaattatggtaggcggatctgaagacgtttttttaaaagtgaaaccaatttttgacattcttggtagcagtgtgattctgcaaggtgatgcaggtgctgggcaacataccaaaatggtgaaccaaattgcgattgcttccaacatgattggtgtgactgaagcaatcatttatgcggaggcggctggacttaatccatcacgtgttctcgattcaatttcaggtggtgcagctggtagttggtcacttgcaaacttgattccacgtgtacttaaggatgatttttctcctggtttctttattaaacatttcatcaaagatatgggaatcgcgatctcagaagcaaaacaaatgggcttagaacttcctgggctaactttagctgaaaaaatgtatcaaacgctagctgaacaaggtttgagtgaagaaggaactcaagcactcattaaatattatcgttag

SEQ ID NO: 24580 - DNA, 531 bp, Listeria monocytogenes
atgacagtagaaaaatggaacgtagacccagcacatagttcaatcgaatttcaagtaaaacacatgatggtatcaaaagtaaaaggtgcatttagcgatttcacagcggatatcgaaatggatccagaagatttaacttctgcaaaattaaacttctccgttgcagcagcctctgttgacactcgtcaagcgcaacgtgatggacatttgaaaagcgaagacttctttaatgtagaaaaatatccaaacgtgactttcacggcaacaaaaatcacagcggacggcgatgatgaatacgaagtgactggtgacttaactattcgcgacgtaaccaaacctcttacactagaagtaagctacgaaggaacaggaaaagatccaaatactggcaacatggtagctggctttgaagcaaaaggtaaattcaaccgcaaagactttggccttaattacaatgctgcgttagaaactggtggcgtacttatcggcgacgaagtgaaattaaacatccaaatcgaagcaagtaaataa

SEQ ID NO: 24581 - DNA, 1278 bp, Listeria monocytogenes
atggatttgcaattaccaagagggacgcgagatattttgccggaagaggttagtaaatggcattttttagagacagagtttaaaaatgtttgcgaaaactaccaatatgaagaaatcaggacgcctgtttttgaacatacggaattatttgagcgtggggttggcgattctacggacatcgtatcaaaagaaatgtacactttccaagacaaaggcggaagaagcttaacactgagaccagaggggactgcttctgttgttcgagctttcgttgagcataaattatacggtgaagtgagccaaccaatcaaaatgtactataatgaaccaatgtttcgctatgaacgtccacaaggcggaagacaacgccagtttactcaaatgggaattgaagcacttggaagtgatgatccttctattgatgtagaagtaatttcactggcaatggagttttttcgaaaaattggcctaacaaacattaaattggtcattaatagtcttggtgataaagaaagtcgtctaaaacaccgggaagcacttgttgcgcattttgaaccacatattgatgaattttgcgcggaatgccaagtacggttacacaaaaatccactgcggattttagactgtaaaaaagatcatgacaatccactgattcaatctgcgccatctattttggactttttaaatgaggaatctgttgcctattttgaaaatgttaaaaattacttaaatgcgctagagattccgtttgaaattgacccaacgatggttcgtggtttagattattataaccacacgacatttgaaattatgagcgtagaagaaggatttggcgcgaaaacaacgctttgtggtggtgggagatatcacggtttagtgagagagtttggcggcccagatacaccaggaatgggctttggtattggtgtggaacgtattttactggcactagaaaaagcggacatcgaaatacctgcgaaaaaaccattagaggtttatgtgattacagcgcaaccagaagcagaactaaaaggcgtaacactcgtaaataaattaagacaaaatggtattagtgcagaaaaagattacttaaaacgtaaatttaaagcacaactaaaagatgccaacagaaaaaatgccgtatacaccattattcttggtgaagaagaattacaaacaggcaattatcaattgaaaaatatggaaacgggcgagcaagaagctgtgtctgaaacaaccatactagaaaaattatcaaacaccaagggggagaaataa

SEQ ID NO: 24582 - DNA, 5136 bp, Listeria monocytogenes
atgaaaagtaaattttttataggcatgatgacttttttgctatcattaatttgtcttactggaatgaaagcagaagcaaaatcggtgggagatatttctccagatgatatttcaccggagatttcagataatcgctttcaatctgcagaagggaaagttttgcctaattttgaggtggatatgtcgattagtgatcaaaataacgggaaattatcgattgatgaggattttgagttaacctcagatggcgatattattttgattggaacagtgcaaggtcaatacatacaaggaacccccattttaaatgaaaatgggcaattaaataaaattccaaaccgtgatcaagggattattatgcgtgtcgatcgaaccacaaaaaaagtggagtgggcacgtgttgttaactatgaggacggtaattacaattcacaatatgcagctgacaaatggtttagttcgtataaatcgattacaaccaactcgagtaaatcgactttttatgttggtggggaagtagtcaattactacggagactcaggtggaggtagtactttaattgtaaaatcaattgatgcaaatggtaacttccaaatagcccataaatcatacgttagttacggtgttccatcaagatcagatctaacctatgcctattttatggatattcaaatggaaggtaatacattaaccatgtcagcttcagctcggtatgctgcgcaaggtaaacagtttattcgttatactttagaaccagcctcattatccattacaaaaaatgaatttaacccattagataatactttctgggccaaatatcaacggacagatgtccttaaagtagataataaaggtctgatggcttataacgcggatgtaaatggtgccaaccaacttaaaatgtccattcgtgaatcagaaaataattataaagaaattacattgtttgattctgttcctgaaattttagcaaactcttccccttatatatttatggaagatcgtggcgatgggaatgtgtttgtggtcatgtcaacacccactacctggtatatcgcgcttgttaatatcgcgtcagaacaagtagttgagactaaaaaaatgacgatgaactcctccacgacgctaaatagtgtgatttacagtgaaggaaaaggtctgcttttaggtggtagtacacacgcggaagaaagcatttttggtagtgagccattaaacaaaaataacggatattatttagcgcttggaaatgatttgaacgtaacggatagccagattttaagaacgaatcaacataattcattgacaactattattaatggcgtcggcaataaagtagatggtttctttagctacgatggattaaataatgatggatatatccaaaatgtagaatatcctaacacctatgatgtgaacccgaatggggcgatgatatttgcagaatttaatttgcaaccagctccagtactagatacaggtaatccaatcttagcattttaccaaggggaacgtcgtgcagattttgatgaactagaaggggtgaaagcgtactctggaattgattcatctgatgtaacaaaatctattacaaaaaatacgtttgatttatatactgtaggcgtacaacagcaactttatcaaattgaatatttgccaggaagtggtaataaaaccactggtacgcgaaatgtccaattgattcacccacttgagactccaaaactagagaaaagctacgcagatagccatggggcttttaaagttggcgaagtagtccctgcaaatgctattcatgcatttaatggtttagatagtgctaataatgtgacttatgtagttaccgcagtagatgatgagaaaataactgtagatgcttcaattaagcgaacagaaggaacgaaaacagctgtaattaataaggaaattacacttatgacttcgactgctgacgaaactgcagtaatcgatgtgacgagtgtagctctagcagctggaaagtatacatccttaacagatgttcgaaatgaagggcattttcatatttatgcagaaacaatggatagcgtgtccatcgatcctaagtacgttaaactaacagaagaccctgaaaacccagttgactggaatgcgccaggtgtttattatgtgactgcatcacttgacccggcgagtggatatacagcgaaagatgtgaaagtaagtgttgctgtagttgatgttggaagtccgaaagttatttctgtaaacatgaaaccgtacaatccaacaaccgctcttgtcgttgcggaagatgatattaatggcgcaggagtgtataaaatcaactgggcaattaaagatgcaaatggacttattatccagcaaggtgtggaagagagtggtgctaccattcgagttcaaaccccagttccaattgatctctctacattaaatgatggaaattatacattgtcagtatcagcggctgacagaattggtcatacatcagaagcttcagaaaaagcgttcacagtagacagacaagcgccagttgtgacagctgacgacaagatcacgtatgaaataaatacaaagaaaacggaagaggaatttttaaacgatgtaaatgtaaaaacagaagccggcgcggtgattaaaaccaattttgatacgatggtgagaatggattcgccaggtgattatacggttttagtggaagctaccgatgcagctggtaaccaatctgatcccatttatgtcatcgtaacagtggaagatacggtagcgccgattataagtgcagatgaagcgattagttataatcaaggaaatatacgaacagaagcactattcctgactgatattcatgcaacgacagatgaaccagcaacgattacaagtgattttgcggatcaagtgaaatttgacacaccgggagtctacgcagtcacattaaaggcaaacgatattagtggaaaccaagcaatcccaagaacagtaaatgtcacaataaaagatgtgaccgcaccagtaatcactgctgatgaagccattatttacgaaaaaggcataaccaaatctgctactgatttcttaacggatatccatgctactacaaacgatggctcagcaataacttctaattttgcaactgtagtagatttaaatacacccggggattacgatgtgacacttagctctaccgacacaggtggtaatatatccgatccagtcaccataacagttaccgtacgtgatacaaccccaccagttattacagcagatacaactatcacatacgaaaaaggaaccacgaagactgcagctgcctttttaacggatgtaaatgcaacaacgaatgacggttcagcagtaacttctaacttcaacccaattagtttgaagcaagtagggacttatcaagtaacattaagttctgttgatgaaaatggtaactatgctttgccagtaaaagtaaccgtcgttgttcaagatacacaaaaaccagtaatctcatccagcgcaacaagcattacctatgagcgaggagaaaagaaacaagaaacaggcttcttccttgatttagctattaaaacagatgacggcactccggttacaagtgattttgacacagccgtaaatctggacacggcaggaacttatacggtaacactgaattcagaagatgaaagtggcaataaagcagacccagtcactattactgtgaccgttgctgatacagaaaaaccaattatcacagcagacacaaccataacctacgcaaaagggacaaccaaaactgtcgcacaatttttaacagatattcatgctacaactaatgatggatcaaccatcattagtaattttgacccaaccgttcttgcgcaagaaggaacctacacagtcgtattaaatgcaaaagatgagagcaacaatgaagcagatccggtaactgttacgattacagtggtagatacaaaaggaccgattatcaatgcattaaatgcaatcacctatgaaagaactatcaataaaaacgaagctgatttcttagcagatattgaggcaactacagatgatggatctacaatcacaacggattttaatagtaaagatcttgatacggttggaacctatatcgtcacattaaatgcagaggatgcaagtggcaataaagcaacacccgtaaaagtgacaataaaagtagaggataccatccctccaatcattacagccgaccaatcaatcacttacgaaagaggcattacaaaaacagagcaagctttctacacagatattaaagccgcaacaagcgacaatagcccaatcagctctgatttttcgaaaattgatctaacaaaaaccgggaattatgaagtcttactccgagcaacggatcaaagtggaaacaaagcattgccacttaaaattaatgtgctagtccaagatactatcgctccggttataaaaacaaccagccgagaaataacggccgaacgtggcacgccaatgaccgaacaacaactactcgcaaaaattggcgccaatacagatgatggctccaaaataacaactgattataacccggcaattgtcaacacatcaggagattatttagttcatctatacgctgttgacgctgctggcaatcaagcaataccggtagaaataactattcatgtaaaagatacaactgcaccaataattaaggcagataaaaaaattagttacccggtcggaacggttaagacagtaacggaatttttacaagacattcatgctaccacggacgatggttctaaaatcacgacagattttgacccgaatatgttaaaaacgccaggaaaatatactatccacttaaatgcagtagatgcagacgggaataaagctaaaacaatcgatgtaagtcttacagtagaagagaaggtgacgccgcctaaaccaccgacaccagatgatggcggaaataatacgaatggcagcaatgggacaaatggtagtaacaccgatataacggtaaatcctaccaagcaaaatactacggctacaaatgaaagcatcccagcattaggtgatacaaaatcaactattccagttatcgttggtatgttccttttagctacttcactcgttcttattagacgcaaataa

SEQ ID NO: 24583 - DNA, 1806 bp, Listeria monocytogenes
atgtgtggaatcgttggatatataggaacaaataatgcaaaaggcattttattagaaggacttgaaaaattagaataccgcggctatgattctgcaggaatcgctttgcaaaacaaagaacttgtaacagttgtcaaagaaaaaggacggattgcagaccttgcgagccttgtaccaagtgatgcattcggtacaacgggaatcgggcatacacgctgggcaacacacggtaaaccgaatcacgaaaacgcccacccgcaccaaagtaaatcaggtcgttttacaattgttcataacggcgtaatcgaaaactacacccttttaaaagaagaatacttaaaaaaccattcttttgtcagtgacacagatacagaagtaatcgttcagcttatcgaactctttgcagcagaactttctactaaagaagcattcaaaaaggcgttatcgttactgcacggttcttacgcaatctgcttaatcgaccaaaccaatacagaaacgctttacgcagcaaaaaataaaagtccattactaatcggaaaaggcgaaaacttcaatgttatcgcaagtgatgctatggctgtccttaaagagacagacgaattcgtggaaattatggataaagaaatcgtcatcgtaacaaaagatggcttcactttagaaacactagaaggtgaagaaatcactcgtgcaagctacaaagcggaactagatgcatcagacatcgaaaaaggcacatacccgcactatatgttaaaagaaatcgacgaacaaccagctgtaacacgtaaaatcattcaagcctatcaagatgaagctggcgaaatcaatgtcgacaaaactatcattgacgaaattttatcatctgaccgcattcatatcgttgcttgtgggacaagttatcatgctggtttagtcggaaaaaatttaatcgaaaaaatggcgaaaattcctgtagaagtacacgtatccagtgaatttgcttacaatttgccattaatgtctaaaaaaccgctatttatttttattacgcaaagtggcgaaactgccgacagtcgtcaatgtcttgttaaagtgaaagaacttggctaccgcacattaaccttaacaaacgtaccaggctcgacgctagaccgtgaagcagatcattcgatgtatttatacgcaggcccagaaatcgctgtagcttcaacaaaagcctatacagctcaaatttccgtattggcagtacttgcagtttcccttggtcgcgaaattggtgacgaagaagcacttaacattaatttagctgctgaactaggaattgtcgcaacagcaatggaagccatggtctctagcaaagaagtgattgagcacatcgctggcgaatacttagcaacttctcgtaacgctttcttcctaggtagaaatatcgattatttcgtagcaatggaagctgctcttaaactaaaagaaatctcttatattcaagctgaaggttttgcaagtggcgaattaaaacatggtacaatcgcgcttatcgaagacgggacaccagttttagcgcttataacgcaagaatctatcaactggaatattcgcggaaatgtcaacgaagtattagcgcgtggagcaaaaacttgtatattcgcaatggaaaacgtcgcacaaccaggtgaccgctttgtcattccacaagtgcatccgctattaacaccactggctagcgtcatcccatgccaactactagcttattacgccgcacttcaccgtgattgcgacgtcgacaaaccaagaaacttagcaaaaagtgtgacagtagaataa

SEQ ID NO: 24584 - DNA, 882 bp, Listeria monocytogenes
gtgataaaaagtcaaaagagtttcagcggaaccagccaaggggcattatatttagtgccgacgccgattggtaatttagaagatatgacttttcgtgcaattcgcatgcttaaagaagcggatattattgcagcggaagatacgcgaaacaccgtgaaacttttaaatcattttgaaattacaacccgaatgacgagttatcatcagtttacgaaggaaaataaagaagataatattattcagcgaatgctgggcggagaagtggtggcgctagtgagtgatgctgggatgccatctatttctgacccgggatacgaacttgttcaaagtgcgttagatgctaatattcctgtcatcccattaccgggagccaatgctgcattaactgcactgattgcatctggtcttgccccgcagccgttttacttttacggatttcttccacgccaaaacaaagagcgtactcaagcgattgaaaagttggcggctcgtgaagaaacgtggattttatatgaatcaccacatcgtttaaaagaaacactaaaagcaatcattaaaatcactggaaatgatcggaaaatcgtcctgtgtcgagagctcacaaaaagatttgaagaatttttgcgtggaacggttgaagatgcgctgaactgggcaatggacgaagaaatccgcggggaattttgcttgattatcgaaggcaattccaacccacaacttgcagaagagcagctctggtggcaagaactcgatattaaaacgcacgtaagcaccgtaatggaacaggaaaatgttagttctaaagatgcaatcaaaaccgttatgaaagcgagaaatttaccaaaacgagaagtttactctgcttatcatgaaataaaataa

SEQ ID NO: 24585 - DNA, 1386 bp, Listeria monocytogenes
ttggaaaaaaagaagaaattcagattatttgatgcggttcttatggctgtatgtgtcgttttggttgtggaatctgccgcgccagcagcggcgataggatcatctcaatttttctggtggattgcgttacttattttatttttcttaccatatggacttgtttcggcagaacttgggacaacctatgatgatgaaggcggaatttatgattgggtaaaacgggcatttggccgaaaatggggtgcacgtgttgcttggttatactggattaattatccgatttggatggcgagtttagcggtattgtttgtagaagttattacgcaaattttcccggtttcatttgggacgccagtttcgattttgattcagctcatttttgtgtggattgttgttattgttagttgttatccagtgagcgatagtaaatggattcttaatatcgcggctttctgtaaagtcgcaattatgctttgccttggtgtacttgggatttattttgcgattacgaagggattggcgaatgacttttctggaaaagcattacttccaacttttgatttagagagtttatcatttatttcagtcattttattcaatttcttaggttttgaagtggtaacaacgcttgcgagtgacatggaaaatcctaaaaaacaaattcctcaagcaattatttatggtgggattttgatcgcattcttctatttactagcagctttcggaatgggggcagcaattccgacttctgaactttcaacgtcaggcggccttattgatagctttattatgctgattggcggagttaacccatttgttattattattgggattatgtttatgtatacattagtagcaaatttagtgtcttgggcactaggcgtgaattatgtagcaatgtatgcagcgaaaaacaaagatttaccagctgtttttggaaaaacaaatccgaaaaatgatatgccaacgggtactagtatattaaatgggattgtagcttctgtattaatcgttgcggcaccacttattccaaatgaaaatattttctgggcattctttgcattaaatgtagttgctttactaggttcatatatcctaatgtttccagcatttttgaaattacgtaagttggatccggaccgagaacgtccatttaaagtgccaggtggcaaaatcttgctttacttaatgactttcgtaccaatgattttactcatcattactttgattttctctgcagtaccattaaatggttcaagtgcagaattaaatgaaaaaatcccaatcttaattggaaccattgtagcggtgattgttggtgaaatatgtatttggcttgctggcaaaagaaaagacaaaggagagataaaaaatgagaacgattga

SEQ ID NO: 24586 - DNA, 711 bp, Listeria monocytogenes
atggaacaaatggatgcacaccaaattatttcttttattcaaaatagcaagaaagcaacaccagtaaaagtttaccttaaaggggacttagaaaaaattgattttccaagtgatgtaaaaactttcattactggaaatgcgggaactgtttttggagaatgggcagttgttgagccattattagaagcaaataaagcgaatattgaagattacgtaatcgaaaatgatcgtcgtaactccgctattcctttgttagatatgaaaaatattaacgcacgtattgagcctggtgcagtcattcgcgaccaagtaacaatcggcgacaatgcggttattatgatgggagcaagtatcaatattggttcagttatcggtgacggtacgatgattgatatgaatgtagttcttggcggccgtgcaacggtcggtaaaaattgccatattggtgcaggttctgtccttgctggcgtagttgagccaccatccgcacaaccagttatcgtagaagacaatgttgttgtaggcgccaatgtcgttgttttagaaggcgtacgcattggagaaggcgcagttgtagcagcgggcgcaatcgttacaaaagatgtagctcctggaacagtcgtggccggaattcctgcacgtgaacttaaaaaattagatgcaaaaacagcttctaaaacagaaatcatgcaagaacttcgccaactttaa

SEQ ID NO: 24587 - DNA, 1620 bp, Listeria monocytogenes
atgaaaaaaactatcaagattacaaccagtttacttttgagctttgcttgtgtatttagtattggggattttactaagccgcatacagtcgaagctgaaatagtctattcgcttacaaatccaaagccagttaatgaaatttttactgatccaaaactcgcgcaagttgtggcggattggttgaagcttccagctgcaactagctcggttacgcaaacccaattgaatacaattaaagctttgcactttgattcaaaaggtgttcaaagtcttgaaggagtagagtatttaaaaaatctcacgcaagtatttggctatggtaaccaagtgagtgatttagggccattaagtaatttaacgaagctagaagtcatccagatgccaagaaatcaaataagtgacttaacgccaattgcgaatttaactgcattaatgtcacttgattttgagtttaataacttacaaacgattgaaccgataaaaaatttaacgaacatgttagaactgaatgttagcgccaatcctatttcggatattaatgccgttaaaaatatgacacagctggaatttttgactttaagagactgtgaggtaagtgatttatcgccagttgaaaatctgtctaatatgctgatgttttgggcggggagaaataatattagtgatattacgccgctcaaaaatatgtctaaattgcttggtttaagtttatttgggaatcaaatcaaggatgtgagcgtaatcaaaaatcttactagccttgaagacttcgatataaaagcgaatcaggtgagcgatattagtagtttagcaacatcaactacactcgagacattaactcttagtttcaaccaaataattgatatttcgccactgaaaaatttgaccaatttaactagattagaactggagaatcaaacgcgtgcactagatgcggttgagatagacaatccattgattttacccgcgccagtaattgatgaaaatggtagtagagtacagccatcaaaagtgagtcatgcaggtgtttatgcgaatggcgagattacatgggaagggttgcaaagtaattatattttaaattacgaatacgctttgcccgtaacaattggttcgttgacaacaacgtattctggtaaaattacgcagcctttgttagagaagcctgttgatccggtcactccagtagatccggtagatccggtagatccggtagatccagtagatccggtagatccggtagatccggtagatccggtagatccggtagatccggtagatccagtagatccggtagatccggtaaacccggtagatccggtagatccggtagatccagtagatccggtagacccggtaaacccggtagatccagtaaacccggtaaacccagatccagtaaatcctatgaagccagtagagccaatcattccagttactcttgaaaatcaatttaccttggtgaatcagactatttctgttaatgaggaaatagcaacacaaccagctaaggatattgtgaagttaccgaaaacaggagaaagcggaatgacatctagtctatttggagggttaatactgactgttactagcgctattttactaagaaaacgaaaataa

SEQ ID NO: 24588 - DNA, 1770 bp, Listeria monocytogenes
atgaaaaaaatgggagtcaaaattggtttgtgcatccttttaataatgccatttactatatcattttccgcgaacgtctcagcggaagaaaatattagtataaaagccgctcaagatgttgtcaacattcctgacccggctttgaaaagttatctaaatgggctcttaggacaaccaagcacaagtgatattactgaagcacaaatggacactattacagacgtcaccattagtaatgctagtttgacggatttaacaggactcgattatgcgcacaacttaactattttacatttaacaaatacaggtgtgacggattactctttggttgcaaatatccctagtttaactaatcttaatatctctggaagcaatttaacaaccaattccatacctgatttaaatggtttaacgaatgtaaccaacttaaacttaagttccggtaaactagataatagtgctttgacaaaatttaataaacttccaaatttaacttttttgaatttagacaataatccttccatcactgattttatgccactcaaatcccttcctaacttagccagtttatttatccaattttgtggagttaacgatttccgtggaattgattctttcccaaaattaaccaatttagcagcttttggacaaaatgtaggaagtgccattttaattaacagtaccattaaaagctctgccttgaactataacgaagccaaccaaactatctttgtaccgtttactttaatgacagaacgaagcatgaacttcgacggttatttattccctttcacaacaaatacagcatcttctagcacttatttcaccttaaatggtgtgcaaattagtggtagtcgtctgagcattgatgatacaggagtgaccgtaagcgggattacaaaagatttctttgattctattactaaaatggaatacaatgctttttatgataatccagctggatcttataattctccgccaaatttcaatagttattcggtatctagcggaacttatgaccactattttgacattgatcattcactaacgattacgaatgattctgcaataagttatggagagcaaactaccgttaccgaagaacaatttttaaaagatgttcatgctgaaacagatgatggaacacctgttactagtgattttaatacgattgtagactttagcaaacctggtgtctatacggtaacattaaatgccgaaaatgcagctggtttaaaagcaacgccaacacaagtaacggtgaccatacttgcaaaaccagtcatcacagcagataagagcatttcttacacgaaagatacaaccaagacagagcaacaatttttacaagatattgcagcaaaaacaagtgatggtagtaaagtaacaagtgattttgatagcgttgttgatttagctaaagttggaacgtataaagtaactttaaatgcggtaagtgccgacgggctaaatgcagacccagttattattttagtaaatgtggtagcaggaaatgaacctccgacgccacctggtcccggccctgatcccacaccagatcctacgccaaatcctaataacccaaatatcaatcccaacccagataatggacaatctgcgaaatctgaaatcgcatcaaatccgtctaactcagaagtaaatatcgctttaccaaatactggcgacgcgagtcaagcgacgactgtattaatcggtattatcctcgccggagtagctatcctctttttccggaaaagaaaacatagctaa

SEQ ID NO: 24589 - DNA, 747 bp, Listeria monocytogenes
atgacaagatataaagcgataatttcttatgatggtagtgggttttatggctatcaggtgcagccgaatacacgtacggtccaagcggaaattgaaaaagcactgacaaaaatgcataaaggtaagactgtgcgggttacagcatcgggaagaacagatactggtgttcatgcgaaaggtcaggttattcatttcgattcggaactggatatcactgccgaaaaattccaaaaagctttacaagtcatgaccccgtttgatattagctttttaacagtggaagaagtaccagacgatttccatgctagatttggcacggtcggaaaagaatatcgttatgtggtaaaacggacgaaaatttttgatccttttagtcggaattttgcgctacattatccgtatgaactggatatttcaaaaatgaaattggcgagtaaacgcctgattggcgagcatgattttactagcttctgttcggcgagaacggagcgggattctaaagtccggacgctttatagtattgatttttatgaagaggacgatgagacgttagtgattgcttttcaagggaatggctttttgtataatatggtccgaattttgacgggaactttgctcgatgcagggcaaggtcgaatttctccggatgatattagtgaggctttattagcacgtgataggcaaaaattaattagtaaaactgcgccgccacaagggttatatttatggcgagtggactatgaataa

SEQ ID NO: 24590 - DNA, 2166 bp, Listeria monocytogenes
gtgaaactaaattttagaaaaaagaaaaaagattccactaagaagaaacgcgccatcattccactacgtttaaatattctattctttattatttttatattattctccgtgttaattttacgacttggtattgttcaaatcgtgcaaggggatacgtacaaacgtcaattagaagaaacagataacgtaacagtttccaaaaacgtaccacgtggtagcatttatgaccggaattacaatttgttggttggtaattcagcggttaaatccattacctacacacgtagccaacaaacacagactgcagaaactctacatgtagctcaaacattggaaaagctaattactgttgagcctgaaaagttaactgatcgtgatttgaaagattactggattttaacgcatcaaactgaatctttaaaccgcttatccgcgaaagaacaagcgcttgattcatctaaagcttacaaaatccaagttgacaaagtgacaaaagaagatatcgctagcttaaccagtgaagacttaaaagtagcaaccatatataagaaaatgacaactggatatgccatgactgaatctgtcgtgaaaaataaagatgtgacagacgaagaaattgcacgtgtcagtgaaaacatggacagtttacctggtgtagacaccactacagactggaatcgctattacacgtatgatgaaactttacgctcgattttaggttctgtttctacagctaaagaaggtctaccaaaagacaaagcagaatactacttatctcaaggatatagtcgtaatgatcgcgttggtaaaagctatctagaagctcaatatgaaagtgtgctcgctgggtcaaaatctcagtcagaaagcgtacttgattctaaaggtaatattattgaaactgtcaacaaatacgaaggctccaaagggaaagatttagttctttctgttgatgttgaatttcaaaaagcagtagaagaaattctccaaaaaaacatcaaacaaggtaaacaatatgctggttcagatttatttgaccgcgcattcgttgttgccatggatccatattctggagaagtccttgcattagcaggacagaaactaaatgacaagggcgagtttgaagattattcccttggtacatttacaactgcctacgcaatgggctctgctgtaaaaggttctactatccttggtggtattatggacggtgctattacaaacaaaactgttttcactgaccaaccaattgtactaaaaggaacaaaaccaaagagctcatggtttaacagaaccggagctggtaatagaccacttgatcctgtaggagctttagaaatttcttctaactcctatatgtaccaagttgcaatgaaaatgggtggcgcaaactatgtaccaaacggacctcttagagcaccacttagcacctttgacgatatgcgttactactacaaccaattcggtctaggtgtaaaaactggcatcgacctcccaggtgaacaaactggttataaaggggacgaccaaacaatcggtaaaattctcgatttcgctatcggacaatatgactcctacacgccactacaaatggctcaatatgtttctactattgccaatgggggttcaagaatcgctcctagtatggtaaaagaaattagaaatccaagtactaatggtgactctgttggaacacttgcaacagctaatgaaccaaaagtattaaataaaatcggtgtttctgaaagtgatatcaaaacagtacaacaaggcttctatgaagtaacacatggttcaacaggtaccgcaagaactgttttcacttcaagtgattacgatgtcgctggtaagacaggcaccgcggatgcgttctatgatggaccaaaagaaggtaacaaaatggccagtgtttggaatacgacattcgtcggttatgcgccagtggaaaaaccagaaatagctatttccgttgttgttccttggatttatcgtccatatggtacggaccaaaaaacaaatatgaaaatctccaaagaagtattcgacaaatacttcgaacttaaaaaagaacgatctgaatcgaaaaaagatacttcaaaagtagagcaaccaattaacaacaaagaagcagctgcgaaagcacaatcagaacaaaccgaaaattaa

SEQ ID NO: 24591 - DNA, 657 bp, Listeria monocytogenes
gtgggtcaaaaagtacatccaataggtatgcgtatcggtgtcatccgtgattgggactccaaatggtacgcggaaaaagattatgcggacttcttacatgaagatttacgcatccgtgattacgttgcaaaacgtctatctgacgcttctgtttctcgtgtagaaatcgaacgtgcagctaaccgtgtgaatatcactattcatactgcaaaacctggtatggttatcggtaaaggtggttctgaagttgaagcattacgcaaaaacttaaacgaacttactcaaaaacgtgttcatatcaacatcgtagaaatcaaacgtgctgacctagacgcaaaattggttgctgaaaacatcgctcgtcaattggaaggtcgtgtatctttccgtcgtgcgcaaaaacaagctatccaacgtactatgcgtgctggagcaaaaggtatcaaaactcaagtatctggtcgtcttggcggagcggatatcgctcgtgctgaacactatagcgaaggaacagtacctcttcatacattgcgtgccgacatcgactacgcatgggaagaagctgacacaacttatggtaaactaggcgttaaagtctggatctaccgcggtgaagtccttcctacgaagaaaaacaatgtggaaggaggaaaataa

SEQ ID NO: 24592 - DNA, 1092 bp, Listeria monocytogenes
atgaaagtagcaataagtggtggtggtactggcggacatgtttatccagcgcttgccctcatcagagaattaaaaaaaagtcatcctgaagcggaattcttatatatcggaacagaaaaaggcttagaagcgggtatcgttaaacgtgagggtattccttttgaagctattgaaattacaggttttaaacgttcattatctttagaaaatattaaaacagtgatgcgctttctaagtggtgcaaaaaaaagcaaacaaattttgcgcgattttaaaccggatgtcgttatcggaacaggtggttatgtttgtggtccagtcgtttatgcagccgcaaaacttaaaattcctactttaatccacgaacaaaatagtgttgctggattaacgaataaatttttaagtcgctacacagataaagtagctatttgttttgaagaagtaagtgattcttttgcatctgaaaaaatcgttttcactggtaatccacgtgcttctgaagttgtaggtgtggactcagaaggtgcgcttgaagcttacgggcttgtttcagggaagccaactgtgcttgtttttggaggcagtagaggagctcgcggcgtgaatgaagctgtagaagctgttttgccagaatggaataatcgggattttcagctactttatgtaacaggcgatgtacactatgaaaaaataaaagattctttagctgagttgaatttgggtaatcatattagtgttcaaccatttatttatgatatgccgaaaattttaaacgctgtaacgctagttgtttcaagagcaggagcgactacacttgcagaacttacagcgcttggggttccaagtattttgatacctagtccatacgtgacagcgaaccaccaagaaaataacgctcgcgctttagaaaaaaataatgcagctatcgtaattacagaagcagaattaaaaaataccgatttaatggcgacagttgattcgattttgaatgacgaggcgaaattaaatagtatgaagctaagtgctaaacaaatggggcgcccagatgcagcagcgaaattagtagaagcagtccttagcattatgaaataa

SEQ ID NO: 24593 - DNA, 1404 bp, Listeria monocytogenes
atggtagtaggcgattttccagaagaaagagacaccatagtcatcggtgcaggcccaggtgggtatgtagccgcaatccgagctgcacaactcggacaaaaagttaccattattgaaaaagaatattacggcggtgtgtgcttaaacgtgggatgtattccttccaaagcacttatcacaatcggtcaccgttttaaagaagctggacactctgataacatgggtattacagcggacaacgtgaacttagatttcacaaaagcacaagaatggaaaggcggcgtagttaacaagcttacatcaggtgttaaaggccttcttaagaaaaataaagtagaaatgttagaaggagaagcgttcttcgtggatgatcattccttacgtgtgattcaccctgattccgctcaaacttatacatttaacaacgtaatcattgcaacaggatctcgtccaatcgaaatcccaggtttcaaatatggtaaacgtgtattaagctcaactggtgcacttgcactaacagaagttccgaaaaaattagtcgtaattggcggcggatatatcggaacagaactaggtggagcattcgctaaccttggtacagaactaactatccttgagggtggtccagaaatcttaccaacatacgaaaaagacatggtttccctagttaaacgtaatctgaaaagcaaaaacgttgaaatggttactaaagcacttgcaaaatctgctgaagaaactgaaaacggcgttaaagtaacgtatgaagctaacggtgaaacaaaaactatcgaagctgattatgttttagtaacagtaggtcgtcgtccaaatacagacgaaatcggtttagaacaagctggcgttaaagtaacagaacgcggtttagtagaagttgataaacaaggtcgctcgaatgtttctaacattttcgcaattggtgacatcgttcctggtgttcctctagctcacaaagctagctatgaagcaaaaatcgctgctgaagcaattgctggcgaaaaatccgaaaacgattatacagcacttccagctgtcgttttcagtgatccagaacttgctacagttggtttaacagaaaaagaagcaaaagaaaaaggctttgatgtaaaagctgctaaattcccattcggtggtaacggtcgtgcgctttctttagatgcaccagaaggatttgttcgtctagttactcgtaaagaagatggcctagttatcggcgcacaagttgccggaatgaacgcttctgatattatttcagaaatcggcttagcaatcgaatcaggcattacagcagaagacatcgcgcttactatccacgctcacccatcactaggagagcttacaatggaagcagccgaacttgctttaggtcgcccaattcatatgtaa

SEQ ID NO: 24594 - DNA, 1869 bp, Listeria monocytogenes
atggcggattctaaaagttttacatttgaactcaacgagagcgttttaacagcgcaagttggcaggctagatgaaatggcgatggttgtagagcaacgattttcagagctcaaaatgactattgaagatgttggaaatgctgatccaggttcgaaaatttccgagtctttaggtgggctgcagtctgggcttggcacgattagttcggcgtttggacagctgggttctagtagtgaggcgattacatctggattcggtactgcggttggttctgttggtggaatcacggatgcgtttaaaaatctaggttcaagtgtgcaaaatggtacgttattttcaagcttggcgactggaattggtggcatgagtacgatgcttggtggagtatctggcggcgttcaaggaattacaaatctagctagtggttttatggagttgaagaaccatttaggcggattaatgtcttctattggcggcgttggtggaattatgggtaaactgacctctcctatggggttagttattatcggtattgtagcgttagtagctgcatttgcgtatttgatgacgacgaatgaatcattccgaaatacggtgatgtcagtcgtaacacaggttgcgcaactgttcggtcaacttgtcgccagtttaatgccgattatcatgcaaattgttactgcggttatgcaaattggtgccgcgttaatgccaatggttatgcaatttattagcttttttgcgcaattgttagcccaattaatgccgtttattaatatgctgatttccatgcttatgcctgttattatgcagattgttcaagttgttatgtcgcttgtttcggcactattaccgagcatcatgacagtgattcaaggcattatgagcgttattcaatttttaattccaataatcatgcaaattgcgacggtggttgtacaaattgttgtaacgattatttcttatataagtaaaattatgccgattgtaatgacgattattggcgttattgtttcgattatcacaacgattattagttacgtcgttattattgcgacgacgattgctagtgttattgggaaaattattagctttattgcgagtgttattacggcggttatcgggattgtgcaaccaattattgcctttattaccaatatctttacgactatcgtgacaattattggtgcagctttccaaatggtatttactgttgcatccaaaatttggaattccattatgtcgactatttccggaattattgacggaatcaaagcagtcatcacaggtatttctactacagtttcatcagtgtttaacggagtgaagcgcattattacaggtgtttttgacggaatcaaaagtgcttggggtggtttaactgattttgtaggaaatattttcgatggtgtttcaagtgcaattcaaacagtggtagacaatgtcaaaggttttgtaaacgtggtaattcgagggattaatggagccattggtttaattaataagattccaggagttgaaatcggcaaaataccgcaattaatttccggaacaacaaatttccaaggtggctttgctcgaatgaatgaaggcggccgaggcgaaatggttgttttaccgtcgggttcgcaagtaattccgcacgatgcaacgatgaaatacgcaagagaaagtgcgcgcggaaataaatcaatgctttacacgagtcaaggcgctgatttggctagagttgaaaatcttctcgagcgcttactacaaaaaaatcctgtaatcaaaatggatgacaaagtggtagctgaggtagttagccgtaatcaagctaactcatttgatcagtacaactacacaatgggaggtgcagcttattcatga

SEQ ID NO: 24595 - DNA, 903 bp, Listeria monocytogenes
atgatacaagaggggaagttagagcaacagttctttgactatcttcactcagaacgtaattattcagtgaacactagtacagcttacgaaaatgatttacttgatttccgccgctttttaaatgaacaagccattacaacttatcagcaagttacttttctagatgtgcgtatttatttgactgaattaaagcaaaaatctttttctcgtacaaccgtagctagaaaaatttcaagtttacggagtttttacacttttcttttaagagagaatgttattaacgaaaatccgtttacttacgtatcacatgcgaaaaatcagttaaggcttcccaaatttttctattcagaagaaatggaagctttgtttcaagtggtctacgaagataatgaaacgcttacattacgtgatagagtgcttttggaggtattatatggtacgggaattcgggtgagtgaatgtgctggaatactgttgcctgacttagatacatcttatcaagccatcctcattcgcggaaaagggaataaagaacgctatgtgccgttcggggcttatgcagaagatgcgattacagattatttgccagaacgtgtcaatcttatgtctcgctataaaaagtcgcatgatgctttacttgtgaatcattacggtgatcctttgacgaccaggggcattaggtattgtttgacgaaaataattagtaaagcttcattaactcgaaaaattcatccacatatgttacgccacacgtttgcaacagatttacttaataacggtgcggatatgcggacggtacaagagttgcttgggcatgctagcttatcatctacccagatatatacgcatgtaacaaaagagcatttaaagtctacttatatgaaacatcatccgagggcttaa

SEQ ID NO: 24596 - DNA, 675 bp, Listeria monocytogenes
gtgtttattcacggttttcaggaagaagtagggaatttatggcaagaaacgttgcggcacccatttgtgcggagtttggcggatgggacgcttgagaaggaggcgttttactattatttgttacaagatgattattatttgtcgcattttgagaaggtgattgagaagagtgtggagcaggctgggacggcggaacttgctgcggaaatgagggaagtacaggtgcggcttcagcagtcggaattgttgatgcgcgaacagttttatccgcgggttgggctaacggagcgtgatttttccgagcgaaaaccggcgccaactgcttatcattatacttctcaccttcatcggatggtggattttggaagttttggggtgacgattgcggcgcttttgccgtgttatgcgctttatgcggatataggaaaaatgtacgaaggggcgcggagttcggagccattttatcaagagttgttggatagttatgtggatgaaaattatcaaaaagtggtgttgcagcagaaacggttggtggaacaggcggcgagtatggcggatgcgcgggaactggccctcatgaagcaggcttttcaaattagtgtggaaatggaatgggcgttttttgatatggcttataaaaaacaaaattggcgtgggagtgtgaattatgtttga

SEQ ID NO: 24597 - DNA, 744 bp, Listeria monocytogenes
ttggataaaacaaagagaaaaatgatttatgagacttttatgcttattctcatattactttcccttgccctattaccgtacagaaacaactttacatttattttaaattggattatttgggtgatttttacgcttgattatctggttcgactttaccgggctgataataaatggcattatgtaaaaacgcatccgtttcaactcattgcgattattccattttatggtggatttagagcggctcggattgttagttttgttcatcttttaagtattaccgcgatgggaagacgctatattgtaccgatttatagctttttccgttctaatggtttaaatcgatttttaatgatttttgttttacttgtgattataattcctgttccgatggtatttatcgaacccgaaataaacaattatcctgatgcgctttggtgggcgattgtgactgcgacaacagttgggtacggggatattgttcctgtcacgccaattggacggattttggcatcgattatgatgctgttcgggatagcatttatcgggatgattactagtacgataacaaactttttccgcgccaaaaagcctactaattctagtacgcaaagagcgaataagattacccaattaatttcagaaacaccagacttaaccaaagaagaaattgctgtagtagagcaatttttgacactaaggaaaaaagaattagctgatgaaaacacaaaaagtgatagcgaatga

SEQ ID NO: 24598 - DNA, 768 bp, Listeria monocytogenes
atgcagcgttattttgtaacatctgagctagagaatgataacgatacactggccattacaggagaaaatttccatcatattgcacgtgtaatgcggatgaaagaatccgaccaagttttcattgttttcccgagcaaaaaaacatgcatcgctgctattacggcaataaatgaggaagaggtattattaaatttagtgaaatggctagaagaagataccgaattgcctattgaaatcaccatcgcgagcggtctaccaaaaggcgacaaactcgaactcatcattcaaaaaagtacagaactaggcgcacacaaatttatctcctataaagcagaacgatctgtggtgaaatgggatgacaagaaagtcatcaaaaaaattgagcgacttcaaaaaattgcgcaagaagcggctgaacaatcgcacaggacaatcattccagaagttcattatgctgctagtttcaaagagttaatgtttggccatgttcactatgactttgttatcgctgcatatgaagagagcgccagagaaggcgaggatagtgcacttgccagcttatttcaaacaatgaagcctggacagtctgttttgtgtatttttggaccagagggcggcattagtgaaaaagagctattgcttcttgaagaagcgaacgcaaaacttgccggactcggcccaagaattttaagaacagaaactgctccgctctatgtattatcagctgcttctttctattttgacctttacaaaaataaaaatcgttaa

SEQ ID NO: 24599 - DNA, 885 bp, Listeria monocytogenes
atgatgaataaagaaaatccattaaataaataccatacaggaaaatttgaaaagcaacgccaggattatcctggtttgcaaagtaaaatgacgcctgttccagatacaggtgaatcaagctatcaaggcgctaataaattaaccgggaaaaaagcctttgtaacagggggagactccggaattggtcgggctgcggttattgcctatgctagagaaggtgctgatgtcgcgataaattatcatccggatgaagaagtagatgcacaggaagttaaagcgattgttgaggaggctggacagaaatgtgtcttattaccaggtgatttacgaaaagaaggtttagcgaaagatttagtaaaaaaagcatataacgagttaggtggactagatattctagtgctaaatgctggactacaacaatatcaattagatattcaaaaacttccagctgaacagctacgtgatacatttgaagtgaacgttttctccgttgtgttcgccattcaagaagcacttaattacttaaaagcaggagcaagtatcattttaacgtcctccattcaaggcgttaaaccaagcgctcaccttgttgactatgcaatgacaaaaagtagtttaatttcgcttactaaaagtttagcggcacaactaggtgaaaaaggtattcgcataaacgcagttgcaccaggtccaatttggacggcgctacaaatttctgggggacaaccacaagatagtattccagaatttggtcaagatcaaccacttggacgagcaggtcaaccagcggaactcgcgagcgcttatgtgctactagcatcagatgaagcaagttatacaacgggccaagtatacggaattactggtggagctcctattaattaa

SEQ ID NO: 24600 - DNA, 1116 bp, Listeria monocytogenes
atggcttctaaaacaaagaaggctattatcgacgtaaagaaacaatttgaggctgttcataaacaatttgaattggttcaaattttgaatgaaaaaggagaaattgttaatccagatttaatgccggatttaacagatgatcaattagtagaattaatgactcgtatggtttggactcgtgtacttgaccaacgttctatctcacttaaccgtcaaggacgtctaggtttctacgctccaactgctggacaagaagcttcccaacttgcaagtcactatgcacttgaaaaacatgactatattcttccaggataccgtgatgtgcctcaacttatctggcacggacttccacttacaaaagcgttcttgttctctcgtggacactttgtaggtaaccaattccctgaagatttaaatgtattatcaccacaaatcatcatcggtgcacaaatcgtgcaagctgccggtgttgctctaggtcttaaaaaacgtaaaaaagatgctgttgtaatcacttatacaggtgatggcggttcttcccaaggtgacttctatgaaggaatgaactttgcgggtgcttaccatgctccagcgattttcgtagtacaaaacaacaaattcgcgatttctacacctcgtgaaaaacaatctgctgctgaaacattagctcaaaaagcagttgcagctggaatcccaggcgtacaagtagacggaatggatccacttgcagtatatgctgtaactaaattcgctcgtgaacgtgcagttgctggtgaaggcccaactctaatcgaaacaatgacttaccgttatggtccacatacactttctggtgatgatccaactcgttaccgtacaaaagaacttgatggtgaatgggaacttaaagatccaatcgttcgcttccgtactttcttagaaggtaaaggcctttggaacgaagaaaaagaaaatgctgttatcgatcaagcaaaagaagaaatcaaagtagcaattaaagaagcagacgctacaccaaaacaaacagtgactgatcttcttaaaaatatgtacgaaacaccaactgctcctatcaaagagcaactggcaatctatgaagcgaaggagtcgaaataa

SEQ ID NO: 24601 - DNA, 540 bp, Listeria monocytogenes
atgaatcgccttaaagatcaatatcttaaggaaattgttcctgctttaatgagcaaattcaattatgactccgtaatggaggttccaaaaatagataaaatcgtaatcaacactggtgttggtgacgctacagcaaatgcgaaagttttagacagtgcagttgaggagttagctcttatcactggtcaaaaacctgtaatcacaaaagcaaaaaattctatcgctggtttccgtcttcgtgaaggaatgccaatcggtgctaaagtaactttgcgtggtgaacgcatgtatgatttcttagataaattagttactgtttcacttccacgtgttcgtgatttccgtggcgtatcgaaaaaagctttcgatggtcgtggtaactatacgttgggtgttagagagcaacttattttccctgaaattgattacgatcaagtatcaaaagtacgcggtatggacgtagtaatcgttacaactgccaaaagtgatgaagaatctcatgagttactaactcaactagggatgccatttcaaaagtaa

SEQ ID NO: 24602 - DNA, 309 bp, Listeria monocytogenes
atgtacgcaattattgaaacaggtgggaaacaaatcaaagtagaagcaggccaagagatctatgttgagaaattagcaggtgaagttggagatgttgttacttttgacaaagttctattcgtaggtggagattccgctaaagttggcgttccattcgtggaaggcgcaactgtaacagctaaagttgaaaaacaaggccgtgcgaagaaattgacagtttataaatataaaccgaaaaagaactaccacaaaaaacaaggtcatcgtcaaccttacacaaaattaactattgatgcaatcaatgcttaa

SEQ ID NO: 24603 - DNA, 519 bp, Listeria monocytogenes
atggagaaaatgtataatgtaggaaaaattgttaatacccatggcttaatcggtgaaattcgcgttatcgcaacgaccgattttccagaagaacgattccaagtagggaataccgtgtacttattcgaaaaaaacagcaaaaagcctgaaaaactaatcattcgctcacaccgcaaacataagaactttgatttgctgatgtttgaaggattcactggaattcatcaagtggaacgtatgaaagaaggcgtacttaaaatcaaagaaacgcaactaactaatttagaggaaaacgaattttactttcatgaaatcattggttgtacggttgtgacgactgacggcgaagagcttggcgaaatcacagaaattctaacaccaggcgccaatgacgtttgggtcgtaaaaggcgcagacaaaaaagaaaaactgattccatatattgctgatgtagtcaaagaaatcaatatcgacgaccaaaaaattaccatcgaagtaatggaagggctgctagattaa

SEQ ID NO: 24604 - DNA, 2724 bp, Listeria monocytogenes
atgagaataacatccattgatatcattggttatgggaaatggtccgatgctcattttaataacatcgccaattttcaagttttttatggtgaaaatgaagccggaaaatcaactattatggcttttatacatagtattttgtttggttttccaacgaaacaacaatcaataccacgcatggagccaaaaaacggtggaccatacggcggaagattaacgctagaagacacctcttttggaaaagtcatcattgaacgtttaaaaggaaaagcaactggagatgttcgaatatattacggtgatggtcaaactgctggagaagaaaaattgccagaaattattggcgaaattgatcgaaacacctatgaggctatcttttcttttgatatacacggattacaaaatattcatcaatggaagaagaaagagtttgaacgctatttgttagcgacaggaacaactggctcggatgcacttttaaaaacagcagaaacattacaaaaaaaactagatagtctttataaaccaagtgggcgaaatccattaatcaatcaacagcttaaaagagtaaaagaagcccaacaagcttttcaaaatgccaaaaagcaaaatgcgcaatatgaagaattaattaatgagaaagagcaagcgacagcaagacaagcagagttgcaaatagaaaaaacaactaaacgagtagagttagatacattagaaacattaggggatttgtggccattataccaagaatggaaagcactaagtaataaggcttcccaaaaaaaggaagctacttttccgccagatggaattatacgattagaacacctacagctccgagaaaaagaatggcaaaatcagcttattcaattggaagaacgtaaaaaaaatctaattagcaacaatgattatgaacatagcgctttttttgccaaaaatgaagcagaaataacatatttaatcgaaacctatgcagcttttggagagcgagaaatccagttaaagaatttaaaacaagaaattaattttcatcaagttgactcaaaacaaacatttagagtatggacgagcgaacttgaacaaacaatggcccgtttaaaagaaaaagaacagttccacaaagagcaacaacatgaaattcagttaaaattaaaacttactaatgatacagaagaaaaactccaaaagaagattgatcaaatagaaatggatatgtgggataatagaacattccaacaagcaaaagaaaaaatgcaacagaagcctaaaacatttagaactaagacttttgtttcatttggcgtttttgctgtagctttatcactgatgattgttttccaatctatctggagtgtagcacttgtttttgtatctgcgcttattgtgggttatgcaattatgactacatggaaagcacttccaacaaacaatgaacaacttttagtttttttagaacaaaagaaaataaggcaagaatggcaacagcttctcaacgaaatggacattattgcatcacaaatagctgaactaagagcaaccgagaataaactaaacgaaacaatttatcaacatacaatggaattaaaacaacttttttctgatttaggaataaaacataatcccgatgcaaattgggcatatgagcttgcggtttataaaaaaaatagtgaaaaagctcaacttgcaatggaacttatctcaaaactagaaccattagcagagaaacaagaagtatataaagcaagacttgcaaacttagaattgcctggaaaatatacggatacagaagaaaaaatcacttttttacgacaaggcttgctctattatcggaaccacttaactgaaaatgcaaagcttgcagaaaagttggaacaagtaacgatgcaactagacttagttaagcaagatttattgctcataaagaaagaaaaagcagatttattagcgagtgctaatgcgaagaatgaagaagaatttcgtatggctgcaattcgtgtaaaagaagaacagaattggcgagaacgattagttctaatagaagcccaacttgaaccagaaaagcgaatagctctaaatcaatatgaaaaccaagcaactatcaaagaaaaagagctgcaattggaagaaacacttcgccaaatagaactagaacaagaaaaaatccatgcctcactcgcggcacaaaaccacgcaatacacaaattagaagaaggcgggactttcgcggtattgatgcaagaattctattcggaaaagagcaaactacaacaaatagcagccgaatggacagaaacaaaactggcgcttcaaattttacaagatacaatgcaacggttacaagaaggaaaacttcctaaaacgttaaaattagcaagtgaatatttcaaccacttaactaatggtaactatgacaaagtatacttacaagataataggcttcaagtagaaagtaagaatgttgtaccattcttcccagaagagctaagccaagcaacaaaagaacaattatatttggctattcgttttgccttaattgatgtgattcataaagattttccactaccaatcattattgatgatggatttgtgcattttgattctgctaggatgggacaaatgatgcaactgctccgaaaaagaaaaagtgaaaaccaagtcatttttttcacatgccatcaagaaactcgcaaatatttttccagtgaggacatacgcatgctataa

SEQ ID NO: 24605 - DNA, 1080 bp, Listeria monocytogenes
ttgtatcagatgaaaaataaactacaggttaaaatacccggaaaattatatgttgctggtgaatatgcagttgtagaatcaggtcatacggctattctaaccgcggttaaccgttatataacgctaactttagaggatagtgaacgcaatgaattatggattccacattatgaaaatccagtttcatggccagttggcggcgaacttaaacctgacggagaacattggacttttacagcggaagcaattaatatcgcgacaactttcctgaaatcagaaggaatcgagctaacacctgtgaaaatgattattgaaacagaattaatcgaccaatctggtgcaaaatatggactaggttcaagcgcagcggcgacggttgctgtaatcaacgcgctaatgacgaaattttatccagaaatatctatgctaaaaaaattcaaactagctgcactttcccatttagtcgttcaaggaaacggttcatgtggtgatattgcatcttgtatgtacggtggctggattgcgtatacgacgtttgatcaagaatgggtgaagcatcgtttagcttataaatcgctcgaatggtttatgaaagagccgtggccaatgcttcaaatcgaaacattagaagaaccagtgccgactttttctgtaggttggacgggcacacctgtaagtaccggaaaactagtttcgcaaattcatgcttttaaacaagaagatagcaagaattaccaacattttttaactagaaataatgagattatgaagcaaataattcaagctttccatacgaaagacgaggaattgctctattcagctattaaagaaaatcgtcgcattcttcaagaacttggaacaaaagctggcgtaaatattgaaacaagcttgctaaaagaactcgcggactcagctgaaaacatgggcggcgcaggaaaatcatctggctctggcggcggagactgtggaatagcattctctaaaacaaaggaactagccgaaaaactagtgaatgagtgggaaaaacttggtattaagcatttacctttccatacggggagagttcaaattactgaataa

SEQ ID NO: 24606 - DNA, 792 bp, Listeria monocytogenes
atgagagtagcggtatcaggatttaaaggaagaatgggacacgaggttgtcaaaactgttttaagagaagcagatttagagttagtagctgtacttgaccatgaaccaaaagaaaaaaatataaatgaaatggtggaatttagctcgttagatgtacctgtttttggtaatttaagcgagatgttggaagaaataaaaccagattgcgtcgttgattttacgactcctaaagtagggtatagtaacacgaaaacgattttagagcacggcgtacgcgcggtcgttggtacaacaggttttacaccagaacaaattagcgaactaagaacgattgcagagtcgaaaaaaatcggggctttaattgcgccaaactttgctgtaggtgctgttttaatgatgcaatttgcgcaaaaagcagctaagtattttccaaatgtcgaaattattgagttacatcatgataataaattagatgctccaagtggtaccggtgttaaaactgcggaaatgatggcggaaacgcgtgaattcgttaaacaaggtgcagcagatgaagtagaacttattgaaggtgctagaggcgcagaatatgaaggcatgcgaattcatagtgtgcgtttacctggactcgtagcacatcaagaagtgatttttggagcagagggacaaggattaacaattcgccacgactcgtatgaccgaatttcctttatgtctggcgtggctctttctgttcgtaaaacgaaagaactagaaacacttatttatggcttagaaaatattttagactaa

SEQ ID NO: 24607 - DNA, 1191 bp, Listeria monocytogenes
atggaaaaaaacatcgaaacaaagaaaatcaatttggcattacttgtttgccttgtgggatttccacaaattagtgaaactatttatacaccttctttaaccgaaattgctaagggctatggggtatcgttaaacctggctcaaatgactttaagcatttactttcttgcttttgctgttggtgtcttcttttggggcgttagttccgattttttaggtcgacgaaaagcgatgaactttgggatattcatctatattcttggttgcttcgcctgccttttttcaaataatattacaatgctttttatcggacggtttgttcaagcattcggcgcaagtacgggttctgttacaacacagaccattttgcgtgacaactaccacggaaatgatcgccaccatttatttgcaaaaatatctgccgctttggcattttcaccagcaatcgggccattaattggtgggtttatcggacaatattacggctttcgcgtggtatttttatttttagtagttatgggaatgatattgctgttctggagtttaaaacgactaccagaaacaaaaacagtgaacgctacctcctttagtgtgcagaaaatcgtcgtaattggtaaaaaaatgatatttgaccgctatacaattgcttttggagcgctaattggtatttttaatggaatattgtttagttactactctgaagctcctacaatttttattgagaggtttcatttaaatcagagtcagtatggctttatggggtgcgcagtggctatggcaactattttaggtgcttggctatcgaactggcgcctaatgcagaactcgcctcataaaatcattaaagaaggtattttattagccattatcggcacattagctcttagcgtggtcgcgatttttccgctaacgaaccaagttatattgtatattcttttcatctctattatcttggcaggaatcggcatggctttaccaaattgcttaagtctagcactagtgaaatttcaagaagccgccggtacggctagcgcatttttaagcttaggttattatgtaattgtcagtctttgtactttcttcattggcgttttgcattcgggatcaatgcttgtatttccctcattctgcctagtattacttctaattgccttgctttgtataaaaatagctactagaaataatcgctaa

SEQ ID NO: 24608 - DNA, 2067 bp, Listeria monocytogenes
atgagtaaagactttttattagaaattggtttagaagaaatgcctgcacaatatgtgactagttctgttttacaactagaaaaacgtgtaacggactggctaactgaaaataaaatcgagtttggcgaaattaaaacctattcaacaccaagacgcttaactgttcttgtagaaggaatggcagaagagcaagcaaatcgtgtagaagaagcaaaaggtccagcgaaaaaaattgctttggacgaggaaggcaattggtcaaaagctgcattaggttttgctaaaagccaaaaagtcgaccctgctgatcttactttccgtgatattaaaggcgtggaatatatctacattaaaaaagaagtcattggtgaaaaaacaagcacattacttccaagtttagaaaaagtagtaactagcatgactttcccagtaagtatgcactggggtagcaatgatttaagatatattcgcccaatcaaatggcttattgctatgtttgacgaagaaatcattccatttgagattactggagtaacaacaagtaacacatcacgtggtcaccgtttcttaggtaagtcagccacaattaaacaacctagcgactatccgaatgcgttattagaacaatttgtagttgtgaatgcagaagaacgtaaacaagctatcgtagaacaattacgtgaactagaatccatggaaaattggcaaattaaagaagatgatgacttactagaagaagtaacaaatctagtcgaatatccaaccgttttatctggtaatttcgagaaagaatatttagaactaccagaagaagtgttgatcactactatgaaagaacaccaacgttatttccctgtatttagccaggcgggtgaactattacctcattttgttactgtacgtaatggaaaccatgaaaatcttgacacagtcgctcgtggaaatgaaaaagtgttacgcgctcgtttgtcagacgctgatttcttctatcaagaagatttaaaaatgacgattgacgaagcagttgctaaacttcaaaatatcgttttccatgaaaaattaggtacattaacagagaaaatgaaacgtgttcaaaaagtagctttaatgcttgcggactacctagattggcaagaagaagataaacaagatattatccgtttaacgaatatttataaattcgatttagtgacaaacattgtcggtgaattccctgaactacaagggttaatgggtgagaagtatgccttattacaaggtgaaaaacctgcaatcgcaactgctattcgcgaacattatttgccaaactcagcggaaggtgaattaccacaaactgatctaggttctttaattgctattgcagataaattagaaacacttatcggatttttctgcgtgaacattgttccaactggttccgctgatccatttggtttacgccgtagtgctttcggagcgatgcgtattatccaagcaaacggttggaatatcccaatgctagaagttatttcccgaattgtggatatggaacgtgcagaaggctctacagaattaccggacgcagatgttaagaaagaagtacagactttcttgaaaaatcgcctacgtgttattctacaagggcaccatattcgtcatgatattattgatgctgttatcggcggagaccctaatgtgattccgcaacttatcgatcgggcgcaaattctaaatgaacatgcagaggctgaatggttccgtccaacgattgaagcacttagtcgtgtcgtaaaaattgctaaaaaatatgaagatggcgtggaagttgatccagcgttatttgaaaatgaatacgaacaagctctctttgataaattagaaaaactgaaattcgattatgccggtctaaccattattgaacgattaaaagcttttgcggatttacgaacaacaattgatgcttattttgataatacgcttgttatgagtgataatgatgaattgaaaaataaccgtctagcacttctattcgaactggcaagctttattaaagaatttgctcaaatggatgaaattaatgtaaaataa

SEQ ID NO: 24609 - DNA, 864 bp, Listeria monocytogenes
atgacaattcagtggtttccaggtcatatggccaaagctcgccgtgaggtaacagaaaaattaaaactagtagatgtgatttttgaattagtggatgcacgtatcccgctatcttcctctaatcccatgctagaagaaattatccatcaaaaaagacgagtgattattttaaataaagcagatactgccgatgaaaaaacaacaaaagaatggattgactactttgccgagaaaggtttgccagcagttgctgtgaatgctcaagaaggtaaaggactattcaaaatagaacaagccgccgaaaaattaatggctgaaaaattcgaccgtttaagaagtaaaggtatgaagccaagagcaattcgtgcgatgattttaggtattccgaatgttggtaaatcaacattaatcaatcgactagcgaaaaaaaatattgcaaggacaggtaataaacctggtgtaactaaggcacaacaatggattaaagtaggtaaaacattagaacttttggatactccagggattctttggcctaaatttgaagatcaagaaattggttacaaattagctcttacaggtgcaattaaagatgatttacttcaaatggaagagattgctggttacggtttgcgatttttagaaaaccattaccccgaccgacttcaaacttggctaaaagtagaaactgtttctgaagaccctatcgaaacactagcatttattgcagaaaaaagagggctcttagatcgatacaatgatccagattattctcgcgcagccgaaacggtagttcgagaaattcgtcagcaaaagttagggagaatgtcgtttgatttcccaaattgggaagatgaagtcgaatga

SEQ ID NO: 24610 - DNA, 402 bp, Listeria monocytogenes
atgatttcaggattaagccatatcactttaattgtgaaagatttgaataaaacaaccacattcttaagagaaatttttaatgcagaagaaatctattctagtggcgatcagactttttcgctttccaaagaaaaattttttctaattgctggcctatggatttgcattatggaaggagactctttacaagagcaaacttacaatcatattgcgttccgaattcaatctgaggaagtggatgaatatattgagcggattaaatctcttggtgtggaaataaaaccagaacgtcccagagtcgaaggtgagggacgctcaatttatttttatgactttgataatcatctctttgaattacacgctggtacattagaagaacgcttgaaaaggtatcacgaatag

SEQ ID NO: 24611 - DNA, 396 bp, Listeria monocytogenes
atgtttacgattaacacaaaaagtcaactaccgatttatgaacagatcgtccaaaaaattaaagaacaagttgtcaaaggggtacttcaagaaggcgaaaagatattatctatacgtgaatttgctagtagaatcggagtaaacccaaacactgtgagtaaagcgtaccaagaattagaacgacaagaagtaatcattacagtaaaaggaaaagggaccttcatagcgaaccaaacagataaattgagctcgcccaaaaagttagcagaaacaaggaccaaattaaaagaaaccattctcgatttagtttaccttggagttaacatagaggaaatacataaattagcagacgaatatagtcaagacatcattggaggtgacgtggttgaaggttga

SEQ ID NO: 24612 - DNA, 1308 bp, Listeria monocytogenes
atgacgaagaaatcaaggtttgaccaatttggctttcaaccttttattgggcttgcaatagataaattaggattctatgagccaacagaagtacaacagaagctaatcccaggtattttaaaaggtgaaagtatcattggccaatctcaaacaggtacagggaaaacccatacttttattttgccaattattaacaatgtgaatcctgaaaaagatgcagtacaagcggttattacggcaccaagtcgtgagcttgctactcaaatttataatgaaattcgcaaagtaaccaaatacagtgaaaaagaaatcgctgtacaactcgttattggtggtacggacaaacaacgtgcaattgataaactaaaaaaacagccacaaattattgtcggaacgcctggtcgtatcaatgacttaatccgtgaacaagctttatttgttcatacggcgaaaacgttagttattgacgaagcagacatgacacttgatatgggcttcttaaatgatgttgaccatatcgctggaaaaatgccagctaatttacaaatgcttgttttttcagctacaattccacaaaaattaaaaccatttttaagcaaatatatggaaaatccacgttatgagcatattcagccaaaagtggctgcctcaaaaacggtggaacatcgcattatggccactcgtagccgtaataaacttgatttacttaaaaatgttttagttggttcgcaaccttatttggcgattgtttttactaatacgaaaacaacagctgatgaagtagcaaacggattaatcgaacgtggacttaaagtagccaaaattcatggtgacgtcaacccgcgtgaacgtaaacgtacaatgaaacaaatcgaaaacttagattaccaatatgtcgttgcgacagatttagctgcccgtggtattgatatccaaggaattagtcatgtcgtgaactatgagttgccagatgacttagatttctacattcaccgcacaggtcgtactggtcgcgccggacattctggtatcgcacttactttattcgaaccagctgacgaagatcgtctaaaccaactcgaaaaaatgggtattgagtttaaacacgttgactggaaaaataaagaatttgttacactcgaagaccgtaaccgtcgtgcaaaacgtgaagcaaaacgcgaaacagctgacccacgtgaaattggtatgcgtaaaaaagcaaaacaaaaaggtaaaccaaactataaaaagaaaattaactacaaaatgaacgaaattaaacgtcgcgaaagacggaaaaaacgataa

SEQ ID NO: 24613 - DNA, 270 bp, Listeria monocytogenes
atggctttaactcaagaacgcaaaaatgaaattattgcagagtaccgtgtccatgatacagatactggttcaccagaagtacaaattgctgtattgactgctgaaatcaatagcttaaatgagcacgttcgcgtacacaaaaaagatcatcactcttaccgtggattaatgaaaatggtaggtcaccgtcgtaacctattaacttacctacgtaaaaaagatgttcaacgttaccgcgaacttatcaaacgtttaggtttacgtcgataa

SEQ ID NO: 24614 - DNA, 702 bp, Listeria monocytogenes
atgcgcttagataaattattgtcccatacaggtttcgggagtcgaaaagaagtgaaaccactgcttaaatcaggggcagttgtcgtcaatggcacaatccagaaagatagtaaaacccaagtaaatcccgacaaagatcaaataaccgtccacggaaccccagtcgtttaccaagaattcgtctatttcatgctccacaaaccacaaaatgttgtgagcgcaaccgaggataatgtgtcagaaaccgtcatcgatttgctcgctcaagaagacacgcttacggatccgttcccagttggcaggttagacaaagatacagaaggtttgctgattataacgaacgatggcaccctcgcgcacaatttactctcacctaaaaagcatatagataaaacatactatgctaaaattgatggcgatgttacggccgaggatgtagaagctttcgcagcgggaattgaactcgatgatggctacacttgcaaaccggctcgcttagaaattattacaccaaacgaaataaaagtaactatccaagaaggcaaattccaccaagtaaaaagaatgtttgccgctcggggaaaatctgtcagctatttaaaacgaatttcgatgggcaatttacaattagatgagtcacttgcacttggtgaataccgcccattaaccgaagcagaactagctatcctccaaaataaataa

SEQ ID NO: 24615 - DNA, 1032 bp, Listeria monocytogenes
ttgaaagcagtagtaaaaacaaatcccggatatgatcaaatggagctaaaagatgtggaagaaccacaagtctatggcgacaaagtaaaaatcaaagtagcattcactggtatttgcggatcagatatccatacgtttaaaggagaatacaaaaatccaacaactcccgtcacacttggacatgaattttctggtgtcgttgtagaagttgggccagatgtaacgagtatcaaagtgggagaccgtgtcacaagtgaaacaacttttgaaacttgtggagagtgtatttattgtaaagaacatgattacaatttatgtagcaatcgtcgcggcattggtacgcaagcaaatggtagttttgcagaatttgttttatctcgcgaggaaagttgccacgtgctagatgaacgtatttcgctcgaagcagcagcactgacagaaccacttgcatgttgcgtgcattcggcgcttgaaaaaacaacaattcgtccagatgacacagtacttgttttcggaccggggccaattggattattactagctcaagttgtgaaagcgcaaggggcaacggtgattatggcaggaattaccaaagatagcgaccgcttacgtctagcaaaagaacttggaatggaccggattgtcgataccttaaaagaagacttggctgaagttgtgctcggcatgacagggggttacggagcggaacgcgtatttgattgctcaggcgcagtaccagctgtaaatcaaggattacctctaacgaagaaaaaaggcgattttgttcaagtaggactttttgccgaaaagaaaaatgcgattgatgaagaatctattatccaacgtgaaattgcttatattggcagccgttctcaaaaaccatcttcttggattttagcactcgacttacttgctaatggcaaaatcgatacagataaaatgattaccaaagtatatggtttagatgactggcgcgaggctttcgaggcagttatggcaggtaatgaaattaaagtattagtgaaatcttaa

SEQ ID NO: 24616 - DNA, 1200 bp, Listeria monocytogenes
atgaataaatattttaagaacttagcaactatattatttactgtttccgttttaactacttctattattgcctcacctgccatggcatccgcttatgaagagtcacataatgtctcaactatatatactagccctttagatacgccccatgttggtgacacgaaaatcacaggaaaaaccacaccattatcatcttttagcattgcaatttatacctcagaaggcaggctaactggaacattttttggaaccaccaatacagacggcacctattctgttgatttatccgatttcaccgtttatcatccaagtggctatgtgactacaggtaaagtaatttatgaagaaaattcctttgttcgttcaggaacggaaacgggtggtgataaagtgataaaagtaaccgttagttacgactatattcaaactgctattaatgagctattcctaaataataaccccacaggaactattttaactataacagatcaaaatgctattaacgctgtgcaggaacaaattaatactgtaactagttcagaaaaagaatctttccaagaacaacttaataatgctcaacaacaattggatgcgcgcatagcacaagaacaggcagccatacaagctgtcaaccagcttttcttagaggacagcccagtaaactcgattaaagccgaaactacgcaggatttaattgatcaagctcaaacgcttgtcgatgttcttcctgcttccgagttaaaagatacgcttcaggccaacattgtaaaagctcaaacagaactagacgaacgctccaaacctgtaacaccaccaaaaaacgatccagaaccagataacccagaagaaccagtcacaccagtagacccggcaaccccaatacctgacgaaccatctacaccaacagatcccgcaacaccagaaaaaccagaaattaccactccagaaaatccagaatcaacggtagtagaagctgattctagcgaaaatgaaccagaaaaatccgccgattcaaaaatagtaaacaacccgattcaaattactagccaagcaactaaaacagctacaaagcaagcaaaatccagcgcaacaaaaacaaccctgccacttccaaaagcaggggacacggaaaccacatctagcattttattcggtacacttatgctctcttcccttgtccttttcaaacggaaaaaatag

SEQ ID NO: 24617 - DNA, 2076 bp, Listeria monocytogenes
atgaacaggttttttagaaatgcgatattttatgtcataatattccttgttattatcgggattgttgcttcatttaactcaaacaaagaggcagccaaagatattagctattcagaatttgtgagtaagttagaagatggtaaagttaaatccgtagaaatacagccagaccgtagtgtttatacaatcaatggggaatttaaatctagtgataaaagttccgacgacaaaaaaactggtcttggacaaagcaaaacaagtagcactgctttcacaacatacgctttaaatagtgatacttctctaggcgatttacaaaaaacgttagataaagaagacgtgaaaatgaatgtagtgcctgccaaacaaaacagcggttgggttacattcctaacttctattgtaccttttgtaattatcttcatcctcttcttcttcctaatgagccagtctcaaggtggcggcggtggtaaagtaatgagctttggtaaaagtaaagccaaactttacaacgacgacaagaagaaagttcgcttcacagatgtagctggagcagacgaggaaaaacaagaacttgttgaagtagtagaattcctaaaagatccgcgcaaatttgcggaacttggcgcacgtattccaaaaggtgttcttttagtaggtcctccgggtactggtaaaaccttgctagctcgtgcagttgctggtgaagcaggcgtgccattcttctctatctcaggttcagactttgtagaaatgtttgtcggtgtcggtgcaagccgtgtccgtgacttattcgaaaatgcgaagaaaaatgcaccatgtatcattttcattgatgaaattgatgcagttggtcgtcaacgtggagctggaatgggcggcggtcacgatgaacgtgaacaaaccctaaaccaattactagttgaaatggatggtttcggcggcaatgaaggtatcatcattattgcagcaactaaccgtgcagacgtacttgacccagcgcttcttcgtccgggccgttttgaccgccaaatcatggttgatcgtccagacgtgaaaggccgtgaagcagtacttcgtgttcatgctcgtaacaaaccacttgctaaaagtgttgatctaaaagcaatcgctcaacgtacgccaggattctctggtgccgatttagaaaacttactgaatgaagccgcactcgttgcagctcgttccgataagaaagaaatagatatgagtgatctcgatgaagctagcgaccgcgtaattgccggcccagctaagaaaaatcgtgttatctctgaaaaagaacgccgcacagtcgcttatcatgaaggtggtcacgtaattgtcggaatggtacttgatgaagcggaagtcgtgcataaagttaccattgttcctcgtgggcaagctggtggttatgctgtaatgttaccaaaagaagatcgcttcttaatgacgaaagctgagttaatggaccgtattactggtttactcggtggacgcgtagccgaagaagttactttcggtgaagtaacaacaggtgcaagtaatgactttgaacgtgcaaccgaacttgctcgccgcatggtaactgaatggggtatgagtgataagattggaccacttcaatttacttctggtaacggtcaagtatttatgggccgcgatttcggtagcgacaaaggatattccgataaaatcgcctacgaaattgatacagaagttcaaagcttaatccgctactgttatgaccgcgctaaaacaatcattaccgaacatcaagaacaacataaacttatcgcggaaacattactaaaagtagaaactttagatgctcgccaaattcgttccctatttgatgacggtgtaatgcctccagatatcgatacgattgacgtagaagcagaatatccttccgaaaaagacgaagaagtagcaggtaaatcttttgaagaagaaagagaagagttaaaagaagaagaaaaagtcgaagaaactcaagaagaaccaaaagaagtcacttcggaagatgctccaaacattgagcaaacgccaaacgataaaaaagacgaataa

SEQ ID NO: 24618 - DNA, 819 bp, Listeria monocytogenes
atgattaaccaaaatttatattatcagtcagtagcaaattccaagcccatcgaaatttatctattcttcgatccagcttgtgatgactgttggaatatcgaagcgaacatgctccggttacaaatggagtacgggaactatttcaaattgcgctatgttctgcataacaatttgcagacatttgtatgtaaacaaaagcgtgcaggaaatagtaacctaagcttaaaagaacaacaaataggggcgcacctttcctatatttcttgtcttgcagtcaaagccgctgaactccaaggaaaaaaacaaggaattacattcttgcgcaagattcaagcagcctacttccttgaaaataaagatatcgctagtgatgaagtactctatgatattgctgtctccactggtctagatttatcagaattcaaaaaagatctagcctctacagttgccaaacgtgcttatatcggcgatcaaaaagtagctcaagaaatggaaattcatgaaaaccctactgtagtctttttcaataaaaatatagaagatgccggattaaaactaagtggacttcatcgttacgaagtttatgtacatgttttatccgagcttttaaatgatgccccgcaaccagaagaacgcccgcaaatggaagaatacttagcaaaagtaaaagttacttcttctgcttctatggcagatttttatggtgtttccgaacaacaaatcgagcgccaaatgaagaaatggcgtctccaacaaaaagtagaattaatcgatgctccagctggacagtctcactggaaatacatcggaaacttataa

SEQ ID NO: 24619 - DNA, 672 bp, Listeria monocytogenes
atgacaattgctaaaatgatcgatcatactgctttaaaaccagacacaacgaaagaacaaattttaaccctaacaaaagaagcaagagaatacggctttgcatccgtatgtgtgaacccaacttgggtaaaactatccgctgaacaacttgctggagcagaatccgtagtatgtactgttatcggtttcccactaggagcgaatacccctgaagtaaaagcatttgaagtgaaagatgccatccaaaacggcgcgaaagaagtcgatatggttatcaatatcggtgcacttaaagacaaggacgacgaattagtagaacgcgatattcgcgctgttgtcgatgttgctaaaggcaaagcattagtaaaagtaattatcgaaacttgcctattaacagacgaagaaaaagtgcgcgcatgcgaaatcgctgtaaaagcaggaacagacttcgttaaaacatctacaggattttcaacaggtggcgcaactgccgaagatatcgccttgatgcgtaaaacagttggaccgaacatcggtgtaaaagcatctggtggggttcgtacgaaagaagacgtagaaaaaatgatcgaagcaggcgcaactcgtatcggcgcaagtgcaggcgttgcaattgtttccggcgaaaaaccagctaaacctgataattactaa

SEQ ID NO: 24620 - DNA, 1200 bp, Listeria monocytogenes
ttggctaagaaccgtcatctatttacatcagaatcggtttctgatggacatccagataaaattgcagatcaaatatctgatgcaattttagatgcaattatttcaaaagatcccgacgcgcgtgtcgcttgtgagaccactgtgacaacgggtttagtattagtagcaggtgagattacgacctctgtttatgtcgacatccctaaaatcgttcgcgatactattaaagaaatcggctatacccgtgcgaaatatggctttgatgcagaaacatgcgctgttttaacggcaattgatgagcagtcaccagatatcgcacaaggcgtagacgaagcgttagaatccagaagtggcaacgaaattgacgctgctattgaagcaatcggagcgggagatcaagggttaatgttcggttttgcaacagacgaaacggaagaattaatgccattacccattttcttagcgcatggtttagctcgcaaattaaccgagttacgcaaaacaaataaattagattacttgcgcccggatgcaaaaacgcaagtaacagtagaatatgatgagtttaatcaacctgttcggattgatacgattgttgtttcaactcaacatcatcctgatatcacacaagaacaaattgcgaaagacttgcacacgtatcttttcccagaagtgattgatgcttctttcttagatgaagatacgaaatactttatcaacccaactggccgctttgttatcggtggcccacttggtgatgctggtttaactggccgtaaaatcatcgtggatacatacggtggttatgcacgtcatggcgggggagcgttctccggtaaagatccgaccaaagtagaccgatcgggcgcttatgctgcaagatatgttgccaaaaatatcgttgctgcaggacttgctaaaaaagtagaagtacaagttgcttatgcgattggagttgctcgtccagtttctatctctatcgacacatatggaacaagtgattattccgaacaagaattaattgatggcgtaaatgcattatttgatttacgcccagctggcattatccatatgctagacctgcgtcgcccaatttatcgtcaaacagctgcctttggtcattttggccgtagcgatcttgatttaccttgggaaagaaccgacaaagctgaggcattgaaaaaattaatcgtaaaataa

SEQ ID NO: 24621 - DNA, 1353 bp, Listeria monocytogenes
atgacacatattaaatttgattattccaaagcgctccgtttttttgaagaacgcgaacttgattatcttgaaccagcagtaaaagcagctcatgattcattacataatggtacaggtgctggtaatgacgcacttggttggattaacttaccaacagattacgacaaagaagaatttgctcgtatcaaaaaagcgacagaaaaaatccacagcgactccgatgtattaatcgttatcggaatcggtggttcttaccttggagcacgtgcagctatcgaaactttaaatcattccttctataatgtacttgaaaaaggtgcgcgtaaaacacctcaagtattctttgcgggaaatagcatcagttcttcctacttacatgaccttattgaagtagttggcgaccgcgacttctctgttaacgttatttctaaatcaggaacaacaacagaaccagcaatcgctttccgtgtgttcaaagaacttttaatcaaaaaatatggcgaagaaggcgcgaaaaaacgcatttacgctacaactgataaagcaaaaggcgctctaaaaacattatccgacaacgaaggctacgaaacatttgttgttccagatgacgttggcggacgtttctccgttttaactgcagtaggtttacttccaatcgcagttagcggcgttgatatcgatgctcttatgaacggagcagcagcagcaagcaaagatttcgataaaccagaacttaaaaacaacattgcataccaatatgcagcagctcgtaacgttctttaccgtaaaggcaaagtaactgaacttctaatcagctatgagccaggcttgcaatactttaacgagtggtggaaacaattattcggcgaaagtgaaggcaaagacaaaaaaggtatttacccatccagcgctaacttctccacagatttacattctatcggtcaatatatccaagatggccgtcgtaacctttttgaaacagttattaaagtggacaaaccacgccacaacttaactatcaataaagaagacgtagatttagatggattgaattatcttgctggcgaaacggttgatttcgttaacacaaaagcattcgaaggaactcttttagcacatacagacggcgaagttccaaactttgttgtagaagtaccagaactagatgcttacactttcggctacctagtatacttctttgaaaaagcagtagctatcagcggttacctaaatggagtaaatccatttgaccaaccaggcgtagaagcatacaaagccaacatgttcgcattgcttggcaaaccaggcttcgaagacaaaaaagcagaactagaaaaacgtttaaacgattaa

SEQ ID NO: 24622 - DNA, 471 bp, Listeria monocytogenes
atgaaacaagaagagttagacatcatattagagaatcatgggaaatggctgttcaacgaaggtggcgatagagcggatttaagtaatgcagacttaaaaaacacaaatttaagatttgcaaatttaagacttgcagatttaaggggtgcagatttaagttatgcaaatttaagatttgcaaatttaagtaatgcagatttaagttatgcaaatttaagtaatgtaaatttaaattgggtaaactggcaacatgtagaaggcttgacagtaatctgcgtacaagtagatacgacacgtaaaaacaatcaaatagcatatatcaaagaattagacatatggataacaggttgtttccaaggaacattagatgaacttaaagcgtctgttgaacaaacgcatggagataacgaaaagcttagaaagagatattacagagtgattgattttattttgaaagaggtggcggaatga

SEQ ID NO: 24623 - DNA, 294 bp, Listeria monocytogenes
atgaaacacgaccaaccaattgttccacgcaaagaagatgaaacgaaattacttcaaaatcgtttgcgacgtatcgaaggccaaatccgcggtattgctcaaatggtcgaggatgatagatattgtacagacattttagttcaaatttcagcagctaataaagcactcaaaaatgttggtttacaagtactagaacatcatacagcacactgtgttgtagatgcagcaaaaaatggggaagatgacgtaatggaggatttacttaaagcaatacgtcaattttcgaaaacctga

SEQ ID NO: 24624 - DNA, 441 bp, Listeria monocytogenes
atgaaactacatgaacttaagccttcagaaggttctcgtaaagaacgtaatcgtgttggtcgtggaacaggctctggtaacggcaaaacttcaggacgcggtcataaaggacaaaaagctcgttctggtggtggcgtacgtttaggttttgaaggtggacaacttccacttttccgtcgtattccaaaacgtggattcacaaatatcaaccgtaaagaatttgctatcgtgaacttagatgttttaaaccgctttgaagatggtacagaagtaacaccagaacttttagttgaaactggaattattcgtaatgaaaaatccggaatcaagattttatctaatggaaatatcgagaaaaaacttactgtgaaagcgaacaaattctctgcagctgcgaaagaagcaattgaagcagctggcggaaaaactgaggtgatctaa

SEQ ID NO: 24625 - DNA, 750 bp, Listeria monocytogenes
atggcagaagtacatttcgtcggagcaggaccaggagataaagagttaatcacattaaaaggatatcaattattaaaagaggcagatgtcgttatttatgcgggatcactcgtcaatccagagttgctagagtattgtaaagccagctgcgaaatccataatagtgcgagcatgaatttaatcgaaattattgactgtatggaagcaggtgtgactgctggtaaagaagtggttcgtttgcaaacaggggacttttctatttatggttccattcgtgaacaagtcgaggaaatgaaaaagcgttcgattcccttcacttgtacaccaggtgtgagttcattccttggtgcggcaagcagttttggggttgagtatacagttcctgaagtaagtcaaagtgtaattattacccgaatggctggcagaactccagtaccatcacgcgaatcgcttcgttcatacgcggcacaccaaacttcaatggtaattttcttgtctgttcaaggtattagaaaagttgtttcagaattaatcaaaggtggctataaacctgaaacaccagcagcagttatttacaaagcgacttgggcggaagaaaagaaagtaaccggcacgttagaagatatcgcagaaaaagtgacagaagctggaattacgaaaacggcgcttattatggtcggtgatttcctcggagaagagttttattattctaagctatacgataaggatttcaaacatgagtacagataa

SEQ ID NO: 24626 - DNA, 1377 bp, Listeria monocytogenes
atggcacaaacatccactatccaaaacgacacaaaggcagccgaagaatacgcagctcgagtgtttgaaacaattaaacaacggaatcctggcgaaacggaattccaccaagcagttgaagaattcttaaactctgttatcccagcccttgcaaaagaacctaaatacgaagcaaatggcattttagaacagttaacagaacccgaacgccttatcagtttccgagttccatgggtggatgattctggcacagtacacgtaaatcgcggttaccgggtccaattcaatagcgcaattggtccatataaaggtggtcttcgtttccacccttctgtaacaggaagcatcgtcaaattcctcggttttgaacaaatcttcaaaaactccctaactggcttaccaatcggtggcggtaaaggtggctctgactttgatccaaaaggaaaatcagactcagaagtaatgcgtttctgccaaagttttatgactgaactacaaaaacatatcggcccagatacagatgttcctgctggtgatatcggagttggcggtcgtgaaatcggctacttattcggtcaatacaaacgtcttcgcggcgcttatgatgccggtacaattacaggtaaaggcctttcttacggcggaagtttagctcgtacagaagcaacaggttacggtcttgtttatttcaccgttgaaatgttagaagcagctggtgaaaccattcgcggcaaaaaaatcgtcgtttctggttcaggtaacgttgccatttatgctatcgaaaaagcacacgaattaggtgctaaagtagttgcatgtagcgactctgctggttttgtttatgacaaagaaggtatcaaagtagagaccgtgaaacaattaaaagaagtagaacgcaaacgcattagcgaatacacaaccattcatccatctgcagaatattacgcaggcggcgacgtatggtccgttccatgtgatatcgcactaccatgtgcaactcaaaatgaaatcaatgctgatcaagcccgagcgcttgtaaaaaatggtgttatcgctgttgcagaaggcgcaaacatgccttctacccttgatgcagtggatatttaccacgaaaataaagttctattcggtcctgcaaaagctgccaatgctggtggtgttgccgtatcagcacttgaaatggcacaaaacagcacacgtatgagctggactttccaaacagtcgacgaacatttacaaaacatcatgaaagatatttataaaaattcaagcaatgctgcaagcgagtatggcgcacctggtaaccttgttatcggcgcaaatatcgccggattcctcaaagtagcagatacaatgatttctcaaggtattatttaa

SEQ ID NO: 24627 - DNA, 744 bp, Listeria monocytogenes
atgactttacaaggaaaagtagcagtagtaacaggtggatcacgcggaattggacgtgacattgccattaacttagccaaagaaggcgcgaatattttcttcaattacaatggtagcccagaagctgcggaagaaacagcaaaactcgttgctgaacatggtgttgaagtagaagcaatgaaagcaaacgtagccattgccgaagatgtagatgcctttttcaaacaagcaattgaacgctttggtcgtgtggatattctcgtgaataatgcgggaattacacgggataatttattaatgcgtatgaaagaagacgaatgggatgacgttattaacatcaacctaaaaggaactttcctttgtacaaaagcagtaagtcgtacaatgatgaaacaacgcgcaggtaaaattatcaacatggcatctgttgttggtttgattggtaatgcaggtcaagcaaattacgtagcaagtaaagcgggcgttatcggtttaacaaaaacaactgctcgagaacttgcgccccgtggtattaacgtaaatgctgttgctcctggtttcattacaacagatatgacagacaaattagacgaaaaaacaaaagaagcaatgttagcacaaattccgcttggtgcttacggaacaaccgaagatattgcgaatgcagttcttttcttagcaagtgatgcttcgaagtatattactggtcaaacactatccgttgatggcggaatggtgatgtaa

SEQ ID NO: 24628 - DNA, 885 bp, Listeria monocytogenes
atggctaacattacagctcaaatggtaaaagaattacgtgaaaaaactggtgctggtatgatggattgtaaaaaagcacttgtagaaacagaaggagatatggaaaaagcaattgactatcttcgtgaaaaaggaatcgctaaagctgcgaaaaaatctgatcgtgtagcttctgaaggtatgactcatgtaatcagcaatgaaaaacatgccgtagtacttgaagttaatgctgaaacagatttcgttgctaaaaacgataacttccaacaattagttgacgctttagctaaacaaattcttgcagttcgtccagatagtttagaagacgcacttaaaacagaaatgcctaatggccaaactgttcaagattacatcactgaagcaattacaaaaatcggtgaaaacatttcccttcggcgttttgaagtaaaagaaaaagcagacaactctgctttcggtgaatacatccacatgaacggacgtattggtgttcttacacttcttgaaggaactactgatactactgttgcaaaagacgttgcaatgcacattgctgcaatcaaccctaaatacatttctcgtgaagatgtttcttctgaagaagttgcacacgaaaaagaagtattaactcaacaagcattaaacgaaggcaaaccagctaatatcgttgaaaaaatggtagaaggccgtttgaaaaaatatctaagcgaaatttccttagaagaccaacctttcgttaaaaatccagacatcactgtaggtgaatatgtgaaacaaagcggtggcaaagttgtatcattcgtacgtttcgaagtaggcgaaggaatcgagaaaaaagaagataactttgttgaagaagtaatgagccaagtgaaaaaataa

SEQ ID NO: 24629 - DNA, 1140 bp, Listeria monocytogenes
ttggctaaaatcaaagtaatgagtatctttgggacacgaccagaggcaataaaaatggcaccgctagttctggcgttagaaaaagaaccagaaacatttgagtcaacggtagttattacagcccaacaccgtgaaatgctagatcaagtcttagaaatttttgatattaaaccagatattgacttagatattatgaaaaaaggccaaaccttagctgaaataacttcacgtgtaatgaatggaattaatgaagttattgctgccgaaaatcctgatatcgttttagttcacggcgatacaacaactagttttgctgctggactggctactttttatcaacaaaagatgttaggtcatgttgaagctggacttagaacatggaataaatattcgccgtttccagaagagatgaatcgccagttaactggtgtaatggcggatattcacttttctccaaccaaacaagcgaaagaaaatctgcttgcggaaggaaaagatccggctactatttttgtgactggaaatacggcgattgatgcccttaaaacaactgtgcaaaaagattaccaccatccaatcttggaaaatcttggcgacaatcgtttaatacttatgacggctcaccgcagggaaaatttaggcgaaccgatgcaagggatgtttgaggcggttcgagaaatcgtggaaagtcgtgaggacacggaactcgtttatccgatgcatttaaatccagcagttagagaaaaagcaatggcgattttaggtggacacgaacgcattcatttaatcgagccactcgacgcaattgattttcataatttcttacgcaagtcttatcttgtttttaccgattcaggtggtgtgcaagaagaagcaccaggtatgggtgtgccagttttagttttgcgtgatacaacggagcgtccagaaggaatcgaagctgggacgttgaaactaattggaacgaataaagaaaatctgatcaaagaagcattagatttacttgataataaagaaagccacgataaaatggcgcaagcagctaatccatatggcgatggtttcgctgcgaacagaattttagcagcaatcaagagtcactttgaagaaactgatcgcccagaagattttatcgtgtaa

SEQ ID NO: 24630 - DNA, 669 bp, Listeria monocytogenes
ttgaatcattgggaagactttttagcgccttacaaacaggcagtggaagaacttaaaattaaacttaaaggaatgcgttcacaatttgagcttgaaaataatcattcgccaattgaatttgttacaggacgagtgaagccggttgcgagcatactagacaaggctaatcaaaaacatattgcgctagatcatttagtagaagaaatgcaggatattgcgggactccgcatgatgtgccaatttgtagatgatattgaagtagtggtgcgccttttaagacaacggaatgattttcgaattgtagaagaacgcgattatattacaaacaagaaacctagtggttaccgctcctatcacgttgttattgagtacccagtggaaacaattcaaggagaaaagaaaatcttagctgaaatccaaattaggacacttgcaatgaatttttgggcaacgattgagcattcggtaaactacaagtatcaaggcgaatttccagaagcaatcaataaacgtttaaaacgcgctgctgaagctgcttttcaattagatgaggaaatgtcgcaaattcgtgaagaaatacaagaagcgcaagtttatttctctcaaaataaagacgtatcaaaggataaaaaagcagtgcatcaagtgatgccaaagaaaaataagtaa

SEQ ID NO: 24631 - DNA, 630 bp, Listeria monocytogenes
atgaccaaaggaatcttaggtagaaaagtagggatgacacaagttttcactgaaaacggcgaacttattccagtaacagtaatcgaagcagcacaaaacgtggtacttcaaaagaaaactgttgaaactgacggctatgaagctgtacaaatcggtttcgaagataagagagcaattttgtcaaacaaacccgaacaaggtcatgtagcaaaagccaatactactcctaagcgcttcattcgcgaattccgcgatgtaaacttagacgagtatgagattggtgcagaagtaaaagtagacgtattcgcagaaggtgacatcatcgacgcgacaggcgtatcgaaaggtaaaggattccaaggtgttattaaacgccacggacaatcacgcggccctatggcccacggttcccgttaccatcgtcgcccaggttcaatgggtccagtagcacctaaccgtgttttcaaaaataaactacttccaggtcgtatgggtggagaacaaatcactatccaaaacctcgaaatcgttaaagtagacgttgaaaagaacgttcttttagtaaaaggtaacgttccaggcgctaaaaaagcattagttcaaattaaaactgctactaaagcaaaataa

SEQ ID NO: 24632 - DNA, 2691 bp, Listeria monocytogenes
atgcggaaagtatacgaaatatttattttagactggcgccgtctctttaaagcgcctttagctttattattagtaattgcattaattattttgccatcactatatgcttggtttaatattgaagcactttgggatccgtactccaacacttcggggatcaaagtggcagtttcgattgatgatgaaggcgcggaaatagacgtaccagggaaaaagccccaacaagtgaacgtcgggaaccagctcaagaaaacgctagaaaaaaataaaaaacttggttggacttttgtaagtgaggatgaagcgaaaaaaggcgtgaaaagtggaaaatactatgcgtctattcatattccaaaagatttttcagaagatatggtttcggtcgtcaatgataatgttaccaaaccgacaatcgattattccgtcaatgaaaaaatcaatgctatcgccccaaaaatgacggagagcggtgcaacgacgattgttaatcaaattagctctgagtttgttggtacagttagtaaagccgttttggaagagtttaataaagcagggattgatcttgaaaatgaattgccaacaattcgtcgattaaaaaccaaggtattccaagtgcaagacgctttaccagaactgaaaaaaatgggagcagaagcggtcaaaatagaagccaaactgcctgaactgaaagcgaaagcaaaccaagttgtcgagctaaacgaaaaaattcctgaactaaataaagcgacagaaaacgtcttattagtggaacaacaactaccaaaaattgaccaactcgggcaagacattttagtgctacaaaagaaaattcctgaaatcaaacaaatcgccgaatcggtaaaagaagtagatgaaaacttcggaacgattaagaaaacggtcaatgacgcagtgaatgaatcgggcaaagcgcttgatgtgattgatactgcgatggcggcaattcccacagtagaaaaaattgctcaaaatggcagtggctatgtagataaagtgtctgatttcgcagatgaaattaataagtccttcgatacgttagcgcctgcaattaaacaaaacttaacactaatgaagcaaatggcagacaatatttatcaagtcacagaagcaattaaaaatggctcaatcactccagaacaagccattacggaattgaagaaaatggagcaagatattgattccttgcagcaaatgattacaaaacaaaccgcgacattagaaagtttaaatgaaacattgccgaataagccatttaccgatttaattgcgaatttaaaaacgattaatagccagctaggcgcgcaaaaagaaacaattacaaaagtacgcacagaacttgaaaatggcgcgcaaccgtccgaggaacttttaaatcaactgaatgaacaagcgaaaaatgttagcgagaaattggaccaaattttagccaactatgattcggaaatcgtcccagcaatcaaagtcggcttaaatcaaattcaaggagatttgaaagatagtcaaaaactactggaaacgttacaagcaaaaatcccagaaattacgcaggttttaaaagattccagagaaacactacagacagggcaaacctacttagaagaattccaagaacggctaccagaaattcaaaaaacgttagatgaagcaacgaaagtaatcaacactaaactggacacgattatcgcgggtattaacgaagcggccaacttttaccaaaacgattatcctaatgtaaaagccaatattaaaaaagcggccaacttcattcgcgatgatttaccagggctcgaaaaagaaataaaccaagcttcgggcctcatccaagaaaaaatgccagaattcgaaaaagcgattaaaattgcggccgatctttcgcgggaagaattgccagaatttgaaaaagccattaataatgcagcgaataaaattaccgacttcgataaaaattacgatttgcaaagtattattaaaatgcttagaaacgacgcagataaagatagttcgtttattgctagtccagttaagttaaaagaaacaagctactatccaattccaaattacggttcggcaagttcaccattttatacggctctttgtttatgggtgggtgcgctcttgttgatttccttattacgtgtggatgtagaagtgccagctgggattttcagtcattaccatcgttattttggacgattactgacattcttatctatcggattaatgcaggcgcttatagtgacgctcgggaatattttcttgctcggggtatccatcgcagaaccattactacatgtactattcagcatgtttatcagcgtcgtatttatgaccatcgtctacacgctcgtatcactatttaataatgtcggaaaagggattgcgattatcctgttagttttacaaatttcaggagcaggcgggaactttccaattcaagtttcgccgccatttttccaagcgatttatccattcttgccattcacttatgccgtgagtttaattcgggaaagtgttggcgggctttatatgccaactgtttggatcgatatgagtgttcttgccggatttgccattctctttatcacgctaggcattttactcaaaaaaccactagataaagtagtacccaagctatcagaaaaagcaaaacgaagcaagctcatccattaa

SEQ ID NO: 24633 - DNA, 822 bp, Listeria monocytogenes
atgccagaaatgccggaagtagaaaatgtccgcgcaacattacaagaattagtcccaggtaaaaaaatagatcaagtaatagttcgtgttccaaaaatgattgtctcaacaccacccgatgagtttgtgcatatgcttgtcgggcaagaaatagagggtgtgcgccgtcgtggtaaattcttactttttgacttaaccaactgtacgattttatcgcatttacggatggaaggtaaatttcggttaatggatgaaaatgaagaggtcagcaagcatacgcatattatttttcattttgaggatcacacggaattgcgttttttagatgtgcgaaaatttggtacgatggaagtaacgaataaatacggtgagggtgagactcggtcgattaaaaagcttggcccagaaccgctgacgcaagcttttacactaacggattttgcaactggtgtgaaaaaaacaagccgcgccatcaaaacggctttacttgatcaaaagttagtagcgggagttggaaatatttatgcggatgaaatttgttttgaagcaaaagtacgaccggaaagagcagctaactcactttcagacaaagaaattaaacgtatttttaaagcgacgaaaagtattatgactgaagctgtagcacttggtggctccactgttagaacgtatgtgaattcgcaaggtaagcttggacaatatcaaaataaattaaaagtatacggcaaaacagacgagccgtgtgttgtttgtggaacgccgattgaaaaaatcaaattaaatggacgtgggacacatttttgcccgaattgccaaaaatag

SEQ ID NO: 24634 - DNA, 3411 bp, Listeria monocytogenes
gtgaaacgttcagctttatggaaagatatctaccgcgaaatatggcgttctaagagccgctttatttccatttttatgctgattatgttgggcgttgcttttttctccggattaaaagcaactggacccgatatgcttctaacagccgacaactattttaataagtatgaattagctaattttaatgtgcaatctacttatggactagatgagacagacaaggaagcacttgaagatatatccggtgtcgcacaagtggaactcggatatacagcagatactttaatgaaagataaaaatatcgtaacgaaactattttccacatctaaaagcgataatttaaatcaatacaaggtaattagtggccgtttaccagaaaaatcaggagaaattgcgcttgataataatcaacttgttcataaaaatgtcaaaattggtgacaaagtaacttttgtgaaaagcgatggtaacaagctaactgatacacttaaaaaatccacctataaagtagtcggttttgttagctcacccgcttatatccagaaatccgaacgtggttcgagcacggtaggtaaaggaaagacagatgcttttggtgtaattccagagcaagattttaatttaccagaatacactattgccaatcttacttttgataacttagcagcaaaacaagcttttagcgacgaatatgtatccaccgaagaaaaagataagaaaagcgtcgaacaagctttaggagatcaaccagaaaaaagactaaataaaatcaagacgagtgagcaaaagaaactaaatgaggccactgcagaaatcaacaaaggaaaagcagaattaaaagcaaatgaagcaaaacttgcagatgccaaagcacaattagaagaaggtttctctaaatataatgcagctagagcaagttacgatgccaaaatcaaacaaagtgaggcagaaattgcaaatggtgaagcagaacttgccaacgccaaaaaacaactggatgctgcaaaaatacaaatcgaccaaggtgagcaagcgcttatacaagctgaaatggaattggaagaaggacgtgcggcttgggaagatgccaataatcttctaaatacagcaaatggttatttgcgagaagcgaagtcgactttagaaaatgttttaaaacaaccagatttaactgattttgagctagatcgcgcgagtttaacagattcgttccaaatgctcgcgtccgaacttgatttatcaaatgcggaccgcgaggaatatgaaaatgccatgaataatttactagatgattatgaaaatggcaatattagcgatgcagaaataagagaatctataaacgcggctcttgcgcaagttgctaacgctgaaaatgaataccaatcagctagaactgcattagatgctgaaaaacaaacaatagaacaaggcgaaaaaacattagctgccaaaaaccaagaacttcaacaagcaaaaattgcttaccaagaaggtcttaccaaatatcaagatggtcttgaaaaaatttcgctcgcaaaacaacaattagctgttggaaaacaaaccggttccttagaattacaaagcgcacttgcaaaattaaataccggacaagcagaatacgataaaaattttgctttatttaaaaaagaaaaagcgaaagcagaagccaagttaactagtgcggaaaaagatgtacaaatcggccagcaaaaattagatgcgctgaaagttccgaaatactatgtccttgatcgtaacgataatccaggttatagcgaatacaaagaaaatgcagaccgtttaacttccttatcaacagcctttccaattttcttctttctaattgccgcgctcgtttgtttaacgacaatgacgcgcatggtagaggaacaaagaacacaaattggcacattaaaagcatttggttattccaacggtagcattattttgaaatatcttgtttacgggtcgattgccagtgtcattggaagtgtccttggaattttaattggcttccagtttttcccgaacattattttcaatgcttataaatccatgtatgaaatgccatctgtagatattggattttattggagttatagcttacttgctttatttgtcgctttattctgtacaacatttacagcttatgtagcttgtcgtgctgaacttcgcgctaatgcagcaacgttaatgcgtccaaaagcgccaaaaattggtaaacgtattttccttgagcggattagttttatttggaaacgaatgaacttcacaagtaaagtgactgcaagaaatttattccgctacaaacaaagaatgctcatgacggttctaggtgttgctggatgtaccgcattaattcttactggttttgggctacggaattcaattagtgacatcgccaaaatgcaatatggccaaattatgaaatatgatgcagctatttatcaagacatgagcgcaccaccagcagccaaagaaacctttgatgaaataatgaatgattccaatatcaaaagcaaattggctatgtcacaaacaaatattgagaccgtaaaatcaggacaatcagcacaaactacatcaatcattgtccctaaaaatttgaatgaactaccaaattacattgtgcttcgcgaccgtgctagtcatacaaccgaaaaacttaccgatgatggtgcgattataacggaaaaactggctaaattattcgacgtaaaaccaggcgatacaattaccgtcaaaaacgctgaaaatgacaaattccaaataaaagtcagtgccattactgaaaactatgcaatgcactacatttacatgaccaaagcatattatcagcaagtatttaaagaaaaacctagctacaatttagacttattaatgttaaaagatacctctgaaaaagtagagagcgattttgcggaaaaattaacagatagtaaagcaattttaaatgttactttttccaataatgttagttccttgctaaatgaaacattggatagtctgaatattgttatcgtggtactcattacgtctgcggcattacttgcattcgttgtcctttacaacctgacaaacattaatgtatcagaacgtattcgagaactttccactatcaaagtacttggtttttatccaaaagaagtgactatgtatgtctaccgagaaaatattattttaaccttaatgggcattgcggctggatttatccttggtttcttcttgcaccgatttatcatcaccacagcagaagtggatcaaatgatgttcagtccggcaattagttggacaagctacttattttccggcatactcacactcgtttttgcaactgttgtgatggttgttatgcatattaaactaaaacgaatcgacatgattgaagcactgaaatcagttgaatga

SEQ ID NO: 24635 - DNA, 2274 bp, Listeria monocytogenes
atggcgacacaaaagaaaaaaacgagcggacgtaaaaaatcgtcaacacgttcaaaaaagaaacaatcagcctcttttcgtttagaaataacgggggttattttaatagcaataggagttatcggacttttacaattaggctttgtcggtcgaggtttttttgccctggctgagatgtttgttgggcttttaagctatgtattacttgcgggtagcgtgatacttggcggctacatggtaattagaaggaaaatgccacatttatttagcaaacgattagtcggtatttatctaattgttttaggctttttaacatatatacatatgtattttattatccataacttaggggcaaatgcgtccgtagtttctagtacgtggaaattagttctagaaaatttatttagaccaaatcaggtcggttttgttggcggaggaatgattggagctgcaattacttccatcacgtatttcttattagatcgcttaggaacaaatctgattgctgttctacttattatctatggtttttcccttgtatctggtatttccatccgtcaatttttctccaaaattgccgaatttgttcgttacttatttacgaaaggcaaagttgcgaccgaaaaagggaaagaagtaaaagcgaaacgagataaaaagaaagctgagaagattgttgatgttgagccagatgaagtaatcgatgtaatagaacctttgcaagaagaaaaaacaccaccaatcatttccaactttagctccaaagtagagcaagaaaaagcaccagtagaagaaaaaatatcgcaaaaagagcaagatttagaaatgtttcagcaagaatctttcgaaaatgaaatttatcaattgccaccagtagatattttagcgcctgccaaagtaactgatcaaagtaaagagtatgaccaaattaaagtaaatgcaaaaaaattagaagatacttttgagagctttggtgtaaaggccaaaatcacccaggtccatcttggtccagcagtgactaaatatgaagtacaaccatctgtcggtgttaaagtgagcaagattgtttcgctcagtgatgatatagcacttgctttagcagcaaaagatattcgaattgaagcgccaattccagggaaatcagctattggtattgaagtggcgaaccaaaatgtagcaatggtatccttacgtgaagtgttagaaaacaatccaaaaaataatccagacgagaagctccaaatagcacttggtcgtgatatttctggagaagcaatgatggctaatttggataaaatgccacatttactagtagcgggtgcaactggaagcgggaagtctgtgtgtatcaatggtattattacgagcattttactccgtgccaaaccccatgaagtgaaaatgatgatgattgacccaaaaatggtagagctaaatgtctataatggtatcccacatttgctcgcaccagttgtaaccaatcctaaaaaagcagcccaagcattgcaaaaagtagttgcggaaatggagcgacgttatgatttgttttcacatacgggtactcgtaatatgcaaggctacaatgattatgtgaaaaaacataacgaactgaacgaagaaaaacaacctgaattaccatttatcgttgtgattgtagatgagttagctgacctaatgatggtagcttccaatgacgtagaagatgcgataacccgccttgctcaaatggcacgtgcagcaggaatacatttgattatcgcaacacaacgcccatcagttgatgtaattaccggcgtaattaaagcgaatatcccgtctcgaattgcttttgccgtttcaagttccattgattcaagaacgattcttgatatgggcggggcagagaagttacttggacgcggtgatatgctgctacttccagttggctctagtaaacctactcgaattcaaggagcctttttatctgatgcggaagtagaagatgtagttaattacgttatttcgcaacaaaaagcacaatatagcgaagaaatgattcctgatgatattccagaagtcgaaggagaagtgacagatgagttgtatcacgaagcagtagaacttgttgtagaaatgcagacagcatccgtttcgatgttgcaaagaaaattccgtattggctataaccgtgcagccagattaattgatgaaatggaacaaagaggtgtagttggacctcacgagggaagtaaaccgagaagagtaaatgtcgaagttagtcctgagcatgaataa

SEQ ID NO: 24636 - DNA, 396 bp, Listeria monocytogenes
atgcttatggacttgaaagatagaaaatacaaacgtagtaaaaattatgcagaatcttttcatcatgcttttactggactaaaaactgcttttttagaagaacgaaatatgagatttcatacttttgcagctcttgctgttattatttgcggctttttctttcatgtaactaaatctgaatggattttattaattctttctatttttggtgtgttaacgctagagatggtgaacacagcgattgaacgagcggtagatgtggcgacagagcaatacattgatgaagcgaaaaaagcaaaggatgttgctgctggagcggtactgttagcagcaattgtagcaagttttattggactaataatattcataccatacttttgccagatgtttttataa

SEQ ID NO: 24637 - DNA, 1467 bp, Listeria monocytogenes
atgacagatagaaaaaatttaacgacgaatcaaggtgtgccagttggtgataaccaaaattcaatgacagcgggacgtaaaggacctactttgatagaagattatgtgcttattgagaaattggcgcattttgatagagaacgagttcctgagagggttgtacatgctcgtggtgctggtgcgcacgggaaatttgttactaaaaaaagcatgaaaaaatatacaatggctaaatttttgcaagaagaaggaacggaaacagaggtttttgctcgtttttcaacagtaattcatgggcaacattctccagaaacattacgtgatccacgcggtttctccgttaagttttatacggaagagggaaattatgactttgtcggaaataatttgccagtatttttcattcgtgatgcgattaagtttccagatgttattcattccttgaagcctgacccgcgcacaaatattcaagatggcaatcgttactgggatttctttagccttacaccggaagctacgacaatgattatgtacttattcagtgatgaaggaacgccggcttcttaccgcgaagtccggggctctagtgttcatgcgttcaaatggattaacgaagaaggcaaaacagtttatgtaaaactgcgctgggttccaaaagcgggaatagtgaacctttcgacggagcaagcttctcaaattcaagcaaaagaatttaaccatgcaagtcgtgatttgtacgaagcaattgaaaatggagactatcctgaatgggatttatatgtgcaagtgttggatccgaaagacttagatagctttgatttcaatccattagatgctacaaaagattggtttgaagatgtattcccttatgaacacgtaggaacaatgacgcttgaccgcaacccagataatatttttgcggagacagaatcggttggttttaatcctggggtacttgtacgtgggatgcttccttctgaagaccgtttgttgcaaggtcgtttattctcttactcagatacgcaaagacatcgtgtagggccgaactacttacaactcccaattaacagcccgaaagcgcctgtcgcgaacaaccaacgtgacggtcatatgccgtttaaacaacaaacaagttcgattaattatgagccaaatagttatgatacggaaccaaaagaaaatccagcgtttatcgaaccagagcaagaaatccgtggtgatatttctgggcgcctgattgctgaaaaaccaaataactttggccatgcaaaagaagtatgggatcgttattcaaatgcagaacgtgctgcactcgtgaaaaacattgtcgatgattggtcacaagtacgtgaggatattaaaatccgcaacttacgtaatttctatcaagtagatccggaattcgctagtcgagtggctgcgggaactggtattaatcttgaagaacatgtaactgatttaaaataa

SEQ ID NO: 24638 - DNA, 735 bp, Listeria monocytogenes
atggttagaaaattaaataagatgaatgatgcgtcgccactttatgcacaaatagcggatgacttacgggaaaaaatccaatcaggaatttggaaaaccggagataaaattccaccagagctggatttatgtgagttatacaacgttagtagaattaccgttcggaaagcaattgatgaactcgttcgtgagaatctactttatagagagcgtgcgaaaggtacttttgtacgtgactgggaagaagcagaggatgagcattttactttggtgcgcagttttacgaatgagatgaaagaacttggtaaaaaagcggctacgctacatgcagaagtagaagtgatcaatgctgataaaaaaattgcgttgcagttggggcttgcagttggggataaggttttacaagttaagcggctacgaggcacgaaagacttggcgtttgctctttttatcagtgcgattccttatcgacaagcgtattcccttcaagcagaagattattacggttctttttatgaatatttgaaaggatttgggattgtcgttaatcaagaaaaggaatatattgaagctatgctaccaaatcgtgaagttcaggaagctttagcaatcgataagcaggaaccaattttaaaaagagtacggatgacgaaacaaaaagaaagtgattttagagaatacagtgaatgcttttatgtaggaaagcattatcgatattatattgattttgaataa

SEQ ID NO: 24639 - DNA, 999 bp, Listeria monocytogenes
ttggcaaatgaagcaacgcaagaattatttcaagtgcttgataatacagctattatcttgcaaaatgaacttgaaataagctatttggaagcggtttatgaaacaggagaaaatctgtttcaaaaagaagttttacaaaaagaagagttgtcttctgagaaacaattgaaattacaagagtcttacgaaagtatcgaactcgaaaatttctcaaatgaagaaatccgcaaaggtcttcaattagcactactaaaaggcatgaaacatggtattcaagtgaaccaccaaatgacaccagattctattggttttattgtggcatatttacttgagaaagtgattcaaaagaagaaaaatatttctattttggatccagcctgtggaactgcaaaccttttaacgacggtgattaatcaacttgagttaaaaggcgatgtagacgttcatgcgagtggtgtagatgtagatgatttgcttatttcgcttgcattagtaggagcggatttacagcgacaaaaaatgacgttgctacatcaagatggtctggctaatttattagtagatcctgtagatgttgtaattagtgatttgcctgttgggtactatccggatgacgaaaatgcaaaaacatttgaactttgccgtgaagaagggcattcatttgctcatttcttgtttatagaacaaggaatgcgctacacaaagccaggaggatatttgttcttcttggtacctgacgcaatgtttgggactagtgactttgctaaggtggacaagtttatcaagaaaaacggtcatattgagggaattattaaattgcctgaaacactgtttaagtctgaacaagcacgaaaaagcatcttgattttacgaaaagcggatgtaaatgtaaagccgccaaaagaagttttactggccaatctctcttcgctaacagatccgagcgtaactgcaccgattttagctgaaattgagaactggttcaagagtaaacaataa

SEQ ID NO: 24640 - DNA, 1044 bp, Listeria monocytogenes
atgacaaaaagctatcatgtcgcagttgtaggtgcaactggtgcagttggtacccaaatgattgaattactagaagaggcggcgacttttaagataaagcaagtttcattcttgtcttctattcgttctgctggaaaaaaactatccttccgcggtgaagaagtaactattcaagaagccacacctgaaagttttgaaggcgttgatatcgctttatttagcgctggtggttctgtatcgaaagcacttgcgaaagaagcagttaaacgtggagctatcgttattgataacacgagtgcatatcgtatggatccaacagttccattagtcgttcctgaagtgaatgaaaaagcacttttctctcataatggtattattgctaatcctaactgttccactattcagatggtagcagccctcgaaccgattcgagaagcattcggcttaaatcgtattattgtttccacttatcaagctgtttctggctctggtgtaagcgcaattcaagaattaaaagacggtagcaaagctgttctggataacaaagaattcactccacaaatcatgcccgttaaaggggacaaaaaacattatccaatcgcttttaatgcattgccacaaattgacgttttcacagagaatgactatacatacgaagaaatgaaaatgatcaatgaaacaaaaaaaatcatggaagacaacacaataaaagtttctgctacgtgcgttcgtatcccagtagttagcggacactctgaaagtgtttatatcgaagtggataaagaaggcataactgctaaagaaatccaaaatgcactaaaaaatgcacctggtattgtcctagaagatgacccagcaaatcaagtttacccacaagctgttcaagctgcaggtaagaaggaagtcttcgttggtcgtattcgtgctgacatagacgaccctaaaggttttcatatgtggattgtttctgataatttactaaaaggtgccgcatggaattcgattcaaatagctgaaagtttagttaaattagcgattatttag

SEQ ID NO: 24641 - DNA, 897 bp, Listeria monocytogenes
atgaataacttacaaacaaagtttccgcatatagcgattaaattaaatgaaccgttatctaagtatacctatacaaaaacaggcggtgcagctgacgtattcgttatgccaaaaacaatagaagaggcgcaagaagtggtggcatactgtcaccaaaataaaattccacttactattcttggtaacggttccaatctaatcattaaagacgggggaattcgcggtgttatcttacatctcgatttactacaaaccattgaaagaaataacacccaaattgtcgcaatgagtggcgccaaactcattgacactgcaaaatttgcactgaatgaaagcttaagcggacttgaattcgcttgtggtattcctggatctattgggggagcgctacatatgaatgcaggagcatacggcggcgaaattagtgatgttttagaagctgcaaccgtactgacacaaacaggcgaattaaaaaaactaaaacgttctgaactaaaagcagcatatcgctttagtactattgcagagaaaaattacatcgtattagatgccactttttctttagcattagaagaaaaaaacctaattcaagcaaaaatggatgaacttactgcggcacgtgaagctaaacaaccattagagtatccatcttgtggtagtgtattcaaacgtccacctggtcactttgctggtaaattaattcaagatagtggcttgcaagggcatattattggcggtgcgcaagtttctttaaaacatgctggatttatcgttaatatcggtggggcaactgcgactgattacatgaatttaattgcttacgtccaacaaaccgtacgcgagaaatttgatgtagagttagaaacagaagttaaaatcataggcgaagataaatag

SEQ ID NO: 24642 - DNA, 1125 bp, Listeria monocytogenes
atgaaatttttacatacagctgatttgcatttagggaaaattgtatctggcgtatcgatgctagcggagcaagaatatattttgactcaaataacacagattgcggaggaagaacaagtcgacgcgcttattttagcgggagatttatatgaccgcgctgtgccgcctgctgatgcggtgaaagtgctaaatgatattttagtaaagtggaatgtagaactgggtattccgatatttgccatcagcgggaatcatgacagtgctgagcggcttgcttttggaagtcagtggtatgaaagtagtaagctatatatgaagggaaaatgcacttcgcagtttgacgggattccttttatggatgccgaagtatggcttgtcccatatcacgaaccagcaatcattcggcaagcttttgcagataattcgattcgcagttttgaagacgctatgcaagccgtgacgaaacaaatccggtccaaatgggatacaagcaaggcgcaaattttggttgggcatgcgtttgtttctggaggtattccgagtgattccgaacgacaactagcaattgggaatgtggaccgagtttctactgattgttttgatggttttacgtatactgcacttgggcacttgcaccatccacatgcgattcgccacccgtctatcttttatagtggatctcctttaaaatattcattttcagaagcaaatgatcataaaagtgtgcggattgtggaactggaagggaaagagctaattagtgtgacggagcgctttctaacgccaaaacatgatatgcgcattatttctgggacactagcggaactgacggaaaacttagtagaaaatcctgatgacttttttcaagtgaatttaatggatgaaggggctttaattgatccaatggggaaattacgccaattttatccaaatattttacatttagagcgtaaaaaacaaacattaaaagaaacgcaagatagctttgaagaaataatgaaaaaagatgatttagagttatttggtcaattttttgaacatgtcaatggaacagaattaacggaaacacaaaaacaaaagttagcggatgtttttgaacaagcaagaaaggaggatgcggaatga

SEQ ID NO: 24643 - DNA, 1869 bp, Listeria monocytogenes
ttgaaaaggactactcgctacagtagaaaatatgttccgagtattgatggacttcgagcactcgcagttattgctgtaatcgcctaccacttgaattttagctgggctaaaggtggattcattggcgtagacatatttttcgtcttatctggttatttaattacaaatattttattaacacaatgggaaaaaaaccaatcacttcaattaaaacaattttggattagacgttttcgacgactcattcctgcagtttatgtaatgattgtggtggttgtcatctattccgtcttcttccatccagaaatcttaaaaaacttacgtggcgatgcgattgcttctttcttttatgtaagtaactggtggtttattttccacaatgtttcttattttgattcttttggacttccatcaccacttaaaaacttatggtcactagccattgaagaacaattttatttaatctggcccgcttttttactggtgtttctcaaatgggtcaaaaatccgaaactattattaaaaatcgtcattggccttggtcttctttccgcagtttggatgacgattttgtacgttcctggaacagatccaagtcgtgtttattacggcacggatacgagagcatttgatttgctatcaggttgtgcacttgcatttgtttggcctttcaatcgccttagtcctgtggttccaaggaaaagtaaggcagttctcaatattgcgggaacaatcagtattttatgttttattctattcacagcttttgtaagtgaatatcaacctttcttataccgtggtggcttgttattcgttgcaattctaggcgttattatgattgcaactatctcgcaccccgcttcttatctaagcaagattttcagttttaaaccacttagatggattggaacaagatcttatggtatttatttatggcactatccaattataacattgactacaccagtactagaaattactcagcctaatatatggcgagctatcctacaagttgcggctacttttattattgctgaattatctttccgctttattgagactccaattcgaaaaaatggttttattaactattttaaaggcttcaaagataaaaactatttcatttggaaaaataaacctgttggtaaatggttaagcattgctggtgttgttgctgttttagcaatctttacgctgggcatgtcaaacgttctttccgtcaacaccaatgcagaaaaacaacaaacgtctgttaaaacaaccacctctaccccagacgagaagaaagatgataaaaaagaagataaagctactaaggataaagaagcagactcaaataaagctagcgaacaaaaagaaacacaaaaaccagacaataaaaataaatcagctgctactccaaaaacaataattacgcaaacggtggcaattggtgattcggtcatgcttgatattgaaccatacttgaaagaggcagttcctaatatcacaattgatggtctagttggacgtcaattacgagatgccattacaactgctaccggctataaaaaattcaatagtgaaaatagctctgtcattctcgaacttggtacaaatggtcccttcacagaagaccagttaaacgatttattagatcaatttgataaagcaacgatttacttagttaacacacgggttcctcgtggttggcaatcggatgtaaataaaagtattgccaatgctgcttcacgacctaatgtaactgttgttgattggtattcaagatccagtggtcaatctcagtactttgctccagatggtgttcatttaactaaagctggcgctcaagcttatgtcgccatgttaactagcgtcatgaacaaataa

SEQ ID NO: 24644 - DNA, 1299 bp, Listeria monocytogenes
atggatcattcaatgtcaaaaaaattgcatgatgaagcacttttacatatagttggcggggttaatagcccatctaggtcaaataaaggagttggcggcggaattcctgtaacgatggaacgggctagtggcgcttatttttatgatgtggatggcaataaatatattgactatttagctgcatttggaccaatcattacgggacatgcacatcctcatattacagaagcaattacaaaagctgcgcaaaatggtgttttgtacggaacacctactaaacacgaaatcacttttgcgaaaatgttaaaagaagccattccttcacttgagaaagttcgttttacaaattctgggacggaagctgtcatgacaactattcgtgtcgctcgtgcttatacaggcagagataaaatcattaaattcgctgggtgttatcacggccactttgatttagtgctcgtggaagccggttctggcccttctacgcttggcattccagactccgctggggtaacaaaatcaaccgcagaagaagttatcactgtcccctttaatgatcttgattcttttaaagaagcattagctatttggggcgatcaagttgctgctgttttagtagagccaattgttgggaattttggaatggttgcaccagaagatggatttttagaagcagttaatgaactcgcacatgtcaatggttctttagtgatttatgatgaagtcattacggctttccgttttatgtacggcggcgcgcagaactatttaggtgttattcccgatttgactgccatgggtaaaattattggtggtgggcttccgattggtgcttacggaggtcgaattgatattatggaaaaagtagcaccacttggaccggcttatcaagctgggacgcatgcggggaatccagcatctattctttcaggaatcgcgtgtctcgaagttttacaagaagaagggctttatgagcgctttgaaaaatatggttccatgttgaaagatggcattgagaaagccgctgctaaacataatattgcggttactgttaaccaaatcgtcggtgctcttactgtttactttacggaagatcctgtaactaactatgctgaggcaggtgcaacaaatggtgagttattcggacgattctttaaaggaatgctagaagaaggtattaacttggcgccttctaaatatgaagcatggttcatcacttccgcacactcggaagctgatattttagaaacaatccaagcagttgatactgtttttggaaaaatggttcaagataactag

SEQ ID NO: 24645 - DNA, 1077 bp, Listeria monocytogenes
atggaaaagctattagaagttaaagatttaaatatttcattccacacatatgccggagaagtaaaggcgattcgtggagttaattttgacttatataaaggggaaaccttagcgattgttggcgaatctggttcaggtaaatcagtaacgacaaaatcgattatgcgtttacttccagaaggtaactcagaaattaaaagtggccaaattttatttaacggaatggatatcgctaaagctcacgaaaaacaaatgcaaaaaattcgtgggaaagatatagctatgattttccaagatccaatgacatcattaaatcctacgatgacaattggtaaacaaatttctgaaccacttattaagcaccaaaaaatcagtaaacatgaagcacataaaacagcgcttcgtttgcttcaattagttggtattgccaatgcagaagaacgaattaaacaatatcctcaccaattttctggtgggatgcgtcaacgggttgttatcgcgatttcacttgcatgtaacccacaaattcttattgcagatgagccaacaacagcgctagatgtaaccatccaagcgcaaattttagatttaatgaaggacttacagaaaaaaattgatacgtcgattatctttattacccatgatcttggtgttgtagcaaacgttgcagaccgtgtagctgttatgtacggtggtaaaattgttgaaatcgggacagttgatgaaattttctataatccacaacatccttatacatggggattaattagttctatgcctactttggatacagatgatgaagaattatttgttattccaggtacgccacctgatttacttcatcctccaaaaggggacgcatttgctgcacgtaataaatacgcaatgcaaattgaccttgaagaagagccaccactatttaaggtgtctgatacacattatgcggctacatggttgcttcatcctgatgcacctgaagtaacgcctcctgatgctgtattacgtcgccaagagcagtttgcggaacttcatcctggcatgcaagctgtccatgcgaaaggggtagaggtagaatga

SEQ ID NO: 24646 - DNA, 804 bp, Listeria monocytogenes
atgaaaatactatttatcggtgatgttgtcggttctatcggccgcgatgccataacagaatatttaccacaattaaagaaaaaatataaacctactatcacggtgattaacggtgaaaatgcagcaagtgggcgtgggattacagagaaaatttataaagattttctggagcttggtgccaatgctgtaacacttgggaaccatacatgggataatcgtgatatttttgaatttatcgatgaagctaagtatttagtgcgcccagcaaactttccagatgatactacacctggaacaggaatggtttttgtgaaaagcaaccagcatgagattgctgtcattaacatgcaaggccgaactttcctagcagatttagatgatcctttccgtaaaatggattatttgatagaagaagcaaaaaaacgcactaatattatttttgtggattttcacgctgaaactactagtgaaaaagaagccatgggttggtatttagatggccgtgttacggcagttgttggcacacatactcatgtgcaaacgtcagataaccgcattctcccagaaggaacagcctatctgacggatactggtatgactggcccatacgatgctatccttggaatggagaaggaggctgttatccgtcgatttaaaacagctttaccaactaggttcgaagttcctaaaacgggccgtgcagtcttgtcgggctgtttaatcacacttgacgaaagcactgggaaagcacaaaaaattgatcggattctcatcaacgaagatcacccattttcctttgattaa

SEQ ID NO: 24647 - DNA, 507 bp, Listeria monocytogenes
atgataaaattatgtacaataagtgattcccaagcactcttagaagtaagttataagacatttgatgaaacatttagagcgcaaaataaaccggaaaacatggatgcatatttaaaaacaaattttacggctaaaaaattaagcgatgaactaaaaaacccacattcctatttttattttgtttttcaccaagaagctattgctggttatttaaaactaaatataggagatgctcaaacagaagaaatagctgggaatacaatcgaaatagagcgtatttatgtattgaagtcattccaaaaaaagggattaggtaaagagttatttaatcaagcaatagagatagcgaaagaagttgatgcaaaaaaaatatggttaggtgtttgggagaagaataagaacgctattcaattttatgcaaagctgggttttattaaaaatggacaacatgattttttcatgggtgatgattgtcaaactgatattattatgataaaagatttataa

SEQ ID NO: 24648 - DNA, 1491 bp, Listeria monocytogenes
atgacaaatttatttcaagatgatagtctaacgctgcatacagacttatatcaactaaatatgatgaaagcgtattttgacgatggacttcatgagcgtagatcggtgtttgaagtgtttttccgagatatgccatttgattcgggttttgttgtgtttgcggggctagaacgaattattcattatatgcaaaatttacgttttacagaaacggatattgcttatttacacgacgaacttggttttgatggaccttttctagaatatttacgtaactttaaatttaaaggaaatattcttgctgcgaaagaaggggagtttgtttttaaaacagagccaatccttcaagtagaagcaagtctagcggaagcacaattaatcgaaacagctttgcttaatattgtgaatttccaaacgctgattgcaacaaaagcggcgcgaatccgttctgttattgacgacgaaacgtttgcagaatttggtacaagacgtgcacaagaaatggatgcggctatttggggcacacgagcggcttatattggtggttgtgattcgacgagtaatgttcgcgctggaaagattttcggtattcctgtgtctggtacgatggcacatgcgatggttcaagcttaccgcgacgaactagaagcatttagaagttacgcaaaaacgcattttgattcaattttcttagtagatacatacgatacgctaaaatctggcgtaccaaatgcgattaaagtggcgaaagaaatgggcgataaaattaactttatcggcatccgcctagatagtggcgatatggctttcttatctaaaaaagcacgccaaatgttagacgaagctggctttacagaagcaaaaatctttgcttcgagtgacttagacgaacatactattttatcgttaaaagcgcaaaaagcaaaaatcgattcttggggcgttggcacaaaactaatcaccgcttacgaccaaccagcattaggtgccgtttacaaaatggcggcgattgctgatgaaaatgatattttacaggattcgattaaactttcaagtaacaccgaaaaagtgtcgacacctggtaaaaagaaagtttaccggattattacgaatgaagatggcttgaaagcggaaggcgattatattgctttggcggatgaatcacttgagaatgtcgacaaactaacgatgttccacccagttcatacgtatattatgaagacagtcgagaatttcaccgcgcgtgagctacttgtaccgattttccaaaatggggaacttgtgtatgatatgccttcactcgatgaaattaaagcatataaagaagagaacttggcgctactttgggacgagtacaaacgaacagttcgtccggagcaatacccagttgatttaagtgtaaaatgttggaaaaataagatgcgtaatatcgaaaaagtacgtaaaagtgtccaacttcattcaccagttgaactagatatgccgttttag

SEQ ID NO: 24649 - DNA, 537 bp, Listeria monocytogenes
atgtcccgtataggtaaaaaaactattgtgattcctgcaggtgtaacagttacacttaatggatcaacagcaacagttaaaggtcctaaaggtgaacttgtaaaagagttcaacccagaaattactattaaaatcgaaggcaacgaaattaacgtttctcgcccgactgataataaaaaccaccgtgcacttcatggtacaactcgtgctattcttaataacatggttgtcggagtttccgagggttatgaaaagaaattagaacttatcggtgttggttaccgtgcgcaaaaacaaggcgataagcttgttcttaacgtagggtactctcatccagtagagtttgttgctcctaaaggcgtagatattgaagttcctgcaaacacacaagtgattgttaaaggatacaacaaggaacacgttggcgagttagctgcaaacattcgtgccgtacgtccaccagagccatataaaggtaaaggtattcgttacgaaggcgaacatgtacgccgtaaagaaggtaaaactggtaaataa

SEQ ID NO: 24650 - DNA, 1161 bp, Listeria monocytogenes
atgaaacatgtttttccaacatacaaaaggtttcctattgatttagttaacggtacgggcactgttgtaacagataaaaatggtaaaacatatctcgatttcactagcggtatcgcagtttgtaacctaggtcattgcccaacaaatgttgcagaagcagtacaacaacaattagggaatatttggcacacatcgaatttatatgaatgtgctttgcaagatagtgtcgcagaattaattgctgatggtaaagagagattagttttcttttgtaatagcgggacagagtcaaatgaagcggcgctcaaattagctagaaaatataccgggaaagaaaaaataattacctttgaaaaatctttccacggacgaacattcggttcaatgtcagctacgggccaagctaaaatccatcagggtttcggtgagcttgttcccggatttacctacgttccttataatgatatcgaagcttttcgagcagaaatcgatgaaaatacagcagccgttatgttggaggtaattcaagctgaaggtggcgtcattccagcgaatgcggcctttcttttagaagttcaattactttgcaaaaaaatgggggcattattaattattgatgaagtgcagactgggcttgggcgaacggggacgctttatggatttgagcagattggtttagatccagatattttcactttagcaaaagggcttggaaatggcttgccgattggagcgatggtcggaaaatcggacttaattagcgcttttgggccgggaagtcatggctctacttttggaggaaataaattggcacttgcggcggctaaagagatattactgacaatgaaacaaacgggatttttagaagaagtaaatgccaaagcagactattttagaaatttgttagaagcgaatttagaggtgttggataatgtttctgacattcgtggcggagggtttctgataggtatagaacttgaaaatgccgcagaaccagttataacggaacttagagataaaggattgttaatactaactgctggaacgaatgtgctacgaatcttaccacctttaaccgtcagttatgcagaaatcgatcaagccatatatttattgaaaagcgttttggaaaaccaattgattgggagtgaagagggatga

SEQ ID NO: 24651 - DNA, 939 bp, Listeria monocytogenes
atgaacgcaggaattttaggagtaggtaaatacgtacctgaaaaaatagtaactaactttgatttagaaaaaattatggatacatctgatgagtggattcgaactcgaactggtatcgaagaaagaagaattgctcgtgatgacgaatatacgcatgatttagcatatgaagcagcaaaggtagccattaagaatgctggtcttacaccagatgatatcgacttgtttatcgttgcaactgttacacaagaagcgacatttccttcagttgctaatattatccaagaccgtttaggagcgaaaaatgctgccggtatggacgttgaggcagcttgtgctggtttcacttttggagtagtgactgcagcacaattcattaaaacaggtgcatataaaaatatcgtagttgtcggtgcggataaattatctaaaatcactaactgggatgatcgcacaacagccgtattattcggtgatggagcaggtgctgtagttatggggccagtttctgatgatcatggtttactttcatttgacttaggttcagatggatcaggtggtaaatacttgaatttagatgaaaataaaaagatttatatgaatggtcgtgaagtgttccgttttgcagttcgccaaatgggagaagcttcactacgagtacttgaacgtgctggtcttgagaaagaagacttggacttactaattcctcaccaagcaaatattcgtatcatggaagcttctcgcgagcgtttgaatttaccggaagaaaaactgatgaaaacagtacacaaatatggtaatacttcatcctcttcaatcgcacttgcgctagttgatgcagtggaagaaggacgtattaaagataatgataacgttctgcttgtaggctttggcggcggactaacatggggcgccctaatcattcgttggggtaagtaa

SEQ ID NO: 24652 - DNA, 1032 bp, Listeria monocytogenes
atgacacaatccgccttaaagcgggaaagttatttcgataatgccaagtttattttgattttcttagttgttttcggccattttcttcaaacatttatcgcggattatgctggcgtccgcgtactttatatttacatttacaccttccatatgccggctttcgtactaatatccggtttttttgctaaaagctttggtaagcctggttatttaaaaaagacgatgaaaaagcttattttaccttatgtattttttcagctaatttatagtattttttattattttcttctaagtaaagataatctttctatccaattgcttgatcctgaatggtcactttggtttttactaagtttgtttttctggaatataatgttatttatttttgcaaaaatcaagccttggaagtcgatttgcattgctctcttcgttggattggttgctggctattttgatattattggggggtatttgagtttatctcggacacttgtttttttcccgtttttcttagttggctattttttaaagaaagagcatttttactaccttaaaacgcattttgtcatgattcttgggggcattttcattgttttacttttatcctttatcacgcttcatcctaacttaaatgataagtggtttttaggttctaagccttatgcaaactttgtggaagttaagtcgctagggctattcattcgcgcgcttgtctatttgattagctttggttcgattgcagcttttttcagttttattcctagaaagaggttatttttcactaaatggggtaaaaatacgttatatgtttatttgttacatggcttctttattaagttttttcgtgaaggtagccagactgactttcaatatagcccgtcgacatttttacttctattcgtcgttacttttgttttaacggtattattatcgagtcgattggtaaaaatattcgttcaaccggtaatcgaacttagggtatctatgctgcgagatgtgtttagccgcttaacaaaacgggaaagttattaa

SEQ ID NO: 24653 - DNA, 735 bp, Listeria monocytogenes
atggaacgtttacaaaaagtgattgcaaatgcaggtattacttcaagaagaaaagcagaaaagcttattcaagaaggtaaagtaacagtgaacgggaaagtagtcacagaattaggtgtgaaggttagcggtacggagcgaattgaagttgagggaattcaactaacaaaagaagaacatcgctatttccttttttataagccaagaggaacggtttcggctgtaacagatgataaaggtcgtacaaccgtagcggattattttgcggatattccagaaagactttacccagtaggacgacttgactatgatacttctggattgttattaatgaccaatgatggggatttcgctaatttactaatgcatccgaaaaatgaagtttccaaaacatatatcgcgcgtatcaaaggtattcctgaacgagaagtgattcgtcagctagaacgcggtgttgtgatagatggtcgcaaaacagcaccagcaaaagtaaaagtacgttcgtctgacaaaacgaaagataaagccattgtagaaattactattcatgaaggcagaaatcgccaagtgcgtaaaatgttcgaggcagttggctttgaagtacaaaaattatcaagagaagagtactcgttcttgaatttacgtggtttaaacgcaggtgaacgtcgggaattatcccatcatgaagtaaaacaattaaaaacggaagcaagatttggtaaaaataaaaagtaa

SEQ ID NO: 24654 - DNA, 1467 bp, Listeria monocytogenes
ttgagtattaaagaaacagcattaccaaaagttcaaacaaaattatttattaatggaaaatggacggatggagataataaagaaacaaaagatattgtaaatccagcaaacggagatgttattgcaaaaatcgctcaagctggaccaagtgaaacaaaaaaagctattaaagcggcaaaagatgcatttcctgattgggcaaaaatggaactagctgaccgtgtcaaattattacacaaaattgccgatttaatggaagaaaaagcagatacgttagcaaaaattatgacgcttgaacaaggtaaaccgctaaaagaatcaaaaggagaagtcttaactggcgtagaaaacttccgattcgctgcggaagaagcaagaagattatatggtgaaacaatccctgctccaaacaatcatgcgtttatcgtgaaaaaacaaccaattggcgtagttgctgctattactccttggaatttcccaggtggtatggtgacgcggaaacttgcaccggcgctggcaactgggaatacaattgtattaaaaccttctggagatacgccgctttcggctctagctatttttgaaatttttgaagaagctggcttgccaaaaggcgttgcaaatatcgttatgggtagctccaaagaaatcggtgaaacgttaactgatagtgatgatgttcgtaaactaactttcactggttccacgaaagttggtcaaacactctttaaacaatcagccgatacactgaaaaaaatctcactcgaacttggtggtcatgcgccatttatcgtatttgatgatgcgaatcttgatgccgctgtaaatgatttagttgctgcaaaattccgcaacaacggtcaagtatgcgtgtcaccaaaccgaattttcgttgccaaagaaatcaaagaaaaattcactaaagcgttagttgctaaagtagaacaattaaaagttggtaacggtttagatgacgtgaatgttggtccgcttatccgcgaagatgcgatagataaaattgataaacaacttaaaaacgccacagaaaaaggtgctaaagtcttaactggtggcggtcgtctaacaggctctgactatgataaaggaaacttttataaacccactgtcttagataatgttacccgtaaaatggacattttttatgaagaaacatttggtccagtaatcccgctcatcacatttgaaacggaagacgaagcaatcgaaatggcgaatgacagtgaattcggtcttgcttcttacttctacactaaagacttagcacgcgtagaaaaagtgggagcagcactagaatacggaatggtcggagcaaatgaaattgccatctctaacccagaaactccatttggtggagtaaaacattctggtttcggtcgcgaaaacggtcattatggaatggaagaatacatccaagtgaaattcatcaacttaaaatatcgtgattaa

SEQ ID NO: 24655 - DNA, 912 bp, Listeria monocytogenes
atgaaaaattatctatcattatccgaagaagtaaaacaagcaaaagcagaaggaaaagcaattgttgcgctagaatctactattatctctcacggtatgccatacccgcaaaatgttgaaatggcgcgtgatgtggaacaaattattcgtgataacggtgccgtaccagcaacaatcgctttaatcgacggaaaaattaaaatcggtctttctgatgaagaactagaactatttgctaaaagtagcaatgtagcaaaagtttctcgtcgtgatatcggttaccttattgcaacaaaacaacttggagcaacaactgtagcagctacaatgatttgtgctgaactcgcagaaattggaatcttcgtaactggcggaattggtggtgttcaccgtggtgccgaaacaacaatggacgtttcagctgacttagaagaattagcgaaaacaaatgttgctgtcgtttgtgccggagcaaaatcaatcctagacctaaacttaacaatggaatacctagaaacaaaaggggttccagttattggttaccaaaccgatgtattgccagcattttacacacgttcaagtgatgtagaattaacattgcgtgcagacactccggaagttatcgcagaatcgcttaaagcgaaatgggaccttcaaatcgaaggcggcgcagtaattactaacccaatcccagaagaattcgctatggacgaaaaagtaattaacgatgtaatccaaacagcgcttaaagaagcagaagaaaaccatatccacggaaaagacgttactccattcctacttggaaaagtaaaagaactaacagatggtaagagccttgaagcaaacatcgaacttgtaaaacacaatgctttaatcggtacacaaatcgccgtagcataccaaaacatctaa

SEQ ID NO: 24656 - DNA, 915 bp, Listeria monocytogenes
atgaacggcattatcccactgtggaaagaacgcgggatgacaagtcatgattgcgtttataaattaagaaaaattttacatacgaaaaaagttggtcatacaggtacacttgatcctgaagtagaaggcgtgctaccaatttgtattggccgtgcgacaaaattggctgaatatgtcaccgatgaaggcaaagtctatgtagcagaaataacattaggcaaatcgactacgacagaagatgcaactggtgaaacggttaatactaaagaactagccgaaatttcggcggcagaacttcaagccgcgcttactaaactaacaggtaagattacccagattccaccaatgttttccgctgtaaaagtcaatggtaagaaattgtatgaatatgcaagagctggtatagaggtagaacgaccatccagacaagtggatatttattcgttaatccgtttagatggcgacacagcgctaaatcaatccaacccaaccttccaattagaaattgcgtgcggaaaaggaacctatatccgtactcttgcagttatgattggcgaattattaggttatccagctcatatgtctaaactagaacgtactcgtagcggctttttcaaaaaagaagattgtttgacgctcacagaaattgacgaaatgatgcaagcaagtgatagcagctttttatatccacttgaaaaaggaattgaatctatggccaaactagtaattgaggaagaagtatacgcaaaagttttgaatggcggccttttaccaacatcgttatttgcagaggtagaaaatgaacctcgtgctgcgcttatttttaaagataaattaacagctatttataaaccacatccagagaaaaaagacctttggaaaccagaaaaggtcatcgagttaaatcaagcatag

SEQ ID NO: 24657 - DNA, 480 bp, Listeria monocytogenes
atggctaaggcgtttctatcaattggcacaaatattggcgagcgtttagagaatttaaatgacgcactaagaggtttagcggcttcgaatcaaattaatatcaccaacgtatctagcgtatacgaaacagatgcagtaggttacgaagatcaagcagcatttttaaatatcgctgtagaaattgaaacggactttccgccaattgatttattagatttttgccttgcgctcgaacttgaattggggcgagttcgattatttaagtggggtccgcgactcattgatattgatgttttattatatgatgatgttaaaaccgatacagaaaagctaaaaatcccacatccttatatgaaagaacgtgcttttgtgatgattccattaatagaaatttcaccagaaaaaagcaatcttgtagagaatccggcccttttggaagaacaaggtgttcggaaaataaaaaatcaagtcaactggtaa

SEQ ID NO: 24658 - DNA, 825 bp, Listeria monocytogenes
atgaaagaccttcatacagataacttacaaatttcatacgacaaacgaatcattgttgatggtttagacatagccattccagcgaataaaataaccgctttagtaggtgcaaatggttcagggaaatcgactattttaaaaacgatgtcccgcttaatgaaacctagtaaaggcgctgtttatttagacggcaaaacgattcatagtcagccaactagagacgttgccaaacaattagctattttaccacaaaacccttctgcacctgatggtttgacggtgtttgaattaatttcttatggacgttctccgcatcaaagtagctttaaatcgattaccgcaaaagatcgcgaaattattttttggtcattgcgcgtgacgaatttaacggagttcgcggatcgacctatcgatagtttatcaggcggacaacgacagcgtgcttggattgccatggcgcttgcccaagaaacagatgtcctatttcttgatgagccgactacctttttagatatgacacaccaactagatgtacttaatttattgaaacaattaaatcaatcagagaaccgcacaatcgtgatggttgtccatgatttaaatcacgcatctcgttacgctcaccatatgattgctattaaagaaggaaaagtcattgcagaaggaacaccaacaagcgtcatgaccgaacaaactttagaggatgtctttaatatcaaagcagatattttaattgacccccgcagcggtgtccctctttgccttccatacgaaacttgcaacggatgcgaaattgtaaaggagcttgattccattgccaaatga

SEQ ID NO: 24659 - DNA, 1281 bp, Listeria monocytogenes
atgtacgtattaaaaaatggacaagtgctaaacgcgtcagggaaactagaaagtaaagatgtactcattcaaaacggcaaagtcaacttgattgccgattcaattgaagtaacaagtggtgaggaatttgacgccacaggtaagctaattacaccaggctttatcgacgtccatgtacatcttcgtgagccaggcggggaacataaggaaaccattttgacaggaacgaaagctgctgcacgcggtggctatacgacaatttgttcgatgccgaatacaaaacctgttccagattctaaagaagtaatggaaagtatacaagcaaaaattaaagaaacagcgaaagttcgcgtgttaccatatgcttcgattacgaccagccttggaacggacgaattagtagattttgaagctttaaaagaagctggcgcatttgctttcacagatgatggtgtaggagtgcagttagctggaacaatgtatgaagcgatgaaacgagcggcagcactagatatggcaattgtggctcactgtgaagataactcacttatatacggtggagttgtccatgacgggatttttgctgaaaaagaaggacttaaaggcattccaaatattgctgaatctgtccaaatcgcacgtgacgttttactagcagaagctgcaggttgtcattatcatgtctgtcatatttcaacaaaagaatctgttcgtgttgtgcgagatgcaaaacgggcgggaattcgtgtcactgctgaagtttcaccacatcacttaattttagatgaagaagctattccaggaaatgatggtaattggaaaatgaaccccccacttcgcagcaaagaagatcgggcggcacttttagaaggcttactggatggtacgatagattttatcgcaactgatcatgctccacacgcagcggaagaaaaaaatgtaccgatggagcaagctgctttcggaattgtaggtctagaaacagcattcccattactatatacacattttgttaaaacgaacgaatggacattaaaacagctaatcgactggatgactgtgaaaccagcggaatgctttaaactgccatacgggaaattagaagaaggcagcgtagcagatatagtcgtacttgatttagaaaaagaagcgaatattgacccagacactttttattcaaaaggaaaaaacacaccatttgttggagaaacatgtattggttggccagtagccacgtttgcagaaggaacgcttgtatacaatgagggggaaattaaatga

SEQ ID NO: 24660 - DNA, 513 bp, Listeria monocytogenes
gtgttacaaccacatttagtaattggttccgcatttacgtttggtgatgcattctttacactttttgctttcgcgattttgctagttttaatccgaatttatgcttggaaaccgcttatgggtattatgaaagagcgtgaagagcatattggttctgaaattgatgcggctgaagaaaatcgcgctcaatcagaaaaattacttgctgaacaaaaaagtgttttacaacaagctcgtgtggaatctcaaacaatgattgagaacgcaaaacaacttggcgaaaaagaacgcgaagaaattgtcaaaactgctagacgtgaatcagaacgtataaaagaagaagcaaaatccgatattgcacgcgaaaaagaagatgctatttctgctcttcgcgaacaagtcggttccttatctgttcttattgcatcgaaagtcatcgaaaaaaatctggatgaaaaagaacaatctaaccttatccaagattatatcgaaaggctaggggatgacaaatga

SEQ ID NO: 24661 - DNA, 303 bp, Listeria monocytogenes
atggatttagagcaaactattatgagcttgatcgtgttcggtggtaacgctaaaagcgatgctatgttagccattgattccgctaaaaaaggggatttcgctcaagcagacgaacaaatcgcccaagcagaacaagcactacttgaagcgcatcattctcaaacaaaacttatacaaggtgaagcacgtggcgaaaaaacagaagtttcccttctactcgttcacgcacaagaccacttaatgaatgcaattactttcaaagatttagcgaaagaaattgttgacctttataagaataaataa

SEQ ID NO: 24662 - DNA, 1008 bp, Listeria monocytogenes
atggatacggttattttaataacggttattatcgttatagtggggttagcgtttgattttataaatgggtttcatgatattgcgaatgcggttgccacgagcatttcaactagagctttaaaaccgcgagtagcaattggtattgcggcagttatgaatttcctgggagccatttcgtttaccggagtagctgaatcgctcaccaaaagcattgtagatccattttcgcttaataatggggaatttgtcgttttatgtggcttaatagcggcagtgatttggaatttaatgacttggcttgttggaatgcctagtagttcatcgcatgcgcttatcggtgcgatagctggggcttccatcgcatcagccagtagttttagcgtgcttaattggtcaggatttacaactattattattgcactcattatctcaccaattatcggttttacagtcggttatttgatttattcgctctttaagcatctttttcacgacaaaaagcttgggaaaatgaatcggcgctttcgttttatccaaattggaactgctgcagcccaagcatattcacacggcacaaatgatgcgcaaaaaacgatggggattattacgcttgctttagttgcgagtggacttttgaaagagtcagccggtattccattttgggtgcaagtaagttgtgcagcatcgatggcgattgggtcatctgttggcggttatcgaatcattaaaacagtaggaacaaaaatcatgaaaataaccccagttactggtgttgcatctgatttaagctctctttccgtaatcatgacagctactttgattcatttgccagtcagcactacgcaagttattgacagctcgattatgggtgtcggaacagctaatcataaaaaagaagtcaattggcgtacggggaaaaatatggttgtaacttggtttattacgttaccactagctggacttttggcagcagtggtatactggatatcagcagctatttttttataa

SEQ ID NO: 24663 - DNA, 2712 bp, Listeria monocytogenes
atgaaaaaacagcgtgtagattacaaacggagattagaccaaaagcgagcgcaaaaagcaaaattaattgcggcgcttattacgacaacaacgatgatggtagcgcctgtcactgtgaattacgattcttttaatcaccaatttgccctaagtggtattcaagcggatgcggcaacaattgatttgctagggaattctaatttgaatacacagtattctaatgggaaattagtgattactctttctgggaatcagttagttagtgctagtgcggtatccacatactatccatattttgaattgccaagtgaactttcttctattttgagtaatccaaatataagagcaaatatgaaaattgactataaaattgcttatttaggaattggcggtattggattatttaatcaagggacagtaaatggaagtagctcaagcaatttctttattgattctagtagaaatgcaattggtgcgaaagtaaatcacttactgggagtcggagttggtagtgtatctactttcactttgacaattgatttgctagcgcttggcgtaactgcgctacctagtgccaatgatgggaaattagactttgctgctagaactggtgatgggcttttagatgttgatttgttgaatagtaatgcggctcgtgggtttattactacggatgttggggatgcggatgctgacgccgacgcggatgctgatgcggatgctgacgccgatgcggatgctgacgccgatgctgacgctgatgccgacgctgacgctgatgcggatgcggatgctgacgccgatgcggatgctgacgcggatgctgacgccgatgcggatgctgacgccgatgcggatgctgacgccgatgccgacgctgatgcggatgctgacgcggatgccgacgcggatgccgacgcggatgctgatgctgatgcggatgccgatgctgatgctgacgcggatgctgacgctgatgctgacgcggatgctgacgcggatgcggatgccgacgctgatgccgacgctgatgccgatgctgatgctgatgctgatgctgatgccgacgcggatgctgatgccgacgcggatgctgatgccgacgctgatgcggatgccgacgcggatgcggatgctgatgcggatgcggatgctgacgctgacgcggatgcggatgccgacgcggatgccgatgctgatgcggatgcggatgccgacgctgatgctgatgctgatgcggatgcggatgctgacgccgatgctgacgcggatgccgacgcggatgctgatgcggatgcggatgccgatgctgatgctgacgctgatgctgacgctgatgctgacgcggatgctgatgccgacgcggatgctgatgcggatgccgacgcggatgctgatgcggatgcggatgcggatgcggatgctgacgctgatgccgacgctgatgcggatgccgacgctgatgctgacgcggatgccgacgctgatgcggatgccgacgcggatgctgatgcggatgcggatgctgacgctgatgctgacgcggatgctgacgctgatgctgacgcggatgctgacgcggatgcggatgccgacgctgatgccgacgcggatgccgatgctgatgcggatgcggatgccgatgctgacgcggatgctgacgcggatgctgacgcggatgcggatgccgacgcggatgctgatgcggatgcggatgcggatgcggatgctgatgcggatgccgacgcggatgccgacgcggatgctgatgcggatgcggatgccgacgctgatgctgatgcggatgcggatgctgacgcggatgctgacgctgatgcggatgctgacgcggatgccgacgctgatgcggatgccgacgctgatgctgacgcggatgccgacgcggatgcggatgccgacgcggatgctgatgcggatgcggatgctgacgctgatgctgacgccgacgcggatgctgacgcggatgccgatgcggatgcggatgctgacgctgatgctgacgccgacgcggatgccgatgtagacattgactggagagatttcctagttgaaaaaccaactgtaaatccaatatatgaaggaactaaaacaatttcaggttcctcaatttataaaaacatgaacatcaatgcccttctgaaatcattgcaatcagatgcacctgttggaacaactttctatattaatttgactcttccagatggtactgtaattggaaatgtcttaatccatgcagatggaacctatacaatcaatattcctaattataatttgaaagctggagatgttattcatcttcaagtaacagctaaatacggcgatgaagtaaaaacaagtgatgatgtatccgtaacagttctgcctttagtagactcagacgctgatgcggatgccgatgctgacgccgatgctgacgcggatgctgacgctgatgcggatggtggaccaaatccttctaccaatggaggaactactggaacttctaacggaggaactggcgtaaccgttacaaacatgagctcaaatggttcaggaacaatgctttcctcaggttatagcgcggatggaactacttctatctcagcaagtgatctcccatcaactggagatacaaacagtagtcttccgtgggttgggcttggattattctcactagcaggcgcgtttttactacgtcttttccgtaaatag

SEQ ID NO: 24664 - DNA, 759 bp, Listeria monocytogenes
atgacatttttagaagaaattttagcgcaaaaagaagtagaagttgcaaaaatgcccttagaacaagtagcagaaaaacggaaaacttattcgttttatgaatttttaaaagcaaatacaaacacgatgcaacttattgcagaagtaaaacgcgcctctccttccaaaggggaaatcaatatgggcgtgaatccagttctgcaagccaagtcttatcaagccgcgggtgcgggaatgatttctgttttgacagatcctgtttttttcaaaggctcgattgaagatttgcgagaagtagcgaaaaatgtgggaattcctgtactctgtaaagatttcattattagtgaaaaacaattgattcgcgctcgaaatgcgggagcgacggttgtgttgttaattatttcggcacttacagaagagaagctaatcaccctgtttgaacaagctctggcgcttgatttggaagtgttagtggaagtacatgaccaggaagaattagctgttgctcaaaaaatcggagctcaactcattggtgtaaacaatcggaatttgcacacatttgaagtggatattgcagtaagcgaaagactggcgagtgatttttcgtcggatgcttgttttataagcgaatcaggttttcgaacagcagaagatgtggctcgcgtgagtcaaaaatatgatgcggtacttgttggagaagcgttaatgcgagaagcgactccagaagtggcagcgaagagtttgaaggtgacacgatga

SEQ ID NO: 24665 - DNA, 1233 bp, Listeria monocytogenes
atgaaagaagaactattaaaacgatttacaaaatatgtaaaagtagatactcaatcgaatgaagaaagcacagtttgtccaacaaccccaggtcaaatggaactggcaaacattctcgttacagaactaaaagaaatcggaatgcaagaagtcactgttgacgaatttggttatgtcatggcaacacttccatctaattcaacgaaagaagtcccagtaatcggatttttagcccatttagatacagcaacagatttaacaggtaaaaacgtccaaccacaagttcacgaaaattatgatggtaaagatatcattctaaacaaagacttaaatgtagtgctttcaccaaaacaatttccagaactagctgggtacaaagggaaaacactaatcacaactgacggaacaacgctacttggcgcagacgacaaagctggcattaccgaaattatggtggcaatgaaccatttaattaaccatcccgaaatcaaacacggaaaaattcgtattgcttttacaccagatgaagaaatcggccgaggcccagaacgttttgatgtagaagcatttggcgcaaaatatgcttatacaatggatggtggcccacttggcgaactcgaatatgaaagttttaacgcggcttctgccaaaatcacttttaaaggtaatagtgttcaccctggtacagccaaaaacaaaatggttaatgctgttaaaatggcgatggaattcgatgcgcgtattccaaaagacgaagcaccagagtacacagaaggttacgaaggcttttatcatttaatctccctaaacggcgacgtagaacaagccagatcctactatattatccgcgacttcgatcacttgaaatttgtggaaagaaaaacacatattgctagtatcgctaaagagttagaagaaaaatacggcgaaggatcggtagaattaaaactgaacgatcaatattacaatatgcgcgaaaaaatcgaaccagtaaaagaaattgtggatatcgtcagtgcggcgatgagaaatctagacattgaaccgaaaatcagtccaattcgcggcgggacagatggtgctcaactttcatacaaaggactaccaacgccgaatatttttggtggaggagagaacttccacggtaaatttgaatatgttgcattagaaagtatggttaaagcaacagaagtaatcattgaagtggctcgtttgtttgaagaaaaagaataa

SEQ ID NO: 24666 - DNA, 1866 bp, Listeria monocytogenes
atgtgtggatttgtaggatgcgtacatgaccgcattacagaaattactggcgctgataaagaaacctttagacaaatgaacagtatgattacgcaccgtgggccagatgatgaaggatacttcacagatgatcacgtgcagtttggtttccgccgtttaagtattattgatgtagaaaacggtcatcaaccgttaacgtatgaaaatgaacgttactggattatttttaatggagaagtttataactatgtggaactccgcgagcaattagttgctgaaggaatgacatttgaaaccgaaagtgataccgaagtaattatcgctacatatgcgaaatacaaagaaaaaacagcagaacgccttcgcgggatgtttggttttgttatttgggacaaacaagaagaacttgtttacggcgcacgcgacccattcggcattaaaccatttttctatgcagaagaagacgacaagctgttcatgggttctgaaaagaaatccattttacatgcgttaaaagaaaaagaattggacgaagtgtcattacaaaactatatgacttaccaatttgttccagaaccagattccttaactaaaaatgtcaaacgtttagagccaggacatcagtttacgaaaaaaattggtcaaccgatggaaattacgacttattggaaagcatcttttgcaccagtaactaaatcagaagacgcatggattaaagaagtgcgtgacgtgatgtatgattctgttaaaatgcacatgcgctctgatgtgccagttggttcattcctatctggcggtattgattcatcgattattgcagcaattgccaaagaataccacccagcaatcaaaacattctcagttggttttgaacgcgatggtttcagtgaaatcgatgtagcaaaagaaacagcggacaaacttggcgtagaaaacattagttatgttatctcaccagaagaatatatgaaagaactaccgaaaattgtttggcacatggatgatccacttgctgacccggctgctattccgctttatttcttatcaagagaagcgcgcaaacaagtaaccgtagcattatcaggtgaaggcgcagatgaacttttcggtggttataacatttataacgaaccaaattcccttgcaatgtttaacaaaatgccaggcgtatttaaatcaatgttaaataacttggcgcgtattatgccagaaggaatgcgtggtaaaagtttcttagaacgtggaacaacgccgatggaagaacgttatatcggaaacgccaaaatgttcacggaaaaagaaaaacaaattttacttccaaaatatcaagctggtcatgactatacgaatattacagatccattttatgcagaaacaacgaattatcatcctgtagaaagaatgcagtacattgatattcatacgtggcttcgcggagatattcttctcaaagctgaccgcatgacgatggctaattcgctggaagtccgtgtacctttccttgataaagaagtgtacaacgtggcaagaaatattccagatacaatgaaaacaactaatggaactactaaatatatcttacgtaaagcggcagcaacatttgtaccagaacatgtacttaatcgccgtaaactaggattcccagtaccaattcgtcactggttaaaagacgaaatgaacgcttgggttaaaaatatcattaaagaatcaccaaccgatcatttaattaacaaacaatacgtgctagacttactagacgatcactgtgccggtaaattcgactacagtcgtaaaatctggacagtcgttattttcatgatttggtacgatgtatacgtagcagacaaatacgattttggaaaataa

SEQ ID NO: 24667 - DNA, 1227 bp, Listeria monocytogenes
gtgaaaaaggtaacactcatttttagcgtttatacatttattctaggtatcttagtgggagttattgctgctttatttttagcaatggttcactttgccacgacatttttgtgggattatcttcctaatcagtttgatttttcatggtattatcctctgctaatcggcttaatcgggagtttttttgtagggatggttcagctgaaacttggtgactatccgcggtcaatgcatgataatgttgctgaggcgaagaaaactggacggatggaatatcgcaaagttctgcttccaacaatacttagcgcttggattattttaacatttggggcgagcgttggtccggaagcggctttaattggtatcgtaggtggtgccacgacttggattattgaccatttaaaattatctatggcgcataaagaagaacttgttagtttgagtgttggcgcgattatttccagtattttccacgctccgtttagcggactagccgaggaaattgatgaaagtagtcaagcaaagaaaattcctaaaaactctaaattagtgttatcacttcttatttcttttagcgcactcggatctttcctttggctgaaatcctttttaaaaatgcctgcaagtatttttgcgattcggctacctgatatgggttggtcttggtggtttattttactttttatcccaacaattattctcggatggctttttagtgtttattttcagcaattacaagtatacattgcgaaagcggcctctgtaattaaaaataaaatggtcgcggcgattatcggtggattaagtattggtttgtttgggattatttcttccttcatgttgttttccggcgaacatcagttgatcgaattaacaactactgtccaaaattattcgattcccttcttattaattattgcgctcttaaagcctgttttagtcgctatctgtttagcaactggttggaatggtggtgcgatttttccggcgattttcactagtactgtgatgggatacatagcaacatattggatagatgggtcaactggatttctcattacggttttcgtaaccgcctgttgtacgaaaattgtgggaaagcctgttctaaccgcatccattttacttttcattttcccgctacaatttttcccgtttattctactgacagcctttatcgttaataaaaattggtgggttagcattagaaaaattatccgggcataa

SEQ ID NO: 24668 - DNA, 999 bp, Listeria monocytogenes
ttgccaaatgaggtttatgatgtaaccattatcggcggcggtcccattggcctattctccgcattttatagtgggcttcgttccatgaaaacaaaaattatcgatgctgaacctgctgtcggcgggaaagttcgctactttttcccagaaaaaatcattcgcgatatcggtggtattcccgccattaccggcgaaaatcttgtcgcaaatttaaaacaacaagcagaaacgtttcatccaactattgtttgcagtgagcgagttgtagatgtgaccaaactagcagatggcacctttcaattaacttcgcataacggttcgattcatttttcaaaaacaattgtcattgctacaggtagtggtacgtttgaggtcaataagcttgaagctctacatgccgaagattttccatttgcaatccattatgatgtcaaaaatatcgagcaattccgcgataaagtagtagtggtttctggtggaggaaattctgctatcgactgggcgcagacgcttgaaccgattgccaaaaaagtacaccttatttatcgcggcgaagattttaaagcccacgaggaaagtgttcgtgaactgaaaaattctcgcgtcgaaatccatatccatcatgaaatcagcgaactaatcggaacgaacaaccaactaactgagattaccgtttgctgtaatcaaacgcagactacgaaaacaattgaaaccgaggcacttttcattaatcacggggtaaaagtagaccttggaacaatggcggaatggggctttaaacaagccgattttggcattgtcgtggatgatgaaatgaagacgacggttcctggtatttttgcttgtggagatagtgccacctaccctcgaaaaatacgcattatcgcagcaggactgcatgaagggcccatcgcgattaatagtgcgaaaaaatatttagaaccaactgccgcagatgaagcgatgattagcacgcatcacgaaagctttattggttaa

SEQ ID NO: 24669 - DNA, 648 bp, Listeria monocytogenes
ttgaaattagtattaatgggactgcccggcgccggaaaaggcacacaagcggaacagattgttgagaaatacaacattcctcatatttccactggagatatgttccgagcagctatgaaaaataatacggaattaggacgcaaggctaaatcgttcatggataatggcgaccttgtacctgacgaagtaacaaatggtatcgttcgtgaacgtttaagcgaagatgatgctaaggatggtttcttgcttgacggttttccacgtactgtggaacaagcgcaagaattagaaaacattctaagtgatttagggacagaacttgatgctgtcattaacattgatgttgaaaaagatgttttgatgaaacgtcttaccggtcgctggatttgccgaacttgcggtaaaacttaccacgaaatttacaacccaccgaaagtacctgggaaatgtgatttagatggtggagaactttaccaacgcgatgacgacaagaaagaaacggttgaaaaacgactaaatgtaaatatgaaacagaccaagccgcttctagatttttattctgaaaagggtaaacttcataacataaacggcgagcaagaaattaaagacgtttttgtagatgtggaaaaaattcttgcttctttttga

SEQ ID NO: 24670 - DNA, 1290 bp, Listeria monocytogenes
atgtttgtagatcaggttaagatatatgtaaaagctggtaatggtggggacggtatggtagcattccgtcgcgaaaaatttgtaccaaacggtggtcctgctggcggtgacggtggtaaaggagcagacgttgtatttgttgtagatgaaggtctgcgtacattggtggatttccgctttaaacgaatctttaaagcagagcacggcgaacatggcatgagtaaaagtatgcatggacgcggtgcagaagatttagtagtcaaagtaccacaaggaacaattgtaaaagatattgatactggcgagattattgctgatttagtagcacatggtcaacgtgcagttattgcaaaagcaggacgtggcggacgtgggaataaacgttttgcaacgccagccaatccagctccagaactctctgaaaacggtgagcctggacaagaacgaaatgtacaattagaacttaaagtattagcagatgttggtttagttggtttcccaagtgttggtaaatcaaccttattatctgttgtttctgctgcgagaccaaaaattgccgcatatcactttacaacgattgttcctaacttaggaatggttgatgctggagatggtcgtagctttgttatggctgacttgccgggattaattgaaggggctagccaaggtgttggtttaggtcatcaattcttacgtcatatcgaaagaacacgtgttatcgtgcacgtcatcgacatgtcgggctcagaaggacgcgtaccatatgaagactatatggccattaataacgaattagaacaatataacttgcgccttatggaacgtccacaaattattgtagctaataaaatggatatgccagatgcggaagaaaatttaaacgaatttaaaactaaaatcgctgaagatattcctgtcttcccaatttctgcagtaacaaaaacaggcctacgcgaattacttcttgctattgctgataaattagaaacaacaccagaatttccacttaatgaaattttggagcaagaagacgaagatacagttctttacaaatatgttgctgaggaacctgacttcgagatttctagagaaccagatggtacttttgtgttaagtggagcgaaaatcgaacgcttatttacgatgacaaacttcgagcgtgatgcttctattagccgttttgctcgtcagcttcgtgcaatgggtgtcgatgaggcgcttagaaaacgtggtgccaaagacggcgatatcgttcgcttgcttgattatgaatttgaatttatggattaa

SEQ ID NO: 24671 - DNA, 1284 bp, Listeria monocytogenes
atgttagatgttaaattgttacgtaataattttgatgaagtaaagcagaaattacaaaatcgcggagaagaccttggtgaattcgagaaatttggcgagttagataaacgccgtcgtacattgattgtggaaacagaagcgctgaaaagtcagcgcaatgaggtgtctcaagaaatcgctaaattaaaacgcgaaaaacaagacgcggatgctaaaattgaagaaatgcgtgttgttggtgatcgtattaaaacattagatatcgaactacgcgaaattgacgagaagttagatatgattttaatgtcgattccaaatattccacacgaatctactccggttggcgaatcggaagacgataacgtggaaatccgcaaatggggcgaagtacgcgcatttgattttgaaccaaaagcgcattgggatttaggaacagacttagatatccttgattttgaaaatgctgcgaaagtaactggtagccgttttgtcttttataaaaaattaggagcaagactggaacgagcgcttattaactttatgatggacttgcattcgaatgaacatggctacgaagaaatgttaccgccttacatggtaaaccgtgcgagcatgacaggaactggtcaattgccgaaatttgaagaagatgctttcttaattgaagcagaagattatttccttattccaacagcggaagtaccagtaacaaactaccaccgcgaagacattttaaaagcagaagacttaccaagaaaatatacagcgtttagcgcatgtttccgctctgaagcgggatctgctggtcgcgatacgcgtggtttaatccgtcaacatcaatttaacaaagtggaattagttcaatttgtgaaaccggaagattcttacgtggcgctagaaaaattaactggtaacgcagaagaagtattgcgtcgcttagaattgccataccgcgtactaagcatgtgtacggctgatttaggcttcactgctgctaaaaaatatgatttagaagtttggattccaagctacaattcttatcgtgagatttcttcttgcagtaattttgaaagcttccaagcaagacgcgctaacattcgtttccgtcgtgaaccaggaagcaagccagaatacgttcatacacttaatggttccggcttagcgctaggacgtacagtggctgccattttagaaaattaccaagatgcagatggttctgtacgcattccaaaagtattgcaaggttacatgggcggtatcgagaaaatagaattaccaaaataa

SEQ ID NO: 24672 - DNA, 702 bp, Listeria monocytogenes
atgacaattggtattatcggagcaatggaagaagaagtagaacttttaaaaaatagcatgtcgagcgtagaagaaattgtaattggcggagctaaattttacattggcgaaattgctagcaaagaagtagtgcttttagagtctggtatcggtaaagtaaatgccgcactgggaacaacccttatggcagatcgctttaaaccagaagtaatcattaatactggctctgctggaggtatggctgaaggtttagctgttggcgatgttattatttctgaccgactagcttacggcgatgtagatgtaacggaatttggttacacatacggacaagtcccaagaatgccagcattttatcaaggagacgctgtacttcttaaaaaagcggaaaccatttaccgtgaatattttgctacaagcgaaaacaaagcggtatatggacttgttgttacgaatgattcttttattatgcgtcctgatcagcatgaaataattcgcactttttttccagatgtgaaagcagttgaaatggaagcggcggcaattgcccaagttgcttatcaatttgatattccattcttaattattcgtgctatttcagatttagctaaccaagaagcaactatttcatttgatgaatttattcacttagcagcgaaacaatccgcaacttgtatcatcgaattgcttaaaacaatttaa

SEQ ID NO: 24673 - DNA, 2352 bp, Listeria monocytogenes
atgggatggtttaaagattttttctttggcgatatggacgaggaaatagatacatacgaagatacgtcttcaagaaaagtagaaaagaaagcaaaacaacgagcatcagaagtattgccgaaatcaaatgttacagcaattaaaacaaaagaacgtactataaggaacgaacgaccagttgcttacaaaacagctccaaaacaaaaacatatgcaaccggtgaaacgacaaatgaaaacgcaaatggtttaccagtatccaaaaggtgaatttcgttttccattaattccagataaacaaaaaagccaaccaattcaaccaaaaaaacaaccaataacagaaagacaagtggcagagacgcaaccagtaaaagaggaaacaagaaaacgaccttttacggcgacggatgtaccttcgcctgtttatgcctttaataaacgaccaagtaaatttgagtttgctgtaactgaagcagaagaacttagtacaatacaagaagatttaaccattactccagtagatttgttagattcagcagaagcggaaacaattgcttttgatgccggactaaatcgtcaaatagaagaagaggttgtgtcagtgccagtgatggaagaagtcgttacggaacaacctgaagtggaagtgaacccagaaccagttgaacagcaagaaccagcacgcgtttcccttataacggaagaaccggcgcaaacaaaaacaactactagaagcaaacaagtagaatcaaatagacaagaacagttgctaaaaagcagaattccatttaatgtcatgatggtgaaaaaagataaacaagcgcttcaaaaagaagatgcgcaggaaataaatgtgcaacaaccagttgagatagaagcagaacaaacgaatattgttcaacaaacgcaagtagcgacagcctcttatccaatgaactatgaatttccatcgtttggtttactccatccgccagtctccaaacgagaagacgactcatggctacaaatgcaacaagagatgctagatgagaccttggaaaattttaatgtacaggcaagcgttgttaatcgcacccaaggccctgccgtaacaagatttgaagtgcaacctgaaaaaggtgttaaagtcagcaaaatcaccaatttgacggatgatattaaattaaatttagccgcgaaagatatacgtattgaggcaccaatacctggtaagagtacagtaggtattgaaatccctaatcagacaagtcgtcccgtaatgctttctgaattgatgaatacggaagcttttcagacatccgcttcaccactcacagctgctcttgggctagatatttcaggtacaccgattattactgatttacaaaaaatgccccacggtttaatcgctggagctacagggtcagggaaaagtgtttgtatcaattcattgctagtaagcttactttataaagcaactccagaccaactgaaattacttttgattgacccgaaaatggtcgagttagctccttacaaccggataccgcatcttgtaagtccagttattacggatgccaaagcagctacggtcgctttaaaatgggcggtagaagaaatggaacgtcgttatcaattatttagccatactggtgttagaaatatggaaaaatataatgaatacgctagtcacccagatcatacaggggagaaattaccttatattttaattgtgattgatgaattagctgatttaatgatggttgcaccaaatgatgtagaagagtccattagccgcatcgcgcaaaaagcaagagcttgtggtattcatatgattgtagcgacacagcgcccatctgtagacgttattacaggtctcattaaggcgaacatccctacacgtgtttcgttctctgtatcgtctcaaatcgactctagaacgatcttagatgcaagtggggcagaaaaactacttggaaaaggggacatgctcttcttaccaagtggtgcaagtaaaccagtacgtttacaaggaacctttgttagtgacgaagagattgatgcagttgttgctcatgttcggagccaaggcgaggccgattatatttttgaagaacaagaattacttgtgaaagaaacggcaaaagaaaataccgatgaattatttgaagaagcatgtgactttgttttaagtcaaaatgcggcatcgacatccttgttgcaaagacatttcaggattggctataaccgagcggcaaggttaatggaatctcttgaaaatcaccaaatcgtttcaggaataaatggctccaaacctcgagatgtgattattacaaaggaccaattagctaagcttcgaaacaaagaatcttaa

SEQ ID NO: 24674 - DNA, 1053 bp, Listeria monocytogenes
gtgataacgaatcagcgggatattgataaatattacgacatgttagtggagaaaaattcgaattatgaaggcgtattttttgttggagtgaaaacgacgggaatactttgtcgcccaacgtgtccagcgaagaaacccttaaaagaaaattgtgagtttttcagtacagccaaggaggcgctacttgcatcttaccggccttgcaagcgttgtgaaccgctctccaatccgacgaaattgtcgccagctgtgaagttacttgttgatgcaattgagaaaaatccggagaaaaaatggacggataaagattttgatgatttatccattagcgcaaatacagcgcggcgccagtttaagaagcaatttggaatgacttttattgagtatgcacggtcgcggcgtctcggtcttgcttttaagcatattcggggtggaaattcaatcattaatgcgcaacttgatagtggttatgagtctggaaatgggttccgagatgctttttcaaaaacgatgggggaggttcctcataaatcaaaagatatcaccattttatactccgcttggcttgaaactaaacttggatcaatgctcgcaatttctgatgatgatagtctattgcttctggaatttgttgatcgaaaaggactggaaacagagattaaaaaattacgaatgcgcttaaacgcggctattacacctgaaaaaacaataataattcaacaaatagaagccgaattagcgcaatattttaatggagagttgattgattttaaaacaccgattcgctatatcgggtcagattttcaggaaaatgtctgggaagagctacgacgaattccgattggggaaacaatttcgtacaaaggtctagcagaaaaattagggcgatcaacagcgagtcgcgccgtggcaagagcaaatggggccaaccaattatccctcatcgtcccgtgccatcgtgtaatcaatactaacggagcattaggaggttacggcggcggtcttgctcgaaaagaatggttaattaaacatgaaaagatggttccaaagtaa

SEQ ID NO: 24675 - DNA, 318 bp, Listeria monocytogenes
atgcgtggaatgggaaatatgcaaggtatgatgaaacaaatgcaaaaaatgcaaaaggaaatggcgaaagctcaagctgatttagaagctcaagagttcactggaactgctggtggcggaatggttacagtaaaagctactggtaaacgcgtcattacggatgttgttataaacgaagaagtagttgatccagaagacatcgaaatgctacaagatttagtacttgcagcaacaaatgacgtattaaaacaaattgaagatacaacttcacaaacaatgggtaaattcacacaagggttaaatatccctggaatgtaa

SEQ ID NO: 24676 - DNA, 1020 bp, Listeria monocytogenes
atggaaatcttactacaaaaagtatatgaccaagaaaatttatccaaagaagaaatgaatattatcgcaacagaaatctttgaaggacgactttcgaaaaccaaaatggctgcttttttaatggcgctcaaagtgaaaggggaaacggcagaagaaatggcgggaatcgcgcaggcgatgcagcaagtagccattcaagtggcttttccagctggtacggcgatggataattgcgggacaggcggagataaatccaatagttttaatattagtacaacgtcagcttttgttcttgcagcagcggggattccggttgcgaaacacgggaatagaagcatttctagtcgttctggtagtgcggatgtttgtcaggaattagggatcgatattaatttgcgcccagaagatatgacttatttactcgaaaaagtcgggattgcctttttgtttgcgccacatgttcacccgaatatgaagtacgttatggatgtccgaaaagagctcggaacgccaacaatttttaatttgattgggccactcacgaatccggttcacctagaaacgcaattgatgggaatttatcgccgtgatttgttagagcaaacagcagaagtactcggacaactcgggcgaaaacgcgcagtcgttttaaatggcgctggttttatggacgaagcttctctagctggagaaaatcactatgcgttatatgaaaacggcgaagttcacttatatacactccgtccagaagatgttggtttaactagttatccactcgaagcaattacgggaggagatgctaaagaaaatgcagcaattttgcgtagtgtgcttgaaggagaacctggagcttacttagatacggtgcttttaaatgccggttttggtttattcgcaaatggcaaagtggaaacggtgcaagaaggcgtggatttagcaaaggacttaattagtagtggcctagccaaacaaaaattggcagatttaattacttatcaaaaagaggtgctagcaaaatga

SEQ ID NO: 24677 - DNA, 2343 bp, Listeria monocytogenes
gtgtctcatttaaaagattatacgattggtattcaacatataaagcagctgacgtcggaaatctcacttggaactaaattggtatttgctatttctgggcaaataacaatcaaggattctgagcaaaaattttacttgcaggaaggcgatattttagtccttgatcgcaacactttttatacaattgaaggaaatgaagcaaacttattcattaatttaacgatttcagatacattttttgcgcattattatgaggattattttcagcattcttttaaatttttctcgaaggagagtgaccctgggagagagcgggttgttgggtcattaaggaagtcggtgagtgagcttttgattgcttcggcgacgaagaaacgggcgaataaattagaagcgcaatcggcgttattccaaattttattattacttacgcgttttttgaaaaaaggggttccatcttctgctaggaaagaagtcaatgataaacgaatttcgcgcatcattcgagaagtggaggagcggtttgatgaagccttgtcgcttcgtgtgtttgcgcaaaaagagtttttaagcgaggcgtatttatctcgttattttaaaaagacgactgggcttggttttttgcagtatttgacggaagttcgattgaagcatgcgattcaagatttgctacattcggctgaaagtattacggaaatcgcgttaaaaaacggtttttcgagtcaaaagcatttttcagaagtatttaagtttcattttgagctaacgccaagtgagtacagagcggaacatcatgcggaaacgaatttgttaatagacaataaggcatctgagctgggcgctagtatagagcaaattgtgccatctccggagattttagtgaatttgtcgcgactttatcatgatgtggagccgggcaaggaattaaataaagcgccatttgagaaaaagaaaattgatattacggaaaagactgcccgttgtcttagtgagaatatgaatattttaacaattggtgagcttaaagaagtgcttaaagccaacgtgcaaaagcagattataacgacacgcgatgaaattgggattaattatattggtattcgtcacttgtttaggggttcgacgttcttgcctgaaacggaaacggacgagctagtaccgacatcttcgccatacgctaacgcggatttggcgctcacgtttttaaaacaacaaaatttagagttgttcattcgcatagagtatcaagatattgtaggcgatgtagcggctgtttttgaacgattagatcattttttaaagcattgtatgcaagtttttgggcgagaatttgtttctaagtggcattttatgttttttgagccgaaaaatacatatgctgataaggaagaactaaaaaaactttatttgaaaatatatcatattataaaatcgcgttttccagctatccaagtcggaaattttgtcccgttttcactttctaaaaatgaagtcccagaacggcatatgtggtttttagatgtggctgataaaattgactttgtggcctataatgcgaatcaaaatgaagcggtggatttttcgaaggaagatatgaagtcgtttatgatttcagaagattattgtttgtctaaaacacggaagttgaaggattttttgaaacaccatcatattaataaaccccttatgctagtgaactggaatacactaacgggaaatacacggtatacgaatggtacgtttttccgaggtgcgttggttttaaaaacaatgctagatttagcaccagaagtggatgcgctagggttctggattaatacagaactgcatgaaggcgatgacagccaattaaatattagcttagatgggattgaaatgttccacttttttgacggaaaaagaccggcgttttatgcggtgaagtttttgagaaggcttaaaggtgttgttgttgctgagggtgcggattttattatgacgaagcatacagacggataccaacttattctgatgaactgtgcgaatattaacccgagatattctgtggaagagagatttactaaggaagagcagaaagaactgcatatccgaataacagggcttcaagctggggaataccaagtgtgtaaatggcaattcgaccgcgataatggggcgctttactcgaaatattggcagcttaatagtaagtatggactggataaagagattttggattatattgttgatgcctctcagccgactcttacggtgagcgatgagacgattacggaagattggtcgttttatgcttatttagacattaatgcgattcatttttatgagtttagaagtacgatttaa

SEQ ID NO: 24678 - DNA, 864 bp, Listeria monocytogenes
ttgaagaagaaaaagcgattcaaacagaagttgctcatcgcaagtcttgtaatcggattaatggctgtgctttcgggttgtggctattcaactgatccaattacatcagaatcaactggattttggagtcactacattgtatttccattgtcctggactattacttggttttccgatttattcggtggaagttatgcagtcggaattatcgttgttacaattttaatccgtctacttatcatgcctttaatgatcaaacagctgaaaagccaaaaggccatgacaaacttacaaccgaaaatcaaagaactacaagaaaaatactcgtctaaagataatgaaacaaaacaaaaactacaacaagaaacaatgcgtctatatcaagaaaatagcgtaaatccaatgatgggttgtttaccattattaatccaaatgcctattctactaggattttaccaagcgattagtagaacagcagaaatcaaaacagattcattcttatggatgcaactgggaaatccagatccatattacatcttaccggttgttgcggcattaacaacattcttatcatcaaaaatttctatgatggggcaaacacagcaaaataaatcaatggcaatgattgtttacatcatgccagtaatgattctatttatgggtattacattaccgtctgctcttgctctatactggattatcggtaacattttcaccgtattccaaacacttttaattaataatccttttaaaaacaaacgcgaacaggaggcgctggctgctgctcaagttgcggaagatcgtttgaagaaaaaagcagctaacatgaaggcttccaaaaaaggaggtaagaaaagaaagtga

SEQ ID NO: 24679 - DNA, 609 bp, Listeria monocytogenes
atggaacacatttatattcccggaaaaaataaggatttagctccattattactacttcacgggacaggcggcgatgaaaagtcgcttgtcgaagtagcagaatttatcgcgggtgatgcggctgttttatcgttacgcggtgatattaaagaaggcggagcaaatcggtttttcaaaagatttcatgatggcagtttagatttagaagacttggaaagtaaaacctcggaattaatcactacaacgcgcgaacttgctaaaaaatatcaactagattttgagcgaatcattgcagtagggtattcaaatggtgccaatattgcggccaatgcacttcttcaagcggagaatagctttcataaagcgattttatttcatgcaatgccagctggaaacaaacaacccgaattttcgattagccatcgtagtgtatttctgtccgctggtttaaatgacccgcttattacagcgaaagcttccgaagaattagttgaaatcctcaaacaacgtggagcgaacgtggaaacggtttggacagcagctgggcattcactgactatggaagaattagaagaagcgaaaaaatggtatcaaaacaaccagaaatga

SEQ ID NO: 24680 - DNA, 867 bp, Listeria monocytogenes
atgcgtattcgtgtcccggcaacaacagccaatcttggccctggctttgattcgtgtggtttagcgttaacgttatatttaacgcttgatattggagcggaagcagactcttggtatatcgaacataatattggcggcgggattccgcatgatgaaaccaatgtaattatagaaacggccttaaatctggcgcctaatttaacgccgcatcatttagtgatgacctgtgatattccacccgctcgtggactagggagtagttctgcggcagttgttgcgggaattgaattagctaatacacttgctgaacttaacctttcaaaagaggaaaaagtccggatagctgctgaaatagaagggcatcccgataatgtcgcgccagctgttcttggaaactgggtcgtaggggcgaaattagatggagaagatttctatgtacgccacctttttccggattgtgctttaattgcttttattccaaaggcagaacttcttacttcggaaagtcgtggtgttttgcctgatacgcttccgttcaaagaagctgtccaagctagtagtatcgccaatgtaatgattgccgcgattttgcgcaatgatatgacattagccggagaaatgatggaacgtgatttatggcatgaaaaatatcgcagtcaattagtgccacatttagcacaaattcgcgatgtagccaaaaaccaaggagcctatgctgcttgtttgagcggcgctggtccaactgtcctagtgttcgctcctcgaaacctcgcgaataaactgcaaacatctttacaaacactagaaatcgatgcggacgtccttctacttgatgtcgaaggaagcggcgcagaagtttttcgttaa

SEQ ID NO: 24681 - DNA, 729 bp, Listeria monocytogenes
atggataccccagattataaacgagttgtattaaaattaagcggtgaagcacttgccggaaatgatggctttggaattaacccgagcgtggtcaatttgatttctgctcaaatcaaagaagtagtagaactaggagtagaggtagctatcgttgttggcggcggaaatatctggcgcggtaaacttggtagtgaaatgggaatggaccgtgcagcagcagaccaaatgggtatgcttgcgactatcatgaattccttatctttacaagattcccttgaaaatattggagtagcaacgcgtgtgcaaacttccattgatatgcgtcaaattgcggagccgtatattcgtcgtaaagcaattcgccatcttgaaaaaggtcgcgtcgttatttttgcaggtggaacaggtaacccatacttctccacagatacagcggcagcactaagagcggccgaaatcgaagcagatgtcatcttaatggcgaaaaacaatgtagatggtgtctacaatgccgatccaaaactagatgaaaatgcgaaaaaatacgaagaactttcttatcttgatgtgattaaagaaggtttagaagtaatggatacaacagcatcatcactaagtatggacaatgatattccattaatcgtcttctcatttacagaacaaggcaataatattaaacgtgttattttaggtgaaaaaattgggactactgttagggggaaaaaataa

SEQ ID NO: 24682 - DNA, 1353 bp, Listeria monocytogenes
gtggataataatttccaggacagaacaccaccacaaaatattgaagccgaacaagctgtactgggcgcgatatttcttgagccgaatgcgctgattaccgcttctgaaattttaatgccggatgatttttatcgtactggtcaccaaatcatttttgaaacgatgcttgatttgaatgaccacgggaaagctgtcgatgtattaacggtttatgaggcgcttgctgccaaaggtaatttggaagatgcgggtggtttgccatatttgacggaattatccggggctgtgccaactgctgctaacttagaatactatgcgcatattatcgaggataaggcgcttctgagacgtttaattagaacggctacccaaattgcgacagatggttattcgcgcgaggacgagctcgacatgcttatggacgaggcggaaaagagtatcttggaagtttcgcaacgcaaaaatgttggggcgttcaagaatattaaagatgtccttgttaaaacttatgacgatattgaaattttgcataatcgcaaaggtgatattactgggattccaactggatttaacgaacttgataaaatgacagctggatttcagcggaatgatttaattattgttgctgcgcgtccttctgttggtaaaacagccttcgctttaaatattgcgcaaaatgttgcgacgaaaactgacgagaatgtggccatttttagtttggaaatgggtgcggaacagcttgttatgcgtatgctttgtgcagaaggtaatattaatgcgcagaatttacggacgggtgctttaacgagcgatgattggcaaaagctgacaatcgcgatgggtacactttctaattctgggatttatattgatgatacgccgggtgttcgtgtgaatgagattcgttccaaatgtcgtcgtttaaaacaagaaactggtcttggcatgatcgtgatcgattacttgcaacttattgcggggagcggtcgtggtggcgaaaatagacaacaagaggtttctgaaatttctcggtcgttaaaagctttggcgcgggaacttgaagtaccggttattgccctttcacagttatctcgtagtgtggagcaacgccaagataaacgcccaatgatgtcagatattcgtgaatcgggttcgattgagcaagatgcggatatcgtcgcctttttataccgggaagattactatgaccgagaaggtgagaatgacggcacgattgagattattattgcgaaacaacgtaatggtccagttggtgacgtgaaactagcctttgtaaaagaatacaataagtttgtgaatttagaagtgcgttacgacgacgcaatggcttaa

SEQ ID NO: 24683 - DNA, 1497 bp, Listeria monocytogenes
atgagtaacgagaatcatgaagaactaaatgaccaactcatcgtccgtcgtgaaaaagtggacacattgcgcgaagaaggcatagatccttttggcgaaaaattcatccgttccatcagcccggaagaaatcgaaacaaaattcgctgataaatcaaaagaagaacttgaagaagctgctattgaagtttctgtagcaggtcgtattatgacaaagcgtgtaaagggtaaggtaggtttcacacatattcaagaccgtttccatcaattacaaatctatatccgtaaagatgcgattggcgaagatgcttacgcagtcttcaaattagcagatctaggtgacattattggtataaaaggaactattttccgtactaatacaggtgaactttctgttaaagcaacggaattcactttgctttccaaatcgttacgtccacttcctgataaatatcatggtttaaaagacgtagaacaacgctatcgtcaacgctatttagacttaatcacaaacgaagaaagtcaaaatcgctttgtgatgcgcagtaaaatcttgaaatacactcgtgattatatggataaccaaggattcttagaagtagaaactccggtgcttcatacaattgctggtggtgctgctgcaaaaccatttatcacgcaccataatgcgcttgatatggaattatacttgcgaatcgctttagaactacacttaaaacgtctaatcgttggtgggatggataaagtgtacgaaattggccgtgttttccgtaatgaaggaacatccacgcgtcataacccagaatttacaatgctagaatcctatgcagcatacgaagattatgaagatgttatggatctggtagaaggtttagtatccacggtatgtaaacaagtaaatggaacaacagaaataacatacggtgaatacaaagtagatttaactcctaactggcgccgtatccacatggcagatgctgtaaaagaatacgtaggagtggatttttggaacgtaacttccgatgaagaagcgcgtgaactagcaaaaaaacatgatgtgccagtaacggaacacatgacatacgggcacattcttaatgagtttttcgaaacatacgtagaagaaaagctcattcaaccaacctttgtttacgggcatccggtggaaatttccccattagcgaagaaaaacaaagaagatgaacgttttactgaccgttttgaattatttatcgttggtcgtgaacatgcaaatgcattctcagaattaaacgatccaattgatcaaagagaacgctttgaagcgcaaatgaaagaacgtgagcaaggtaatgatgaagcacacggaatggatgcagatttccttgaagctttagaatacggtctaccgccaactggtggacttggaataggtattgatcgtctagtaatgctattaacagatgccccgtctattcgtgatatcctattattcccaactatgaaacaccgcgactaa

SEQ ID NO: 24684 - DNA, 1890 bp, Listeria monocytogenes
atgcaaacctatgatgcaggaacttttgacgtcatcgttgttggtgcaggccatgcgggagtagaagcaggccttgcgagtggtcgaatgggtgccaaaacgctgatgttaacgataaatttagatatggtcgcttttatgccatgtaatccttctgttggaggtccagcaaaaggcgtagttgtgcgcgaaattgatgctctcggcggcgaaatgggtcgtaatacagacaaaacatacatccaaatgcggatgctaaatacaggtaaaggcccggctgttcgcgcattacgtgcccaagcagacaaatgggattaccaacacgaaatgaaacacacaattgaaaaagaagaaaatatcactttgcgccaaggacttgttgaccgtttagtgattgaagatggcgtgtgtaaaggcgttattacaaacagtggcgcaatttactacgcgaaaacagttgttattactaccggaactttctcacgtggcgaaattattgtcggtgaactgcgctattcaagcggtccaaataaccaacaaccttctgtaaaactttcagagcacttggaagaattaggttttgaactgcgccgttttaaaacaggaacaccaccgcgtgtaaaatcaagtacgattgactactcaaaaacagaagaacaaccaggtgacgatcatccgcgcgcatttagctttgatacggtggaaatgttgcttgaccaactaccgtgttggttaacttatacaaacgaaacaacccacgaaataatccaagcgaacttacaccgttcaccaatgtttacagcaacgaaaaaaggcactggggctagatattgcccatccattgaagataaaattgttcgtttcagcgacaaaccaagacaccaaatcttccttgaaccagaaggcaaaaataccgaagaagtatatgtccaaggtctttccaccagtttgccagaagaagtgcaacgtgaaatgttaagaactattcctggacttgaaaatgtagaaatgatgcgtgttggctatgctatcgaatatgatgcagtaatgccagatcaactgtggccatcacttgaaactaaattagtcgaaggacttttcacagccggccaaattaatggtacaagtggctatgaagaagcagcagggcaaggcttaatggcaggaatcaatgctgctcgtaaagtctttgaaaaagaaccagttatccttggtcgcgaccaagcttatatcggcgttttaattgacgatttagtaacaaaaggaacggaagaaccatatcgtttacttacatctcgtgccgaataccgtttgctattacgccatgataatgcagatttacgtttaacagaaatcggtcatgaaatcggcttaattagcgacgaacgttatgaacgctttttagcaaaacaaagtgccatcgaagcagaaaaagaaagactacaaaaaacacgcattaaaccaactgccgaagttcaagcgatgctaaaagaaatcggctcaggtgaactaaaagacggaattctagcagcagatttacttcgccgtcccgaaataacttacgacaaaatcgcccaaattgtttcacgtgaaacatttgtgaccgatgaaatcgctgaacaagtagaaattcaaattaaatacgaaggctacattcaaaaatccaaccttcaagtagaaaaaatgaagcgcatggaagacaagaaaatcccagaaaatatcgattatgatgcaatcagcggcctagcaacagaagccctagaaaaattaaagaaaatcgaacccctttccatcgcccaagctagccgtatcagcggagtaaacccagccgatatatctattttgctagtttatattgagcaaggaaagatagcgaaaataagtaaataa

SEQ ID NO: 24685 - DNA, 2352 bp, Listeria monocytogenes
gtgattcattcaaaatacttatggaatatcgaggaagcggcggaagataaagcaagtcaattagcagaacagctaaaaatctcgcttccacttgcaaaactactttggaaaagaaaaattacaacgcaaggacaattcgataaatttttccacccagaaaaatatgaaagctatgacccgtttttattcgcagagatggatcttgcggttgctagaattaagcaagcgatagaacgaaatgagcagattttagtttatggagattatgatgcagatggggttactagtattgcagttttaatgaaaacattgcggcatttaggagccgatgctgatttttatattcctaatcgctttacggaaggttatggcccgaatattgccgcttttgatatggctaaaaaccaaggaacagatttaattattacggttgataatggtattgcggcgcttgaagtaatggctcatgccaaagagattggtttagatgttattgttacggatcaccatgaaccgcgtgagattatgccagaagctgtggctgttatccacccaaagcatcctaaatcagcttatccgtttgatgaactagcgggtgtgggtgttgcttacaaattatcgcacgctttacttggagaagagccaaaagaactgctcgatttagttgcagttgggactgtggcagatttagtttctttaacagatgaaaatcgcttacttgttcaactgggattgcgtcaattacgcgaatccgccaaccttggactggctgtgctagctaaaaaagctagtttgaaattagaagaggctacggaagaaacgattggctttggtttggcaccacgactgaatgcagttggtcgattaggcccagcagatccagcggctgatttacttttaacggaagatccagaagaggcacttttcttagcggaagaaatcgatgatgcgaataaggaacggaaacaaatagttgttgatacaacaaagctcgcgatggaggcaattgaggcaaaagacactttaggaaatgtgctcgttgtttacggtgaggggtggaataccggaatccttggaattgttgcttctaaattagttggaacatattctcgaccggcaattgtgttggggattgatcctgtaactggaattgctaaagggtctggtcgaagtgtggacgcgtttcatttatatcaagcgcttgataaacatcgtgatttaatgatggccttcggtgggcatccaatggctgcaggccttacattgccagccgaaaacctaactgaattagaagctaaattacaagaagaagcgagttatctttcagaagaagattttcgcccggccttgaaaatagaagaaaaaattaagcttgctgatgtttcggtggcctttattgctcaacttgaaaaattagcgccttttgggatggataatcctaaaccgatttttttgttagaaaacatgcatttaaaaggaacgaaaagaattggggcagataaaacccatttaaaaacaatgctcgccacagagaaaaatgatgccactttagactctattggatttggcgtaggagatttggtagataaaatttctccgacagcagccgtggatgtggttggagaattgtccatcaatgaatggaacaatgtgaaaaaaccgcaactacgaatgatggatattcacatttcgcactggcaactctttgatgtacgtaataaatcagagtgggctaggatactccaagaacaaacagaatcaagagttttcgtttgttttgaagaaagaacgattggtacgcttggagaacaaaactatattttggtgaatgaaaaagctgattttgtggcagatttccagacagaagaacttgttttcgcagatatgccaacgaatatcgaattagttgaaacgattgttcgcgaaacaaaaccagagcgtatttttgtccattttgatgcagcagaaggtaatcaaatcccggcaataccagaccggttagcttttgcagaattatatagtctcattaaaaaattccaaccatttccaatcgaaaagtacacaccacggctaatgcaaaaatttggttggaataaagagcaaatagatttcatgtcaaaggtgttttttgatttagaatttgctaaaatggatagtggtcagattattatcaatgaagttgttgaaaaacgtaatctggacgagtcacttgtttatcaacaaaaggtagaagaaataactacaagaaaaaaactgttgtactccaattatactgagcttcatagttggatgaaatcaatgatggaaacatcaatttacccgaatgcggaggaactagaaaatggaaattaa

SEQ ID NO: 24686 - DNA, 813 bp, Listeria monocytogenes
atgcttacaacaagaaaagcattatattatttagacaaaggaaaaacaaaagaggcgattcgcttacttgaaacttgttggaaacaagaagtgacaaccaaaaataaaagagatatctttacagcaacggtattacttagcgatgtgctctaccaaagtggcgaacattttcccgaaatctatcaacagctcatgtcgattttagaagagatgcaagatctggaagcagtcgagttcgaacgtgaaaaagctaagcaaattttcgctgagttagatgaatattttagtgaggtcgggacatttttccaaggggatagtctagcagagctttggctagagtttgattacgaaaatgactataaagatgtataccctacgccgcaaagagtggctgcaatcgaagcagaactaggctataagttacctaaatcttatatctacttaatgcgccatacccaaaatggaggtatagtatcaaccggttctgttcctacgacagagccaagttcatggtcagagaattgtgtagctattactgggattatgggaataggaaaccaagggatatctgcattgaatggtatgcacaacacaaatttttggatagaagagtggggttatcccgatgttggtttagctattgccgattgcccgtcagccggacatgatatggttttcttggattatcgaaattgcggaaaaacaggcgagcccgcagtcgttcatattgatcaagaggctgattataaaataatgaagctagctgataattttgaagcgtttattttgagtttgtacagagaggaatattaa

SEQ ID NO: 24687 - DNA, 1392 bp, Listeria monocytogenes
atgaataataactttttatggggaggtgcaacggcctcttatcaatgtgaaggtgcttgggatgtggatggcaaggcggaatcgatgtgggactactacttgcacgaagctggccttgagaatggcgatgtggcgagcgatcactaccatcgctatgaggaagacattcggatgatgaaagaaggcgggcaaaattcctatcgattttccttatcttggccgcgaattattaaaaataggcaaggtgacatcaacttaaaagggatcgaattttatcaaaacttgctagatacgtgtaaaaaatatgatattgagccgtttgtgacactttatcattgggatttgccgcaatattgggaagaaactggtggctggttggatcacgatgtttgcgccgcatttgagcattatgccaaggtttgttatgaccattttggcgataaaatcacgaattggactacgtttaacgagccaaaatggtttgttgctaacggatataaaatcggcaactacccgcctggctatcaagatacgcaaaaaacgatgattgcagcttataatgtgatgtacgcgagtgctttaggcgtcaaagcttttaaagaaggtggctatccagggcaaattggtattgttcacagctacacgccggtgaacggtatcgatgaaagtatcgaaacgaaaatcgcgatgcgctacgctgataactactgcaacaactggattctcgacacagccgcacttggcgaatttccggtcgatctcattgccgaactagcaaaatcgcacgatatcagctttatgaaaacagacgaactacaaacaattaaacaaaacactgtcgacttcatcggcttaaattactattcgcgcacgctcgttaaaccatacactggcggcgaaacccagctacaatttaaccacagcggtaaaaaaggcgaaagtaaagttcttatcaaaaactggttcgaacaagtgaaagatcccgccaacgaaacgaccgaatgggacacagaaatttatccaaaaggcttacaagatggcttaatcgaggcttacgaacgctatcaattaccactttatgtgacagaaaacggcattggtgttcgcgaagatgtttcagtgccacaagtagatgatgcctaccgaatcgcctttatgaatgaccatattaacgccattttcaacgcaatcgatgctggttgtgacgttcgaggctactacgcttggtctccgttcgacctttattcttggaaaaatggtgtcgaaaaacgttacggacttgtggcagttgatttcgaaaacaaccaaatcagaaaaccaaaagcttcctactactggttcaaagaaatgattgaaagtcagggaaaactcatcaaacgaagagaattttaa

SEQ ID NO: 24688 - DNA, 1791 bp, Listeria monocytogenes
atgaagatttggaatagtattgttgggaaaatttggagtaccattattcttttactaatagggattttagttatttccggatttttagtggcaatgatttatgaaaaaaataatattacgcgaataacaaatgaattagaagacaaaacagccagtatcatcactgtaatgcaagaaaataatgaagtaatctctgctgaaaataataatgattctgcacttatactacttgatgatacgatgggcgtcattatcgaacaaaacggaaaaagcgtctatcaatcacagtcaccagatactatttctagtgcatctgccaataaattaattcaagacaagacattagataaagctttagaaaaagataacagtgtaacgatgaaatataattttaaaacagaaaaaagttccttaccggttgaaatctctgcacagaaattcaaattagcgaacggtgaaactggtgttgtttacgtctatcagtcttatcatgacatcctaaaagtgaacgaaaaaacgatgagtactttgattatttcgggaattattgcgatagtcattacgtctatcttatctttcgtcttttcttctcgcatggctttcccgcttcgagaaatgaaaaaaattgcgattgctgtttctaaagggaactttgataatcgtgtaccaacttatacgcatgatgaaattggtgaacttggggtagcttttaacgatatggcaaagcaattgaagtataatgttagtgcccttaggcaagaaaaggaacagctatccaatattttagttgggatggctgatggtgttattaaatttagtgtggataaaacgattattcttagtaatccgccagcagaagaatttttacataattggttcttctcacctgaaaataccgaaaaagtgctcattccagtggctttaaatgaattattgaatgatacgttagaaaagaaagaatctcaagttggcgaaatcacgtttgctgatcatacgtatgttgccattttaacgttactctatacaggagaacatgtgcgtagtatcgttgcggttattcgcgatatgacagaagagaaacaacttgaaaaaatgaaaagcgattttgttaataacgtctcgcatgaactaagaaccccgatttcgatgctacaaggttatagtgaagcgattattgatggggttgctcagtcggatgaagaagtgcgggagtttgcgcaaattatttatgatgaatcccttcgtattggacgcttggtgaacgatatgctggatcttgcgagaatggaagctggttttaatcaaatggataatcaaaaattaccgctcgcgccgttactgcgaaaagtgatttctaattttgacgttcttgcgaaagagaactttgtggaactcggtttagaacttgaaacacccgatttagagtattcctatgacccggaccggatggagcaagtattaattaatttaattatgaacgctattcgtcatactggaaaagaaggctatgatggaaaagtaattttaaaacaaaccatcgatgtagctaggagcaatcttgtaatcacagtatctgacaatggtagcgggattgcggaagaagatatcccctacctatttgagcgtttttataaagtggacaaagcaagaaaacgtggaaaagcggttggaactggaattggccttgcgatagttaaaaatattgtggaagcacacaatggaaaaatatcagttgaaagcgaattaggtaaaggatctgattttattatcactttgcctctctataaatag

SEQ ID NO: 24689 - DNA, 201 bp, Listeria monocytogenes
atggaacaaggtacagtaaaatggtttaacgcagaaaaaggatttggttttatcgaacgcgaaaacggtgacgatgtattcgtacatttcagcgctatccaaggcgacggattcaaatctttagacgaaggtcaagcagtaactttcgacgttgaagaaggccaacgcggacctcaagcagctaacgttcaaaaagcgtaa

SEQ ID NO: 24690 - DNA, 2871 bp, Listeria monocytogenes
ttggataaagagaaaatagtaattcagggtgcaagagcccataacttaaaaaacattgatgtagagattcctagagacaaattagtagttatgactgggctttcaggttcaggtaaatcttcgcttgcttttgatacgatttatgcagaaggacaaagacgttatgtagagtctttgtccgcatatgcacgccaatttttagggcaaatggataaaccagatgtggatttaattgaaggattaagccctgccatttcgattgatcaaaaaacaacaagccgtaatccacgttccactgttgggacagttacagaaatccatgactatttgcgcttactttatgctcgtgttgggcatccggtttgtccaaatcacggtattgaaatcacttctcaaacaatcgaacaaatggtagatcgtgttctagaatacccagaaaaaacacgtattcaaataatggctccaatcgtttctggtaaaaaagggacacataagaaaactattgaggaaatcaaaaaagaaggatatgttcgaattcgtgttgatggagaaatttatgatatcaatgacgaaattgaaattgagaaaaacaaaaagcattctattgaaatcattattgatcgcattgtgattaaagagggcatcaatactcgtctgtatgattccattgaagctgctcttcgtttagctgatggttatgcggttgttgatataatgggggataaagaattattatttagtgaacactatgcgtgcccttattgtggtttttccgttggtgaattagaaccaagaatgttctctttcaacagcccatttggcgcttgccccacatgtgatggacttgggactaaacttgaagtcgatgtcgacacggttattcctgatagaagtatgtctctaaatgaaggtgctattattccttggcgcccaattagttcacagtactacccgcaaatgctagcttctgcctgtaaagaatttggaatagatatggatacacctcttgagaagctatccaaagaagaattagatattattttaaatggatcaaaagataaagaattctacttcgaatacaaaaatgatttcggtatgacacgcgaaacgtggattccgtttgaagggatacttccaaatatcgaacgtcgctatcgtgaaacaaattccgatttcacacgcgatcaaatggcgcaatatatgactgatttaccatgtccatcttgtaaaggctatcgtctaaaagaagaaacactttccgttaaagtaaacgaccatcatattgggcaaatcagtgagttttctattaatgaagcacttgctttcttcgatggcttagaactatctgaaaaagaaacacaaattgcagcgccaattttcaaagaagttcgtgctagactaggcttcttaaaaaatgttgggctcgactacctaacaatgagccgtgcagctgggacgctttctggtggcgaagcgcaacgaattcgacttgctacacaaatcggttccagacttactggtgtactttatattttagatgaaccttccatcggtcttcatcaacgagataatgatcgtttaatcagcacactccaaagtatgcgtgacattggaaacacgcttattgtcgttgagcatgacgaagatacgatgatggccgcagattatcttattgatattggtccaggtgcaggagaacacggcggacgaattgttgcagccggaacaccagaagaagttgccaataataaaaattccatcactggtgactatctttcaggtaaaaaatttattccagtccctgctaaacgtagaaaaggtaacggactagaattagaaattattggtgctaaagcaaataatctcaaaaacgtaaatgcaaaaattccactagctactttttcctgtgtaactggagtttcaggttcaggtaaaagttcgttagtgaatgaagtactgcgaaaagcgttagcgagaaaactaaatagaaaccacgcaaaaccaggtgaacacaaagaaataaaaggcatcgaaaacctagaaaaaattatcaatattgaccaatcaccaatcggaagaacaccgagatcgaatccagctacttatacaggagctttcgatgatattcgtgaccttttcgcaagtactaatgaagccaaagttcgtggttataaaaaaggtcgctttagttttaacgtaaaaggtggccgttgcgaggcgtgtaaaggcgacggaatcatcaaaattgaaatgcatttcttgcctgatgtatatgtaccctgtgaagtttgtcatggaaaacgatacaatggtgagacgttagatattcgttataaaggcaaaaatattgctgaagtattagaaatgactgtagaggaaggactagaatatttcaccaaccaaccaagaattgcgcgtaaacttcaaacaattgtagatgttggtcttggctatattcgacttggacaacctgcaactacgctttcaggtggtgaagcgcagcgcgtcaaactagcttcggaacttcataaacgtagtaacggaaaatctttctatattctggatgaaccaactaccggactccacgcagatgatattggtcgtttactcaaagtattacaaagacttgtagaagagaatggcgatacagtacttgttattgagcataatcttgacgttatcaaacaagctgattacttgattgatttaggtccagaaggtggcgatggtggcggtcaaattattgcaaccggcacacctgaaaaaatcgctcgctcaaaaaaatcttatacaggtaaatacttgaaaccaattttagaacgcgataaagaacgcacggaagaacgaattgcaacagctaagaaaaaataa

SEQ ID NO: 24691 - DNA, 1854 bp, Listeria monocytogenes
atggattatcaaaaactagctaaagagattctggctaatgttggcggagaagaaaatgtgcgctcagtggttcactgtgctacacgacttcgcttcaaattagtaaacaaagaaaaagcagacaaaaaacaaatcgaaagcatatcgggagttattagtgttgtagaaaatgctggacaattacaagtaatcattggcaataccgttggagatgtatataaagcactgggttcttttactaaactaacagatgatggcgactcggagatagcaaaagggacaaaagattcagatgggaactttttgagtaaggcaattgatgttatttcaggtatattcacacctattttgggagcgcttgcaggtggtggtatgctcaaaggattgctgatgattcttactacttttggatggttgaccgaatcaagtggtacgtatcagattttatacgcggctgctgatagtgtgttctatttcttaccgcttattcttgcttatactgctgcgagaaaatttggtgctaatcctccggtcgcgattgcagcagcaggtgcactagtatatcctacaatgattaatctatttaatgagggagctcatattactttcttacaaataccagtcgtattaatgagttattctttctccgttattccaattatcttggcagtttggtttttatctattttagaaagatttcttaatagtaaaattcatgaggcagcgaagacctttttaacgccgatgatttgcctgatgcttatcgtaccgcttacattcttagcgtttggacctctgggtacgtttattagtcaaggtttagctagcgggtatacatttatttataacttgagcccaattgtagcgggtgcttttatgggtgcgttctggcaagtattagttatttttgggattcattggggctttgtgccaatcatgattaacaacttatcacgctatgggcgtgacaccatgattgcgatggttggaccatcaaactttgctcaagcaggtgcatcacttggagtatttttaaaaacaaaaaaaccggaagtcaaagctattgctggttctgccgcacttacaggcttttttggaattacagaaccgtctatttacggggttactttaaaatacaaaaaaccatttgttatcgcgagtatcgccggtgcaattggtggtgcgatagttggtgcagctgggtcttctggtgcagcgaacgctatcccgggaattttaacattaccaatttttatcggaaaaggatttgttggctttattctcggaattgctgtagcctatattttatcagcaatcggcacatacttcttcggttataaagacgagatggcagacggaattgctccaactacaaaagaagcgaaagaaactggcgtcgaagcagaagttattgtaagccctattcgcggcaatattgttccgttaaatgaggtaaaagatgaagctttttcagcagggttacttggaaaaggtgtagcaatcgttccgcaagaaggtaaattaatctcaccagtaaacggcactatcgaaacagcttttccaacaggacatgcgattggaattcgttctgataaaggggtagaaattttgcttcacgttggctttgatactgttcaattaaatgggaaatattttaaattacttgtggctcaaggtgatagagttttggtagggcaagcattacttgaatttgacctagaagcaattaaggcagatggttatgatattacgactccgatagttgtaactaatacggatgcttacttagatgtactcatctcggatcaaaaaactgttaattatgaagatacgcttttaacaccagtactttaa

SEQ ID NO: 24692 - DNA, 642 bp, Listeria monocytogenes
atgaaagctctaaaaattgcgctaacgaaaggacgcctcgaaaaagacgcagtagcccttttggaaaaagctgggattgactgttcttctatgacagataaaaaacgcaaactaatctttcatagtagcactcaaccgatttcttttattttagtaaaagcagttgatgtcatgacttatgtgaaacatggggttgcggatattggaatcgttggtaaagatgttttaatggaagcatccaaatctcattacgaaatgctcgaccttgaaatcggtaaatgccagttttgtctcgcttctacacctgattttgacccgagcagttatcgacgaaaaatcattgctaccaagtatccaacagtcgcctccaaatttttccgtgaaaaaggcgaagatgtagaaattatcaaaatcgaaggatccgtcgaaattgcaccagtgcttgatcttgctgatgccatcatagatatcgtcgaaactggctccactttaaaagaaaatggcttaattatttatgaaaaaatgtatccaatctccgcccgtctaattgttaacaaagcatccttaaaacaaaataaaacgcaaattttccatttaatcgaccaattagaacaagcgataaaggaggagctcgctgaatga

SEQ ID NO: 24693 - DNA, 657 bp, Listeria monocytogenes
atgaaatttttcttggacacagcaagcgtatcggaaataaaacgaattagcgaacttggtttagtggacggtgtaacaaccaacccaaccatcatcgcaaaagaaggtcgaccatttgaagaagtaatcaaagaaatttgttctatcgtagacggcccggttagcgcagaagttatcggcctcgaagcagacaaaatggtagaagaagctcgaattctagcaaaatgggcgccaaatgtagtagtaaaaattcctatgacggaagaaggtttaaaagcagtccataccctcacagctgaaggcattaaaacaaatgttacgcttattttcactgtttcccaaggattaatggctgcaaaagctggcgcgacttatattagcccgttcttaggaagactagatgatattggtacagacggaatgattttaattaaaaacttgaaaaaagtgcttgataattatggtctaaaagcagaaatcatttcagcaagcatccgtcacatcgggcacttagaagaagccgctgaagccggagcacacatcgcgactatcccaggaagccttttcccgaaactttggtctcatcctttgactgataaaggtattgaaggatttttaaaagattgggaagcgttcagtcagaaagaaggcaattaa

SEQ ID NO: 24694 - DNA, 303 bp, Listeria monocytogenes
atggcagaagaacataaccataatcatgaagaagaaaatattatttggattacaaacgaagaaggaaaagaagaagcttacgaaattctttttgactttgattccgaagactttgacaaatcttacgtattatatttcccagcaggtaaaggggaagacgaagaaatcgaaatccttgcatctagctatatccaagatgaagaaggtaaacaaggtcaacttaaacctgttgaaacagatgaagaatgggatatgattgaagaaatccttgctacattcctagctgacgaagacgaagaataa

SEQ ID NO: 24695 - DNA, 771 bp, Listeria monocytogenes
atgaaaaaaatagtacttattatatgttgtggattattactacttctcggagcttgcgaggatacgcctgagaaagtccaaacaacgactatacatatttcagcagcagcaagtttaaaagattcgatagacgacgtaaaaccactttttgaaaaagccaatccaacgattaaattatcttttgattttggtggttctggacaaattcgcgaacgtgtcgaaagcggggcaccaattgacggcgtccttttagcgagtaaaaaagatgcagatacactgattaagcaaaatttagcagaaaaaacgaaagaatttgcgggaaatgaactcgttttaattgaacctaaaaacgtggatcagaagacagaggcgaacttagaacaattactaaatgacgcatccaaaatcgccatcggggacccagaatcagtaccagcaggtgcttatgccaaacaaacgctcgaaaacctaaatctatataatgcagaaaaagcaaagcttgttcttgcaaccgatgttcgtcaagtcttatcctacgtggaagccggaaatgcagatgcaggcttcgtttaccagacagatgctctattaagcaagaaagtacaagtgaaggcaaaaatcgatgagaaactccatgatccaatcgcttactacagcgcacaagtcagtgattcagataaaaaagaagaaaccgctacatttcttgattttatgaataaatcagaagcgcaaaaaatactggaaaaatacggattcaaagcagcaaactaa

SEQ ID NO: 24696 - DNA, 1854 bp, Listeria monocytogenes
gtgaatttaagaaaagatttaagcgaaaaagtattaattgctgacggtgcgatgggcactttgctttattcttatggagtggatcgttcgtttgaggagctaaatttgtctcatccggaagatattgttgcgattcataaagcgtacattggtgctggggcggatattatccaaacgaatacgtatggcgcaaattatattaaattagcgcgatatggtttagaggatgaagtgaagcgtattaatcaagcagctattcgattggcaaaggaagcggcaagagggactggaacgtatatttttgggacgattggcggaataaatggcgctgtagatgcaagacttccggcggctccactcgaagaaatcaagcgaagttttagggagcagctatactgttttttgttagatggcgtggatgcgattttgctagaaacatattatgatttagatgagcttaagacagtgttgaaaattcttcgcgagactactgatttaccagtagttgcgaatgtttctatgcatgaaccgggtattttgcaaaacgggaaaaaattgccggatgcgctggaagagcttattgcgctgggggcggatgtagttggtattaattgccgtcttggtccgtatcacatggcgcgtgctcttgaaacagtgccgctgtatgataatgcttatttggcagtttatcccaatgctagtttgccagagatgcaagaaggaaaagtgatttatcagtctgatacggattattttgaacattatggggaggtttttcggcaagaaggcgctcggattattggtggttgttgtggcacgacgccagatcatatccgcgctttgcgaaaaggtcttgaaacaacaaaacccattttggaaaaagaagttcggccgattttggaacttgttccagaagaagtggaggatgtggattctggtgaacgtttgcttgataaagtgaaggaacgtttaacgattttggttgaactagatccgccgcggacttttgatacgacgaaattttttgaaggagcccaggcacttgacgaggcaggcgttgatgcgattacgatttcggataattcgcttgccacgccgcggattagtaatatggcgctagcttcgattttgaagcatgaatatggtattaaaccactcattcatttgacgacgcgggatcataatttggttgggatgcattcgcatgtgatgggatttcataaattggggctgcatgatgtgcttgcgattacaggtgatccaactaaagtaggtgatttccctggagcatcttcggtgtttgatttaaggtctgtggaattagttcagctaattaaaaagttcaatgatgggatttcttatactgggaaatcactgaaagaaaaggcacgattccatgttggagcggcatttaatccgaacgtgctgaacttagagaaagcggttaggttaattgagcgaaaagttgaatatggtgccgattatattattacacagccaatttatgatgtgaataaagctatcttattaaaagaagccttgcaaaaagcaaatattgatgtgccactttttattggggttatgccattattgtctagtcggaatgcggaatttctgcataatgaggttcccgggattcgtttgacagatgatgtacgggagcgaatgagagaggcggaagagcacggtcatgcaaatgaagaaggcatggcaattgctcgtgaattagtggatgcgatttgtgagcatttccaagggatttatattattacgccatttttacgatatgatttatcgatagaattagcgaaatatgcccaaaataaacagcaagtccaaattgggtctaaataa

SEQ ID NO: 24697 - DNA, 837 bp, Listeria monocytogenes
atgaatatagaaaacaccttactaaaacaagatgtgtggcgttttattgataatacaacgattaatccagctttcgatgccattcaatcgtttgcgacagatgataccctatgtcgttcggtcggagcaagaatggcgccgtctaccgtgcggggctgggtgcatgaaaaaacagtttcacttggaattcaagattctaagttgcctgatatagataaaggaattgcatttttgcaaaaacaaggctaccgcgtcgtagttagaaattctggtggtctagctgttgtccttgactcaggtgtgctcaatttgtcaatggttcttccagatgcagaacgcggaattgcgattgaacgtggttatgaaactatgtttacactaatcaaagacatgttcgtagattgtaatgaggtaattgaagcgaaagaaatagaagactcttattgtcctggtagttatgaccttagtattcaagggaaaaagtttgccggtatttctcagcgtagaatggcaaaaggggtagcggtccaaatttatttagctattgacggggatcaaactactcgctcagaactgattcgcgatttctatacgattagcggaaaagcaaagcaaacaaaatatacttttccagatgtgaatccgaatgttatgggttcgctttcggacttaatgaaaaatgatataagtttaaatgggacgttggtacgtcttttcaatagtttgcgacattacgcaggtgatcttgtatctggtacgcttacgtctgaagagttagatcttttcccagcctattacgaacgtttaattgcccgaaatgataaagtgcttacttga

SEQ ID NO: 24698 - DNA, 234 bp, Listeria monocytogenes
atggcagaagtattagaaaaagttacaaaaatcatcgtagaccgtctaggtgtcgaggaatccaaagtaactttagaagcttccttcaaagaagatctaggtgcagattccctagatgttgttgaattagtaatggaacttgaagacgagttcggagttgaaatctctgatggcgacgctgaaaacattaacacagttggtgatgcagtgaagtacatagaggcgaacgcataa

SEQ ID NO: 24699 - DNA, 1101 bp, Listeria monocytogenes
ttgacagaagaagttagatgtattggttgtggcgcggttattcaaacagaagaccctgataaaatcggctatgcaccaaaatcatccctgaacaatgagcaagttatttgtaaaagatgctttcgtctaaagcattacaatgaaattcaagatgttgcgctaacagatgatgattttctacgcattttaaatcaaattagttcgaaacaagccttaattgtctatgtagtagatatttttgattttgatggtagttggttgcctggacttcctcgttttgcaggaagcaatccggtattacttgtcggtaacaaagaagatgtgttaccaaaatcattaaaacgcgataagttgacacgttggatgagaacacgtgccaaagagcaaggcttagcggcgacagatgtcgtactagtcagcgctgaaaaaggccacggttttgatacccttttagagaaaattgatgaattacgcaatgggcaagatgtgtatgttgtcggttgtacaaatgttggtaaatcaacgcttatcaatcggattattaaacaagcatccggagaaaacaatgtgattacgacatcacaatttccgggaacaacgcttgataaaattgaaatcccattagcagatggcaatgtgcttgttgacacacctggaattatcaatcaccatcaaatggcacacttcattgatacaacaacattaaaagctattacacctaaaaaagaagtcaaaccagcagtcttccaattaaatgaagaacaaaccctatttttaggcgcgcttgctcgcttagattacgtatcaggtggtcgtaaatcgctagttgtttatgtatccaacaatttaccgattcaccggacgaaattagaaaaagcagaggcattatatgagaaacaggctggactagtacttcaaccgccaactgaagaagatatgaaaactctacctaaactcgtgccatattcctttactgtaaaagaaaaagcagatattgtcttttctggacttggctgggtgacaatcccagaaggtggcgcgaaagtaactgcctgggttccagaaggcgtgagcgcaactatccggacatcactcgtttaa

SEQ ID NO: 24700 - DNA, 150 bp, Listeria monocytogenes
atgcgcgttaatattactttagaatgcactgaatgcggtgatcgtaattacatcactactaaaaataagcgtgaaaatccggaacgtattgaattaaaaaaatattgtccaagattacgccgtgtaactttacaccgcgaaactaagtaa

SEQ ID NO: 24701 - DNA, 714 bp, Listeria monocytogenes
ttgaataagaaaaataagttttttgacatttatttagaattagagcaagacattacatctggcgtttatccagcaggcacactacttccaagtgaaaatgtcctggctaagcgtttttcggtgtctcgtgaaaccattagaaaagcacttgtattattgcttgaaaacggctgtattcaaaagctccaaggaaaaggctccattgttattgaccgggaacgttattcttttccagtctctggattaactagctttaaagaattacaaaaatccgaacagatgaatgccactacagaagtcatccggaatgaagagacaactttaccagatcgaattgctgattttgctggtcttccgcacggctcaaactgcttagctatcctcagagtgcgctatttagaaggagaggcaactattttggattacgattatttattagacaaaactgaaccaattgcgaatgagattttagaagactccttgtatcaatacttagaaaatgaaaaaggttatgaaatcagttatgctcaaaaagaaataaccgtggagccactgaatgccgaagataaaaaatacttagccttacatggtgatacgcatgtggttgtcgtaaaaagtactgtgtttttaaaagatacaacactttttcagtatactgaatcgcgtcaccggttggataaattccgttttattgattttgctagaagacgctaa

SEQ ID NO: 24702 - DNA, 480 bp, Listeria monocytogenes
atgaatatccaaattgtaacggtcgggaaattaaaagaaaaatatttagtgcaaggaatcgccgaatatttaaaacggttgagcgcctacgcgaaagtgacgattgttgaagttccggatgagaaagctccggaagtgcttagtgatgcggaaatgaaacaagtgaaggataaagagggtgcgcggattttagcaaagattccggacgatgcctatgtgattgcgctggcgattgatgggaaaatgaagtcgagtgaagaatttgcggcggatttggataagctggcgacttatggtaagagtaaggtgacgtttgtgattggtggatcgctgggacttagtgaggcggtgctgaagcggagtaatgagcggatttcgtttggacggttgacgttgccgcaccagttgatgaggttggtgctggtggagcaggtttatcgggcgtttcggattgttcggggggagccttatcataaatag

SEQ ID NO: 24703 - DNA, 576 bp, Listeria monocytogenes
atgagcgggaagcctgtaatacatgaatttatagtcgtagaaggacgggacgatacaacggcaattaatcgttcagttattgccgataccattgagactaatggatctgccctttcacaagaaacaatagaaaaaattagacatgcgcaagaacttcgcggcgttattatttttacagatccagattttccaggtgaaaaaatccgaaaacaaattgactcagcggtaccaggctgtaaacacgcttttatcaatcgccaagatgctttaccaaaagctggtcgcggccttggagtggaacatgccagtagcgctaatattcgtgaagcattagaaaacttccatacgagtggggcgcccactgaaaaacaatttatttccaaagatattcttgttcatctcggtcttcttggaggagtgggagcgaaagaacgccgagaaaaaatcggaaatatactaaaaattggttatacaaacggaaaacaactacaaaccagactagaatcatttgcaatcagtgaagaacagttagtagccgcgtgccaaaagattatgcaggaggaagaaaatgagtaa

SEQ ID NO: 24704 - DNA, 1113 bp, Listeria monocytogenes
atgaaaactaaattaattttattatacggtggaaaatctgccgaacatgaagtttcattacaaacagcattttcagttatcaatgctttggatttagaaaaattcgaagctgcgccaatatatattacgaatgaaggtgagtggattcaaggaccacttctttctgggaagttagattttgtcgaacaattacgtttttcggctacagatacaataaaacttgctacaactgaatcagaaaaatcagaaggggaagcaattagcccggccgttttagaagcagacggacaagagacagtcgtattcccacttttacatggtccaaacggagaagatggcactgttcaaggattgttcgaagtattaaacattccatatgttggcaacggggtcttggcatcttctgctgcaatggacaaaatcgtgatgaagaaaatttttgcagatgctggaatcccgcaagttccagcagttgctgttcgtttaattgattggaaaaattatcaagaggaaatggttgctgagatggaagaagtccttacatatcctgtcttcgtaaaaccagcaaaccttggttcgagtgttggtattagtaaggcaacaaacaaaaaagaattagtggacgcaatgacagaagcgtttttatatgaccgtcgtgttgttgttgaacaaggtgtcgttgctcgtgaaatcgaaatgggtgtacttggaaatgatacgccagtttgctctgtacctggcgaaattttgccagaaggtgcagttgccacattctacgattacaaagctaaatatcaagataacaatactgcgttaattattccgactgaagtagatccagaaatcttggaacaaatgaaagaatatgcgatccaagcgtttttaggtctggacgcaagcggactagtgcgagcggactttttcttaacggaagataatcagttattcttaaatgaagtgaatacaatgccaggtttcacaccgtacagcatgtatcctcttctttggcaggaaacgggcttaccgtacggagcgttaattgaacgattagtcgatttagcgaaagaacgccacgcagccaaaaatgcacttaaatataaattagaagactaa

SEQ ID NO: 24705 - DNA, 2484 bp, Listeria monocytogenes
atggcagataaaccgcagacaagatctcagtatcgcaataaacaaagtggtggttctaaaaagaaatcccaaaaacgaggaaaacgagtagcagcgaatattttcaaaactattttctttgtgggattatttttagctttctttggtattgcggctggtgcaactgtcttttacgattacgcaaaagacgcaccaaaactgaccgactccaagctacgagatccgctttcatctaagttacttgataaagatggaaaagttttcgcagaagttggaaccgaacggcgggaatatattgaatacaaagatatacctgaaacactaaaaaatgcaattctaacaacggaagatgcgcgtttttatgaacatgatggcattgacccaattcgacttggtggagcagtaattgccaatttgacagacggttttggtgcagaaggtgcaagtaccctttcgcaacaaatcatcaaaatgtcctaccttgattacacaaacaaaacacttgcaagaaaagctcaagaagcatggttagctcttcagttagaagaaaaatatagcaagaatgacatcttagaaatttatgttaataaagtctatatgtcagaccgtgttcacggcatgcaaacagcttccgaacattatttcggtaaaaatgtgaaagaccttacgttagctcaaacagccttacttgcaggtatgccacaaagtccgaataactacaatccttatgaacacccagaagcagcaaaaaaacgtcgtgatcaagttttaacaaacatgtatacacacgataaaattacaaaagaagaaatgaccgaagctcaaaaaacacctatcactacaggacttcgctcgaaaaaagatcgtgaagataaaatttacaaatacgattcttacgtaacacaagtgttaagtgaaatcccaaaagaatatgatgtttatcgtgatggcttaaccattcatacagctcttgaccgtgatgcccaagagtacacggagaaaatgctcaatacgaacgaaattgttaacttcactgatgatgaaatgcaagcaggtattgttctgcaagatacaaaaactggacgtgttcaagcaatcggaggcggacgtaaacaaaaagtaactcggggttataactatgcaacccaagtaaaacgttctgttgggtctactatgaaaccaattgccgattatggtcctgcttttgaatatttggattggtcgactgcccatattttagaggatgaaccatatacgtattctggtggaacccctattaacaactgggatttcggttacaaagggccaatttcagtaagacaagcactttatcaatcgcgtaatattccagccctaaaaacacttcaagctgtcgggctagataaatccgaggaatttgttaataaactcggcatcacctatgatgaaggacaaaacgtagaatccaatgctatcggagcaaacagttccaacccaatgcaaatggctggtgcctatgctgcattcggtaacaaaggaatctacaacaagccacacactgttacaaaaatcgttttatcagatggacaaacagaaattgacacagaaccacaaagtactgttgctatgaaagaatcaactgcttatatggtttcagatgttctaaaagatgttctttctatcggaacaggtacatcagcagccgtaccaggcgtccctgctgctggtaaaacaggtacaacgaatattccacctgaattcacttcgaagtactactaccctagtggtgctgcccgtgactcatggttcgctggttatacaaccaattattctattgctgtatggaccggctatgatgacaagaaaaaatatgtatctgcaagtgaacaaaaaattgcgcagcggatgtttagtaaattgatggctcatgcatctgctggtaaaactactgcagatttcaaaatgcctagcaatgttgtttccgtcccaattctaaaaggcagcaacccaatcgcccgtgctgcacaaggcacttcaagcgataaagtaagttacgaattattcttatccggaaccgctccaacaaaaactgcttctactccagaagacgagaagaaaaaagcagaagaagctgcgaagaagaaaaaagcggaagaagataaaaagaaaacagatgaagagaagaaaaaagaagaagaagctaagaagaaagcggaagaggaagcaaagaaaaaggctgaagaagaagccaaaaatcttactgcccctgccggcttgagagcaagttataacgctggctctaagcaaattaatgtttcttggtctgcagtagaaggagcaacctatgaagtaacagtcaatggttccactactacagtatcttctacctccgtttctgtaagtggcggtaatcctggagacacagtttccattaatgtcgtcgccgttaaagatggtaagcgaagcccagcttcctctaccactgttaaaattccagatagttaa

SEQ ID NO: 24706 - DNA, 1536 bp, Listeria monocytogenes
atggtaaagcaaataatgattcaaggtaccgcttctgatgccgggaaaagtgtactggttgcaggcctatgccgcctattcaaaaataaaggcaagcgagttgttccgtttaaatcacaaaatatgtccctcaattcttttataacagcaaccggagatgaaatgggacgcgcgcaagtttttcaagcagaagcggctggcgtctttccggatgtccggatgaatcccgtgttacttaaaccgaccaatgacaggcagtcgcaagtgatttttatgggtgcaattttagataatatggatgctgtgacgtaccacgatttcaaacaaacccttatcccgaaaatccaggcagtttaccagagtttagccgatgaaaatgatattattgtactagaaggtgctggaagcccagcagaaatcaacttaaatgaccgggatatcgtgaatatgggtatggcaaaaatggtcgatgccccagttgtcttagttgctgatattgacaaaggtggcgtttttgcttcgatatacggcaccattatgctgttaaatgaagaagagcgggctcgaatcaaaggtgtgattatcaataaattccgcggcgatgtagctcttttacaacccggaattgatatgattgaggaactcacaaacgtcccggttatcggtgtgattccctatgccaatctacaactggaagaagaggacagtgtttctctaaatggaaaaaattacgcgccagatagtaatgcactgcttgatatcgcgattatttgtttaccacgtatttcgaactttacagactttcatagtttggaaatccaaccggaaataagtttgcgctacatacgaaatctagctgattttggaaaacctgatttagtcatcattccaggcagtaaaaatacgctagaagacatggcatttctcgaagaatcaggactgaaaaaagctattcaaaattttgcggaaaatgccggaaaagtaatcgggatttgtggtggctaccaaatgctcggtcaaaaaatgctcgatccggatcaagtggagagtaaacaactagaaatagccggacttggtttactagataccgagaccatttttctcgaccaaaagcgcactactcaaattacaggtgtgacgcattcaggagaagctgttgaagggtacgaaatccatatgggtgagacgaagcgcggcgagagcactagtccattttgtaaaattaaagcggtgaacggaaacgaagaaacccaccaagatggcgctatctctgccaacaaaaatatcatcggcacatatattcatggtattttcgacaatgatgttttcttgggaaatctatttgacgaactactaacgcgcaaaaaccaatccatttatccgcatgaaatcattaatctgaaagaacacaaagaacaagaatacgacaaactagcggcccttttagaagcaaatattcaaatggaccaactagaaaaaatcatgaaaggagaaaaaatatgcgtatctacacaaaaaccggcgataaaggaatga

SEQ ID NO: 24707 - DNA, 789 bp, Listeria monocytogenes
atgaatttatcattagagggaaaaacttatgttgtaatgggagtagctaataagcgtagtattgcttgggcaattgcgcgttcactaaatgaagctggagcaaaactggtatttacatatgcggacgatcgtgcgaaaaaaagcattacagagctagtaccttcattaagcgaagtaaatcaaaatccacttatcttagcttgtgatgtaacaagtgaagaagctattacagaaacttttgaaacaattaaagataaagctggcaaacttagcggcctagcacactgcattgcttttgcaaacaaagactttttaactggggactatttagaagtagatcgtaaaagcttcttacaagcacatgaaattagtgcctattcatttacagctgtagctcgtgcactaaaacacttggaaatgttaacagaagatgcaagtttactaacgctaacttaccttggtggggaacgtgtagtagaaaactataatattatgggtgtagcaaaagcttcccttgatgcaagcgttcgataccttgcaatggatctaggcgcaattggggttcgtgtgaatgctatttcagcaggaccaatcagaacagtatctgctcgtggcgttagcggtttctctgattctatttcactagtagaagaaagagctccactaaaacgtgcgacacaagcggaagaagttggcgatacagcgtattacttattcagtaatttatctcgaggcgttactggtgaagtaattcatgtagatagcggttatcatattattggattttaa

SEQ ID NO: 24708 - DNA, 1515 bp, Listeria monocytogenes
atgagcattaaggctgaagagatcagctcaatcataaaacagcagattgaaaattatcattctgaactaaaagtgagtgatgttggtacggttacctacattggtgacggtattgcgcgtgctcatggactcgataatgcaatggctggtgaattgctagagttctcaaatggtgtaatgggtatggcccaaaacttagaaacaaatgatgttggtatcattattctaggcccttacacagaaatccgcgaaggcgatgaagttcgtcgtaccggtaaaatcatggaagttcctgttggcgaagcgcttattgggcgtgtagttaactcattaggtcaaccagttgatggtttaggcccaattgaaacaactggaactcgtccgattgaagcagtagcacctggtgttatgcaacgtcaatcggtaaacgaaccattacaaacaggtattaaagcgattgatgcacttgttcctattggtcgtggtcaacgtgagttaatcattggtgaccgccaaactggtaaaacatctgtagcgattgatactattttaaaccaagctgaccaagacatgatttgtatttatgtcgctatcggtcaaaaagaatctacagtacgtaatgccgtagaaactttacgtcatcacggtgcgttagattacacaatcgtagtaactgctgctgcatcacaaccggcgccacttctttacttggctccttatgctggtgttgcaatggctgaagaattcatgtataacggcaaacacgttttagtcgtatatgatgatttatccaaacaagcagctgcttatcgtgagctgtccctattacttcgtcgtcctccaggtcgtgaagcatacccaggggatgttttctacttgcactcccgtttacttgaacgtgctgcaaaattaaatgatagcctaggtggcggatccattacggctcttccattcgtagaaacacaagccggagatatctctgcttatattcctacaaacgttatctctattacagacggacaaatcttcttgcaatctgatttattcttctcgggagtgcgtccagcgattaacgccggtctttctgtatcccgtgtaggtggatcagcgcaaattaaagcaatgaaaacagttgccggaacacttcgcctagaccttgccgcataccgtgagctagaatccttctcacaattcggttctgacctagatgcagctactcgtgcgaaactagaacgtggtaaacgtacagtagaagttctaaaacaagatttgcacaaacctttgaaagttgaaaaacaagtattgattctttatgcacttgttcataaatatctggatgatgtaccagttcatgatgtactgcgttttgagtccgaaatgaatacatggtttgatcataatcacccagagcttttggaagaaattcgtacaacgaaaaaacttcctgatgaagcgaaacttgaagcagcattaaaagaatttaaaaatacatttgttccttctgaagaaaaataa

SEQ ID NO: 24709 - DNA, 1308 bp, Listeria monocytogenes
atgtttattctcaccatggggctgaatcatcatacagcaccaatcgacatccgcgaaaaattagtttttaaagaaaccgaagaagaaatggccttagtaacattacagcaggaaaaaagcatcctcgaaaatgttattatttcgacatgcaatcggacagaaattgtggcggttgtagatcaaatacatacaggtagatactacttaaaacgttttatggctaactggtttcaaatggatatggaaaaaatcgagccttatttgtttttccatgaggaaacagaggctgtcaatcatttatataaagtaaccgcgggacttgattcgcttgtgctgggagaaacacaaatactcggacaagtaaaacatgcattcgaaatcgcgaaacaaactgagacaacaggtacacttttaaataaactgtttcgtgaagtagttactttcgcaaaaaaagtacatcaccatacaaaaattaacgaaaatgccgtttctgtcagttatgccgctgtagaggttgcaaaaaaattatacggttcattagacaataagaaaattgttctagttggtgcaggggaaatgagtgaactcgctttgcaaaatctcgctgggagtggtattgcagatataactatcatcaaccgcactaaatctaatgcagaattattagcaaatcaatttcaagcaaaagtgggcgcatatgaaaatatgaatgaacatttgatgctagcagatatcgttctcgtttccacaagtgcgacagaaccaattattaaacaagcggctatgcaagatttgatggaacaaaaagcgagttcgatgcttgtgattgatatcggtttaccgcgaaatgttgaacatgattgttcatacattcccaatttccatttatatgacattgacgatttggcaggggtcgttagtgcgaactcattagagcggcagcgaatcgttctggaacttgaaaatactattgaggtagaagttcgtaactttttcgagtgggaaaaacaactaggcgtcgtccctgttattcgtgctttgcgtgaaaaagcgttagatatgcaagaagttgctatgactagtttagaaaataaacttcctggactaacagaacgcgaatacattcaaattggaaaacatatgaaaagcattataaaccaaatgctaaaacaacctatctcagagttaaaagaaatgtctgtagaagaagatgcaactacaagtattgaacattttaaacgtatttttgggttgagtgaaacagatgttactgtaatagaaaaagaacaagccgaaacgaggagttaa

SEQ ID NO: 24710 - DNA, 1260 bp, Listeria monocytogenes
ttgtttaaatttaacgacgaaaaaggccaacttaaatgctccttttgcggaaagactcaagatcaagtacgtaaattagtggccggtccaggtgtttatatttgtgatgaatgtatcgagctttgtaatgaaattattgaagaagagctaggtatttctgaatttgttgattttggtgaagtgccaaaacctcaagaaatccgtcatatattgagtgactatgttattggtcaagagcgtgccaaaaaagcactcgctgtagcagtttacaatcactacaaacgtattaattccaatgaaactaaagaagatgaagtagaactttcaaaaagtaatatttgtttaattggtccaactggtagtggtaaaacacttcttgctcaaacattagcgcgaattcttaatgttccatttgcgattgcagatgcgacttcacttacagaagctggttatgttggggaagatgtagaaaatattcttcttaaactaattcaatcagcggattacgatgtggaaaaagccgaaaaaggtattatctacattgatgaaattgacaaagttgctcgcaaatccgaaaacccatctattactagagatgtttccggtgaaggcgtacaacaagcgctactgaaaattttggaaggtactgtcgcaagcgttcctcctcaaggtggtagaaaacatcctcatcaagaacttattcaaattgatacaggaaacattctatttatcgttggtggagcatttgacggaatagaacaaatcgttaaaaatcgaatgggtgaaaaagtcattggatttggtacagataatgcgaaactaaaagatgatgaaacttatttatcccgtgttgttccggaagatttactgaaattcggtttaattcctgaatttatcggtcgtttaccggttatagcaacgcttgaacaattagatgaagcagcgcttgtttccattttgacagaaccaaagaatgctttagtaaaacaatacaaacgtatgttagagcttgatgacgttgaacttgaattcgagccaactgctctaattgaaattgcgaaagaagcgattgaacgcaaaacaggagcgcgtggtcttcgttcgattatcgaacagattatgctggaagtaatgttcgaaatcccttctcgtgacgacattacgaagtgtattattactgaaaaagcagctcgtggtgaagaagaaccgcaactgcaattagaagacggttctattattccaattaaaacatctgcatga

SEQ ID NO: 24711 - DNA, 423 bp, Listeria monocytogenes
atgaagattacaacaaaaggtcgttatggcctaacaataacacttgaactcgcaaaaagaattggtgatggtcctatttcccttcgtagtatcgcccaagataaaaatttatcggaacattatttagagcaattaatcggaccccttcgtaatgcaggaattgttaaaagtattcgcggtgcccatggaggctatgttttaaatggtgatcctgaaaaaattactgcgggtgatatcatacgtacactagaagggcccatcgtacttgtggaaagtatggaagatgaagaagctgcccagcgagaactatggacacgaatgcgtaatgctgtccgtgacgtgttagatcaaacaacgcttgctgacttactaaaacattctactgactctgaattaacagatggatacatgttttatatttaa

SEQ ID NO: 24712 - DNA, 1635 bp, Listeria monocytogenes
atggcatattcatttaaattaccggatatcggtgaaggtatccatgaaggtgaaatcgttaaatggtttgtacaaccaggcgataaaattgaagaagatgaatccctatttgaagtacaaaacgacaaatcagtggaagaaatcacttctccagtttcaggaacaattaaagaaatcaaagttgctgaaggtacagttgctacagttggacaagtactagtaacgtttgatggcgtagaaggtcacgaagacgacgccgaagaagaaagcgcagcaccaaaagcagaatccacagaatcaactcctgcacccgcacaagctagcggaaaaggaatttttgaattcaaattaccagatattggtgaaggaattcatgaaggtgaaattgttaaatggtttattcaaccgggcgataaagtagaagaagatcagtccatttttgaagtacaaaacgacaaatctgtcgaagaaattacttctccagtagatggtactgttaaagatattttagttagcgaaggaacagtagcaacagttggtcaagtattagtaacattcgaaggtgattttgaaggagaagcaagccatgaatctactccagaatctccagcagaagacgctgcacttgctaacaacgatgcaacttccgcaccagcaacaggtggaaacggaactccatcatctaaaaaagatcctaatggccttgtaattgcaatgccttctgtacgtaaatatgcgcgtgaaaaaggcgttaatatcgctgaagtagcaggctctggaaaaaataaccgcgtagttaaagctgatattgatgctttcctaaacggcgaacaaccagctgcagcaacaactactgctcaaacagaagaaaaagcagctgcaccaaaagcagaaaaagcagcaggaaaacaaccagttgcaagctccgatgcttacccagaaacacgcgaaaaattaacaccaactcgtcgtgcgattgcaaaagcaatggtaaactcaaaacatacagctccacacgttactttaatggacgaaatcgaagtaactgcacttatggctcaccgcaaacgtttcaaagaagtggctgccgaaaaaggtatcaaacttactttcttaccttacatggtgaaagctcttgttgcaacgcttcgtgacttcccagtgcttaacacaactttagatgatgcgacagaagaacttgtttacaaacattacttcaacgttggtatcgcagcagatacagaccacggtttatatgtaccagtaattaaaaatgctgacaaaaaatccgtattccaaatttctgatgaaatcaacgaactagctggaaaagcacgtgatggtaaattaactgctgacgaaatgcgccacggttccgcaactatttctaatatcggttctgccggcggacaatggttcactccagtaattaattacccagaagttgctattctaggtgttggtcgtattgctcaaaaacctatcgtaaaagatggcgaaattgtagcagcaccagtactagctctttccttgagctttgaccaccgtgtaattgacggcgcaactgctcaaaaagcaatgaacaatattaaacgtttattaaacgatccagaattattactaatggaggtgtaa

SEQ ID NO: 24713 - DNA, 966 bp, Listeria monocytogenes
atggtaggaattatcctcgcaactcacggtgaatttgctgaaggtattttgcagtccggaacaatgattttcggcgagcaagaaaacgttaaagcaatcactttgatgccaagcgaaggtccggaagacatcaaagctaaaatggaagctgcaattgcatcctttgatagccaagatgaagttttattcttagtggatctttggggaggcacaccattcaatcaagcaaacggtctttatgaactacataaagataagtgggcaatcgtagcaggacttaatttgccaatgttgattgaagctttctcatcacgttttacaatggaaagcgcacacgaaatcgcagcaaatattcttgcaccagctcaagaaggtgttcgcgttaaaccagaagaactacagccgcaagtaacagctactgaacagccacaagcagaaatcgctgcagttggtgatggcaaaatcgaattcgttctaactcgtgttgattcacgtctcttgcatggtcaagtagccactgcatggacaaaagcaacacacccaacaagaattatcgtcgtttcagatgcagttgcaaaagacgatcttcgtaaaaaattaatcgaacaagctgcaccaccaggagtaaaagctaatgttatcccagtccaaaaaatgattgagatttcaaaagatccacgtttcggcaataccaaagcacttttattattcgaaaatcctcaagatgttttacgcgcaattgaaggtggcgtagaaatcgaacaagtaaacgttggttccatggctcactctgtaggtaaagttgttgttagtaaagtactttccatggggaaagatgatgttgaaacctttgagaaattaaaagaaaaaggcgttaaattcgatgtgcgtaaagtccctaatgactcaagcgctaacatggaagatatcatcaaaaaagcaaaacacgaattaaagacacaataa

SEQ ID NO: 24714 - DNA, 1305 bp, Listeria monocytogenes
atggaaaagagtgttaatgtaattggagcaggtttagcaggaagtgaagcggtgtggcagttagtaaatcgaggcgtaaaggtagacttatacgaaatgagaccggtaaaacaaactccggcacatcatacagacaaatttgcagagctagtatgtactaattccttgcgagctaacggcctaacgaatgccgtgggagttattaaagaagaaatgcggatgcttgattctattatcattgaagctgctgacaaagcatctgtaccagcaggaggagcgcttgcggttgaccgccatgaattttctggttacattacagacaaagtgaaaaaccatcctctcgtgacggtgcatacagaagaagttactactatccctgaaggtccaacaattattgcaacagggccacttactagtcccgcacttgcggacgaaattaaacaattaactggcgaagagtatctttacttttatgatgcagcggcgccgataattgaaaaagatagtatcgatatggataaagtgtatttgaaatcccgttatgataaaggagaagcagcttacttaaattgcccgatgtcagaagaagaattcaatgctttttatgaagcattagtaacggctgaaacggctgctttaaaagaatttgaaaaagaagtgttttttgaaggttgcatgccaattgaagtaatggcaaaacgtggaattaagacaatgttgtttggcccattgaagccagttggattagaagatccgaaaacaggaaaaagaccttatgcagtattgcaacttagacaagatgatgcagcaggaacactttataatatggtaggtttccaaacacacctaaaatggggcgagcaaaaacgtgtatttggaatgattccaggtcttgagaatgccgaaatcgttcgttatggtgtgatgcatcgtaatacatttattaactcaccaactgtgcttgaaccaacgtaccaattgaaaacacgtaatgatctgttctttgctggacaaatgacgggtgtggaaggatatgttgaatcagctgctagcgggcttgctgctgggattaatgcggctaattttatacaggaaaaagaattagtggttttcccaactgaaacagcgattggcagtctagcccattatattacgagtgctagtaaaaaatcgttccaaccaatgaatgttaattttggactcttcccagagcttgaaacaaaaattcgtgcaaaacaagaacgtaacgaaaaattagctgaaagagcgctaaatgcaataaaaaaggttgcagaagaactataa

SEQ ID NO: 24715 - DNA, 1137 bp, Listeria monocytogenes
atgccaaatattcttgattcattatggaacagcatggcgctttttttatcagcgcttttttttcacggaatggcactgcgatctattagagaaaaaaagcctgcttggttccaaattaaatttgcaaatgaatttattaattatgcactgggcatttattacggccttctaggtgtttattttattatccgcggattacccggcacagactctggaatctatacagatatgctacttaatattttaatcgtcctgcatttattttcttcggcaggtccagcaactatcgcgttactacttatcgtctcaggaaaactttttcttggtgatgcactttttgccaatttgatttatgtatttttaattattggttttcactttgtttgcatggaagtagctaaacttcgacttagttccgttcaaaaagtcgttttagttaaacttagtgcgattccccttatgctattttatttacatcaaaaaatacatttagcgtataccatgaatgacttacctgtttggattctctactttttggtttctttttttattacctttattattgtttcagcggcttattatatcgatacatcgaataagttgatttatgatttacaacaatcaactatccttgatccactaacaggtttaacaaacttccgccattttgaaaatgcctttgatgctgcattcaaccatgctacgttaaaaaaatctaatttaagtgtgattattattgatattgattattttaaacgggtaaatgatacatatggccatctagtcggaaatggggttttatctacttttagtcaaatgctcttaaaaatcagcttcccgccgaacacagtgatatcaagaattggcggtgaggaatttgcaattattttaccgaatattaatgtcagcgaaacggagcatttagcagagaaaattagacgaaaagtcgaaaaaattgatgttccgattgtcgcttccggctccgttattactatttctgctggcattgcaaattacgatggtagaaattatccaagcgcgaacgagctattaaatgcagccgaccaagctctatataatgcaaaacgaaatggacgaaaccaagtacatattcgcgaaacagaaccagttatttaa

SEQ ID NO: 24716 - DNA, 1266 bp, Listeria monocytogenes
atgacagataagaagagcgaaaatcagacggaaaagacagaaaccaaggaaaataaaggaatgactcggcgcgaaatgctgaaactttctgctgtagctgggaccgggattgctgttggtgcaactggtcttggcacgattttaaatgtggtggatcaggtggacaaggcgctcactccgaaagaaaaggcggagacaggcgtaccgttttatgcgtcgaatcaagcgggaattattactgcgcagcaaacctattgttatatcgccagctttgatattcaaacagaatcgcggcaaattttgcaagatttgtttgtgaaatggacaaaatttgctgatttgacgacgagtggtggggttttgcgtgatgtagataacgacatgttaccaccgaacgacactggagaagcggatggactaggcatttctaatttcactgtaacacttggttatggtccgactttttttgaaaaagatggcaaagaccggttcggtgttaaggcgaaaaagccgaagtatctggaaaaaattccccatatggcgcatgatagcttggatgaggcttattctgacggcgatttatgcatccaagtgtgcgccgatgaccagcaagtagctttccacggaattcgtaatttcatccgtttagcgagcggcgtcgcagttgttcgctggattgaagaaggttttctcagcgcaccaaaaaacgaaacaccgcgaaatctgtttggttttaaagacggaacggcaaacgttgaccacgattcaaacaaaggttataaagacgtcgtttgggcggaaaaagacgaaccagaatggatgcgaaacggcagctacctcggctatcgcaaaatccaaatgctcatcgaaatctgggaccgctcctctttgcttgaccaggaagacacttttggtcgaaaaaaagcatccggcgccccgtatcacaaaaaacatgagcacgataaagtcgacccgagcaaactgccagctgattctcatgtgcgtctagccaaagacaccaagcaacaaatgcatcgccgcgcttattcatatacaaatggcattgataaaagcacgggaacgattgacgctggattactattcatttgtttcacccaaaatccagccaaacagttcttgccaatgttaagtatcatggggaaaatggataaattaaacgaatacaccgtcccaattggcagcgcgatgtttgcttgccaaggcggacttgctcccggagaaatttttggagaaaaactactttag

SEQ ID NO: 24717 - DNA, 816 bp, Listeria monocytogenes
ttgaagaagtggaaaagggatcacctaggtatggtcatggggatattgaatgttacgccagattctttttcagatggcgggaaatatatgcaagtagaagaagcggtggctcgagcgttacaaatggcggaagatggagcagcgattattgacgttggaggaatatctactcgtcctggtttttcggaagtaacccccgatgaagaacttgcccgaattataccggtcattaaagctgtcaggacgaaattacccgatatatggatttccgttgattcttggcgtgctgaagtagcggaacaggctatcttagcgggagctgatatgataaatgaccagtggggtgcgaaaaaagaaccgaaaattgccgaagttgctgcaaaatacgatgtaccgatttgtttaatgcacaatcgtgagaacgcgcaatacgacaattttttagaagatgtgaaaaaagacttgttagaaagtattgccatagctaaagcagcatcagtaccagacgagcatattattctcgatccaggttttggttttgttaagacacctgctcagaatttagaagtgttacgacggattgatgagatagtcgcacttggttacgaggttttactcggtacgagcaggaagtcaactattgggcttgtcctaggaactactcctggagatagaatggaaggaactggagcaacaactgtctatggattttcgaaaggttgtacaattactcgtgtccatgatgtacttccaattgcacgtatggtgcgaatgacagatgcaatcactggcaaattagatattacaaatttataa

SEQ ID NO: 24718 - DNA, 1293 bp, Listeria monocytogenes
gtgaaaattacaatcaatcaagcatccgaatttgtcggaaaagaagtaactattggagcatggcttgcgaataagcgttcaagtggaaaaattgctttcttgcaattacgtgatggaacaggatttatgcaaggagttgtcgtaaaagcagaagttggcgatgatattttcgcaactgctaaagctttaacgcaagaaacaagtttgtatgtcacaggtacaattaacgaagatactcgttccccatttggctatgaaatggctgtatctagtgtggaagtaattagtgaatcacatgattatccaattacaccgaaagagcatggcacggaatttttaatggaccaccgtcatttatggctacgttctaaccgtcaacatgcgattatgaaaatacgtaacgaaattattcgcgctagctatgaatttttcaataaagaagggttcctaaaaatcgatccaccaatcttgactggaagtgctccagaaggaacaaccgaacttttccatacgaaatattttgaagaagatgctttcctttctcaaagtgggcaattatacatggaagctgcagcaatggctttcggtaaagtattctcattcggtccaactttccgtgctgagaaatcaaaaacacgccgtcacttaattgaattctggatgattgaaccagaaatggcattttacaaattagaagatagcttacaagtacaagaaaactacgtggctttcctagtaaaagcagtacttgataactgtcgtttagaactagatcgtcttggtcgtgatgtgagtcatttagaaaaaatggttgcaccgttcccacgtattacttatacagaagcaattgaacgtttacacgaattaggatttgatgatattgtttggggagacgacttcggggcaccacatgaaacagcgattgcagacagcttcgaaaaaccagttttcattacccattatccaaaagcaattaaaccgttttatatgccagaagatccagaaaacgatcaagttgttttatgtgctgatatgattgctcctgaaggttacggagaaattatcggtggatccgaacgtattcatgatttagaaacgcttcaagctagaatggaagacttcgacttggatcaagaggcttatagctggtatcttgacttagctcgttatggttctgtaccacattccggttttggacttggcttagaacgtacagttgcttggatttcaggcacagaacatgtgcgtgaaactattccattcccacgtttactaaaccgtttatatccgtaa

SEQ ID NO: 24719 - DNA, 360 bp, Listeria monocytogenes
gtgattaccaaaatcgacaaaaataaagtacgtaaaaaaagacatgctcgtgttcgttctaagatttctggaactgaaagtcgtccacgtttaaacgtattccgttcaaacaaaaacatttatgctcaaattattgatgatgtaaatggtgtgacacttgcaagtgcgtctaatttagataaagatttcggttctgctgaatccaaagttgatgcagcaagcaaagttggcgaactagttgctaaacgtgcttccgaaaaaggtattacttctgtcacttttgaccgtggaggatacttatatcatggccgcgtgaaagctcttgctgaagcagctcgcgaaaatggactagaattttaa

SEQ ID NO: 24720 - DNA, 870 bp, Listeria monocytogenes
atgaaagtattagtaaataaccatttagttgaaagagaagatgccacagttgacattgaagaccgcggatatcagtttggtgatggtgtatatgaagtagttcgtctatataatggaaaattctttacttataatgaacacattgatcgcttatatgctagtgcagcaaaaattgacttagttattccttattccaaagaagagctacgtgaattacttgaaaaattagttgccgaaaataatatcaatacagggaatgtctatttacaagtgactcgtggtgttcaaaacccacgtaatcatgtaatccctgatgatttccctctagaaggcgttttaacagcagcagctcgtgaagtacctagaaacgagcgtcaattcgttgaaggtggaacggcgattacagaagaagatgtgcgctggttacgctgtgatattaagagcttaaaccttttaggaaatattctagcaaaaaataaagcacatcaacaaaatgctttggaagctattttacatcgcggggaacaagtaacggaatgttctgcttcaaacgtttctattattaaagatggtgtattatggacgcatgcggcagataacttaatcttaaatggtatcactcgtcaagttatcattgatgttgcgaaaaagaatggcattcctgttaaagaagcggatttcactttaacagaccttcgtgaagcggatgaagtgttcatttcaagtacaactattgaaattacacctattacgcatattgacggagttcaagtagctgacggaaaacgtggaccaattacagcgcaacttcatcaatattttgtagaagaaatcactcgtgcatgtggcgaattagtgtttgcaaaataa

SEQ ID NO: 24721 - DNA, 1293 bp, Listeria monocytogenes
atgttagaacgttatactcgtaaagaaatgggcaacatttggacagaacaaaatcgttatcaggcttggctagaagtggagattttggcttgtgaagcttgggcagagcttggtgatattccgaaagaagacgttgcgaagattcgtgctaatgcgaagtttgatgtagatcgtattcatgagattgagctagaaactagacatgatgttgtggcatttactcgttcggtttctgagtcgcttggtgcggaacgtaaatgggttcattatggcttaacatcaacagacgtagtggatacagcgaattcttatttacttaaacaagcgaatgagattttgcgcaaggatttggaaaatttcattgcgattattggcgaaaaagcaaaagaacataaatatactgtaactatgggacgtacacatggtgttcacgcggaacctactacttttgggttgaagcttgctctatggtacgaggaaatgaaacgtaacttagaacgttttaattttgcggctgatggtgtggaattcggaaagatctctggggcggttgggacgtatgcaaatattgatccttttgtagaaacttacgtatgtgaaaaattaggaacgacacctgcacctatttctacgcaaacattgcaacgtgatcgacatgctgaatatttggcaacacttgcattaattgcaacttctgtagaaaaatttgcggtagaagtacgtgcgttacaaaaaagcgaagtgcgcgaagtggaagaattctttgcaaaaggacaaaaaggttcgtccgcaatgccacataaacgtaatccaattggttctgaaaatgttactggactagcgcgcgttattcgcggtcatatggttactgcttatgaaaatgtaccactttggcatgaacgtgatatttctcatagttcagcggaacgaattattttaccagattctactattttattagattatattttgaatcgttttggaaatatcgtgaaaaacttgacggtgttcccagaaaatatgaaacgcaatatggacagaacacttggacttatttattcacagcgtgtgttacttgcgctcattgataaaggtttggctcgtgaggcggcttatgatgtcgtacaaccaagagcaatggaagcttgggaaaaacaagtacctttccgtgaattagtagaacaagatgcaaccattactgaaaacctatctgcggaagaaattgcagattgctttgattacaactatcacctgaagaatgtcgacttaatttttgatcgtttaggattataa

SEQ ID NO: 24722 - DNA, 363 bp, Listeria monocytogenes
gtgagcaatgtcgcctataaatcgaatctcgagccaaatagagtacatagagaagcggaacaacccaaaaaacaaatcctaaaacgtggtcaaatgacacttggagaaaaagtaatcatcacgattgcgcttgcgattgttttagttgttgcttttcgtataattagcgtacaagcgcaaatttacacagtgaaccaagaaattcaaacaaaagaaaccaaaattctcgaacaacaaaaatcaaatgaagacttaaaagtagaagtaaaagatttagggagatatgaacgtattttgaaaatcgctaaagaaaaagggctaaaacttgatggcgataatgtgaaagtggtagatggtcaatga

SEQ ID NO: 24723 - DNA, 2601 bp, Listeria monocytogenes
atggcaattaaagaaaatgcggcccaagaagtattagaagttcaaaaagtgattgacagattagcagacaatggacaaaaagcattgaaagcatttgaaagttacaaccaagaacaagtagacaatatcgttcacgcaatggcacttgccggacttgaccaacatatgccccttgcaaaattagcagtagaagaaactggacgtggattatacgaagataaatgtattaaaaacatcttcgcgacagaatatatttggaacaacattaaaaacaataaaacagtcggagttattaacgaagacttacaaactggtgtgattgaaattgctgaaccagttggcgttgttgccggcgttacacctgtaactaacccaacatctactactcttttcaaagcaattatcgcgattaaaacgcgtaacccaatcatctttgctttccatccaagtgcacaacgttgttcatcagcagcagcgaaagttgtatatgatgcagcaattgcagctggagctccagaacattgtattcaatgggtagaaaaaccttccctagaagcaacaaaacaattaatgaaccatgataaagttgcacttgtacttgcaactggtggtgctggaatggttaaatcagcatactctactggtaaacctgcactaggtgttggaccaggtaacgtaccagcttacattgacaaaacagctaaaatcaaacgttctgttaatgacatcattctttctaaatcttttgaccaaggtatgatttgtgcttctgaacaagcagtaatcgtagacaaagaagtggctaaagaagtaaaagcagaaatggaagcaaacaactgctacttcgttaaaggcgctgaattcaaaaaattagaaagctatgttatcaaccctgaaaaaggaacacttaacccagatgtagttggtaaatcccctgcatggattgcaaaccaagctggcttcaaagttccagaagatacaaaaattcttgtagctgaaattaaaggtgttggcgacaaatacccactatctcacgaaaaattaagcccagttcttgcatttatcgaagctgctaaccaagcagaagcattcgatcgttgtgaagaaatgttagtatatggaggacttggacactccgcagttattcactctactgataaagaagttcaaaaagcatttggtatccgtatgaaagcttgccgtatcattgtaaacgcaccaagcgcacaaggcggtatcggtgacatttataacggcttcatcccttccctaacacttggttgtggatcttatggtaaaaactctgtatcacaaaatgtaagtgcgactaacttgctgaacgttaaacgtatcgcggatcggagaaataatatgcaatggttcaaacttccaccaaaaattttctttgaaaaatattccactcaataccttcaaaaaatggaaggcgttgaacgcgtatttatcgtaactgacccaggaatggttcaattcaaatatgttgatgttgtaatcgaacacttgaaaaaacgtggcaatgacgtatcttaccaagtatttgctgacgttgaaccagatccatctgacgtaacagtttataaaggtgcagaactaatgaaagacttcaaaccggacacaattatcgctcttggtggtggttccgcaatggatgctgccaaaggtatgtggttattctatgaacacccagaagcttcattcttcggcttgaaacaaaaattcttagatattcgtaaacgtactttcaaatatcctaaacttggtggaaaagcaaaattcgtcgcaattccaacaacaagtggtacaggttctgaagtaacaccttttgcggttattacagacaaagaaaataacattaaataccctcttgctgactacgaattaactccagacgttgcgattgtcgatgcacaatatgtaactactgttccagcacacattactgctgatactggtatggacgttttaactcacgcaattgaatcttatgtatccgtaatggcaagcgattatactcgtggattatctatccgcgcaatcgaacttgtttttgaaaacttacgtgaatctgttcttactggtgatccagatgcgcgcgaaaaaatgcataatgcttctgccctagctggtatggcgtttgcaaatgcgttcctaggaatcaaccacagcttggcacacaaaattggacctgaattccacattcctcacggtcgtgccaatgcaatccttatgccacatgttattcgttataacgcacttaaacctaaaaaacatgcgttattcccaagatatgaaagtttccgtgctgatgaagattatgctcgtatctctcgtattatcggcttccctgctgcaactacagaagaaggcgttaaatcacttgtagatgaaatcatcaaacttggtaaagatgttggtatcgacatgagtcttaaaggacaaaatgttgctaaaaaagatttggatgctgttgtagatactcttgcagatcgcgcattcatggaccaatgtactacagccaaccctaaacaacctcttgtaagtgaactaaaagaaatctaccttgaagcttacaaaggtgtttga

SEQ ID NO: 24724 - DNA, 516 bp, Listeria monocytogenes
attagcaaagacatgttggtaaacgatgggattcgtgcacgtgaagtaagattgatcgaccaagacggtgaacaattaggcgtgaagagtaaaatcgatgcgcttcaaattgctgaaaaggctaatcttgatctagtgcttgttgctccaacagcgaaaccgccagtagctcgtatcatggactacggtaaattccgttttgaacaacagaagaaagataaagaagcccgtaagaaccaaaaagtcatcgtgatgaaagaagttcgtttaagtccaacgattgacgaacatgacttcgatacgaagctacgtaatgcacgtaaattccttgaaaaaggcgataaagtaaaatgctctatccgttttaaaggccgtgccattacacacaaagaaatcggtcagaaggtgcttgaccgttttgcaaaagcgtgcgaagacctttgtacaattgagcaaagaccaaaaatggacggacgttcgatgttcttagtcctagcaccacttcatgaaaagtaa

SEQ ID NO: 24725 - DNA, 366 bp, Listeria monocytogenes
atggcacgtattgcaggtgtggacgttccacgtgaaaaacgtattgttatttccctgacttacatttatggtatcggtaaacaaacagctaaagaagttcttgctgaagctggcgtttctgaagatactcgtactcgtgatttaactgaagaagagctaggtaaaatccgtgaaatcttagaccgtattaaagttgaaggtgaccttcgtcgtgaagtaaacttaaacattaaacgtctaatcgaaatcggttcttaccgtggcatgcgtcaccgtcgtggacttccagttcgcggacaaaatacaaaaaataatgcccgtactcgtaaaggcccgtccaaaacagtagcaggcaaaaagaaataa

SEQ ID NO: 24726 - DNA, 1374 bp, Listeria monocytogenes
atgtcaaaacgatatgctgtagtgcttgctgctggccaaggcacacggatgaaatcaaaactttacaaagtattgcatcctgtttgtggaaaaccaatggtcgaacatgtagtagatcaaatttcaacgcttaatgttgataaagtggttacgattgtaggtcatggagctgagaaagtacaagagcatttagcaggtaaaagcgagtttgtaaaacaagatgaacaacttggaacggcacatgcggtacttcaagcgaaagcagaacttgcaggtaaagacggtgtgactctagttgtttgtggggacacacctttgatcgaagctagcacgatggaagctttacttaaatatcaccacgaaaaacgtgcaaaagcaactattcttacaacagttattgaagatcctacaggttacggtcgtattattcgtgatgacctaggcattgtagaaaaaatcgtagaacataaagatgcaacagaaaaagaacaacgtatttcagaaattaacactggaacatattgctttgacaataaagctctttttgaagcgttagagaatgtttctaacgataatgtgcaaggagaatattacttaccagatgttattaaaattttaaaagattcggatgaagtcgttgcggcttacagaatggagtctttcgaagagtcacttggagtgaacgaccgaattgccctagctgaagcgtccaaattaatgcaacgtcgaattaacgaaaatcatatgcgtaatggcgtaacgcttgttaatcctgaaagcacgtatattgatatagatgtaaaaattggtcaagatacagtaattgaacctggagttatgcttcgtgggaaaactgtaatcggcgatgattgtgtggttacaagtggctcggaaatcgtaaacagtgttatcggtgaaagagtgcatgttagaacttcttccattttcgaaagtaaagttggagatgacgttcaaattggtccatatgcccacctaagaccagaatctgacattcacgatcatgtgaaaatcggaaattacgtcgaaacgaaaaaagcagttgttggtgaaggaactaaattaccacatttcatttatatgggagatgcggaaattggtaaaaacgtcaatgttggttgcggaagtattgctgttaattatgatggcaaaaacaaagctaaaaccattattggtgataatgtctttgtaggttgtaattcaaacctgattgcacctgtcaaagtgggcgaccgagctttcatagccgctggttccacaattacaaaagatgttcctgaagatgcgctaggtattgctcgcgcgaaacaagacaacaaacttggttatgcgaaacatttgaatcatagtaaataa

SEQ ID NO: 24727 - DNA, 444 bp, Listeria monocytogenes
atgacaagccggaaattagatcagctttatagacaagtcattatggatcactataaaaatccgcgcaataatggagagctcccagatagcgatgtaacaattgacctcaacaacccaacatgcggtgatcaaattcatcttcatttaaaaatggacggtgataaaatcgttgcggcaaaattcactggtagcggctgttcgatttcgatggcctctgcttcaatgatgacgcaaagcattatcggtaaaaccgagaaagaagcactaaaaatgtcccgcgaattttcagaaatggtgcaaggtcacgaccatgaaacaattgatgaatacggcgacgttgaggcgcttgctggagttgcgaaattcccagcaagaatcaaatgtgcgactctttcatggaaagcaatggagagagcgatttttgaaaaagaaggaacaaaataa

SEQ ID NO: 24728 - DNA, 294 bp, Listeria monocytogenes
atgaaaaagttaaatgagctctcaaaatcagatttattattaattttccaagcattaagcgatccaattcgtcttgatattttcctatgtttactgaaaagcaaagaaaaacgcttctctggcacaacttacaatatctccaaatccaccatgtcacaccatattaaactgcttaaagaagcaaaactgattaatttaagaaaggaaggaacaacgcatatttattcagtgaatcaagagctggtcagtcttattagtcacttttttgaggagtgcggggaaaaagacgagtaa

SEQ ID NO: 24729 - DNA, 267 bp, Listeria monocytogenes
atggctaatgtcgtcgtttggagtaaagaagggtgtcattattgtaaagatgtcaaagattttttaatcgagcaaaaaattgtttttcaagatatcgacgtcaccgaccatgattatttgcgagaagttctccaagccaaatacggcatctgccacgtaccagtcgtagaaattggcaacattgaaaatgggacctaccaagctgttacagaaatcggattggaacatttggaaaaagcattgtttgaaaagggggaagtaaaatga

SEQ ID NO: 24730 - DNA, 513 bp, Listeria monocytogenes
atggaacaaattctgcttgttgacgggtataatgtgattggggcttggccagaattaagttatttgaaagatcgtgatttggaagcggcgagagataagcttgttgaatggatggcggagtatcagagttatacgggataccgggttgtggtcgtgtttgatgcgcagtttgtccgaggtgtgaagcggaaaagcaagaaatatcaagtcgaagtagtttttacacatgaggatgaaacggcggatgaatatattgaacaaaaagcaattgaatggaaaaatgtgcggacgcaaattatggtagcgacatctgactatacagaacagtgggctatttttggacaaggagcgttacggatttcttcgcgagaactactttttgaaattcaagaaatgagcaaacaaatcggtaagaaaatcaagcgaattcaggaagaaatgccaaaatccaaccttaatctagattctgatgttatttcgcagcttgaaaagtggagaagaggcgaggagtaa

SEQ ID NO: 24731 - DNA, 1272 bp, Listeria monocytogenes
atggatacacttctgtcaggagtacagtatgttttaaacttggggcctacagttattttgcctattatgattttctttattgcattaattttccgagtaccagcaaagaaagcgcttcgttcagcgattacgattggtatcgggtttgtaggtattaaccttgttattagtttactatctagtaacttaggtccggcagcgcaacaaatggttgagcgttttggactgaatttaacaattattgatgcaggttggccagcagcagccgcggcttcatgggcttctccagttgcagcaattttaattccaatctgtttggtagttaacttagcacttattttcttcaaagttacgaaaacactcgatattgatatttggaactattggcatttcatcgcagcaggtgcaactggttatatcgtaactggtggtaactggtggttcgcgattctttgtgccattatctatgaagttgctgttctttggatggcagatagaacacaacctatggtagaagaattttacggcttaaaagggatctccttaccaacaggttctacagcagcattcggtttcatcggtattccggttggttggctaatcgctaaaatccctggtattaaaaacatccacgttgacccagaaactattcaaaaacgttttggtattttcggggaaccaatgatgatgggtcttattctaggtattgcaatcggtattcttgcaggctatgacgttggggcagttgcacaacttggtatgtccatgggtgcggtaatgttcttaatgcctcgtatggttaaaattttaatggaaggtttaattccaatttcagaatccgctcgtgagttcatgaaatctcgtttcaaaggccgcgaactttatatcggtcttgatgcagcactttctatcggtcacccagcgaatatttctactggtttaatccttgttccaatcactcttttcttagctgttatcattcctggtaacaaagtacttccttttggtgacttggcaactattccattctacgtatcattcgtagtagcatctcgtaaaggtaacattcttcattccgttttagctggaactgtagttattgcactagcgcttcttatggcaactgacttcggtcttgttcatacagaaatgatgaaaggtgtttacgaattccctaaaggagcaacacaagttagtacacttgatatgggtggtaacttctttaactgggttattcttaaattctctcaagcttgggcagctattttctaa

SEQ ID NO: 24732 - DNA, 630 bp, Listeria monocytogenes
atggcaaatgtacacgtaattaatcacccactagtacaacacaaattaacaattattcgagataaaaatacgggaacaaaagcattccgcgaacttgtagatgaagtcgctacattaatggcgtacgaaattacacgtgatatggaactagaagacattcaagtagaaacaccactacaaacaacaactgctaaaacacttactggtaaaaaattagggattgtgcctattttaagagctggtcttggtatgcaagatggtattttaaaacttattcctgcagcaaaagtaggacatgtaggtctttatcgtgaccatgatacacttgaaccagtagaatattttgtaaaactaccttctgatgtggaagaacgtcttttcatcgttgtagatccaatgcttgcaactggcggatcggcaattatggctatcgattgcttgaaaaaacgcggcgctcgcaatatgaaattcatgtgtttagtagcagctcctgaaggcgttaaagcgcttcaagacgcacatccagacgtagaaatctatgtagctggtttagatgagaagttagacgaaaatggttatatccgtccaggcttaggagatgctggcgatagattattcggaactaaataa

SEQ ID NO: 24733 - DNA, 801 bp, Listeria monocytogenes
atgattgaaaaactaatattaggtcgttttgttccaggggagtccttgattcatggtctggatgcacgaacgaaacttttagcaggattttattatatcggtattttatttttagcgaataactggtggacatacgcattgatggttttgttcacactaatggtcgttcaaatgacaggcatcaagctaaaagtttttataaaaggtgttaaaccacttatttggttgattttatttaccgtagtaatgcaaatactattcgcgagcggaggaacgatttactttgattggggaccatttaccatctcttcttttgggctgttaaacggtgtatttgtatttttgcgttttgttttaattatcattatgtcgactgttatcacactcacaaccacgcctatgaatttaacagacgcgattgcttatatccttcgtccttttgcagtgcttaaagtgcctgtgaatgacattgcattaatgatttcggtggcacttcgttttattccaactctcatgggagaaacagataaaattatgaaagcacagcgagctcgtggagtggattttggtgaaggcaatctttttgaacaaatgaaagttgttgtcccgatttttattccgttatttgttagttcgtttaaccgagcggaagaattagcggatgcaatggaagcaagagggtatcaaggaggcgaagggcgcacgcgattccgaatattgcattggcatcttggagatttgattgcggcatgcgtaatgatacttttaaccgcaggactcgtaatactaagaacatcttaa

SEQ ID NO: 24734 - DNA, 2079 bp, Listeria monocytogenes
atggcagattatttagtgattgtagagtcacctgcaaaagcaaaaacgattgagaagtatttaggcaagaaatttaaagttaaagcttccatgggacatgttcgtgacttaccgaagagtcaaatgggtgtagacacagaaaatgactatgaacctcgttatattacgattcgcggaaaaggccctgttttaaaagaattaaaacaagctgccaaaaaagcgaaaaaagtctatctcgcagccgatccagatcgtgaaggggaagcaattgcatggcacttagctaacagtttagagttagatcaatcagacaaattacgtgtagtatttaacgaaataacgaaagaagcagtaaaagaatctttcaaaacaccacgtaaaattgacatggatttagtcaatgcacagcaagcgcgtagaattttagaccgtttagttggatataatatcagccctatcctatggaaaaaagtgaaaaaaggtttgagtgctggtcgtgttcaatctattgcacttcgaatcattattgatagagagaaagaaatcaataatttcaaacccgaagaatactggacaattgacggtaacttccttaaaggtaagaaaaaattccaagccaatttttatggtgtaaatggcaaaaagaaaaaactttctactgcggatgatgtaaaagaagtaatgtctgcaatcaaagggaaatcatttgacgtaacagatgtaacaaaaaaagaacgacttagaaaccctgctgcaccatttaccacctcaagtttgcaacaagaagcagcacggaaactaaattaccgtacaagaaaaacgatgatgcttgctcaacaattatatgaagggatcacacttggcaaacaaggcacagtcggcttaatcacttatatgcgtaccgactccactcgtattgcagattccgctatactagaagcaagtaactacattaaagaaacttatggacctgaattttctcgtaatcataaacgatcagataaaaacgcaaaaggtgctcaagatgcccatgaagcaatcagacctacaagtgcaatgagaagtcctcaagaagtaaaagaatatttaactcgtgaccaacttcgcttatatcggctgatttgggaaagattcattgctagccaaatgacaccagcagttcttgatacaatgcgcgttgacttagataacaatggcgtgaatttcagagcgaatggctcgaaaattaaattccacggctttatgaaagtctatgtagaaagtaacgatgataatacggaagaaaaagaaaatattctaccggatttgaaaaaaggagataaggtgcagtccgaatcactcgaacagcggcaacatttcacgcagccacctccacgttataccgaagctagattagtaaagacgctagaagaaattggtattggccgtccttcgacttattcgccaacgcttgatacaattcaacgcagaaattatgtttccttaacaaataaacgatttatcccaactgaattaggtgaaatagtcaatgaaatgattgaagagtatttcccagagattttagatgtgaagttcaccgccaacatggaaagtgagctagatgaagtagagcacggagaagtcgaatgggtgaaagtcattgatgaattttataaacgatttgagccaaatgtcattaaagcagatgctgaaatggaaaaaatcgagattaaagatgaaccagctggcattgactgcgacctttgcggagccccaatggtatacaaaatgggtaaatatggtaagtttcttgcttgcagtagatttccggattgtcggaatacaaaagcaatcgttaaagaaatcggtgttacttgtccaaaatgtgagaaaggacatgtaatagaaagaaaaagtaagaaaaaacgtattttctacggttgtgatcgttatccagattgtgactatgtatcttgggataaaccagtcgaacgtgcttgtccgaaatgtgagaaacgagcactagtcgagaagaaattgaaaaaaggtgtacaagtacaatgtacaaattgtgattacaaagaatcaacccaacaataa

SEQ ID NO: 24735 - DNA, 1182 bp, Listeria monocytogenes
atgaatgacgttttcctaaaagcgcttcctgtattgcaaaaattaactacagcgggttttgaagcgtattttgttggcgggtctgtcagagattacttgctaaatagaacgatttccgatgtggatattgcaactagtgcttttccagaagaagtaaaggagatttttcaatccacttatgatactggaattgcgcatggaacagttacagttagagaaaataatgaattttatgaagtgactacatttcgaacagaaggaacgtatgaagatttcagacgcccgagcgaagtgaaatttattcgttcgctagaagaagatttacaacgtcgtgacttcacgatgaatgcgattgcgatggacgaacatttcgctttacacgatccgttttctggacaagaagcaattaaaaacaaagcaatcaaagcagttggcaaagcttccgagcgttttcatgaagatgcgcttagaatgatgcgaggagtacgctttctgagtcaactggattttcaattagatagtgaaacagagaaagctttagaaagccagattggcttattacagcatacttctgttgagagaattacggtcgaatggttaaaaatgattaaaggtccagcgataagaagagcgatggacctacttttaaaagtggaaatggaaacctatctgccaggtttaaaaggagaaaaaaaagctctaactgaatttggtagttgggattggggaaaacggacaactgatgatgcgatttggctcgggcttgtcgttactgttcaaccaaataatgttaacgcatttctaaaagcatggaaattacccaataaaacaattcaactagtgagtaaagcgtatcaatatgcgctaaaaatgaaagagacatggctagcggaagaactttatcatgctggcaaggcagttttctcactagtaaatgaactaaatattattcgagggaaagaaaacaaccaacataaactaagtcaagcttatgaggcgttaccaattcactccaagaaagacttagccattaccggagcagatttattaaaatggtccggagaaagcgctggtccttgggtaaaagagacgcttgataaattggaatgcggcgtcctttgcaatgaaataaacaatgaaaaaaatcagattaaaaggtggctaggctatcatgaagaataa

SEQ ID NO: 24736 - DNA, 2583 bp, Listeria monocytogenes
atgacagaatatacaccaatgattaagcagtacttggaaatcaaagacaaatatcaagatgctttcttatttttccgtttaggagatttttatgagatgttttttgaggatgcactgaacgcttctcaaattttagaaattacattaactggtcgtgaaggtgggacaaaagagaaaatcccgatgtgcggagttccataccattcagcgagcggttatattgatacattaatcgaaaaaggctataaagttgcgatatgtgagcaagtcgaggatcctaaaacaacgaaaggcatggtgaagcgtgaagtagtgcaattgatttcaccaggaaccgttatggatgaacgcggcttaaaagcaaaagaaaataactatattgcttccctttattgctatgaaggcaaagagtatggctttgcttattccgacttatcgacaggtgaattaaaatcaaccgttattgaagctagcgaagatcgtttgattaatgagctaacgacactttcaacaagagaattgattgtttcttcctcggaaaaagaagtgctttcagatgtcatgaaggagcaactaggtttaactttttctgtgcacgaagaagatacgattccagccgaaaacgagaaattagtaacccgccatatgtcattatccgaaaaacgtgccattggtaagttactccattatttaaaagaaacgcaaaagcgggatttaggacatttacaacaagctgtacattacgaaacgagcaattacatgaagatggactactattccaaacgtaatttagaattagcagagtcgattcgtggtaaaggtcgtcaaggtacgctactttggcttctagataatacccaaactgctatgggcggaagaatgcttaaacaatggattgatcgtccgttaatagaccgaaaaaaaatcatcgagcgacaaaatgatgttagcgaattaatggcacactttttcgaacgcttagagctagtagaaaacttgaaaaatgtatacgatttagaacgccttgctggtcgcgttgcatacggaaatgtgaatgcgcgagacttaattcaattgcgtaattcgttatatcagattcctcgtattcgggcgacactgttatcaatgagtagcgagagcctaacagaacttgctgaacaattagatccatgtgaagaattaaccgaaaaattggaagaagcaatcatggattctgcaccgatttccattcgggaaggcgggattattaaagatggctataacagccaactagatacgtaccgcgatgcaagccgcaacggaaaaacgtggattgcagaattagaacgtaaagaacgcgaactaacgggcattaaaacgttgaaggtgggctttaatcgggtattcggttactatattgaagttacccgagcaaacacgcatctgctcccagaaggccgctatgagcgcaagcagacactaacgaatgccgaacgttatatcacgcctgaactaaaagaaaaagaaaaactcattttagatgcagaagaaaaaagcatggaattagagtaccaattattttctgaagtacgagaaatggtaaaagactacatagaacgtctgcaaaaattagcgaaatctgttagtgaaatcgattgcctgcaaagttttgcggatattagcgagaaaaaccattttattcgtccgacattaagcgaagacggttccctgcacgtaaaacaaggtcgtcatcccgtggtagaaaaagtaatgggtgcccagagctatgtagcaaatgactgtgatttagatgaaaatcgggaaattttacttataactggtcccaatatgtcaggtaaaagcacttatatgcgccaagtagccttaacagcaatctgcgcgcaagttggttgttttgttcccgctgaagaagcgatattaccaatttttgaccaaattttcacgagaattggtgcagcggatgatctaattgccggtcaaagtacattcatggtagaaatgttagaagctagaaatgccattgttcacgcgacgaaagatagtttaattttatttgatgaaattggtcgtggaacagctacttacgacggaatggcacttgctcaagcaatcattgaatatatccatgaaaatgtccatgctaaaacacttttctccacccattatcatgaattaactgatttggagaaagaactgcgtggtttacaaaatattcacgttagcgctgtagaagaaaatggcaaagtagttttccttcataaaattaaagaaggcccagcagacaaaagttatggtattcatgtcgctgagctagcagaattaccaaaatcacttattgaacgagcgagtcgtattttagaacaactggaaaatgacgataagaaaatcattatcgctagcgtgaagcagccagaagaagttcacgaagaagtacaactgtcgatgttcccattggagccagaaaagaaagcatcttctaaagaaacaaaactactaaaagaaattgcctccatgaacattatgcagatgacaccaatggacgcgatgaataaattatacgaacttcaaagtaaaatccattaa

SEQ ID NO: 24737 - DNA, 1833 bp, Listeria monocytogenes
atgcataaaatgagattttttcagtccgtacaatttaagttagttattatgtatttgctactaattatcgttgcaatgcaagtaatcggcgcgtattttgtacgtgaactggaaggacaactggagaaaaattttcaagattctattacaaatagtattaccttgctggattataatgctagagaagaaattattaaaaatagcgataactcagtgaagttacaaaatgatattagagaactcttagtcgactattcgcgtgcaagcagcaacttaatcgaagtaagaatagtagatgacaaaggaaaaattcttggaacatcgaatttaaataaccaaggaattgttggccaaaaaagcaacgatccacttgtaaaacgaacattatcacttggaacgacttccgaggacaaaatctataaagatgaatcaaataaaaataaccgcgtttgggtgaatgtatcctccatcaaaaataaaggccaagtgataggggctatttatcttgtcgctgatattgaaagcgtatataaacaggtagatgatattaccaatattttcatcacaggtactttgattgcgatgattattacagccgtccttggaattctattatcgcgaaccattactaaaccgattgtcgaaatgaaacgtcaagcttatgcgatggctcgcgggaactatagccgcaaagttaaagtatatggtgtcgatgaaattggggaactggccgattcttttaatacgttaacgaaacgagtccaagaagcccaagcaatgactgaaggggaacgacgcaaattatcttcagtactcgcatatatgaccgatggcgtaattgcaaccgaccgccgcgggaaagtaattctcattaatacgcccgcagaaaaaatgctccgcgtgaaacatgaaagtgcgaatggacgctcgattattgatgttttagacatcggggacacgtaccagtttgaagatttaatggaagtggatggttcgttaacaatggaccgtagtactctcgacaaaccttacgtgcttcgtgccaatttctcggttattcaaagagaaactggctttaacaatggggttatcgcggtacttcacgatattactgatcaagaaaaagtcgaccaagaacgtcgggacttcgtatccaacgtttcgcatgaactaagaaccccacttaccagtatgcacagctatttagaagcattaagcgacggcgcatgggaagataaagaaatcgctccacgtttccttgaagtaacgcaaaatgagaccgagcgaatgattcgtctcgttaatgacctgctcaaactttccagaatggacggcggcagggaacaactagaaaaaagtttcgtgaactttacagacttctttaaccatattattgaccgttttgaaatgatgaaaaaagaaacaatcatgttcaaacgccatattccaagagaaccagtcatcatcgaaattgatgaagataaagtaatgcaagtgcttgataatattatttctaacgccaataaatattcaccagatggtggccgcatttcgttctatctgaaaaaatttgaagatgaaattgaagtgagcattgccgatgaaggtttaggcgtaccagacgaagatttagcaaatgtattcgaccgattcttccgcgtagacaaagcgcgctcgcgagaaatgggaggaacagggttaggactcgctattgctcgagaagttatcgaagcacatggcggtcgaatttgggccgaacgtaataagaataaaggaaccataattaaattcaccctgccatacagtgacttaccggaggatgattgggaatga

SEQ ID NO: 24738 - DNA, 738 bp, Listeria monocytogenes
atgaaaattgacattctatccattttcccagatatgttttcgggagtgaccgggaattccattataaaaaaagccatcgaaaacgagcgtgtcgcggttgaagtgactgatttcagggaatatgcagaaggaaagcatcatattgtcgatgactatccttacggtggcggagcaggtatgctactcaaagcgcaaccgatatttgatgccgttcaagctgtcaaagaaaaacagccagaaacaaagccaagagttattttaatggacccagctggcaaacgcttcaaccaaaaaatggcagaagaatttgccgaagaagagcatcttgtttttatttgtggacactatgaaggttacgatgaacgaattcgcgaacaccttgttactgatgaagtttcgataggagattacattttaactggtggcgaaattggtgcaatgattgtaatggatagcgttattcgccttttaccaggtgtacttggtaataaagattctgcggtaacggattcgttctcaactggattgctcgaacatccacactacacgcgaccagccgattttagaggtatgaaagtgccagatattttactcagcggaaatcatgcatggatagaagaatggcgcgacaaagaatcactcaaaagaacctacgaacgccgcccagatttactaaaaaactatcccttgacagacaagcaaaaaacttggctcaaagaatggtctgacagtaaataa

SEQ ID NO: 24739 - DNA, 831 bp, Listeria monocytogenes
atgaagaaggttcttggtttaattttcacattaagtttagttttagtacttacagcttgcggcggttcctcagataaagcttcatctagtaaagatgataaacagttagtagtgggtgcatccaatacaccacatgcccaaatcttagaacaagcaaaaccaatcttgaaagataaagggattgacttgaaaatcgttaaatatacagactatgttatgcctaacaaagcgctagaagaaggcgacttagacgctaactacttccagcataaaccatatcttgaattagaagaaaaagaaaaaggctacaaatttgctgatgttggcgcaattcacatcgaaccaatgggtatctattctaaaaaagtaaaagatattaaagatctaaaagacggtgcgcaagtattactttctaactcgaaatctgactggccgcgtgtcattggtatctttgtagataacggattattaacgctgaaagatggcgtgaaaccacaagatgcaacatttgatgatattaaagacaatccgaaaaatttgaaattcaaatacgattttgacccagcttacttgatgactgcctacaataacgaagaaggcgacgttgtagcaattaactctaactttgttgtagaccaaggcttaaacccttctaaagacgctattgcaatcgaaagcaaagactctccttatgcaaatatcgttgtaacgacagagaagaaaaaagacgataaaaacattacagagctagtaaaagtactacactcgaaagaaattcaagattacattacgaaagaatgggatggcgctgttgtcccagtcgataaataa

SEQ ID NO: 24740 - DNA, 1101 bp, Listeria monocytogenes
atggcacttacagctggtattgtcgggcttcctaatgttgggaaatcgacactttttaatgcaatcacaaaagcaggagcagaggctgcgaattatccgtttgcgacgattgacccgaacgtaggaattgttgaagttcctgaccacagattaaacaaactaacggaacttgtaaaaccgaaaaagaccgttccaacaacttttgaatttacagatatcgccggaattgtaaaaggtgctagtaaaggggaaggacttggaaacaaattcttatcccatattcgtcaagtggatgcaatttgtcatgtaactcgttgctttgacgatgaaaacattacccacgtagaaggccgagtagacccgctagacgatatttctacaatcaacttagaacttatcttagcggacttagaaacagtagagaagcgtattggacgcgttgagaagctgtctaaacaaaaagataaagatgctgtggctgaatataacgttttagttaaactacgtgaagcattcgaaaatgacaaaccagctcgtgcgattgaatttaacgaagaagaagagaaaatcgttcgcaaccttttcttacttacaagaaaaccagttttatatgtagcaaatgtaagtgaagaagatgtttctagtccggacgataacaaatatgtacaacaagtacgcgaattcgctgcgagtgagaactctgaagttatcgtggtttgtgcgcgtgccgaagaggaaattgctgagcttgaagacgaagataaattagaatttttagaagcacttggaattgaagaatctggtttagaccagttaattcgttccgcgtatacattgcttggcttagcgacttacttcactgcaggcgttcaagaagttcgtgcttggactttcatcaaagggatgaaagctccacaatgtgcggggattatccacacggacttcgaacgcggattcattcgtgccgaagttgtcgcatatgacgctttacttgaatacggctcagagcaagcggccaaagaagcgggtaaagtacgcttggaaggtaaagaatacgaaatgaaagatggagatgttgttcatttccgctttaacgtttaa

SEQ ID NO: 24741 - DNA, 1185 bp, Listeria monocytogenes
atgaagaatctagtaaaagtaaaagttttccctaagttcacaaaaggctataaggaaggttatccccttattcttaaagaacgtatggaaaaatggccaaaagaattacaagaaggcgacgtattagaattaacagatacgaatggccaatttattgcaagaggctaccacggagaacaaaacaaaggcagcggctggcttttcacttgggacaagaaacagcaactcgatgaagactttttaacgaacctaattacgacagcaatcgaaaaacgtcaatttctatttgcagatgactctactacggcttttcggatttttaatggcgaaggagatggacttggtggtttcactgttgatttttatgatggttatctcgtaattcaatggtacagtctaggcatctacgctttccaaaaaatgattattgatattttcttatcttttccagaaataaaaggtatttatgaaaaaagacgttttcaagaagatacaaaagacgatttcgtcgccggtcaaaaagcaactttcccacttattattaaagaaaatggcattaattatgcaacttacttagatgatggttggatgacaggcatctttctagatcagcgggatgtgcggagaagaattagtgaggattattctgtttccaaaaatgtcttaaatacattttcgtatacaggggcattctcggtagcggctttatttggtggcgcgagtaaaacgacaagcgtagatgtggctggtcgttcgctcagcaagacaaaagaacaattagaagtaaatggtcttgatccaaacgaacaagcaattatcgtagaagatgttttccattatttcaaatatgcagcgcgcaaacaattaacttttgatttagttgttgtcgatcccccaagctttgcacgcacaaaaaaagtaactttccgagcggcgaaagattacccagctatgcttcgtgaaatcattgacatcactgctccaaacggcactatcattgcttcaacaaactatgcaggattcggtatgaaagcatttaaaaaattaattgcggaagccttccaaacaagcgatcgtacttataaaattgtggaaacccattccttacccacagatttcacagttaataaaaactttcctgaggggaattatttaaaagtgctctttcttactttggatatttaa

SEQ ID NO: 24742 - DNA, 1242 bp, Listeria monocytogenes
atggtctatttacaaaagcaagataaggaagtttttgatgcaattaagttagaacttggtagacaacgcgcgaatatcgaattaatcgcatctgagaattttgttagtgagcaagtaatggaagcaatgggttctgtattaacgaataaatatgcagaaggttacccaggaaaacgctattacggcggatgtgaattcgtggatatcgtggaagatttagcacgcgaccgcgcgaaaaaattatttggagctgaatatgcgaacgttcaaccacactcaggtgctcaagcgaatatggcggtttatcatacagtgcttgaaccaggtgataccgtacttggtatgaacctttcacatggtggacatttaacacatggtagtccagttaatttcagtggtgttttatacaattttgttgaatacggcgttcgtgaagatacaaaagagattgattatgatatcgtccgtgaagctgctttaaaacataaaccaaaaatgattgtagctggcgcaagtgcttatccacgtaaaattgattttgctaaattccgtgaaattgctgatgaagttggcgcatacttaatggtagatatggcgcatatcgccggtcttgttgctgctggtttacaccaaaatccagttccttatgctgattttacaacgacaactacccataaaacgcttcgtggacctcgcggtggaatgattttagccaaagcagaatgggaacaaaaattaaataaatcgattttcccaggaattcaaggtggaccattaatgcacgtaatcgcagcgaaagcagtggcgtttggtgaagcgttacaacctgaattcacaacgtattgcgagcaaattattcgtaattctaagaaattagcagaaactcttcaagcgaatgatgttgctgttttaacaggtggttcggataatcatttattattaattgatttaaaaccacttggcttaacaggaaaagcagctgagaaagtattagatgaagttggtattaccgtgaataaaaataccattccattcgaaacggaaagcccatttgtaacaagtggtattcgtgtaggtgttgctgcagtgacgactcgtggattcgatgaagttgcgattgaaaaagtcggcgtacttatttcggaagtactgcataacttagaaaatgaagaagttctcgcagatgtaaaagcacgcgtggctactttaacaaatgaatatccgctttatccaagtttataa

SEQ ID NO: 24743 - DNA, 1188 bp, Listeria monocytogenes
atggcaaaagaaaaatttgaccgctctaaaccccatgttaacattggtactatcggacacgttgaccatggtaaaacaactttaactgctgcaattacaactgtacttgctaaaaaaggctatgctgatgcacaagcttatgaccaaattgatggtgctccagaagaaagagaacgtggaatcacaatctctactgctcacgttgagtaccaaactgacagccgtcactatgcacacgttgactgcccaggacatgccgattacgttaaaaacatgatcactggtgctgcacaaatggacggagctatcttagtagtatctgctgctgatggcccaatgccacaaactcgtgaacatatcttactttcacgtcaagttggtgttccatacatcgttgtattcatgaacaaatgtgacatggttgacgatgaagaattactagaattagttgaaatggaaattcgtgatctattaactgaatatgaattccctggcgatgacattcctgtaatcaaaggttcagctcttaaagcacttcaaggtgaagctgactgggaagctaaaattgacgagttaatggaagctgtagattcttacattccaactccagaacgtgatactgacaaaccattcatgatgccagttgaggatgtattctcaatcactggtcgtggaacagttgcaactggacgtgttgaacgtggacaagttaaagttggtgacgaagtagaagttatcggtatcgaagaagaaagcaaaaaagtagtagtaactggagtagaaatgttccgtaaattactagactacgctgaagctggcgacaacattggcgcacttctacgtggtgttgctcgtgaagatatccaacgtggtcaagtattagctaaaccaggttcgattactccacacactaacttcaaagctgaaacttatgttttaactaaagaagaaggtggacgtcacactccattcttcaacaactaccgcccacaattctatttccgtactactgacgtaactggtattgttacacttccagaaggtactgaaatggtaatgcctggtgataacattgagcttgcagttgaactaattgcaccaatcgctatcgaagacggtactaaattctctatccgtgaaggcggacgtacagtaggcgctggcgttgtttctaacatcagcaaataa

SEQ ID NO: 24744 - DNA, 885 bp, Listeria monocytogenes
atgagtgattatttagttaaagcgttagcctacgatggcatggcgcgtgtatatgcagcagtaacaaccgaaacaatcaaagaagcgcaaagaagacatgatacatggtcagtttcctctgccgcacttggcagaacgatgacagggacgcttttccttggagcaatgcaaaaagaagatcaaaaaatcactgttaaaatcgaaggggatggtccaattggtccaatcgttgctgatagtaatgcacaaggccaaatcagaggatacgtaacaaatccacacgttcatttcagcgaactaaatgaagctggaaaactagatgtccgccgcggggttgggacatccggtatgctttcggttgtaaaagatttaggctttggcgaaaatttcaccggacaaacaccaattgtttcaggtgaaattggcgaagattttacgtattacttagcaacatccgaacaaataaactcttccgtcggtgtaggagtgcttgttaatccagatgatacgattgaagcggcaggtggtttcatgttgcaactacttcctggcgcgacagacgaaatcattgatgaaatcgaaaaaaatctgatggctctaccaacagtttctagaatgattgaagcgggcgaaactcctgaatctatcctagctaaactagcgggcggagaagataaattacaaattttagaaaaaatcccagtttcttttgaatgtaactgttccaaagaacgctttggcagtgcaatcatttcacttggaaaagaagaaattcgttccatgatagaagaggatcatggcgcagaagcggaatgccatttttgccgaaacacttatgatttctcagaagaagaattaaaaacgttgtatgaagaagcaaaataa

SEQ ID NO: 24745 - DNA, 1311 bp, Listeria monocytogenes
atggcaaaaccagttgtagcgattgtcggacgtccaaacgttggcaaatcgactatttttaacagaatcgttggtgaacgtgtttccatagtggaagatgttcccggtgtgacacgtgaccgcatatataattcagcggaatggcttggaaaagaatttaacattattgatacaggtggtattgatctttccgatgaaccatttttagagcaaattcgcgcacaagcggaaatcgcaattgatgaagcagacgtaattatttttattaccaatggtcgtgaaggagttaccgatgcagacgaacaagtagcaaaaattctttaccggtctaataaaccaattgttttagcgattaataaagtagataacccagaaatgcgagatcaaatttatgacttttattctcttgggtttggtgagccgtatccaatttctggttcacatggactagggcttggcgacatgcttgatgctgttcgcgctcattttccaaaagaagaagaggaagaatatccagatgacacagtgaaattcagtttaatcggtcgaccaaatgttggtaaatcttctattctaaatgcactgcttggagaagatcgtgttattgtttcagatattgcgggtacaactcgtgatgcaattgatacaacttatactttcgatggccaagattatgtcatgattgatacagccggaatgagaaaacgtgggaaagtgtatgaaagcacagagaaatatagtgttttacgtgcaatgagagcaattgaacgctcggacgttgttcttgtggttatcaacgcagaagaaggtattcgtgagcaagataaacgaattgctggatatgcgcatgatgccggacgtgcaattattattgttgtgaacaaatgggatgcaattaacaaagatgaaaaaacaattaatgtatggacagaagatattcgtgagcaattccaattcttaagctatgcaccaattgttttcgtatctgctaaaacaaaacaacgcttaaataatctattcccacttattaaccaagtaagcgataaccattcattacgtgtacaatcaagtatgctgaatgatgttattagtgatgctgttgcaatgaacccatcacctatggataaaggtaaacgactgaagattttctatacaacacaagtggcggtaaaaccaccaacgtttgttgtatttgttaatgatccagaactcatgcatttttcgtatgaacgtttcttagaaaaccggattagagaagcatttccatttgagggtacgccaattcgagtaattgctcgtaagcgtaagtaa

SEQ ID NO: 24746 - DNA, 207 bp, Listeria monocytogenes
atggaaaaattaacgttaaatgtagaaggtatgacttgttctcactgtgaggctcgagtaacgaaagctttatcagaagttaatggtgtgaaaagtgcagtagtgtcacttgatgaaggaacagctactgtcgagtttgaaaaaggacaagtaatggaagatgcactaattgatgctgtggaagaagcaggttatgaagtagcttaa

SEQ ID NO: 24747 - DNA, 483 bp, Listeria monocytogenes
atgattatttttgtttgggcacaagaccgcgctggaaatattggaaaagataacaaaatgccgtggcacttaccaggagatttgcagtttttcaaaaaaacgacgactgggaaaacacttgtcatggggcggaaaacctatgaatcgttaggaaaagctttaccaaatagaaagacaatcgtattgacacgagatcaaggtctcaagttagatgatgcagagatacttcattcaaaagaagctgttttagcccttgctgagacaggggaaccaatctatatagttggcggtgcagaaatctatcgtttatttatggatgtggcggatcagctgattgtgacaaaaattgatgcagagtttgaggctgatactgcgtttcctgaagtggattgggagaatttttccgaagtggcgaaagaattccatgaaaaagatgaaaaaaataagtacaattacactttttatacgtatgaaagaaattag

SEQ ID NO: 24748 - DNA, 816 bp, Listeria monocytogenes
atgttaacgaagaaacctgaaattaatacaattttacaagtaacaccagatcctcattcacttcctgctgcaatggcgacagaggatttgcacgtatactatggggacaatcatgcaattaaaggcgtcgatttaacgttccccgaaaataaagtaacagctttaatcggaccatctggttgcgggaaatcaacttatctaagagcattaaaccgaatgaatgatgaaattgacggttgtcgtatggaaggacaaattttatacgacggcattaatatcaaccgcaaagaagttgatttatacaatgttcgtaaagaaataggcatggtgttccaaaaacctaacccattcacgaaatctatctatgaaaatgttgcttttggacttaaacgccatggcatgaagaacaaaaaagaaatcatggaacgagttgaaaaaagtttgcgtcgtgcggctctttgggacgaagtaaaagatgatttaggaaaaagtgcgctatccctttccggtgggcaacaacaacgactttgtatcgctagagctgtcgcaatgcaacctaaagtattgctactcgatgaaccagcatctgcgctagatccaatttccacaagtaaaattgaagatttaattaatgagttaaaaaataaatataccatcattatcgtaacgcacaatatgcaacaagcagctcgggtttcagactatacttctttcttttatctaggagaagtcgtggaattctcaggaacatccgaactatttacgaatccacaagaaaaacaaaccgaagactatatttctggtaactttggctag

SEQ ID NO: 24749 - DNA, 966 bp, Listeria monocytogenes
atgacagaaactaggactgaaaaaaagaaaaaaacaacgtccacttttactaaagttatgaaaattgctagtgttgctcttttaggaattatcttcttctctataacaggattggcagcgaagtattacatcaccgttcaaaataccttttcaaaaataaatgtccctctagaatcaagtaataaaactttaagtgatttagaaaagaaaaaacctttctctgtgttactcatgggttcagatgcccgagctggtgaaaaaaatggtcgcgcagatacaattattcttgccacagctaataaacaacaaaatgccgtagaaatggttagtattcctcgtgatacaaaagtagactacggaaatggcgacattggtaagattaatgcctcttattccaacggtggcccctcaggaacagtttcagcggtcgaaaaacttatgccaggtgttcctgtagattatttcatttcaatcaatatggagggctttaaagacctagttgatgctgttggaggtattactgtttataacgatatcgacttaacagaagtaaatagcaaatttgttaaaggtaacattactttaaatggaacagaagctttacaatatgttcgtattcgtcatgaagacccccgtggtgactttggtcgtcaagatagacagcgcgatgtcattattggtattgcgaataaagttatcagttcatccggagtttccaatttcgaaagcattatgaaagctgttggcgataatttccaaactaatatgacgcttacagatattacatccatggcagcaaattattcttccgtacttaaaaacgttgattcccaagaacttaaaggtgaaggggaaatgatttatagcgagtcttacggatttgatttatattatttcgctcctgataaaacagatttagagcgaataattactatgtttaaaaagagtttagatattactgaataa

SEQ ID NO: 24750 - DNA, 825 bp, Listeria monocytogenes
ttgaacttaaaagatacagtgaaacttgcaaatggtgtagaaatgccccgtttaggatttggcgtatggaaagtgcaagacggcgatgaagcagtaaattctgttaaatgggcaatcgaagctggttacattagcattgatacagcagctgcttacaaaaatgaagaaggcgttggacaagcgattaaagagtctggaattaagagagaagacttattcgtaacaacgaaactttggaatgcggagcaaggttatgaatctactttggcagcgtttgatgaaagtttacgcaaattagaacttgattatgtagacttatatttaattcactggccagtcaaaggtaaattcaaagacacttggcgcgcttttgaaaaattatataaagacaaacgtgttcgcgcaatcggcgtatgtaacttccacgagcatcacttaaaagaattaatggaagacgcggaaattgctccaatggtaaaccaaattgaattacatccacaattaacacaagaaccattacgtaaattctgtgctgaaaacaacattgtagtagaagcttggtctccattaggtaacggcaaactgctttctaacccagaaatcaaagcgattgcagatgcgcatggtaaatctgttgcacaagttatcctacgttgggacttacaaatcggtgtcgtgacgattccaaaatcagtccaccaagaacgtattatccaaaatgctgatattttcgacttcgaattaaccgaagaagaggttgcaaaaatcagcggattaaataaagacgaaagaactggcccagatccagacaactttaatttctaa

SEQ ID NO: 24751 - DNA, 2397 bp, Listeria monocytogenes
atggctgaacaagaatcactcgccttatttgatgatacaacggaagaacttttcatgaagggcacgatgttgtctaccattttttacaatgccgaaaacctcttttctgtcgtacgaatattggtaaaagaaacaaatgcggattgggacgaaaaagatattatcgtaactggctttttcccagcactccacgaacaagaagtctacactttctacggaaaaatgcaggaacatgctaaatttggtcaacaattcaaagcagaccggtttcgtaaagaaatgccacaatcacgcgctggtttaattaattatctttctggagaactttttaaaggaattggtaaagtaaccgctgaaaatattgtggatacgattggcgatgatgctattacgaaaattttatccgatccgagtttgttaaacacggtacctaagttgccatccggtgcagcggaaagtttgcttgcttcccttagagaaaatcagggattagagcatgtgatggtcggtttaaacgaatatggctttggcccgcaattatccatgaaaattttccaggcctataaacaaaatgctattgaagtgttagagaataatccttataaattgattgaggacgtaaaagggattggttttcagcgtgccgatgagcttggacggaaactcggtcttggcgggaatcatccagaacggcttcgcgcagggattttatttatgttagattcggtttgtatgcaacaaggtcacgtatacatggagcaagaggttctgcttggagaagtgacatatttgctagaagaaagtgaaggcattcgaattgaccaaagtattttagtagctcaagtagaaaaattggccgaggaacaaaagattattacggaaaacacacgcgtatacatgccatcgctctattattcagagagtggctttgcatatcatgtgaagcgaatgcttaaacaaacagaataccaagaacaatttccacaatccgaatttttactagctctaggagaattagaagaaaggattggcgttcattacggagactcacaacgacaggctttagaacaagctttaatgtctccgatgctcgtacttactggtggtcctggaacagggaaaacaacggtcattaaagggatagtggagctgtatgcggaactaaatggtgtgagtcttgatccccatgcttacaaagatggagcgactttccccgttcttcttgctgctccaactggtcgtgccgctaaacggatgtcagagtcaactggacttcctgcgatgactattcaccgtctactcggaatgaatggtcaagaacaaatggatgatgatgcagaaagactgattgatggacgactgttgattgtggatgagatgtcgatggttgatatttggcttgctaatcaattattccgtgctttaccagcgcacatgcaagtggtactcgttggcgaccaagatcagttgccttcagtcggaccgggtcaagtactcaaagatattctgcaatctgaacaaattccaactgtagctctttcagatatttatcgccaaaaggatggttcttccattatcgaaatggcgcattatataaaagaaggcatgttgccagctgatttcaccaaaaatagcgccgatcgctccttttttcattgcacggtaaatcaaattggtgatgtggtcgaacaagtggtaaaaaatgcaaaaaacaaagggtttcgagcaaaagatatccaagttttagcaccaatgtatcgtggtcccgcaggcattgatattttaaataaaaaactacaagaaatcttcaatccaaatgatacagggcgtcgtaaagaagttcaattcggtgacataaagtatcgcgtgcatgacaaagtactgcaattgattaatcaaccagagaaaaatgtgtttaacggtgatatcggtgaaattgtttctataatctacgccaaagaaaataccgaaaaacaagatctgattgtcgttcaatttgaccaaacagaggtttcttactataggcaagaatttaatcaattgacccatgcttattgttgttcgattcataaagcgcagggaagtgaatttccgattgtgattatgccgattgtccgcagttactaccggatgttgcgtcgcgatttactctacactggagtaacgcggagtaaacaatttctcattctttgcggggaagaagaagcttttcgaatggggatagaacgaattgatgaaaataagcgtaatacaacactctctgaacgtttaatgagcgaagatgttttattagaacaaatgacgaataaacgaattctcactgctgaaaacattacggaaattgatccgatgattggaatggaagggattactccagaacagtttatggtaggataa

SEQ ID NO: 24752 - DNA, 1452 bp, Listeria monocytogenes
atgacgactagcccattttccttaaaaagtcgttctttgaaattcaaatggacttttggcgctagtgcagctatttttctaacttttttcttattttcctatgccatttaccaaggaattgggcaaatgttgttaaatgaagaagaaccagaagtaaaagaactgcttctagcaacaacgagtacgttaacgaatcaagatttgaccgataatgaggaaattaaatatttatttaataatgataaaaccgttaatcgcaaactccaagatcaagtgattaatttatatgataaagatggccattttattaataagtattatttttcaagaagtcaagatatcactagcattgacttttcacagtattttgttagcggtacagataagtttattatgaataaaccaaccattgatgggcagaagatgatgacggcgcaaatgccgattgtagcagatgataataccaccgttatcggttatgcacaggtggtaaatccgctcacttcctataatcggatgatggaccggcttctcgttacgatgattttacttggggcagtggcgctctttattagtggaatgctcggctacttgctagcacaaaatttcttaaacccactgactcgtctagctcgaacaatgaatgatattcgtaaaaatggttttcaaaaacgaatcgagacgaaaactaattctcgcgatgaaattggcgaattgaccgttgtttttaatgatatgatgacgcgaattgaaactagtttcgaacagcaaaagcaatttgttgaggatgcttcccacgaattacggacgcctgttcaaataatggaaggtcatttaaaactcctcactcgttggggaaaagatgatccggctgtacttgatgaatccttaaacgcctctttaacggaattagaacgtatgaaaaaattagtacaagaaatgcttgatttatcaagagcggaacaaatttcacaaacaaaagaattacaaattaccgatgtaaatgcaacagtagaacaagtaagacgtaattttgaagtgatgtatgaaaatttcacgtttaccttaaaagaagatgatactgatttacgagcacttattcaacataatcatttagagcagattttaattattattatggataatgccgtgaagtattcaggtgacggcaccgaagtggatatgcatgtctataaagaacaaaagcaaatccatattgatgtgcgtgattacggggaaggtatctcacaagaagagattgataaaatattcaatcgtttctaccgtgtagataaagccagaagccgcgaaaaaggtggtaatggcctcggacttgcgattgctaaacaattagtcgaaggatatttaggaacgattaatgcggttagtgagccagataaaggtacaaccattaaaattacacttccttacattgaaccaaaatccaaataa

SEQ ID NO: 24753 - DNA, 2016 bp, Listeria monocytogenes
atggctgataaaaaaaggtatgaagaactaatcaacatacttgatcaatacagctatgattattatgtaattgataatccaacagtagaagatgccgaatatgatcagaagatgcaagaattacttaaaatagaagaagcgcatcccgagtgggttacacctgagtcaccgtcgaaacgagttggcggagaagttttagaaggtttcaaaaaagtagcacatgacaccccaatgttaagtcttgccaacgcttttaaccatgaagatttggcggattttgaccgccgaattcgcgacaaagtgggcgatgatattgcttatatgtgcgaacttaaaattgacggactagcagtatcccttcaatacgaaaatggtaaatacaaacaaggtgctacccgcggtgatggaaccattggagaagacattaccgctaacttgcgcacgattcgttccattccgatgaaacttcaaaaggattattccattgaagttcgtggtgaagctttcatgccgaaacgctctttccaaaaactaaatgaaattcgcgaagaagaaggccagatgttatttgctaatccgcgaaatgctgcggctggatcacttcgacaattagacacaaaaattgcagcgtcaagaaatctcgatatcttcctgtatgcagtagctgatttcggtgaaatgggcgttgaaacacatagcgccggtttagatatgcttgaaacacttggtcttaaagtcaataaagagcgccggctttgcagtagtttagaagaagtatatgcttacattgacgaatggacagaaaaacgcgccgacttagcatatgatattgatggcattgttctaaaattaaacaacttagaacaacaacgccaaatgggaaccaccgttaaatcacctcgttggtcgattgcttataaatttccagccgaagaagtaccaactaagttactcgacattgaattaaatgtaggtagaacaggtgtaataactcccaccgccgtgttagaaccagtgagagtggcagggacaaccgttagccgtgcttcccttcataatgaagatttaattacggaaaaagatatccgcattggcgacactgttttaatcaaaaaagctggcgatatcattccagaagttattaaaagcatcaccgaagaacgtagcggaagtgaagaacctttccatatgccaaaaaaatgtccgacatgcgacagtgaactggttcgtttggaagaagaagtggcgctaagatgcattaatcctaagtgcccagctcaaataaaagaaggtcttatccactttgtttccaggaatgcgatgaatattgacggacttggcgaaaaagtaattattcagttgttttcacagcatttaattaaagatgtagcagatttgtttttcctttcgaaggagaaactgttagaattagaaagaatgggtgagaaatcagtaactaatttactggcatccatcgaagcaagtaaacaaaactcgcttgaaaaactactttttggcttaggaattcgccatgttggtgctaaagctgccaaatcacttgccgttcatttcgaaacaatggataatttaaaagttgcggacaaagaaacactgacgagtattaacgacattggtgaaaaaatggcagacagtattgtgacctattttgcgaatgaagaagtacatgatttattagaagaactaaaaagggctggcgtcaatatgacctatacagggccaaaactagaagatatgtccgaggaagaacttgttttcgcaggtaaaaccgttgtcttaactgggaaactagagaagttaacacgaaatgatgcaaaagcactaatcgaatccctcggagggaatgtttctgggagcgtcagtaagaaaacagatgttgttgtagctggcagtgatgctggttctaaactagccaaagctgaagaactagccattcctatttggtcagaagaagacttaatagagtacttaccagacgaaggtggattaaacgaatga

SEQ ID NO: 24754 - DNA, 1806 bp, Listeria monocytogenes
atggaaaattattctcaccgctttcaggtgaacttggctggtatgattgacattctctcaaaccacctttatgacgaaaaagatgtttatattcgcgaattgctgcaaaatgcaaccgatgccattcgtgctaggaaaaaaattgattcaactttagaaggtaaaatccatgcatctctaactggagataataatgaaaaaacattaattatagaagacaacggcattggtttaacggaagatgaggttcacgcttttctagctactattgctaattcatcaaaaggcgaaaaaaactttgatggagaaagttccaatgactttattggtcgttttgggattggtttactttcttgttttatcgtgagtgatgaaattgtaatgatttctacctctcaaaaagatggcggcacaaccgagtggcgcggaaaagcggatggtacttattccgttcgcaaaatagaaactgacactcgcgaacctggtacgcaagtgtatttacgtttacgcgccggtttagaagatcatcctgaatgtgaggacgtcgaatatttaatcaatacactgaaaaaatatggtgcttctttggaaagcaatataatagtagaaatgaatggtttagaggaagaaattaatagttggaccaaacagttttctgataaagaaaccttgtcaacactttcgagagaacaaattattcagtacggcgaatatatccttggaacgcatttccaagactatttcttaattgaaaatgagtcaggaagaacgtttggtattgcttatatgattccacatgctgttcaaatgaatgctatccgaaaaaatacggtatttctaaataagatgtttgtcaccagtgaagcaaataatattttaccagattggtcattttttgctaaatgcgtgatttggacggatgaacttcaacccgttgcttcccgtgaagcattttataaaaatgagcggttaactagtgttgcaagtgagcttggcgttgctttaaaaaaaggaattgaaactcttccggaagaagcgctgatgaaattattagctacacattatcttggttttaaagcacttgcgagtgaagatgcaccatttttaaaattaatttatccttatcttccagttcgaactttaaatggcgaagaaaaattaggtgatattatcgctaaaaatgacgtcatctattacacttactcggtcgatgattttagacaaattaaggatattgcgagatcaagcggcatgacacttattaatggtggttattcctacgactcgccaattttagcgcagttaagttattttgtggaaggaactgaatttgttttaatccagccggaagaaatgacggataaattacgtccaatgacagcggatgaaaaacaagcgtaccaacctattttgacagaaatgaatagtatgatggctgagtttgacaccgatgtgttaatcaaacattttgagccaaaagatttaccaattattttcatccattctacggcaacacaagagttacgcgaactagaacgcgcagtagaagaaacaacttccgtattcagtgatattttagagagcattcaaaaagaacaagaacctgccccgctcgctcacttgtatttaaatttagataatgagctgattaaacgacttttcacttctgaaaaaacagtgaaagaattgtctgtgattgtgaatgtactttatatccaagccttactattagggcattatccgcttaaacggaaagaaatggtattaatgaaccaaaatatgttacgaatcttagagatgctatag

SEQ ID NO: 24755 - DNA, 990 bp, Listeria monocytogenes
atgtgcacaagcttcgtattagaaacgttagatggaaaacatttattatcaagaacgatggattttgcttttattttggaggcgaacccaacaattagcccaagaaattatggatggaaatcttctacagacggtgccaattatattaatagatatgcatttgttggagcgggaagagagttagataaatacattttcgcagacggattgaatgaagaaggattaagctgtgcatctctatatcttccaggagaagcagtttatgcgccagcaccagtggaaggaaaaatcaatttagctccacaagaatttttgctttggctgttaggaacttgcgcaacgattaaagatgtggaagcaaagttatcggttataaacttggtggatcaaccagtaccgttacttggaatcacaacaccattacactggattttcacagacaagagtgggcgttgtgtagtgattgaaccaacagaaacatcgcttcgtataaaagaaaaccctgtaggagttatgacaaatacgccacgcatcgaatggcatatcgagaatttacgcaactacacaggtttacaagcaacacaattagcgccggtgaagttcggagagtatatggctaaaccattttcgcaaggtacaggaacaagcaaattaccaggtggttatactccgccagaacgttttgtccgtgcggcatacttgaaagaaaatattataaaagcgaaaaacgaagaagaagctatcacaaatgtgtggtatgtcttgaacagtgtccgcattccgaatggagcggtaattaaagaaagtggtgaccctgatttcacacaatatgtggcatctatgtgttcggaaagcaaaacgtactatttcacctcatacgaaaacaaccaaatcaatagtgttactttgtcgaaggaagttatagaaaatatgaaagaacctactacctatcaagtggataaagtgcaaaatgtgaataaattagtctaa

SEQ ID NO: 24756 - DNA, 882 bp, Listeria monocytogenes
ttgcaagatttaaccctttttttagaacaatataaaaaagtgattgatgagtcgctttttaaagaaataaacgagcgaaatatcgaacctagactaaaagagtccatgttatattctattcaagcaggcgggaaacggattcgtccaatgctagttttcgctacgcttcaagctttaaaagtaaatccgcttttaggtgtaaaaaccgcaacagcgttagaaatgattcacacatacagccttattcatgatgatctaccagcaatggataacgatgattatcgtcgaggcaagtggactaatcataaagtttttggcgatgcaactgcgattttggcaggagatgctttactaacgctcgctttttctattttagctgaagacgataatttatcttttgagacacgcattgctttgattaaccaaattagttttagtagcggtgcagaaggaatggttggtggtcaacttgcagacttggaagcggaaaacaaacaagtgacgctagaagagttatcatccattcatgcacgaaaaacgggtgaattattaatttatgctgtaacctctgcagcaaaaattgcggaagctgatccagaacaaacgaaacgcttacgaatttttgcagagaatattgggattggatttcaaattagcgacgatattttagatgtaattggtgatgaaacgaaaatgggtaaaaagacaggggccgacgcttttctgaataaaagtacctatcccggattactcacgcttgatggggcaaaaagggcattaaatgagcatgttacgattgcaaagtcagcgctttcagggcatgatttcgatgatgaaattctcttgaaacttgctgatttaatcgcacttagagaaaattaa

SEQ ID NO: 24757 - DNA, 540 bp, Listeria monocytogenes
atggaattacacgctacaacgatatttgctgttcaacatgacggaaaagcggcgatggctggtgacggtcaagtaacgcttggagaatcggtcgtaatgaaacacactgccaaaaaggttcgccgtctttttcatgataaagtaattgcagggtttgcaggttcagtcgcagacgcttttacattatttgaaaaatttgaagcgaaattgaatgaatataatggtaacttagaaagagcgtcagtcgaacttgctcaacaatggcgtagtgatagtgttttacgtaagttagaagctatgttaatcgtgatggataaagatacattacttttagtttcaggaacaggggaagtaatagaaccagacgacggcattttagcaatcggttctggtgggaattatgcgctggcagctgggcgagcacttaaaagacataatggcggtcagatggaagcaaaagatattgctcgtcatgcgctagaaatcgcttctgaaatttgtgtatttacaaatgatcatattaccgtagaagagctttga

SEQ ID NO: 24758 - DNA, 2691 bp, Listeria monocytogenes
atggaaacgaatcgtccaagtccggatgcgctactggtgaatttgcaagaagaaacagattcatctgtggggaaattaaaaatatattttggttttgcggcaggtgttggaaaaacgtatgccatgttaagtgacgctaaagaccaattagcagcaggtgtggatgtcgtggcgggttatattgaaccccatgcccgcgtggaaacactgagaatgctagaaggaatcccgattatttcacctaaagcaatcaaccataaaaatattgcgctcaaagaattcgatttggacgaagcgttgaaacggaagccggaattgattctggtagacgaacttgcacatacgaatgcagcgggcgtaagaaacaagaagcgtttccaagatgtggaagaactactccaagcgggaatcgatgtatacacaaccgttaatgtgcagcatatcgaaagcttgaatgatatcgtcgaaggtatcaccaaggtcgctgtgcgcgaaacgattcctgactatgtttttgatgaagcggaccgagtaaaactaattgatattgagccagatgagcttttgaaacggctcgaacaaggcaaaatctatcaaccagaacgcgcgcaaacagctatgcagaacttcttcactagagaaaacttaaaactcttacgtgaaattgcgatgcgaaaagcggccgaccgaattagccatgaatacgaccaaactggtgtttatccagaaaaacgtgcaagtagtaaatggctcgtttgtattgggacatcgccttcgtcagcaaaactcattcgctggacagcacgcacagccgaggctttccgcgctccgtggactgctctttacattgaaaatgaagaaaatgattatatgaccaaagcagagaaaaaatgtttacgggaaacgatggaactcgctgaacgacttggtgctgagattgttaccctcgctgggcatgatattgcggaaacagtagctgagtacgctcgtttgaccggtgtgacaaatattgttgttggtaagtcacgtcggcgtatggggttacgttccctatttgaggaagattttgaagaccgacttatcacgcatttggataacgtcgatatgcacatcatcccttcaagccatccaaaagcaaaaaaacggcgaatgaaaatgcggtttaaaagtttcctcacatggcatgacatggcgaaaatggtgttattattagcgctagcaacagcgatttgtgttggcttaagtgaatttggcattggcgaccaaaatgtgattatggtgtatattttgtctgttttaattatttctcgcgtaacaagcggttatgtgtacggtgtcctaggttctatcattggcgtcatgttattcaattttttcttcacgtcgccgctttatacatttaacacaattcaggcagggtatccggtgacttttgggattatgcttttggttgcattgattacgagtgcactaactgttcgaatcaaaacacaagccagccttgctgttgagcgagaacgtcgaaccgaagtgctttatgaaatcaataaacagcttttggtaacgcgcaatttaaaaggaattattaatcttaccaatgaatatattttgcatttatttagccgttccgttattttttattctgctgatcctgccaaaagtaatgaagggattttcgtacaagcagaaggaaaagaagatgcgagcgcgcttcttagtgcggatgaagaagctgttgcccactgggtatttaaaaacaaaaaacgagcgggcgctgggacggatacgctaatgggagcgtttggttactatatgccggtgatgtcacaaggaaaagtgcttggtgtcatcggggtttcttgctccccggaagaaggtccgctcacacaagataaccggatatttttacggatgattagctctcaagtcgcactagctttagagcgccaatatttatcagaagaacagcgccaaatcgttattgaatcagccaaagaaaagatgagaagtaatctgctgagggcgatttcacacgatttgcgaacgccgcttacaggcatcattggcgcgagttccgccttacttgaaaaagaagatgaattagacaaagaaaccgagcgaaacttaattagaggtattaaagatgattcaggctggctcatccggatggtcgagaatttgctatctgtgacacgaattagtgaaggtctggtgagcttggaacgagcgccggaagccgtagaagaaattgttggtgaggcggttgggcgcataaaaaaacgtttcagagaccgaactattcacgtgaaagttccgcgtgatcttttgatggttccgatggatgggacactgattgagcaagtgcttattaatttaatggaaaatgcgctacgtcacggtggaactggtgcagaagtttgggtagacgtgacgaaaacgaaacaaagtgcgattttcagtgtacgcgataatggaaaaggaattccggaaaatcgtttggcagatttatttgatacttttgcggtagaggcaagagaacgctcagacatgtcccgtggcttggggcttggcttatcgatttgtatgtcgattattcgggcacacgacggaactttggaagcaaaaaataacaaacatggtggggcgacattctggttcactttgccactagacggaggagatggaaaatga

SEQ ID NO: 24759 - DNA, 177 bp, Listeria monocytogenes
gtgccgtggacaaaaaacgattatccggattcgtggaaaaatctaaagaaaacagaacgagaaaaagctattgaaatcggcaatgcgctattaaaagatggctattcagaaagccgcgccatcccaattgccacttcgaaagcggaagaatggtataaaaatcataaggaatcataa

SEQ ID NO: 24760 - DNA, 837 bp, Listeria monocytogenes
gtgaatccagcatattttgttttgttagtagaagagctaaaaacaaagtatcttgtcaaagatatctgtcagatactacaagtacctttatctacctattatcgctggaaaaagaaagatttctcacagagctcattggagaaaaaaatagggcagttatgtaaagcatatcagttcacttatggttatcgaaaaatcgccgcattaatgaaacaagaagaacaagttggcatcaataaagtacagcgtattatgcaaaaatatcagtggcaatgtcaggtaaaagtaaaaaagaaaaatcgaccaggctccgcctactatcagacagaaaaccacttaaatcgaaactttcaagctagtcagccgctggaaaaattaactaccgatatcacctacctttatttcggagactgccgtttatatttatcaagcattatggatttgtataatggagaaatcgttgcctactccattggcgaaaaacaagacacagaattagtgctagatacattaaatcagttgtcccttccagaaggaagtttacttcatagcgatcaaggttcggtgtacacatcttatgaatattatcagtgctgtaaaaagaaaaacgttatccgcagtatgtcccgaaaagggacacccgcagacaacgctcccatagaatgtttccattcctcgctaaagtgcgaaacattctaccataaaacagcgtataaatacgctaaatctattgtaatccaaatcgtaaaagattacattaaatattataacgaaaaacgaattcaacaaaaattaggctaccaatctcctattaatttcaggaaacaagcagcctaa

SEQ ID NO: 24761 - DNA, 534 bp, Listeria monocytogenes
atggaaaaaaattggtatgtagttcatacttactccggttatgaaaataaagtcaaagcaaacttagaaaaacgtgtagaatcaatgggcatgtcagataaaatctttcgcgtgatcgtaccggaagaagaagaaacagaagtgaaaaatggtaaaacaaaaacaattaaacgtaaagttttccctggttatgtactagtagaaatcgttatgacagatgactcttggtatgttgttcgtaatacccctggtgttacaggattcgttggttcagcaggttctggatcaaaaccaacaccattacttccagaagaagcggatcgtattcttaaaagcatgggcatggtggaaaaacgtgcggaagctgactttgaaattggtgaaacagttatggtcaaagaaggaccattcgctgacttctccggtaaagtggacgaaatggacaacgacaaaggtaaagcaaaagtcatggttaacatgtttggacgtgaaacgccagtcgaagtggatttcaaccaaatcgaaaaactttaa

SEQ ID NO: 24762 - DNA, 930 bp, Listeria monocytogenes
atgtccattacgaacttattaaatattaaatatccgattatccaaggtgcgatggcacaaattgccaaagctccacttgtagccgctgtgtctaatgcgggcggtttaggaattatcgcttctggcggaatgactgccgacatgctacgcgaagaaatccaaaaaacaaaagcactgacagataaagcatttggcgtcaacttaatgctaatgatgaccaatattgccgaattaaccgaagtaattattgaagaaaaagtgggaatcgttacaaccggagcgggaacgccaaaaacgttcatgccaatttggaaagaagctggaattatcgtgattcccgttgtcccatccgtgatgattgctaagcgtatggaaaaaatgggcgcagatgcagttatcgcagaaggaacagaagcaggcggacacgtcggcgaaacaacaacaatggcacttttacctcaaatcgtggatgctgtaactattccagtcattggcgcaggaggaattgctgatggccgtggaatcgttgcagcgctagctctaggtgcaaaaggtgtccaaatcggtacacgcttcctagcaaccgatgaatgcccagtacacccagacttcaaagcagccgtgattaaagcttccgaccgcgacacaatggttaccggacgaaaagcaggcgcaccagtccgctcgattaaaaacaaaatgatcaaagaatacatccgtttagaagaagaaaacgccgatcgcgacacgttagaagagctaactttaggttctttacgaaaagcagtacaagaaggcgacacagacaacggctccgtcatggccggtcaaatcgctggcttaattacagaaatcaaaccttgtaaagatgttatcgaagagatgatgacagatgctaagaaagtgattgctgggttagaattaaaataa

SEQ ID NO: 24763 - DNA, 849 bp, Listeria monocytogenes
atgaaatggttgagttatctgtatgaaggagatttggcttatggtattttaacacctgaaaataaaatcatccctgctggaacgattttttcgaatccgccagctacccttttagattttattaaagaaaaaccgcttgttccagaattaacaggaattgacgggcatatcgatttagccgaagtggaaattcaagtaccttttgttccgccaaataacattattgcaattggaaaaaactattataatcatgtgctagagatgggaagcaaggaagacgtcccagagcatattcttgtatttacaaagagtgctaatagtctattaccgcataacggcaacattgagttacatcaaaatataacgggccaattagattatgagggagaacttgctgttattattggtgagaaagtaagagacatatctgaacaagaggctttatctgccatctttggatttactattttaaatgatattacagctcgcgatcttcagaaaaaacataaacagttttatttagggaaaagccttgatgcaagttgcccgattggtccattcgtgttggaaaataacgcaaacaaagaacctgtttttcacattgaaaccaaggttaatggcgaagtaagacagtctgactctaccgataaatttatatttggcttagcaagaattatttctgatttatccaaagggcatacgttgcttccaggggatataattgctacagggaccccaagtggtgtgggaaatggtatgacacctccgacttttctacaagatggggacattatcgaaattactattgataaaattgggacactgactaacaaagtaagaaaatcttaa

SEQ ID NO: 24764 - DNA, 597 bp, Listeria monocytogenes
atgacaattaacttaattctgctttctttattagcctatgtgattggttcgataccatctggtttatggattggcaaaattttctacaaaaaagatattcgcgagttcggtagcggtaacttaggggcgacaaattccttccgagtgcttggtatcaaggctggtagcattgttacagtaatggatattttaaaaggaactgttgcaacgttgcttccattcttctttcaattgaatgtagatcatcatttctggttgctaactggagcatttgctattatcgggcatagtttcccacttttcgcaggattcagaggtgggaaagcagtagctacttctgccggagtcattctcgcctatgcgccattactctttgtagccgcacttgtagtcttcttagttacactaaaacttagtaaatatgtatctctcagttcaatgattggagcacttgctgcattaattatttctcttttcatgggggactggattttaattgttctcgttgcttgtatcgcgctctttgtaatttggcgtcaccgagcaaatatcactcgaatacgtaacggagaagagccaaaaataaaatggatgtaa

SEQ ID NO: 24765 - DNA, 867 bp, Listeria monocytogenes
atgattaaagttattgcttcagacatggatggcacactacttaactctgatatcgagattgcacaagaaaacgtcgaggcaatcgaaaaagcccgcgccaaaggaattcatttcgttctttgcaccggacgtatgtatgacgatgcaatggggttaattaataaagctaatttatatgcaccagcaatttgtatgaatggtgcggaaattcgtgacgaacacggcaaaatcattttgcaacatccgatcgatagaaacctagcaagaaacacttacaacacgctgactgaattaggtatgtataccgaatttttcactgatatgggcccaatcacaacagataaagctcgtggcaaagaatttatgattgaaatgcacaaacgcatccacccagacgttcccgcagaaaccattatggataaagtagaagaacgttttgaatccaaggacgttcacgaaattcctgatgtagagcgtattttaggcaataaagatttaaccattctaaaattcatttccttctcttctgataaagacattcttgcaaaagccaaacaaaaactagaaaaagattcggaactatccgtaacatcttctttctccgataatattgaaatcacccaccgcgaagcacaaaaaggtatttctttacaatattacgtagaaaaattaggcgtaacacttgatgaaacttttgcaattggagataatatgaatgatatttcgatgctaaaaatggctggttacagtgtagctatgggtaacggcgaagaagaagtcaaagaccttgcagaacacgtaactctttcgaatgatgagcacggcgttgcagcagccatctataaaatgttagaaacaaatgactaa

SEQ ID NO: 24766 - DNA, 387 bp, Listeria monocytogenes
atgaaaagaagagaggcgcgcgagaaagcacttcaagcactattccaaatagagctaaacgaaatgtcgctagatcaagctattaaaaacatcatggaagacgagcaagacgactatatggaaaaattagtcgaaggcgttatggcaaataaagctgaaattgatgctatcattgagcctaatttagataattggcgcatggatcgtttgagtaaagtcgatttatctttacttcgactaagtgtttatgaaattaagtacttggatgatgtgccaaatagagttagtttgaatgaatccatcgaaattgcaaaaatttacagtgatgaaaaatcaagtaaatttattaatggcgtacttgctaatattgcaccggaagataaataa

SEQ ID NO: 24767 - DNA, 942 bp, Listeria monocytogenes
atgaatcaaaaaatagtcgtggcacttggtggaaatgcaattttatcgagtgatgccagtgctgaagcgcaacgaagtgctcttgaagaaacagccgaatatttggtgcaatttatcgaaaacggggatgatttaattatttcgcatggaaatggaccgcaagtaggcaacctgatgctacaacaacatgcgggagcttctgaaaagaatccagcaatgccgcttgatacgtgtgtcgcgatgacgcaagggagtattggctactggatgcaaaatgcgctagataaagcatttttaaaacacgggctagataaagtagcggtttcattaattacacaagttgttgtggataaagatgatcctgcttttgaaaaaccaaccaaaccaattgggcctttccttaataaagaagaggctgaaaaggaaatggcagaaactggtgcaatctttcttgaggatgctggccgaggttaccgtaaagttgtcccatctcctcgcccacttagtattaaagaacatcagattattaaacaattggttgatagtggcgttgtgactatttctgctggtggaggtggggtttcggtcgttgaaaatggccttgatttatctggggtagaaaccgtaatcgataaagattttgcttctgaaaaacttgcagaactaattgatgcagatttgttggttattttaacaggggtggaaaatgtttatatcaattataatcagccaaatcaaaagaaacttgaacaagtgaccgtttcagaattggaaaaatatattgatgagaaacagtttgcagcaggaagtatgttgcccaaaatcgaagcagcgacagcttttgtcaaagaaagaccacatgccaaagcaataatcacatcgcttgaaaatattggcgccatgctagaacgtggggcaggaacagtgattgttgcaggctag

SEQ ID NO: 24768 - DNA, 345 bp, Listeria monocytogenes
atgaacaaactgattgatgaaatcacaaaaagtcaactaaacccagatgttccaaatttccgtccgggtgatactgtacgtgtacatgcgaaagtagtcgaaggtactcgcgaacgtatccaattattcgaaggcgttgtaatcaaacgtcgcggagctggaatcagcgaaactttcactgttcgtaaaatttctaacagtgttggcgtggaacgtactttcccagtacatactccacgtatcgcaaaattagaagttatccgtcgtggtaaagtacgtcgtgcgaaactttactatctacgtaacctacgtggtaaagcggctcgtattaaagaaattcgttaa

SEQ ID NO: 24769 - DNA, 1698 bp, Listeria monocytogenes
atggcgaaactagaaaaagaccaagaaaaagtaataacacaagggaaatcaggagcggatttagttgtagacagcttaattaatcaaggtgttacgcatgtattcgggattccgggagcgaaaattgataaagtttttgatgtgatggaagaacgtggaccagaattaattgtcagtcgtcatgaacaaaatgcggcgtttatggctgctgctatcggtcgtctaaccgggaaacctggtgttgtacttgtaactagtggacctggcgcatcgaatcttgcaacagggcttgtaaccgcaactgcagaaggagatccagtcgttgcgattgctggtaacgtaacaaggcaagaccgcttaaaaagaacccaccaatcaatggataatgcagcacttttccgtccgattacaaaatacagcgaagaagtagttcacgccgaaagtattccagaagcaatcactaacgcttttcgctcggcaacagaaccaaaccaaggcgctgcttttgtcagtttgccacaagatatcgtgaacgaaccaaacgtaccagtaaaagcgattcgcccacttgctaaaccagaaaatggtcctgcttccaaagaacaagttgcaaaacttgttacacgtttgaaaaaagcgaaattaccggtattgctattgggtatgcgagcatctagtccagaagtaactggtgcaattcgtcgcttactccaaaaaacaagtatcccagtagtagaaactttccaagcagctggcgtcatttcacgcgacttagaagataacttctttggacgtgttggtctgttccgcaaccaaccaggggatattttgttaaataaagctgatttagttattacagtgggttatgatccaattgaatacgatccaaaagcttggaatgcctctggtgatagaacgattgtccatttagacgacattcgcgctgatattgatcattattaccaaccagtgacagagctagtcggaaacatcgcgcttactttagaccgagtgaatgcgaaattcagcggtttagaattagcggaaaaagaacttgaaacattaaaagaacttcatgctcaattagaagagcgagatgttccgccagaaagtgatgaaactaaccgagtacatccattgtcggtcattcaaacactacgttcggcaattgatgacaacgtaactgtgacagtcgacgttggttcacattatatttggatggcacgtcatttccgctcctatgaaccacgccgtctgcttttcagtaacggtatgcaaacgcttggtgttgcgcttccttggggaattgctgcaacacttgtacatccgggtgaaaaagtggtttcgatttctggtgacggtggtttcttattttccgcgatggaattagaaacagctgtccgcttgcgtgcgccacttgtacacctagtatggaatgacggaagctatgacatggttgctttccaacaaaaaatgaaatacggcaaagaagcagctgttcgttttggcgatgttgatatcgtaaaatttgcagaaagtttcggagcaaaaggtcttcgcgtaacaaatccagcagaactttctgatgtgttaaaagaagcgcttgaaacagaaggacccgtcgttgtagatattccaattgattaccgtgataacatcaaacttggcgaaactttactacctgaccaattttattaa

SEQ ID NO: 24770 - DNA, 1293 bp, Listeria monocytogenes
atgtctattattactgaagtttatgctcgcgaagtcttagattcccgtggtaacccaactgttgaggttgaagtttatactgaagctggtgcgtttggtcgcgctttagttccaagtggtgcttcaactggtgaatacgaagctgtagaattacgcgatggcgacaaagctcgttaccttggaaaaggtgttttaaaagctgttgaaaacgtaaacgacattattgctgacaaaattatcggttttgacgtaactgaccaaatcggaattgacaaagcaatgatcgaacttgatggtacacctaacaaaggtaaattaggtgctaacgctattcttggtgtttctttagctgctgctcgtgctgctgctgacgaactaggcgtacatttatatgaatatcttggcggagtgaacggtaaagttcttccagttccaatgatgaacatccttaacggcggagaacatgctgataacaatgtcgacgttcaagaatttatggtaatgcctgttggagctccaaactttaaagaagctctacgtatgggtgctgaaatcctacacgcacttaaagctgttcttaaaggtaaaggcttaaacactggtgttggtgatgaaggtggattcgctccaaaccttaaatccaatgaagaagctcttgaaacaatcatgcaagcaattaaagatgctggttacaaacctggcgaagaagttaaacttgcgatggatgctgcatcaagtgagttctataaccgtgaaactggtaaatacgaacttaaaggtgaaggcgtaactcgtacttctgaagaaatggtaacttggtatgaagaaatgattactaaatacccaatcatctctattgaagatggcctagacgaaaatgactgggacggattcaaactacttacagaacgtattggtgaccgcgttcaattagtaggtgacgatctatttgtaactaacacaactaaacttaaagaaggtatcgaaaaaggtatcgctaactccatcctaatcaaagttaaccaaatcggtactttgactgaaacattggatgcaattgaaatggctaaacgcgctggctacactgcagttatctctcaccgttctggtgaaacagaagattccacaatcgctgacattgcagtagctacaaacgctggtcaaatcaaaactggtgcacctactcgtactgaccgtgttgcaaaatataaccaattactccgcatcgaagacaatttggctgatcttgctgaatatcatggtaacgacactttctacaacttaaaaaaataa

SEQ ID NO: 24771 - DNA, 624 bp, Listeria monocytogenes
atgccaaaattaagcttacttaaacaagatggaacaaacgctggcgaaattactttaaacgacactgttttcggtatcgaaccaaatgaaaaagttgttgttgatgtgattttgagccaacgtgcatccctacgtcaagggactcacaaagtaaaaaatcgttcagaagtacgtggtggcggacgtaaaccatggcgtcaaaaaggtacaggtcgtgcccgtcaaggttcaatccgttccccgcaatggcgtggcggtggtgtcgtattcggcccaacacctcgttcatatgcttacaaattacctaagaaagttcgtcgtttagcgattaaatcaattctttcttctaaagtaaatgaagaaaaattagttgtacttgaaggtttgactttcgatgcacctaaaacaaaagaatttgcggcttttcttaaaaatatctctgtagatactaaggcactaatcgtagttgctggtgaaagtgaaaatgtagaattatctgcacgcaacttacaaggcattacagttattccggctgaaagtatctcagtactagaagttgctaaacatgataaattaattatcactaaagcagctgtcgaaaaagtagaggaggtgctcgcataa

SEQ ID NO: 24772 - DNA, 786 bp, Listeria monocytogenes
atgagcgattccatatccgttataaaagaaaaattaagcgaagtcacttcagaaaatgatccttttttccaaaaatgtatacaggatgaacgtaaaggtgtagaaaaacttgtgcaatccgtgagacgaaaatgggaaaaggaagcaaaattacttgtgaaacttaaagaaatgacacaatatgaaactgatttatttcaacaaggatacaaatatattgctggagtagatgaagttggccgtggcccgcttgctggtccagttgttgctgccgcagtcatcctgccagctgatttttctgttgttggaataaacgattctaaacaattgagtgaagcaaaacgtgacgcattgttcgaaaagataaaaaaagaagcaattgctatcggagtagggattattgaacatgatgtaattgatcaagtaaatatttatgaagcgacgaaacttgctatgtgtgaagcgttaaatcaattaacaccagaacctgattttgttctaatagatgcaatgccactaagatataccgaggcagaactatctcttatcaagggggatacaaaaagcatttcgattgctgcagcgtctatcatcgcaaaggttacaagagataggttaatgcagatgtacgatgaaaagtatcctggctatgattttgcaaacaatatgggctatggcacaaaaaaacatttacttggtttagatacaattggtatatgtcctattcatcgcatgagtttttcgccagtgaaagaatcaaagttacattttgacagcttaaattaa

SEQ ID NO: 24773 - DNA, 576 bp, Listeria monocytogenes
atgattgaaaaaacaattatggaacgtcgtagcattaaaaaagcgaacgacgagccaatttcaagagaaacggtgaacacgattttagagcaagctgcctatgcgccttttcacagcaaagtagagccgtggaatgtatacgtattgcacacacttgctgaaaaagagcgttacatcgagaaaatcattgagtttaacgaacgcgaacaaggggttagtttttctgaagcagagattgcggatttaaaagcaggctatgcgaagaaaattattacgccgccatacttactcattgtgaccacgaatattatcggtcacgggaaaaaggatttcgaatcaatcggggcaactagtgcatttatccaaaacattcaattacttggctgggaagcgggaattgggatgatttggcggtcaaatagatttatttttgatgcgaagtttgcggatgatttaggtatccctgctgagcaaaaaattgtcggaactttgcacttaactagcttagccgaagttcctgaagcgaaaccgcgccgtccgttgaatgaatgggtgaagaatttagccgatttgtaa

SEQ ID NO: 24774 - DNA, 1731 bp, Listeria monocytogenes
atgaattggcaagaagaatatcaaaaatgggttgctaatgacaaattagatagcacattaagaaaacaattaacgaatatggagacaaatgaaaaagaacttgaagatagtttttatcgtaatatggaatttggaactgctgggatgcgtggcgtactaggtgctggaacaaaccgtatgaatatctatactattcgtaaggcttctctaggtttggcgcaatttgtggcggagaacggggaagaggctaaaaaacgtgggatagttattgcgtatgatcctcgtcatatgtcgcgtgaatttgcttttgaatcggcggcagtattagggcatcatggtgtgaaaagttatgtttttgatgcgcttcgaccaacaccggaactttcttttgcagtgcgtcatttaaatgcgtttggtggaattgttatcacagctagccataatccgccagaatacaatggctacaagatttatggtgaagatggcggacaaatgcctccaacaggcgcaagtgctgtaattgaatacataaacgcggtagaggatattttttctgtagaagtagcgaaccaagagctattaattgaaaatggtttacttgaggtaatcagtgaaaaagtagaccgtccatatttggaaaaattaaaagaggttattgtcaataaagagcttgttcaagaacgaggggaggatttgaaaattgttttcacgccccttcatggtactggcggaattcttggcgttcctgcgcttgaaagtgttggctttacgaatattgttaaggttgacgagcaatttgtgaatgatcccgattttggaacggtaaaatcgcctaacccggaaaaccgcgaagcctttttacttgcgattgaatatggtaagaagtttggcggggatattttagtaggaaccgacccggatgctgaccgtttaggcgtggctgttcgtaatgcggacggagaatacgaagttttatctggaaaccaaattggtgcgattattttacattatttattaaaacaaaagaaagcgcaaagtgagttgccggctaatgcagcggtattaaaatctatcgtaacaagtaatcttggaacagaaatcgcgaaacattacggcgctgaaatgattgaagtattaactggtttcaaatttattgcagaacaaattaagcactttgaagaaactggcaagcatacgtttgaatttggttatgaagaaagcaatggttatatggttaagccatttacgcgtgataaagatgcgattcaagcggttcttgcgattgctgaagtggcgctcgttagcaaagtagcaggtagaactttattagaagatttagatcaaatttatgatgaatttggttattataatgaggatctcgtttcacttacgttaagtggaaaagatggttctgagcgcatcaaagaaattacaagtagcttccgtgaacaactgccaacaagtatgggtgggttcgtagtagaacgtgcggaagattatttgagaagtgaaacgacttggattgctactggaaaaactgaagcgatacatttaccaacagcagatgtcattaaatgttattttgaagatggttcatggttctgtttacgtccatcgggcacagaaccgaaaatcaaattctactttagtattcgtggtgaaagtaaagaagaaagtacggcaaaattagaaaaagtgaaagctgatttgatgcaacatatcgaagcttaa

SEQ ID NO: 24775 - DNA, 3708 bp, Listeria monocytogenes
atgagtttaaatataccgccaaaaccagaagagtcattatggacagacgaccaatggaaagccattcaagctaaaggcaataatgtacttgttgctgctgctgctggttctgggaaaacagctgtcctagtcactagaatcattgaaaagttaatagatgagtcagcaaacttaaatgtagacgagttactaattgtaacttttacgaatgcttcggctgctgaaatgaagtttagaataggaaaaggactggaagaagctctgggacaaaatccagattcagcacatctaaaaagacaagtagcattacttaactatgcttctatttcaactctccattctttttgtttagaaattattcgaaaatactattttgaggcagatattgatccaagttttcgcttaattgagccaattgaaagtagtatgattcgcgatgaggttttagaaggtttgctggaacaagaatatggtattgaaaataatgaagctttttttcatttggtagaatcttttacaggagatcgttcggatgcagaattgcactcattaatatctaagctatatgatttctcaagggccaacccagatccaaacgcttggttagaagcaatggtgaacttttataatacagaagagattacttcgattacagagttaccttattttccaattattaaagaagatattgaattaagagtaaatcaagctaaaaactatttactaaacgcaataaattatgcaaatgaaaataacgggccagcaccttatttagctacattagaaaatgatttagtccaaattcaagcattgtcagagttgaactggagcagttggacccatctgaaaacatctattgaaaacatagatttcaagcgtattccgacacttaaaaataaaagtgattacgatgaagtatatgtggaggaagcgaagaaatttcgagatgcagctaaaaaagaaatgaaaaatatcgcaactgactggttttcgagggaagaagtaaattgcttatctgacttagaaaaaatgaaaccagatattcaaactttgagtgaattggtcaaaaaattttctgcaaatttctttgaagaaaaacaacaaagaggggtattagactttaacgatttagaacatttagcattaaaaattttattaaatgatgataaagcttcagaagttgctcaaaattatcaaaaacaatttaaagaagtattaatcgatgagtatcaagataccaatatggtgcaagaaactattctacgccttgtaacgaaccctagtgaagcgcaggggaatctattcatggttggagatgtgaaacagtctatctatcgctttcgtttagcagagccaacattatttatgacaaagtaccaaacattccaacaagatggtagtggaaacgggatacgcattgatttgtcacagaactttaggagtaggaaagaagttttagatgctaccaattttatatttcgtcaattgatggataaacacattgctgaaattgattatgataccgccgcagaattgactttaggtgcaaatttccctgaaacaaacgctatggaaacggaacttttactaattgatatgaaaactgaggataccgaaacagaagatgaattatcgcctcaagaattgcaaaaaaatcaagtagaatcacgtgcgattgcaatgaaaatcagagaaatgatagacaataagtttcctatttatgataaaaaacttaaacaaaatagacctattcaatacagagatatcattattttatcaagggcaatgacgagcgctccggatatggaagaagcaatgaaagttcaagatatccctttttatgcgaataataactcaggttattttgaaacaacagaagtagctacaatgattgcacttatgaaagtagtagataacccttaccaagatattccgcttgctgcggttttacgttcacccataattggcttaaatgaagaagagttggggcaaattcgtatggcgaagaagaagggttatttctatgacgcattgctaacctataaggacataaccgtttcggaaacagcgaataaaattagtgattttgttcaacaattaaacaattggcgtgaattgtccattcgagaaaatttaacgtcattgatatggcaaatctatcaagaaactaacttttatgaatttgtgggtggcttaccaggtggcaaacaacgccaagcgaatttacgagcattatacgaccgggccaaccaatatgaaaaaacatctttccgtggtctgttccgttttgttcgttttgttgaacggttagaaattcgaggcgatgatttaggtaccgcaaaaacacttggtgaaaaagaagatgttgttcgcatgatgacaatccatgcgagtaaaggattagaatttcctgtagttattgtttctgggctaagtcgaaaatttaatatgcgggatatttatagcaaaacgttgttagataaagattatggctttgcatctagttatcgagatgttgagaaaatgattgtttacccaacaattatgcagcaagcaataaagcaaaagaaatctcgtgaaatgattgcggaagagatgcgcgtgttgtatgttgcgcttactcgtgcagaagaaaagttgattttagtagcaacagtaccggattttgaaaaaacaagtaaaaactggctgcaagtcgcaaaagaaaaagaaactattttacctgcagccacaagagcgaaagcgaaatgctatttggattggataggaaacgcaacgattaggcatcctgcttttaaagaattgttgtgtgaagaaataatccaaacacttgcgacggagatgaaactacaaattgaaataaaaacaaaagaaatgtttctaactaatgagctagaaagggctgaatcagataattggctggaaaatataaaagaacatcagccagtacctattcaaagcccatataaggacgaaattcagcgatatatggagtatgagtaccaaaatgaagcggcgactgaaatacgtgctaaacagtctgtaacagagcttaagcgccaattttctttgcaagatagctggagtgatactacactgttaaaagaattccaaaaagtatcactggatagacctaaatttttacaaaaaaataaactctctgcaacagaaattggtacggcaatgcatacgcttatgcaagcagtttcgttagattataaaccgacaaaggaagatttggaacagcttttacacacaatgcgagaaaaagatatcttaacagatgtgcaaattaaagcaattaatatcaaacaaatattagatttctttgaatctccattaggggaaacaatgctgcagaaaaaagatttagtaaaacgtgaagtgccatttagttatttgcttcctgtgtcagagttatatgaaaaagttgatttagacgaacgagtactcattcaaggtgttgtggatagtatgatagaagaggaagaaacgattactttaattgattataaaacagataaaatagaaggaagatatgctgattggaacgctgctgaaaaagtaatgaaagaacgatatcatattcaaatcaagctttatgcagaagcgattcaagcgattagcggtaaaaaagtcgctgcggcttatttatatttcttcgatggacaacatatatgccaaataaacacaaaggaaggtctttaa

SEQ ID NO: 24776 - DNA, 1392 bp, Listeria monocytogenes
atgaattcattatttagaagaaaaccgatagaagatttaatgcataataaaagtggtagcacgcatttaaagcaaactctcggaccacttgatttaactttacttggggtcggagcaattgttggaacagggatttttattttaccagggacagtagctgcgaaaaatgcgggaccggcgattattttttccttcgtgattgcagcgattgtttgtgcgattgcagcaatgtgctactcagagtttgcatctagtgttccggttgcagggagcgcctatacgtatggttatgtggtttttggtgagttaattggatggttgcttggttgggcacttattttggaatacgggcttgcagtggcttctgtggcaagtggatggtcttcttatttaaatgcgttactttcaggttttcatatttccatcccggaagcaatctctgggccttttaatccagaagtaggtacatttattaatttaccggcgattattattgttcttgtgattgcctttttattaacgcttgggataaaagaatcaacgcgcgtgaataccattatggtagtaattaaagtcggtgttattttacttttcttagtagttggcgtattttatgtcaaaccggataattggcaaccgtttatgccgtttggaattagtggagttatgaatggcgcggcgctagttttctttgcttatttaggttttgatgccgtttcctccgcggcggaagaagtgaaagatccgcaacggacgatgccgattggaattattgggtcgctacttatttgtacggtgttatatgttgctgtatccgctgttttaactggaatggtgccgtacacagatttaaacgtaactgatcctgtggcttatgccttgcaagtgattaaccaagattgggtagctggcattgtatcacttggcgcagttgttgggatgattacggttattttagtgatgagctacggggctactagactgatttttgcaatgggacgtgatggtttattgccgaaagtacttgcggaaatcaatcaaaaataccaaacacctgttaaaaatacttggattttcgcagtgattgttgcaattattagtgggcttgtgccattggatcgattggctgagttggttaatattggaacactcttggcgtttatgatggtgtctatcgggattatctttttacgtaaaaataaagatattcaagcgagaggatttaaagtaccactttacccagtacttcctattgtttcgttcctattatgtgcgtttttaattagccgtttgtctgttcatacgtggattctttgcggaatttggtttgttattggtttaattgtttactttgcttatggtagaaaacatagtgaattacttaaaaaataa

SEQ ID NO: 24777 - DNA, 5337 bp, Listeria monocytogenes
ttgaaaaagaaatttagtatagttattatcagtgtattgttacttggttatttagcgccttttgatactttgttagtaggtgcagatgaaacaacggtttctgaagatacagcagttaaaacggcagaagcagatagtgctactgaaggcatagaaagcgaaacaggttcagatgatgaaacggcagaagagccaaaagaagcaaaagaggcagaagcaagcaaagaaacgacagaaaaagaggaaaaagcgaaaacggaagaaccggcttctaatattaaaacggagattaatacagataaaagccagctgaaacaaactagcttaaaagcagcggtgccagcaggaagtacatataattctttgtttccagacgacaatcttgctaaaaaattagctgtgattatcacaggaaatgcggctgcaacaggtaatgaatcagtggatagtgcagctcttttagcaataagccaacttgatttgagtggggaaacgggcaatgacccaacggatatttccaatattgaaggattacaatatttagagaatttaacaagcctgaatttaagtgagaataatatatccgacttggctccacttaaagatttggtaaacctggtttcacttaacctttcttccaatcgaacattagtaaatctttcaggggtggaggatttagttaatttgcaagaacttaatgtctctgcaaataaggcgttagaagatatttcacaagttgcatcgttgccagtgttaaaagaaattagcgcgcaaggctgtaatattaaaaccttggaattaaagaatccggctggtgctgttttgccagaactagaaacattttatttgcaagaaaatgatttaaccaacttaacttcattagcgaaacttccaaaattaaaaaatctctatattaaagggaatgcttctttaaaaagtttagagacattgaacggggcgacgaagctccaattgattgatgcgagtaactgtaccgatttagaaacgcttggagatattagcgggctttcggaactcgaaatgattcaattaagtggttgtagtaaactgaaagaaatcacaagcttgaagaacttgcctaatctggtgaatattacggcggatagctgtgcaattgaagatttaggaacactgaataatttaccaaaattacagacattagttctttcagacaatgaaaatttaaccaatattactgcaattaccgatttaccacaattaaaaacattaactttggatggctgtggaattacatctattggaacgcttgataaccttcctaaattagaaaaattagatcttaaggaaaatcaaataactagtataagtgaaataaccgacttaccgcgattaagctatttagatgtaagtgtaaataatcttacaaccataggggacttgaaaaaattacctctattagaatggctgaatgttagttcgaatagattatcagatgtgagtacactaacaaatttcccgagtttaaattatattaatatatcaaataatgtcattagaacagtcggtaaaatgactgaattaccttcgcttaaggaattttacgctcaaaataacagtatatcagatatttcgatgattcacgatatgccgaatttaagaaaagtggatgcgagtaacaacctaattacaaatataggtacctttgataatttaccaaaattgcaaagtctagatgtgcattcaaatagaattacaagtacatcagttatacatgatttaccaagcttggagacgtttaatgcgcaaactaatttgattaccaatattggtacgatggataatttaccagatttaacctacgtaaacttatctttcaacagaataccgtcgcttgctccaattggtgacctacccaatttagaaacattaatagtatcagataataattcttatttaagaagcctaggaacgatggacggtgttcctaaactgagaattttagatttacaaaacaattaccttaattacactggaacagaaggaaacctaagttcattaagtgatttaacaaatctaacggaattaaatttgcgaaataatgtttatattgatgatataagtggactttccacgctatcaagactgatctacttgaatttagattccaataaaattgaagatatttctgcattgtctaatttaacgaatcttcaagagttaacacttgaaaacaacaagattgaaaacatttcagcacttagtgatttggaaaatttaaacaagctagttgtatcaaaaaataaaattattgatattagtcctgtcgctaatatggttaatcgaggggcaattgtaactgcgagtaatcaaacatatacattgccaactgtattatcatatcaaagctcgtttaccatagataatccggttatttggtatgacggcacactactagcgccatcatccataggaaactctggtaattacaaggacgggaaaataacttggactaatatgaccgctacgtctagttccactttatttaactttaataggttaaaagacggtttaaccttctcaggaacagtcacccaaccttataaatctgcagccaaagtaactgcagatgcagagcaaacttatacaattggtgatactatttcagaggagcagtttttaaaagatgttaatgcaaaatcatcagacggggcacctgttacaagtgattttgctacagtggtggatttaaacacttttggcgaatatgaagttactttaacttccgaaaaagatggaatccaaggggatagttgcaaagtaattgtcaaagttcttcacggagcgcctgtcatttcggcagaccaaacaattagttatgataaacatgcaactattacagagaaacaatttttagaagatattcatgccagcacagacttggatacagctattacaaccaattttagtacagcagttaacttgaataaaggcggagattatacagttgcactaaactctgaaaatgaggacggcgtgaaagctgaaacggtttatgtcactgttactgtaaataaagacccagcgccgattataagtgctaagacagaaatcacgtatgataaattctcgaaaaaaaccgaagcggcgttcttagatgatatagacgcagatacaaatgatggctctatagtaacttctaattttgctacagcagttaatttagataaagctggtgattatactgttacactgaattctattaatagtgatggtgtagcgggcacgccaacagcgattattgtgcatgtggagaaagagaaaatagcaacaattagcacaaatacggcacaacaatatgaaaaatatgcgaagattaatgaaacgcaatttctaaaagatgttcatgctagtattaacgcgagcccaacaaccgcagttttggaaagtgattttgaaacagtagttaaactagacgtcccaggaacgtacacagtaacgattactgctacaaatgaagatggcggagtatcggcacctaaagaagtttctgtcatagtaaggaaaattccagcaccagagatcactgcagataaggaaataacttatccgaaatttgatgaagtaagtgaagcagaatttttaaatgatattcatgcaactattagtgacaaaaatgtagcgattacaagtaacttcagcacagatgtgaatttaaataaagctggcgattacacagtaacattaaatgctacgaatgaagacggcgtaaaggctacaccggttgaagtaattgtacatgttcaacaaggagaacgccctgttataacagccgatgcaactatttcctatgacaagttcgctaacataacggaagcgaagttcttagaagatattcatgcaacaagtagtgatggtcaaagctctactgtaatcacctctaatttccagaccgcgacaaacttcaaaacagccatgagctacacagttacgcttaatgctgtaaatgaagacggcattagcgcagaaccagtagcagtgaccgttacaataaataaagaaccagccgcggcgttaaaagctgatgcagaagtaagctatgcgaaaaatgaagctgtaaccgaatccgatttcttcaaagatgttcatttagaaggaacggaagcgccaagtacagccaaagcaacaagtaattttgattccgtagtagatagaagtaaaacaggagattatactgttacgataaatgctacaaacgaagatggggctgtttctacaccaattgaagtaattgttcatattgaagcagaaagtgcaccagtaattacagcgaatgcagaagtaaaatataacaaacatgaacaaacagacgaaagaagatttttatatgatagtgaagcaaaaatcgatgaagctaatgtggaaattaaaaccgattttgcagaaaaagtagatattaataaagttggaacttatactgtcacactgactgctacgaatgaagatggccaagctgccaatccagtagaagtgagcgtcattgttagtgatgccgctgctgaaaaagtaaatgtgaaatatgtagatgaaaatggatcagaaattagtgcagcggagaccttaactggtaatttagatgaaacattttctattgatgcgaaatctatagctggatacaaatgtgatgcgactttaagcggtgtattttcaacagttgagcagacagttgtgttccattataaagcaatcaagcctggtgttgtaacgattaaatacgaagatacgaatggaaaagcagttgacgaagataaacaaatcactggcgaagtaggggatgattttgaagctgaggcgcaaacggtgagtggttattcatgccgagcaattgcaagcggtaagataacagaagaaccgcaaactattactttcacatacagtacagcaactccttcaaaaaaatcaggcgaaataacagttcagtatgtagatgagtcaggtaagaaattagctgattctaaaaaggttacagggaacattgatgatagttatagtgtagaagcaaaagcaattgaaggctatagcgtagttggcgatgattctgctaaaggtgtttttaccgaaaaatcgcaaacagttacttttaaatacaaaaaaaatacacaagttagtaaagatgaccctaaagttaaagggaaaacaaatcaaccatcaagtactgatacgaagctaaaagtagacaataattcgttgcctgcaaccggagatactgaaaatatgatattagcagttttaatcggttttaatatgctaatcgttgctagtatattcctttttagaaaaccaaaaacgaaccaataa

SEQ ID NO: 24778 - DNA, 1362 bp, Listeria monocytogenes
atgaaagtaattaaatttggcggaagctctttagcatcggggatccaattaaataaggttttccaacttgtagcggaggaccctgacagaaaaatcattgttgtttctgcaccaggtaaacgtttcaaggaagatacaaaggtgaccgatttacttattgattgtgcggcaaaggcacttcttggggaagatacgagcgaattgtttgaatctgtcattgcaagatatgcggggatagcactggacacagggatgagcgacgaaattatcaatcaaattcgcgcagatttacaagcgactatctcttcagataaaagcgatcctgataaatttttagatcgaatgaaagctagtggcgaagacaataacgcaaaattaatcgccgcctactttaaatttaaaggcttaaacgctaattatattaatccaaaagatgccggtttacttgtgacagatgaacatgctagcgcgcaagttttaccggaatcttatgatcgtttgtttgcacttcgagaaagagaaggtattattgttttcccaggatttttcggctatacaaaagacggcgaaattagcacgttttctagaagtggctctgatattactggagcgattgtggcaaacggcgcccaagccgagttatacgagaactttactgatgtggatgcagtctacgcagtcaatcccactattgtgaaaaatccgaagaaggtacttgagcttacttaccgggaaatgcgtgaactttcttatgctggtttctctgtttttcatgatgaagctttaattccggctttccatgcgggtattccggtgcatattaaaaatacgaacaatcctgattcttgtggtacgcgtgtcgttcatgaacgcgaaaataacaatgggccagtcgttggaattgctagtgatgacggcttttgtagcatttatattagtaaatatttgatgaaccgggaaattggcttcggacggaaagtgttgcaaattctggaagatgccgggttgaactatgaacatatgccgtctgggattgatgatttaacgattattattcgcgaaaatcagtttggcgaggatacagagcggacaattatgtctcgtttgaaagaagaattgaacgcagaccaagtgattatgcaacacgggatttcgctgattatggttgtcggtgagaccatgcgccataatgtcgggattacgtctcgtgcttccaaggccttatctgatgcgaaagtaaatattgaaatgattaatcaaggttcttctgaggtaagcattatgtttggcgtgaaagaagagcaagaaaacacagctgttcgcgcgctatataatgaattcttttcagaggtattcgtttaa

SEQ ID NO: 24779 - DNA, 1053 bp, Listeria monocytogenes
atgttagaacagttacagacgctgaaaagtgaagcagaaacgcaaatcaacgaagcatcagacttaaaaacattaaacgacttacgggtaaaataccttggtaaaaaaggcccgatgaccgaaattatgaaacaaatggggaaactttccgcagaagaacgaccaaaaatgggttcgcttgccaatgaagtaaggacagctttaacagaagcgatttctagtaaacaacaaattttagaaacagaagcaatcaatgaaaaactaaaatcagaaaccattgacgttacattaccagggactgctccgagtattggaacaaaacacttgctaacacaagtaattgaagaaatggaagatatgttcatcgggatgggttacgaaatcgcagaagggccagaagtagaactagattactataacttcgaagcgctaaatttaccaaaagatcacccagctcgtgatatgcaagatagcttctatatcacagaaaatactttactacgtacccaaacttctcctgtacaagcaagaacaatggaaaaacatgacttctctaaaggaccaatcaaagttatctgtccagggaaggtgtaccgccgcgataatgatgatgcaactcactctcaccaatttacgcaaattgaagggctagttgttggcgaaaatatcacgtttgctgacttaaaaggaacattaactgttctcgcaaaaacgatgtttggtgaagaacgtgaaattcgtcttcgtccatccttcttcccattcacagaaccatccgttgaaatggatatctcttgctttaaatgtggtggtaaaggttgtcgcgtttgtaaaggaaccggttggattgaaattttaggaagcgggatggtacatccaaacgtccttgaaatgtctggaattgattctactcgatacagcggctttgcttttggcttagggcctgaacgagttgcgatgttgaaatatgcggtggatgatattcgccacctttatacaaatgatttacgctttacgaagcaattccaaagtacagaaacgggggaaatctaa

SEQ ID NO: 24780 - DNA, 924 bp, Listeria monocytogenes
ttggaagcgataaaagaaaagaagcttacacaaacttctaaaaaggcgcatctagaaactagaggcaaaattattacattcatctgtatttctattatggttattgccgcagcgtctattttattttttgttatatcgaaaggtttagcaacatttactgtcaataaagtgtcttttgttgattttataactgggacagactggaatccttcgcaaaaagatgcaagtggtaatccattagtcggcgctttaccaatgattattggttcctttgcagtaacgctttttgccgcttgtattgcaggaccactagcaatcggtgcagccatttttatggtggaaatatcacctaagtttggtaagaagattttgcaaccagttatggaacttttagttggtattccatctgttgtttatggattcattggactaagcgttgttgttccgtttattcgagatcatatttcgggaagtggctttggtattgcagctgcgacagttgttttgacggtcatgattttaccgacggttacttcacttagcgtagatgcgattaaatctgtgccacgtcattaccgcgaagcttctttggcgcttggagcaacacgtttccaaacgatttggaaagtagtacttcgtagttcacgttcagggattttgacagcgattgtgtttgggatggcacgtgcattcggtgaagctcttgctgtacaaatggttatcgggaactctgctgttattccaacatcattatttgagccagcttccacattaactagtattttaacaatgggtatgggaaatacagttatgggtacgcttgataataatatcctttggtcacttgcaatggtgctactagcaatgtcactattcttcatcattgtaatccgcttcatcggacgtaggaggaaagtcaaatga

SEQ ID NO: 24781 - DNA, 1227 bp, Listeria monocytogenes
atgagtaaaatattaaaaaaacctgaagtgctagctccggctggtaacttagaaaaattaaaaattgcgattcgctacggtgcggacgctgtatatattggtggacaggctttcggacttcggtcacgggcaggtaattttagttttgaagaaatgaaagaaggtatcgcttttgcgcatgaacgaaatgcaaaagtgtatgttgcagcaaatatggttgcgcacgctggtgatacagaaggtgctggtgaatttttcctaacattacgcgatattggtattgacgcagtaatcgtttctgacccagccttaattagcatttgtttccaagatgcaccaggtttaccagtacacttatccacacaagcttctgcaacaaactataaaactctagaattttggaagaaacaaggactagagcgtgttgttcttgcacgggaagttagcatgcaagaaattcaagaaattggcgaaaaaaccgatgttgaaatggaagcatttattcatggggcaatgtgtatttcctactctggtcgttgtacattatcgaatcatatggctaatcgtgatgcgaaccgcggcggttgtgcgcagagttgtcgttggaaatatgacttattcgagattgataatggcgtttcaaaaaatttagtggatacagatgaagagccgttttcaatgagtgcagttgatttatctatgattaaatacattccagatatggtagatgctggtgtggatagtttgaaaatcgaaggacgaatgaaatctattcattatgtttcaaccgttgcaagcgtatatcgccgtgccgtggatgcttactgcgcggacccagaaaattatgtgtttgacccagcttgggaagaagaattgtggaaagtcgcgcaacgcgaactatctacaggatttttctacaaagaaccaaccgaggacgagcaactatttgggaaaacgcggaaaattcctcaatatgcttttgcggcgcaagtactggaatatgacgagaaaacgaaaatcgctactttacaacaacgaaataattttggtgtaggggaagaaattgaattttatggaccaggagatactggctttaagcaagtcgtagaagtactttggaacgaagatggcgtagaaattgaccgcgctccaaatgcaatgatgacgataaaaatgccggtagataaacctgtgaagccattttactttatgcggaagaaaaaataa

SEQ ID NO: 24782 - DNA, 1107 bp, Listeria monocytogenes
ttgaatgaaagaatatttcgcgaaaacactcgcccagtccaagtgggtaatttaactattggtggtagtgaggaattaactatccaaagcatgactactacaaagacacatgatgtcgaagcaacagtagcagaaattcaccgattagaagaagctggttgtcagattgtgcgagttgcttgtcctgatgaacgtgcagcgaatgctcttagtgccatcaagaaaaagattcatattccgcttgtggcagatattcattttgattaccgactagcacttaaagctattgatgcaggtgttgacaaaattcggattaatcctggtaacattggtcgccgtgatcgggtggaaaaagtggttaatgctgctaaagcaaaaaatattccaatccgtattggggttaatgctggtagtttagaaaagaaaattattcaaaaatatggttaccctactgctgacggaatggtagaaagtgcacttgcccatattaaaattctcgaagatttagatttttatgatatcattgtttctttgaaggcttctgatgtgaatttagcaattgaagcttatgataaagctagtcgcgcatttaattatcctctgcatctcggaattacagaatctggtacacaatttgctggaggaataaaaagtgctgctggtttaggagcgatactcagtttgggcattggaaatacattacgagtatctttgagtgctgatcctgtggaagaaataaaagtggcccgggaagttttaaaatcatttggtctttcctcgaatgccgcaatgcttatctcctgccctacttgcggtcgaatagagattgatttaattcgtatcgctaatgaagtggaaaattacatagcaaagattgaagttccgattaaagtagccgtgcttggctgtgcggtcaacggccctggagaagctcgcgaagccgatatcggaattgctggttcaaacggagaaggccttctttttagacatggtaaaattattcgaaaagtaccggaagctattatgatagacgaacttaagaaagaaattgatattttggcagaagaattttttgtgaagaaaatagatttggaaagccttagataa

SEQ ID NO: 24783 - DNA, 1074 bp, Listeria monocytogenes
atgaagcaactgctgaaaatttttgtaccagtcattgtcgtcgcgctcctaatgatgttacttgcaacaacgatgaaccgttcggagggctatgctgggagtaatacgctgacgatttataactggggcgattacattgatccatcactcattactaaatttgaaaaagaaacaggtatcaaagtcatttaccaaacatttgattctaatgaagcgatgatgacgaaaattgagcaaggtggaacgacctttgatattgcggtgccaagtgattatgcgattagcaaaatgaaagaagaaaatttgctgatcccacttgaccattccaaattaccaaatgaaaaataccttgatccgcgttttatggatttgtcgtttgatgatgataataaatattcgatgccttatttctggggaacgcttggcattatttataataaagaaatgttcccggataagaatttcgatacgtggaatgcgctatttgatcctgagttgaagaaccaaatcttgctgattgacggggctcgtgaggtgatgggacttgggctgaacagtctaggttactcgctgaacgatacgaataaagcccacttacaagctgccagagataaactagaaacgatgacgccgaatgttaaagcaattgttggcgatgagattaaacttctcatggcggacaatgaggcgggtgtcgcggttactttctccggagaagcggcggaaatgttaagtgaaaatgaagatttagaatacgtaattccaaaagacggctccaatttatggttcgacaacatggtcatcccaaaaacagcgaaaaatgtcgatggcgcgcataaatttattaacttcatgctaaaaccagaaaatgccgcaattaacgctgaatatgttggctatgcaacaccaaatgcaaaagctgtcgaattgttaccaaaagaaatttcgagtgatgaacgtttttatccggatatggacgaactgaataatttagaagtatatgataaccttggtaaacgaatgctgtcgtattataatgaattatttttggagtttaagatgtaccggaaataa

SEQ ID NO: 24784 - DNA, 294 bp, Listeria monocytogenes
atggctagaaagtacgaaattatgtacatcattcgcccaaacattgaagaagatgagaaaaaagctgttgtagaacgctttgacggaatcttaactgaaaatggtgcggagatcatcgaatcaaaagaatggggtaaacgtcgcttagcatacgaaatcaatgactatcgtgatggtttttaccacatcgtgaaattaaacgctgataaagcagattctatcaacgaatttgaccgtttagctaaaatttctgatgatatcattcgtcatatggtaattaaagaagaagcataa

SEQ ID NO: 24785 - DNA, 405 bp, Listeria monocytogenes
atgactacacttgaaaatagcgttatttttgataaaggggaactgattactaatgattactttatcggaaatacttatttaaaaatgcttgtccctgaagatactgtttacaattgtccgattgggaacgttacgtttgaaccaggagccaggaacaactggcataaacatgacggcggacaaatcctacttgtgacaggcggaactggctactatcaagaagaaggaaaatccgctcagttacttaaagagggtgacgtggtaactattccgaaagacgtgaaacattggcacggcgctacgaaagatagctggtttgtccacttagccatttcgacaaacgtggaattaggtggaactacttggttagaacctgtttccgacgagcattacaataacttataa

SEQ ID NO: 24786 - DNA, 1980 bp, Listeria monocytogenes
atgaaatggaatgagtttatcgtaactggcgatccaatgattttaggcgcgcagatttctatcgtacttgtaagtattggtgttgttgcgttactaacttatacaaaaaaatggaagtggctcatgaaagagtggatttcttccgttgatcataaaaaaattggtattatgtacttgcttgctgctgtcttaatgtttttccgtggtggtgtggatgcgctaatgatgcgtacccagctcgctttaccggatatgaaatttttagacgcacagcattacaatgaagtattttctactcacggaaccattatgattttatttatggcgatgccgtttatcatcggactgatgaacattgccgtgccacttcaaattggtgcgcgtgatgtagcatttccatttttaaacaacttgagtttttggacgttctttatgggagcgatgctatttaacttatcattcgtaattggtggttcgccagacgctggttggacaaactatgcgccacttgcgacagattttagcgcgggatatggaattaacttctatcttttaggtgttcaaatcgctggtattggtacgctgatgacggggattaactttttcgttacgattttaagaatgcgtacaaaaggtatgacgttaatgaaaatgccaatgtttacttggtcttcattaattacaagtttgatcattattttcgctttcccagttttaacagtggcacttgctttgatgtcatttgaccgactgtttgggacagcattcttcacactcacgaatggtgggctcccaatgatgtgggccaacttgttctgggtttgggggcatccggaagtatatattgttattttgccagctttcggtattttctcagagattatttctactttctcgaggaaaaaattattcggttatccggcgatggttgccgcgatggcagttatttctttactaagtttcctagtttgggtccatcacttctttacaatgggatcaggggcgcttgttaactccttcttctccattacaacgatgatgattgcgataccgaccgggattaagatattcaactggctctttacgatgtacaaagggcgaataacctttacaacgccaatgctttggtcgcttgcctttatccctaactttgttgttggtggggtaactggggttatgcttgcgatggctgcggccgattatcaatatcacaatacgtacttcttagtatcccatttccactacgtattaattgctggaaccgtgttctcctgctttgccgggcttacatactggtatccaaaaatggtcggttacagactaaatgaaaaaattggtaaatggttcttctggattttcgttgttggatttaacgtttgtttcttcccgcaatatttcctaggactagatggtatgccgcgtcgtatttacacttacgtacaaggtgatggctggacaacgcttaactttatctctacagttggcggattcttgatgggtgtggcattcttagttctttgctacaacatctactacagctacaaaaactctaaacgtgaagttactggtgacccgtgggatgctcgtacgcttgaatgggctacaagttctgcagttcctccaaaatataactttgctgttttaccagaatggaatgacttggatgatttctggaatagaaaacaaaaaggcgatccatatgtaaatgataaaaattataaaccaatccatatgccaagtaataccatggttgggtttgtaatgtctgtcttcttcttcattgcaggtttcggactagtcttctactggtactggatgggaattattggtctagttggtattttaggatgtatgatttatcgttcattccaaaataacgatggttaccacgttgaagtggaagaaattaaagcaacagaagaacataatgcgcgcgaacttgcgactggtgtgaaggagggaaacccatggaatctgtag

SEQ ID NO: 24787 - DNA, 2154 bp, Listeria monocytogenes
atgacaaaaacattagtactggcagagaaaccgtctgtcggtaaagatatcggccgggtactcggggctaaacaaggtaagaacggctatttagaaggtggaaaatatgtagtcacttgggcgcttggacaccttgtaacactagctgatcctgagcgctacgattcgaagtataaaaactggaatatggaagatttaccaatgcttccagagaaaatgaagctagaaccaatcaagcaaacgagaaaacaatatgaaacggttaagaagttaatgaaccgtacagatataaccacgatcgttattgcaacagatgcaggtagagaaggagaacttgtagctcgctggattattgattatgcgaaaatcaagaagcctctaaaaagactatggatctcctctgtaacggataaagcgatacgtgaaggcttcgaacacttaaaaccagggaaagcttatgaaaatctatatcactctgcagtcgctcgttctgaagctgactgggtggtaggaatcaatgctacgcgtgcgttgacaacgaaatataacgcacaactttcctgtggccgagtgcaaacgccaacgcttgcaatgattcaacatcgtgaggaagaaattcgtaactttaaatcgcgtgaatactatggaattactgccctaaccgaacaagaaagtttcacgtggaacaatgggcaaacgtttgataaagctttagcagaaaaactagtaaagtctttacaaggggaaaatgcggtaatcacagacgtttctatgaaagaaaagaaaactttctcaccaggtttatatgatttaacagagttacaacgcgatgcgaataatagatatgatttttcggcgaaagaaacgctgaatattatgcaaacattatacgagcgccacaaagtactaacgtatccacgaacagattcgcgctttatttcaacagacattgtcccaacactaaaagaacgtttagtggcctgcggtgtgggcgaaaatgcaaaagctgctcgtcaaatcagcgtaaaaccaatcaaagcgaacaaatcatttgtagataacagcaaagtgagcgaccatcacgcaattattccgaccgagcaacccgtttccctcggagatttaagcgataaagaaaggaaaatttatgaccttgttgtcaaacgctttttagcagtgctttcagacccatatatttatgaagaaacctctgttaaagccaaaatcggtcaagaagaatttactttaaaaggtaaagttgtcaaatcactgggttggaaaagtatttacggagagtcgcgcgaaccagatcaattaactaaaatgaaaaaaggcgacactatcccagttaaacgaatcaatttagagacaggaaaaacaaaaccgccagcaagattcgatgaggcgactttactttcggctatggaaaacccgtctaaatacatggaaacaacgaacaaggcattggccaaaacactgggtgagactggtggacttggaacagtcgcaactcgtgcagacatcatcgaaaaacttttcaatagtttctccttagaaaaacaaggcaaggacattcaaattacttcaaaaggacgccaattgctagaattagtccccgaagatttgaaatccccagaactaacggcgcgttgggaacaaaaattatctaaaatcgcaaaaggcgaactagattatcgtaaattcactgcagaaatgcgcgactatgcaaaaaaagcagtaactgaaattaaacaaaacgataaaaaattccgtcacgataacattacttcacaaaaatgcccagactgcggcaagccgatgctaaaagtgaaaggcaaacgtggtacgatgctagtttgtcaggaccgtgaatgcggtcatcgtgaatctgtttcaagaacgacgaatgctcgttgccctaattgccataaacgaatggaaatgcgcggcgaaggtgataaacaaatttttgtatgtgtttgtggacaccgggagaaactatctgccttccaacagcggcgtgacaaacagaagaacaaaaacgtatccaaaacagatgtagctaaatttatgaaaaaacaaaacaaacaagaagatgagccatttaacaacccaatggctgaagcgcttgccaaattaaagctagataaataa

SEQ ID NO: 24788 - DNA, 390 bp, Listeria monocytogenes
atggctcgtaaaacaaatactcgtaaacgccgtgtgaaaaagaatatcgaatctggtattgcacacatccgttctacatttaataatacgatcgtaatgattactgacacacatggtaatgctttagcttggtcaagtgcaggttccctaggatttaaaggttctcgtaaatctactcctttcgcagcgcaaatggcagctgaaagtgcagcaaaatcagcacaagaacatggtttgaaaacattagaagtaactgttaaaggtcctggttcaggtcgtgaagcggctatccgtgcactacaagcagctggtcttgaagtaacagctattaaagatgtaactccagttccacataacggatgtcgtcctccaaaacgtcgtcgcgtataa

SEQ ID NO: 24789 - DNA, 975 bp, Listeria monocytogenes
gtgtctttatacatgttagtatcaacatttgcagtggcttttatcattacggtgataggtgtcccactatttataccattcttggtgaaattaaaattcggccaaagtattagagatgaaggcccgaaaatgcatgaaaagaaatcaggaacaccgacaatgggtgctgttgttttcattaccgctatgcttattagcttcttagtcttttcgttcatcagtggtgaagttagtgcggcaacgtggctactatttatcgcgctggcattatttggcgcattaggtttcctagatgactatatcaaagtagttcaaaaacgtaatctaggccttacttcaaagcagaagtttttaggccaagtggtgatttcgattttattctatcttgtgtatcattttaatgattttgccgagacgcttaatattccatttacgaatatagaagtggatcttggttggttctttgttatctttattttgttctggttggttggtttctccaatgcagttaatttaacagatggtttagacggtcttgtctctggcctttctgtcattgctttttctgcttttggtgtcattgcattttaccaagaacaaatggatgtcgcgattttctgttttgcgattgtgggtggaatgcttggatttctactatttaataaaaatccagcgaaaatcttcatgggagataccggttcgcttgcactcggtggaagtatcgcagcaatttctattttagtacatcaagaatggctgttacttttaatcggaattattttcgttattgaaacagcatctgttatattgcaagtattttattttaaggcaactggagggaaacgaatcttccgtatgacaccaattcatcatcactttgaacttggtggctggtccgaatggcgtgttgttttaacgttctggggaatcggattagtcggagcaattatctctgtctgtgtagtcattttttaa

SEQ ID NO: 24790 - DNA, 1251 bp, Listeria monocytogenes
gtggcagttgaaaaaatcaccatgcccaaattaggggaaagtgtaacagaaggaacgattagttcatggttagttaaaccaggcgatacagtagaaaaatatgatgctatcgcggaagttttaacagataaagtaacagctgaaatcccatcatcctttagtggcactatcaaagaaattttagcagaggaagatgaaacactagaagtaggcgaagttatttgtaccatcgaaacagaagaggctagtagttcagagcctgtagttgaagcagaacaaacagaaccaaaaactccagaaaaacaagaaacaaaacaagtgaaattagcagaagcaccagccagtggaagattttcaccagcggtactgcgtattgctggagaaaacaatattgatttatcaaccgtagaaggcacaggtaaaggtggccgaattacaagaaaagatttacttcaagtaattgaaaatggtccagtagctccgaaacgcgaggaagtgaagtctgctccacaagaaaaagaagcgacgccaaatcctgtacgttcagcagcaggtgacagagaaatcccaatcaatggtgtaagaaaagcgattgctaaacatatgagcgtgagtaaacaagaaattccgcatgcttggatgatggtggaagtagatgcaactggtcttgttcgctatcgtaatacagttaaagacagctttaaaaaagaagaaggttattcattaacttatttcgcctttttcatcaaagccgttgcacaagcattgaaagaattcccgcaacttaacagcacgtgggcaggcgataaaattattgagcatgcgaatatcaatatttcgattgcgattgcagctggtgatttattgtacgttccagttattaaaaatgcggacgaaaaatccattaaaggcattgctcgcgaaattagcgaacttgctggaaaagcgcgtaatggtaaactaagtcaagccgatatggaaggtggcactttcactgtaaatagtactggttcatttggctctgttcaatcaatggggattattaaccacccacaagccgctattcttcaagtggaatccattgttaagcgcccagtaattattgacgatatgattgctgtacgagatatggtcaacctatgtctatccatcgatcatcgtattttagacggcttactagcaggtaaatttttacaagcaattaaagccaaggtcgaaaagatttctaaagaaaatacagcgttgtattaa

SEQ ID NO: 24791 - DNA, 939 bp, Listeria monocytogenes
atgtttaagcacgaaaccgtactactacatgaaacagtcgatatgcttgaagtaaaaccagacggaatctatgtcgatgcaacacttggcggcgcaggtcactccgagtatttactaaataagcttaatgaaaaagggcatttatttgcatttgaccaagatcaaacagcgattgataatgcaaaaattaaactagcagattatagcgataaagtgacttttattaaagccaattttcgcgatatgaaagaagcattaaatgagcgtggtatagaagcggttgatgggattttgtatgatctaggcgtttcttcccctcaactagacgagagagaacgtggttttagttatcaccaagatgctgcactggatatgcgaatggatcaagaacaagaattgacagcaaaaacagttgtcaatgaatggtcttaccaagatttaattcgtatctttttccaatatggcgaagaaaaattttcgaaacaaattgctcgtgaaatcgaacgtcgtcgcgaagtgaaaccaattgaaactactggcgaactagtagatattattaaaacagctattccagcgccagcaagaagaaaaggtggacatccaggaaaacgcacttttcaagccatccgaattgctgttaatgacgaactcggcgcagtagaagattcgcttgaaaaagccttaactttaataaaaccaggcggcagaattagcgtgattacgtttcattctttagaagaccgcataaccaagcaattattccaagaagcgacaaaaggaccagatttaccaccaggtcttcctgtcattccagatgaatataaaccagatttcaaacttgcgacaagaaaaccaatcgtaccaagtgaagaagaactggagcaaaacaaccgagcacgttctgcaaaattacgcgtgatcgaaaaaattatcaaatag

SEQ ID NO: 24792 - DNA, 705 bp, Listeria monocytogenes
atgcaacttatcacaacagaaaataaattagcaggatccaaaaaagcgttagaaatcattgaaaaaggcattacatcaggcgaagtaaacacacttggcctagcaacaggaagcacaccagaaacactttatgctgaacttgtaaaaagcgatgttgacactaaaaatgtaacaacaactaacctagatgaatatgtaggtcttgcggcaagcgacccaaacagttatcattactatatgaacgacttgttattctctaaaaaagcatttaaagaaagtttcttaccaaacggagaagcgacagatgctgaagcagaatgcgcacgttatgaagaaattttatctgagcacccaattgatattcaagtgcttggaattggaacaaatggacacatcggttttaacgaaccaggaacttcttttgattcgataacacataaagttgttttaacagattccactcgtgaagctaacaaacgctttttcgaaagagaagaagatgttccaacacatgcttattctatgggaattaaatccatcatgaatgcgaagaaaattatcctactggcttttggtgaaaacaaagcacaagcaatcaaagaaactattaaaggacctgtagatgtgaattgtcctgcttctgttcttcaaaatcatccagatgttactgtgattcttgacaacgaggcggcgtcacttctataa

SEQ ID NO: 24793 - DNA, 4335 bp, Listeria monocytogenes
atgactgcaaaagaggaagaaaaacaagaacgatttcagctgttaatgacacaaatcggtttacaagatgtaacaacctacgaagaatttacaaaagatgctaaaatcgaaaaactcgttgccgataagaaaaataaaacatggcaatttcatttacacgttccacaaatttttccagcagcacttttccatatgatggatgttggaatgaaacgcgcattcagccaaatcgcggaaacagaaatgcaaattgttccagaaaatcaaacaatcaacgaaacgctcattcaagattattggaacttaatcgtagagccaattggaaagcagtcaccgatgattggaaagcttttaatggagcaaaaacctacatttaaagaaccccattttattgaagtagcagtccataatgacatggaagaagcgactattcagcaacgattccagacgaaaattattgaaagttatgggaaagctggatttccacgtctagcaatgaaaatgcacatgcttgaccagtctgaaacagatgaatataaagcttttgcacaggccaaacaagaagaagatcagaaaaaagccgctgaagctgtgcaagttatgcaaaaacgacaagcagaagggcaaagcggtggcggtggagcagctccactaacaggtccgttccaaattggttataaaattaaagacgatgaagaagttaaacgtcttggggacatttatgatgaagaacgacgtattacagttcaaggcttaatctttgcgacagaaattagagagcttcgcagtggtcgtagtttgttacaattcaaaattaccgattatacaagttcaatgattataaaaatgttttctcgtgataacgaggatgcggcgatgttccagaatttgaaaaaaggtatgtgggttaaagttcgaggaagcgttcaaaacgatactttcgtgcgtgacttaatcatgatggcgcaagatgtcaatgaaatcgctggagtgaagcgtcttgatactgctgaagaaaaacgcgcagaactacatcttcattcaccgatgagtcaaatggatgccacttcatctgttgattcactgttcaaacaagctgctgattggggacacaaagcaatcgctattactgatcattctgttgcccaatctttcccagaagcgtatggagcagggcaaaagtatggcttaaaagttatttttggcatcgaagcaaatctcatagatgatggcgtgccaatcgcttataacgatcaacatattgctttggaagatgcaacatattgcgtatttgacgttgaaacaacaggtttatccgctgtttatgatacgatcatcgaacttgctggcgtaaaaatgaaaaatggtgaaattattgataaatttgaagcttttattgatccaggacacccactttctgcaactactattaatttaactggtattacagatgacatggtaaaaggttctgatcccattgatgttgttttaaaacgatttaaagaatggagcggtgatgatattcttgtggcccataatgcttcttttgacatgggttttattaacactgcttatgaaaaagttgggctagaaaaagcagaaaatgcagttgtcgatacattagaattagcacgttttctttacccacattttaagaatcaccgtttgaatacattaacaaagaaattcaatattattcttgaacaacatcaccgggctgtatttgatgctgaggctacagcatatttagcttggaaattaattaaagatgcgaaagaaatgcacaacatcgatttccatgattctttaaatgactatatgggagaaggcgacgcatacaagcgtgcgcgaccattccacgccacaatttacgcacaaacggctgttggtttgaagaatctctttaaattaattacgatgtccaatattaattacttttaccgtgtgcctcgtattcctcgttctcagctaaagaaattacgtgaaggtttaattattggaactgcttgtagccaaggagaactatttgaagcaatgatgcaaaaagggatgcaagcggcagaaaaagtagcagagttctatgatttcattgaagttcaaccgaagccagtttatgcaccgcttattgaacgtgaactagttcgtgacgaaaaagctttagaagaaatattgaaaaatatcgtccgcgttggtgaaaaaactggaaaacctgtcgttgcaacaggtaatgtacattacaaagatccagtggataaaatttatcgtaaaattttaatccattcgcaaggaggagcaaatccgcttaatcgtgctgaattaccagatgttcatttccgtacaacggatgaaatgttgaaagaatttgccttcttgggtgaagaaaaagcaaaagaaattgttgtaactaatgcgaatttagttgtcgattggatggaaaatcttaaaccaatcaaagacgaattatacacgccgaagattgatggcgcagaagatgaagttcggaatatgagctatgcgatggcgcatcaactttacggtgagaaactgccagaaatcgtagaagctcgactagaaaaagaactgaaaagtattatcggacacgggtttgcggttatttatctcatttcacataagcttgttaagaaatcacttgtagatggctatctagttggttcgcggggatcggtcggttcttctttcgttgcgacaatgacggaaattaccgaagtaaacccacttccaccgcattatctttgcccgaattgtaaggattctgagttctttgatgatggttcggttggttctggttttgacttacctgataaagattgtccacattgcggaactgcttatcaaaaagaagggcaagacattccatttgaaactttcttagggtttaaaggggataaagtacctgatattgacttgaacttttcaggagattatcaaccggtagcccatgcttatacaaaagaaatttttggtgaagattacgttttccgtgcggggacgattggtaccgttgcagagaaaacagcttttggttatgttcgaaattatgagcgagatatgaatatgactattcgcggggcagaaattgaccgacttgtagctggttgtacaggcgttaaacgaactaccggacaacatccaggtggtattatcgttattccagattatatggatgtttacgattttacaccggtacagttcccagctgatgcgacggactcagaatggaaaacgacccattttgactttcactcgattcatgataacgtattaaaactagatatacttggacacgatgatccgactgctatccggatgttacaggatttaagcggtattgatccaaaaacaatcccaaccgatgatccagatgttatgaaactatttggatctacagagtcgcttggtgttaaaccagcagatattgattcaaaaacaggaacattaggaatccccgaatttgggacgcgttttgttcgacaaatgctagaacaaactaaaccaacaacattttctgagctagtgcaaatctccggtctttcccacgggacggacgtttggcttggtaatgcggaagaattaatcaaaaataaaacatgcgaactgccagatgtaattggttgtcgtgatgatattatggttttcctaatttatcaaggactagaaagttcattagcctttaagattatggagtctgtgcgtaaagggaaagggttaacagatgaaatggaagaagcaatgatggcgaataaagtaccgctttggtacattgaatcttgtaaaaaaatcaagtacatgttccctaaagcccatgctgctgcttatgttttaatggcagtacggattgcatatttcaaagtacattatccactatacttctatgcgacttatttcaccgttcgtgccgacgattttgatttaacatcgatggtaaacggaaaagaagccgtgaaagcaacgatgaaggaagtaaacgataaaggaatggaagcttcaaccaaagagaaaaacttattaactgttctagaaattgcgaatgaaatgcttgctcgtggtttccatttccaaaaagtcgatttatataaatcgtctgctgatgagttcattattgacggagaatcacttattccaccatttaatgcgattccaagtcttggaaccaacgtagcaaaacaaatcgttgccgctcgtgaaaatggagaatttttatccaaagaagacttgcaacaacgtggaaaagtgtcgaaaacgattattcagtacatggatgatcaaggatgcttggaaggattgcctgatcaaaatcagttgtcactattctaa

SEQ ID NO: 24794 - DNA, 888 bp, Listeria monocytogenes
atggagaaaaaagttggtacagatcgtgtaaaacgtggtatggcgcaaatgcaaaaaggtggcgtcattatggatgtagttaatgccgaacaagcaaagattgcggaagaagctggtgctgttgcagttatggcgcttgaacgggttccttctgatattcgcgcagccggtggtgtcgctcgtatggctgatcctcgtattgtggaagaagtaatgaaagctgtatctatccctgttatggcaaaagcacgtattggtcatattacagaagctcgcgtccttgaagcaatgggcgtggattatattgacgaaagtgaagtattaactcccgctgatgatgaattccatttactaaaatcagatttcaccgttcctttcgtatgtggttgccgagatatcggtgaagcgctccgccgtatcggtgaaggtgctgccatgctccgtacaaaaggagaacctggaacaggcaatatcgtcgaagcagtccgtcacatgcgccaagtaaacggccaaatccgccaaatcgcaggcatgacagatgatgaattaatggttgctgctaaaaacttcggtgctccatatgaattaatcaaagaaattaaaacacttggcaaacttccggtcgttaattttgccgctggtggcgttgcgactcccgctgatgctgcactaatgatggaacttggagcagacggtgttttcgttggatcaggtattttcaaatccgataaccctgccaaatttgccagtgcgattgttcaagccactacctactacacagactatgaattaatcggaaaactttccaaagagctaggttccccgatgaaaggaatcgaaatgtctcgccttaacccagaagacagaatgcaagatcggagtttttaa

SEQ ID NO: 24795 - DNA, 1272 bp, Listeria monocytogenes
gtgacggatagattaattattcaaggtggcaaaaaattatcaggcactttgcaagtagacggtgcgaaaaatagcgcggttgccttgattccagctgctattttggcggaatctgaagttgttttagaaggtttaccggatatttctgatgtatatactctttatgatattttagaagaacttggcggcagcgtccgttatgataacaaaacagcaattattgatccaactgatatgctttcaatgccacttccatcaggaaatgtgaagaaattgagagcttcttactatttaatgggtgctatgcttggaaggtttaaaaaagcggtcattggacttccagggggctgttatttggggccgcgtcccatcgatcaacatattaaaggatttgaagcacttggcgcaaaagtaaccaatgaacagggtgcgatttatttacgggcagatgaattaaaaggcgcgcgcatttacctagatgtcgtaagtgttggagccacaattaacatcatgttagcagctgttcgtgcaaaaggaaaaacagtgattgaaaatgcagcaaaagaaccagaaattattgatgtagctactcttttaacaaatatgggagcaattattaaaggtgctggaacagataccattcgaattactggtgtggatcatcttcatggttgccatcatacgattattcctgatagaatcgaagcgggaacttttatggtgctcgcagcggcctcaggaaaaggcatacgaatcgaaaatgttatcccaactcacttagagggaatcattgcgaaactaacagaaatgggtgttcctatggatattgaggaagattccatttttattggtgaagtagagaatataaaaaaagttgatattaaaacatacgcttatcctggatttccaactgatttacaacagccactcacggcgcttttaactcgtgcagaaggtagcagcgtcattacagacacgatttatccgagtcgcttcaagcacattgctgagctggaacgaatgggcggtaagtttaaattagaaggtagatctgctgtgattagtggtccagcaaaattacaaggttctaaagtaacagcaactgatttaagagcaggtgcagcacttgttattgctggacttttggcagaaggaagaacagaaattcatggtgtcgaacatattgaacgtggctacagtaaaattatcgaaaaactttctgcgattggtgcagatataactcgtagtagtacagcagaaacaaatatctaa

SEQ ID NO: 24796 - DNA, 270 bp, Listeria monocytogenes
atggctaaaaaatcaaaagttgctaaacatgaacgccaacaagcacttgtagaacaatatgcggagctacgccgaacactaaaagcagaaggccgttatgacgagttgcgcaaattaccacgtgattcatccccgtcccgactacacaatcgctgtgagctaactggacgtccacatggctacatgcgtaaatttggtatgtcacggattcgttttcgtgaactagcacatcaaggacaattacccggcgtaaaaaaagcaagctggtaa

SEQ ID NO: 24797 - DNA, 807 bp, Listeria monocytogenes
atgacgattttaaatgaaatccaacaaaattacaatcgattaccgaataaagaaaaacaaattgcgaagtatattttagaaaaaagtgatgaactcaagaatattaacattaaagagctagccgaagaaactggtacgtccatttcgacgataacgaggttttgccgtcatgtgcgttgtgatagttttgttgatttgaaaatgcgggttaacacagcagccacaatggttccgtcgcttggttacgatgatctttttgaagaagtttattcgttttatcataaagtgattgataacacggtgaagctgattgagccggccaaaatccgcgaggttgtacagtatattcaagaagccaaacgagtctatatttgcggcgtcgggagttctggactcactgccgttgaaatgtcgcagcgccttattcgaatggggttaaacgtcatcagtgtcaatgatccgcatatgatgattattactagctcgattacaacaaaagaagattttgttatcggcatttctaattcaggtaacaccccagagctagttactgcactaaaaaacgctaagaaaaacaaaagtaaagtcgctacatttacaagttttgaaaatagtgaaatgaccgaaatcagcgacgtcactattccggtttacaatactttattcgtaagtaaaaggtattttgctaatagccagttttcgattatgtatgtgatggatattatttccatgatgttgctacaaaatgagtcttaccgcgacaatatggaaaaaaccatcaatactgttaccgatgaatttcattaa

SEQ ID NO: 24798 - DNA, 240 bp, Listeria monocytogenes
atggctggaggacgcagaggcggacgccgtcggaaaaaagtatgttactttacttccaatggtattacgcatatcgactataaagatgtagaacttcttaaaaaattcgtttccgaacgtggtaaaattttacctcgtcgtgtaactggaacaagcgctaaatatcaacgtaaacttactgttgctatcaaacgctcacgccaaatggcattactaccatttgttgctgaagaaaaataa

SEQ ID NO: 24799 - DNA, 1047 bp, Listeria monocytogenes
atgtcagacttaattaacattcagaaaaagttattgcccgacgttttgatgattatgcaaaaacgctaccaaatcctacgctcgatttatttttctgaaccagttgggagacggacacttgccggaatgttaggcatgagtgaacgcgtcctgcgcggtgaagtagaatttttgaaagcacaaggtttagtagaaattgcttcttccggaatgaccgttacaaaagaaggcttggtcgttttccgcgatttggaaagtgtcatgaaccaactttcggggttacattcaatggaagaacaattagcgaagaaattgcaaatcaaaaaatgcttggtagtgcaaggtgatagcgatgatactccatgggtccgcgaagaaatgggtcgtgtggcagttgaacaattagacatggcgctcaccgaaaaaagaaacatcgtcgcagttatgggcggctctacaatggcaactgttgccgaaatgatgacaactgatttcgcaaaaggcagagaactacttttcgttcccggtcgtggaggtattggtgaagaccttgacaatcaagcgaatacaatttgtgacaagatggcaacaaagacaaacacgaaacaccgcgttctctatgttccagagcaattaggcgaagaagcctatcgttcgttactgaaagaaccggcaattcaagaaggcttacgattagtacaatccgcaaatgctattattttaggcataggtgacgcgctcgcaatggcgaaacgcagacataccggcgaagatgtacttgaaaaaatcatccatcgtaaagctgttggtgaagcatttggctattattttgatgaacagggcgaggttgtacataaggttcctacattcggtcttcaattcgaagacttagcgcaaatcccacacattatcgctgttgcaggcggtacatcgaaagccaaagcaatcaaatcgtatatgaaaagcgctccaaaaaatacgattttaatcacggatgaaggagcagcaaaatcgcttttaaaagggagtaatacccttttgaaataa

SEQ ID NO: 24800 - DNA, 1314 bp, Listeria monocytogenes
atgcgatttaataccattagcgaaaaaatggatcaatatatttccccgctggctaataaacttagccagcaacgccatttgaaagcaaccagagatgcctttatgtccatgctgccaattacattgtttggttcgattccgattattttgaaagcggctccagtaacagatgatacgaaaaacggcttcctgcttgcctgggctaactttgctgaaaaatatgatttaatcctaaactggattagcggaatcacacttggcgccatgtcgttatatatttgcgtcggtatcacgtattatttatgcaaacactaccacgaagatttcttacgcccactcatgttttctatcgcaggtttctttatgctcgtacttaatccaatcaaaatgggctgggacggcaaagaagtcgacataagtttccttgatggacgcggaatattactttcgattttcgtcgccatcgttaccgtagaaggttatcactggatgcgcaagaaaaatgtcggtcgaataaccatgcccgatagcgttccagcttccctatccgagacattcgcagctttagttcctggtatcattttaatgacctttttctcgattatctttatcattttcaacctactagacacaacagccatccaattcttatatgaaaaaatggcgccgagcttcaaagcagccgatagcttaccattcacgattctaagtattttcctagttcacctattctggttcttcggtgtacacgatgccgcacttgccggaattctaggcccaattcgtgacggaaacctttcaatcaacgccgctgaaaaaatggctggacaagatttgacgaatattttcacgacaccattctggacgtatttcgttatcatcggtggttctggttccgttctcgcacttgcctttttaatgatgcggtccaagtccaaacaactaagcaccgtcgggaaagtcggcttcttaccttccatattcggaatttctgagccgctcattttcggaacaccactaatgctgaatccgattttcttcttcccgttcattttcacatccgtattcaatggcgtcatcacctatctttgtatgtatttcgggattgtcggaaaaacgttcgccgtcttctcctggcaaatgcccgcaccaattggagcatttctatccaccatggactggcgagccatcgttctcgtattcatcctgattttcttaaacggcctaatgtactatccattcctaaaagtttatgagaaaaatctcgtcgctttagaaaaagaagccgaagaagaaaacatcgctgctaattaa

SEQ ID NO: 24801 - DNA, 510 bp, Listeria monocytogenes
atgccaaaccatatcgtactataccaaccagaaataccagcgaataccggaaatatctccagaacatgtgccgggacagatacttacttacatttaatccgtccacttggtttttcaacagacgataaaatgttaaaacgtgctggacttgattactgggataacgtgaaactttcctattacgattctctagatgaattcttcgagaaaaatgaaggcggagaattttattacattaccaaatttggtcgtcatgtttatagcgatatcgattatagtgatacaaacaaagattatttcttcgtttttggaaaagaaacgactggattgccagatgcgcttttacaagagaatgaagaaaattgtttgcgtattccaatgactgaccatattcgttcattgaatttatctaatacagcagcaattttagcttatgaagcgttacgtcagcagaattttggtgcacttttacaagaaccgaattacgatcgaaaaatttttcaagactaa

SEQ ID NO: 24802 - DNA, 729 bp, Listeria monocytogenes
atgacagaagaatttgtgaacaaagaagatgcgctaaaaaattataatgtaaaagagtttcgtacaccagatggctatacgagcgatatgattttaactacagtaaaagaagtaaacgggaaaccaacattacatattttattaattaaacgaagcagtaccaatgcggaaggcagaccaaatatcgaaggcggaaaatgggcggttccgggcggctttgtcgatgaaaatgagtcagctgaccaagctgctgaacgtgaacttgaagaagaaacaagtttgactggtattccgttgattccgtttggggtatttgataaaccgggtcgtgatccgcgcggttggattatttcgcgggcattttatgcgattgtgccaccagaagctttagagaaacgcgcggctggggatgacgcggcggatatcggccttttctcaatgacagaagctttggaactgccacttgcttttgaccatttagatatgcttaaaaaagcgtatagcgcgattacggaagagtttttactgacaacagcaatttgtgatttcttgccagaaactttctcagccgaactactttaccaaacgttagatggttgcacgaagccaggtattttgccggatgaagtagaatttatggagaatatcgagtatttaccgtatttagaaaaagttggtgagttataccgatttaatgcggatgctgaagcaggaagtatttatttttaa

SEQ ID NO: 24803 - DNA, 2460 bp, Listeria monocytogenes
ttgagtaatccagaacaacatatccaagacttagcgctagaagaagttatgggcgaccgttttggtagatatagtaaatatattattcaagaacgtgcgcttccagatgttcgtgacggactgaaaccagtacaacgtcgtattttattcgcaatgaatgtcgaagggaatactgctgagaaaggtttccgtaaatctgccaaaacagtcggaaacgttatcggtaactaccatccacatggtgactcttcggtttacgaagcaatggtacggatgagtcaagattggaaagtacgtaacatgctgattgaaatgcatggtaataacggtagtgtcgacggggatccgcctgcagcaatgcgttatacagaagcgcgactttctccaatatcagcagaacttttacgcgatattgaaaaagaaacagtcgatttcattcctaactttgatgatacgtctagtgagccgacagttttaccagcacgttttcctaaccttttagtgaatggttctacgggtatttccgctggttatgcaacagatattccaccgcataatttaacagaaatcatcgaagctgttattaaacgattagataatccactttgcacaacggatgatattatgaaaattgtcaaaggcccggatttccctacaggtgggattattcaagggattgatggtattcgaaaagcttatcaaactggaaaaggacgcgttgtcgttcgttctaaaacagaaattgaagatattcgtggcggtagaaaacaaattacgattcatgaaattccatatgaagtaaataaagctaatttagttaaacgcatggatgaacttcgtattgagaagaaaattgaagggatttcagaagtacgtgatgaaactgaccgtacaggacttcgtattgctgttgaacttaaaaaagacgccaatgctgaaggtgttctgaactacctgtttaaaaatacggatttacaagtaagctataattttaacatggttgctattaataaaaaacgtccggagctaatgggcattatcccaatgcttgacgcttatattgaacaccaaaaagaaattattacgaagcgctctgaatacgatattcgtaaagcgcgagctcgccaacatattttagaaggtttaattaaagctttgtctattttagatgaagtcattaaattaattcgtggttcaaaagataaacgcgatgcgaaattaaacctccaaacaaaatatgatttcagcgaaaaacaagcagaagcaattgtatctctacaactttatcgtttaacaaatacagatatacatgaacttcaaagtgaagcaaaatcactagcagaacaaattagtgttcttgaaaaaatcctaggcgatgaagcagaacttattgctgttttaaaagaagaactagctgaaattaagaaaaaatataaaacagctcgccgtacagaagtgcaagcagaaatagcagaaatcaaaatcgatacagaagtacttgttgcgaatgaagatgtgattgtttctgtgacgaaagaaggctatgtgaaacgtacaagccaacgttcatatgcagcatcaaatggtgcagaactagccatgaaagaagcagaccatgccatctttatccaaaaaatgaattcactcgattcgctcctgttattcacgagcaaagggaattttatttatcgaccagtgcatgagttgcctgatattcgctggaaaaacctcggggatcacgtgagtcacttggccagtgatttatcggcaggtgaagaaatccgttctgctattgcaattcaagcctttacggaagaaaaacgctttttattcgttactaaaaacggcatgactaagcaatcagctattacgaattacaaaccacaacgctactctaagtctatgatggcaattaagttaaaaggtgacgatgaactgttaagtgttcatttgattgatggcacagaagatattttcttagcaaccaaaaatggttacggtcttcgttattctattactgaaattccagaatcaggtgcaagaacagctggtgtaaaagcgattaacttaaaacaagatgatatagttattggcggtatagtccttatgccgaacgaacaaaaacatattcttcttgccacacagcgtggctcactcaaacaaatgaaagccagcgaatttgaaccaatttcaagagcgaaacgtggcttattgatgttacgcgaactgaaaagcaatccacatcgcttcattggtataacacttgctgataataacgaccacctatttatcgaaacaaacacagaccaaattgttgaaatagatgttgctaatcttcgaataacggaccgctattctaacggatcctttgtactagatgaaacaatggaaggcgaaccaacttctatttggctagcaatacccgaaataaaagatacctcagacgcaaaagaagaataa

SEQ ID NO: 24804 - DNA, 1344 bp, Listeria monocytogenes
atgactatctatcattttgttggaataaaagggtcaggaatgagtgcacttgctcaaatcctgcatgataaaggttttcaagtgcaaggcagcgatgtggataaatatttctttacacaaaaagcattagaagaaaagcaaattccgattatgactttttcggctgataatattcaagaaggcctaacaattattgctgggaatgctttcccggatacacatgaagaaattgagcgtgcactggagcttgggctttcggtgattcgatatcataaatttttaggtcaattaattgatggctatacaagtattgcaataactggttctcatggtaaaacgtcgacaactggtttgctttctcatgtcgttggcgcgattcgcccaacctcttatttaatcggtgacggtacaggcagcggaacaaaagatgcggaatattttgcgcttgaagcgtgtgaatatcaacgccatttccttgcttataaaccaacatatgcaattatgacgaatattgattgggatcatccagactatttcaagagcgtggatgatgtatttaacgcattcgaaacacttggtaaacaagtgaaaaaagctgtatttgccttaggggacgatgctgaattacgtaagcttactttagacataccgattatttactttggttttggcgaggaaaacgaattccaagctaaaaatgtaatcaaagaaacaactggaacaaaattcgacgtgtatcaccgcgaggagttcttaagttcgtttgaaattccagcttacggggaccataacgtattaaatgccttaagtgtaattgcactttgcgattatgaaggtctaccagtagaagatgtaaaaaatgaattaaaaacctttgaaggtgttaaaagaagatttagtattaccgaaaaaggaaaccaagtgttagtagatgattatgcgcatcatccatcagaaatccgtgctacagtgaacgctgctagacaaaaatatcctgacaaaaaagtagttgctgtttttcagccacatacattcacgcgaactcgcacatttttacaaggctttgcggacagcttgaatttagcagatgaagtgtacctttgtgatatctttggttccgcgcgagaaaaaacaggaaatttaacgattgctgatttagcgcacaaaacaaaagggaaccacattatcaaagaagagcacactgaagagctcttgaaatacccagaagctgttattttgttcatgggggcaggagacgttcaaaaattccaggctgcttatgaaaaagtgcttgatcatgaatttttaacagaagctgacttgaaaaaaagtgcgattaattaa

SEQ ID NO: 24805 - DNA, 906 bp, Listeria monocytogenes
atggaaaattatctttgtgtcgacattggtggaacgagtattaaatacgctaaatttaatcaagaaggtaaacgggtgggggaacttaagtcttgtgtgacgcctataactggcggagcgaatcaaatcatgcccgcgcttattcggattgttgaacaagaaaaaacggatgtagcgggcgtctgtgtggcctctgcgggcgttgtggattctgtgaaaggcaaaattatttatgctggctacacgattcccaaatacacaggaactgaaataaaagcagaattagagcaccgatttaatcttccgtgcgcagtggaaaatgacgtaaatgcagcctgtcttggcgagttttggttgggtggagcacgggggtgtgggagcgtgctctgtttgacaattggtaccggaatcggcggagccatgttactaaatgacaaactaataaatggatcgtcttttacagcatgtgaagtgggctatatgcacctttcacaaggaagatttcaagatgtggcttcaacaaaagcattgattaaacaagtagcctcgcgaaaaaatatcgaggaaaatgcgttaaatggtcgtcaagtcatggaatgggcctatagcggagatgcagatgtgctggctgaaatagagcaatggattgagaatttagtagaaggtgtagtaaacttaatctatattttcaacccagaagtgattgtgctcggtggcggattaatggaagaagagtcattcttcaaaccgcgtctaaaagcggctatctcaaccaaattaatctcgccgatgttcgatacagcagatattactttcgcaaagctgggaaatgaagctgggatgattggcgcactctatcatttcttaaaccagaaagaggccgaaaaagatgacgattttaaatga

SEQ ID NO: 24806 - DNA, 1635 bp, Listeria monocytogenes
atgggagacataaatattcagcagatgatttttcaatttatcggaggacttggaatttttcttttcggtataaaatatatgggagacggactgcaaatggcagctggcgacagactccgcgatattttagataagtacacaacgaatccttttatgggtgtacttgccgggattttagttaccgtattaattcaaagtagctcgggtacgactgttttgacggtcggattagtaagtgccggatttatgacgttaaaacaggcaattggtgttatcatgggggcgaacatcggaacaaccgttaccgcctttattattggtattaagctatccgagtattctttaccaataattgctgttggtgcagtacttttattcttctttaaaaatcataaagtgaaaaatattggccaagtattctttggatttggtgcgttattttatggactggatttgatggggcaagggatgaaacctcttgctggaatggaatctttccatgaattaactgcacaaatgagtacgaatccattcttaggtttgctaatcggaacaatcttcacggcggttgtacagtcatcgagtgcgactatcgggattttacaagaattatatgggcaaggtgcgattgatcttcaagcggccttaccggttctattcggtgacaatatcggaacaaccatcacagctgttcttgcagcgattggtgcgagtgttgccgcgaaacgtgcagcagcgacacatgttatctttaacttaatcggtgcaatcattttcatgctgatacttccgctattcacttctctggttgcctacctgcaaggaatgtttggactaaacccagaaatgacgattgcggttgcgcacgggacgtttaatattacgaatacctttattcaattctggtttataggtgcatttgcatggcttgttacgaagcttattcctggcgacgactcgcgaattgactataaaacaaaacatttagataccaatttaatcgatcaatctccgggtattgcactggaaatggctcgtgaggaaacgcttcgtatggcagattacgcgaaatttggtttgcaagaagcgagacaataccttgtgaaccgggactcaaagcatgcggaatccactgttcaagtagaagaagccgtaaataatttagaccgaaaaatcaccgagtacttaacgaaaatttcttctgtcgccttaacaaacaatgaaacagaagaacatgcgctaatgcttgataccgttcgtgatattgaacgcgttggtgatcacatggaaaacatcgtagaaaacatcgatcaactaattaaaaataaagcgaaaatgtcagaagaggcttccgagcaactcattgaaatgtttgagctgacaaccgcgaactttgaacgagcagtgaaatccatgcataaaaaagatcgcgcactcgcagaagaaactattttagtagaaaaagatattgataaagcagaacgcagactacgtaaaaatcatattcgccgcttaaacgaaggcaaatgccaagttgttagcggaattttatacattgatatcgtaagtgatttagagcgaattggtgaccatgcaaacaatattgctgaatctgttttagaattaaacgaataa

SEQ ID NO: 24807 - DNA, 363 bp, Listeria monocytogenes
atggctttaaacattgaagaaatcattgcttccgtaaaagaagcatctgtattagaacttaacgatttagtaaaagcaatcgaagaagaatttggcgtaactgctgctgctcctgtagctgtagctgctgctggtggagctgctgctgagcaaactgaattcactgtagaactagcttctgctggagattctaaaatcaaagtaattaaagtggttcgtgaaatcactggtcttggcttaaaagaagctaaagaattagttgacaacgctcctaaagctcttaaagaaggcattgctaaagacgaagctgaagaaatcaaagctaaacttgaagaagttggcgctaacgtagaagttaaataa

SEQ ID NO: 24808 - DNA, 927 bp, Listeria monocytogenes
atgacaaaaacacttgtattcggtcataaaaatccagatacagatacgatttgttctgccattagttacgcagaattaaaaaaagcacaaggagcagatattgaagcggttcgtttaggagagcttaatagtgaaacagcttttgttcttgattatttccaagtaacagctccacgcctagttcaaacagttgcgaatgaagtttctgaagtagcacttgttgatcataatgaacgccaacaaagcgtagatgatattgacgatgtaacagttacagctgtagttgaccatcaccgtatcgcaaacttcgaaacatctgatccactttattaccgtgctgaaccagttggatgtacaacaacaattcttctaaaaatgttccgcgaaaatgaagtagaagtaagcaaaacagttgcaggtctaatgctttccgcaattatttcagacacacttcttttccaatcgccaacgtgcacggaagaagataaagtagctgctcaaaaattagcacagattgcagacgttgatattcaatcatacggcatggaaatgctaaaagcaggagcagatgttagcaaaaaaacagtagctgaactcctactagatgcgaaagaattcaacatgaacgataacaaagtagaaatcgctcaaatcaatgtagtggatgtaaacgatgtacttagccgtcgcgcagaagtggaagcacttatgacacaaaatattgtggataaagggcttgatttatatctattcgtcatcactaatatcctaactaatgactctgttggaatcgctattggttcaaaaacagcagtcgtagaagaagcatatggtgttaaatttgtcgaaaaccaagcaccattaaaaggcgttgtatctcgtaaaaaacaagttgttccaatcttaacggacacatttgctaaataa

SEQ ID NO: 24809 - DNA, 318 bp, Listeria monocytogenes
atgattcaagtcgatgttatgcgagaagataaccaaataatttcttttacaatgagtggacacgccgattttgccgaacatggcagtgatttggtatgtgcaggagcttcgtctattgcttttggaatggtgaatgctatttcggaagtacgtgattttgatcctgtaatagaagagtcggagggttacctttactattctgtgcctgctgattatgtaggggatgacgtggtgcaaatcttgcttacggggatggaaaatcaactaaggtcattagcgtacagctatcctgatcatataaaaattaactccaaatag

SEQ ID NO: 24810 - DNA, 1923 bp, Listeria monocytogenes
atgaaaatcacatttccagacggtgcagtaaaagaattcgagccaggcgtttcaacagctgatattgccgcttccatcagcccaggcctaaaaaagaaagcactcgcaggtaaattaaacggggagttacttgatttagtaacaccaatccacgaagacggagcaatcgaaatcgtaacaccagaccatgaagatgcgcttggtattttacgtcacagtacagctcatttaatggcacaagcattaaaacgactttatccagatgtgaaatttggcgttggcccagcgatcgaatctggtttctattatgatattgatacagaagcagttattagtgatgaatcactcgttgaaatcgaaaaagaaatgcaaaaaattgttcgtgaaaatgttccaattgagcgcgaagttgtttctcgcgaagaagcaattaaacgtttcaaagcaattggggatcaatataaattagagcttatcgaagcaatcccagaagatgaaacagtgacaatttatacacaaggtgaatttttcgacctttgtcgcggagtccatgttccttccactggtaaaattcaagtgttcaagctgcttagcgtggctggtgcatactggcgcggagatagcaacaacaaaatgcttcaacgtatttacggtacagctttcttcgataaaaatggcttaaaagaatttatccaaatgcaaaaagaagcgaaagaacgtgaccatcgtaaattaggtaaagaactagaattatttacaaatagtatcgaagttggccaaggtttaccactttggttgccaaaaggtgcgactatccgccgcgttatcgaacgttacatcgtggataaagaagaacgtcttggttacaatcacgtttacactccaattatggcaaacgtggaactttacaaaacaagcggtcactgggatcactaccatgaagatatgttccctacaatgaaaatggataacgaagaacttgtgttacgtccaatgaactgcccgcaccacatgatgatatataaaaatgatatccatagctaccgtgaattaccaatccgtatcgcggagcttggtatgatgcaccgttatgaaatgagtggggcactatcaggacttcaacgtgttcgtggaatgactttaaatgatgcacacgtatttgtccgtcctgaccaaattaaagacgaattcaaacgtgttgtcgaactaatcttagaagtgtataaagactttgatattacagattactccttccgattaagctaccgtgatccgaaaaatacagaaaaatattttgacgatgatgctatgtgggaaaaagcacaagccatgcttaaatccgccatggacgaaatggaaatggattactttgaagcagaaggtgaagctgcattttacggtccaaaactagatgttcaagtgaaaactgcaattggaaaagaagaaacgctttctactgtacaacttgacttcttactccctgaacgctttgacttaacatatattggcgaagatggtgaaaaacatcgtccagtcgttattcaccgtggtgttgtatcaacaatggaacggtttgtagcttatctaattgaagaatataaaggtgctttcccaacttggttagctccagtacaaatggaaattattccagttaacgcagatgcacatttagattatgcaaaaggcgtacaagataaattgcaacgagctggacttcgagctgaagtggatgatcgtaatgaaaaattaggctataaaatccgtgaagcacaaacaaagaaaattccttatgcgttagtattaggtgaccaagaagttgaggctggatctgtaaacgttcgacgttacggctccaaagactctgaaacaatggatttagatgcgtttatcgcacaagttgttgctgaagtaagcaaatattaa

SEQ ID NO: 24811 - DNA, 2046 bp, Listeria monocytogenes
atgatggaaaaaggtatttggaaagatgcgctgattcagtcgacgaaaaaactgtctccaaaactgcaagtgaaaaatccggtgatgttgcttgtttatgttggtgcgattttggcaacgagcctttattttctcggtttcttcgggatttcggatgagaagtctggttatacgctagcaattgcgctgattttatggtttacagtgttatttgcgaattttgctgaggcgattgcggaaggtcgtggtcgagcacaggcggatagtttgaaaatggctcgaaaagacgttttagctcgaaaattaaagaatgttgatgataaaactgatgtgattgaagttgcttcgaatgacttgaaaaaaggcgatattgtgtatgtccttgcgaatgaacaaataccgatggatggcgaggtcattgaaggtgcggcttcggttgatgaaagtgcgataactggggaatctgcaccagtaattcgagagtctggcggggatagaagtgccgtgacgggtggaactacacttgtttccgattggctggttgttcgtgtaacggcggtctctggagaaagtttcttagataaaatgattgcgatggtggaaggtgcttcacggaaaaagacaccgaacgagattgctctacaaattttgcttgtaacgctttcgattatttttctggcggtttcagcgacacttttaccatttactgaatttgcgagtaagcaggcgggtgctggatcggcaatttcgattacgaatgtgattgctttgctcgtttgtttggcgccaactacgattggtgcactactttcgtcgattggaattgcagggatgagtcggttaaatcaagcgaatgttttagcgatgagtggtcgtgcgattgaggcagctggcgatgtggatgtgcttttgctcgataaaactgggacgattacactgggaaaccggaaagcaagcgaatttttgccagtggatggtgtgacggaacaagagctagcagatgcggcgcaactttcttcgattgcggatgaaacggcggaaggtcgcagtattgttgtgttggcgaaagaacgctttgatattcgtggtcgagattttgctgaaatgcacgcagaattcgttcctttcacggcaacaacgcgaatgagtggaattgattatcaagaaaatacgattcgaaaaggcgcggcggatgcggttcgtgcatatgtaacggcgaatggtgggacgtaccccaaagagtgtgatgcgattgtgagtaaagttgctggagctggtggtacaccgcttgtcgttgttcgtaacaatcaagtgctgggcgtcatttatttaaaagatatcgtgaaaaatggtgtaaaagaacgttttctcgatttacgaaaaatgggtattaaaacaattatgattactggcgataatccaatgaccgcagcagcaattgcggcagaagcaggagtcgatgattttctagcagaagcaaccccagaagcaaaattggaattaattcgtgaatatcaacgggaaggccatttagtggcgatgacaggagacggaacgaatgatgcgccagctcttgcgcaagcggatgtggcggttgcgatgaatacaggaacacaagctgcaaaagaagctgggaatatggttgatctggattctagtcctactaaattaattgatattgttcggattggcaaacaactgctaatgacacgtggggcactgacgacttttagtgttgctaacgacttagcaaaatactttgcgattattccggtgttattttacggtatttttccacagcttgaagcgcttaatttaatgggattaacaagcccgacgagcgccattttatccgcgattatttacaatgcggtgattatcattgttcttattccgctttctttaaaaggtgtgaaatatcgtgaaatgcctgctggaaaattactgagccgaaatatgttgatttatggtctgggggggttgattgctccatttatcgcgattaaattgattgatatgctattaactgttctaggaatcgtttaa

SEQ ID NO: 24812 - DNA, 774 bp, Listeria monocytogenes
ttgctatttgatacgcatgtacaccttaatgacgaggcttttgatgatgatatagaagaagtaataaaacgcgcgcaggaaaacgatgtgactcgtatggccgtggtgggctttaataaagaaacaattgaccgggcgcttgaattagcggagaaatatgattttatctcattaatcgtcggctggcatcccacagacgctattacctttacagacgaagatttagaatggcttcgtgatttagcactgacacacccaaaagtagttgctttaggcgaaatgggcttagattatcactgggatacttcgccaaaagaaacgcaattcgaggtttttagaaaacaaatccgtttagcgaaagaagtgaatttaccgatagttattcacaaccgcgaagcaacggaagatgttgttcgtattttgcaagaagaacacgccgaagaagtaggcggaattatgcattgttttggtgaaactgtcgaagtaatggaagcatgcttagcgatgaatttttacatttcgttcggtggaacagtcacttttaaaaacgcaaaattaccgaaaattgcagcccaagctataccaattgaccgtttattaattgaaactgacgcaccttatctcgctccgaccccaaatcgtggaaaaagaaatgaacctggatacgtcaagttagttgccgaaaaaattgcagaactgaaagaaatgaaatatagcgaaatcgctacgcactcaacggaaaacgcgaaaagactatttagaatcaaagactaa

SEQ ID NO: 24813 - DNA, 813 bp, Listeria monocytogenes
atgattagagcgatttctgtagatatggatgggacttttttagatggaaatggtgaatatgatcgtgctaggtttgagaagatttatgcagaattaatgaagcgtgggattaaatttattgttgcgagcggcaatcaatattatcagcttaaatcattttttcctggcaaggatgaggagcttttttatgtggctgaaaatggggcggttatttttcatcaaggagaacttcggagtgtgaatcgttttgatgaaagattagttcaaaagattttgtggacgttgattcaagattatcatgatttgcaagtgattctttgtggggtgaagagcgcgtatttattaaaagccgccgatccagattttaaagcatttgcgaaaaagtactattttgagttacaagaggtggagtcattcgatgtgcttccggatgatacgtttatcaaatttgcgcttgatgtagaagtggctaaaacagggcaaattgtcgaggatttgaatcaaacgtttgttggcgaaattcgcgctgtgtcgagtgggcatgggagcattgatattattattccgggtgtgacgaaagggaacgcgattcagcaacttttgaatgaatggcaagtggcgccagaagatttgttagcttttggtgatgcgaataatgatatcgaaatgttgcaactaacttcaaatagttatgcaatgctagaaagtagtccagaagttcttgctgccgcgaaacatgtggctccttctaataaggaggcgggcgtgttacaggtgatagaggaatacatgaaaaaaagccaaagattttga

SEQ ID NO: 24814 - DNA, 519 bp, Listeria monocytogenes
atgatttgtcaaagatgtggagaaaataaagcagttatagccttgcaacaattaaatgagcttgggaaagtggagtcattgtacctatgcgagaattgtgctacggacgaagctctctcctcagaaaaagatttagttaaagcgatggacacttttagtgaggttgctcttgatttcttaacgcttttgcaaaaagaggaaaatacgcagaaagaggttgtctgtgagaattgccagcttagttttgaagagtttttaaagactaatcgagttggatgtccggagtgttattcggcttttgaggcacagttagtaccgattattggtcgagtgcaaaatggatataaaaaacatattggtaaggttccagcagaagttgaacgagcggaaggtgtacaaaatgaaattagtcgtttacaagaaaagttagcaaagctagttaaaaatgaggagtttgaggaagctgctgttgtccgtgatgaaatcaaggctttgaaagctggaggtgaggataaatga

SEQ ID NO: 24815 - DNA, 597 bp, Listeria monocytogenes
atgcattatcctgagccgataacgaaattaatagatagttttatgaaattaccaggaattggaccaaaatcggcagctcggctagcattttatgtgttagatatgaaagaagacgatgtgctagattttgcaaaagcacttgttgatgcgaagagaaacctaagcttttgttccgtttgtggtcacattacagataaggatccatgttatatttgtgctgatacgtcacgcgatcgaagtgttatttgtgtggtacaagaatccaaagatgtcattgcaatggaaaaaatgcgtgattttcatggcttataccacgtgcttcatggcacaatttctccaatggacggaattggaccagaagatattaatattcctgatttgctgaaacgtttgcaagatgacactattgaagaagttattttagcaacaaatccaaatgttgaaggagaagccactgcgatgtatatttcgcgtttactaaaaccttcaggcataaaagtaacgagaatagcgcatggccttccagtgggtggagacttagaatatgcggatgaagtgacgctttcaaaagcaatggaaggacgaagagaagtctaa

SEQ ID NO: 24816 - DNA, 969 bp, Listeria monocytogenes
atgaaaaaggaaacgaaacctagagtagtagtaatcggtggggggactggtcttccagttattttaaaagggcttaaaaagaaggacattcatctaacggccatcgtgacagtagcggacgatggtggtagttctggtaaaattcgcgagcaaatggatgtgcttccaccaggtgatatacgcaatgttatgctggctttatccaatgtcgatccacgtgttgttgatttattccagtatcgttttgcggtagatggtgatttatcgggacatgttattgggaatttgattttaacggctttatcgcaattgaatgatagttatgttgatgcgattaatgtgctagcaacggtgctgaaaatccgcggcaaagttattccagcaacggatcaaccacttattttaaatgccgaaatggaagatggttctattgtgcacggtgaatcgcttatcccgttacaaggaaagcatattaatcgtgtgtatatcgaaccagaaaatgtaaaaccttatccgacagcagtcgaagcagtgaaagaggctgatttgattgttattggtccaggaagtttatacacaagtatcttaccaaatctattacttacggagttggccgatgaaatcacagcaagtaaggctccgaaagtttatattacgaatattttaacgcaaattggcgaaaccgactttttctcagatgcggatcacattaaagttatccatgagcatgtggggaaatcatttatagataaaacgttaattaatacgacgactgttccaaaagagcttctattcccagaagacgttgcgcaagtagagcataatgctaaaggaatggaagaacttggtgtagaagcaatttatcaagattttctttctacagaggatggtcttgtgcgccatgccgctgaaaaggtggcggacgcgcttttagcgatgttacctaaccaaactaatgaaaaggagtga

SEQ ID NO: 24817 - DNA, 2652 bp, Listeria monocytogenes
atgacaaccgaacacaatgaaataaatatgcctacaaaatatgagccgagtaacgtagaagcaggtaaatataaatggtggctagaaaaagaattttttaaagcagaaggaaatacggataaagaaccttacagcattgttattccaccaccaaacgtaacaggaaaactacatttaggccatgcgtgggatacaactttacaagatattattactcgaatgaaaagaatgcaagggtttgacacattatatttaccaggaatggatcatgctggtatcgcaacgcaagctaaagtagaagcgaaattaaaagaatctaatatttctcgttatgacttaggacgagaaaactttgtggataaaacttgggaatggaaagaagaatacgcagagtttatccgtgaacaatgggagaagttaggccttggtttagattactcaagagagcgatttacactagatgatggtttatctgatgctgtcaaaaaagtatttgtaacattatataataaaggtcttatttatcgcggtcaatatataataaactgggatccagaagcgaaaacggctttatctgatattgaagtaattcataaagatattgaaggcagtttctatcatttgaaatatccattaactgatggttctggttacctagaagtagctacaactcgtcctgaaacaataccaggtgatacagctgttgcggttcacccaaaagatgaaagatatcaacacttaataggtaaaactatcatgctaccgattttgaatagagaaatccctattgttgctgatgaatatgttgaaagagagtttggctctggtgcagttaaaattacgcctgcacatgatccgaatgattttgaagtagggaatcgccataatttaccaagaattattgtcatgcatgaagatgggacaatgaatgaaaatgctggtaaatatgatggtctggaccgttttgtagctagaaaagaaattattcaagatttcaaagacttaggtttatttatcaaacaagaacctcatttgcattcagtgggacattcagagcgaactggagcggtagtagaaccctatctttcactacaatggtttgtgaaaatggaacctcttgctgcagaagcattagaacttcaaaaaacggaaaacaaagtgaattttgtaccagctagatttgaaaaaacatatgaaacttggatggataacattcacgattggtgtatttcgcgtcaattatggtggggtcacagaatcccagcttggtatcataaagaaacaggtgaaatttatgttggtgaaaaagaacctgaaaacctttctgaatgggaacaagatgaagatgtactagatacttggtttagttcggctttatggccattttcaacaatgggctggccagatactgagagtccagatttccaacatttcttcccaactaatactttagtaactggatacgatattattttcttttgggtatctagaatgattttccaatctgttgaatttactggtgagagaccttttaaagacacattgattcatggcttagtgcgtgattctgaaggtcgtaaaatgtctaagtcacttggtaatggtgtggacccaattgaagttattgacaaatacggagcagattctcttcgttatacacttgcaacaggttcatctccaggtcaagatttgaaattcagctatgaaaaagtagagtctacttggaatttcattaataagatttggaatgcatcccgctttgtattaatgaatttagatggaatgaaatataatgaaattgatttgtctaatgttactgaagttagtgataaatggatattgactagacttaatgaaacaattcaagcggttacctccttaggtgaaaaatatgaatttggtgaagtgggaagaacgttatataactttatttgggatgatttctgtgattggtatatagagatcgcgaaaatacctctttacggagaagatgaagttgcaaaacaaacaactagatctgtacttgcgtatactttgaatgcgactatgcgattacttcatccattcatgccttttgtaacagaagaaatttggcaaaatttacctcacgaaggggaatctattacaattgctgaatggccaaaagtgaatgaacaacagattgatactaaatcttctacggccatggctactttagttgaagtgattcgtgctgtccggaatattcgatcagaagtgaatacgcctcttagtaagccaattgttcttgaaattaagccgaaagatactacgtataaagaaattctagaacaaaatatttcttatattgaacgtttttgtaaccctgaacaagtgacaatttccttcgatgttgaagcatctaaaacggcgatgactgctgtagtatctggagcagagattttcattcctttagaagcgttaattgatttaaatgtagagattgctcgacttgaaaaagaactagaaaaatggaataaagaagtggcaagagttcaagggaaactaaacaatgagcgattcattagcaaagctcctgagagtgtagttgcagaagagcgtctaaaagaaaaagattatctagataaaaaagcctctgttcttgaaagaattgaaacgttaaaagaagtataa

SEQ ID NO: 24818 - DNA, 576 bp, Listeria monocytogenes
atggcacaattatttttccgttatggttccatgaatagtgggaaaaccattgaaattctaaaagtcgcacataattatgaagaacaaaataaaacagtagctatctttacttcaggtattgacgatagagaccaagttggcttcatttcaagtcgaattggactgaaacgagaagcaactcctatttttagtgacacaaatatttttgaaatcgtagtgaatattaaaccaaaaccaaattgcgttcttttagatgaatcgcaatttctagaaaaagaacacgtatttcagttagcgaaaattgtggatgaattaaatatcccagtaattgcttatggtttaaaaaatgattttcgaaacgaattattcgaaggctcgaaatacttgctgctatatgcagataaactagaagaaatgaaaacaatttgctggttctgtgccaaaaaggcgacgatggttctgcgcgttgatgacaaaggaaaaccagtttatacaggtgaacaaattatgattggcggaaatgaccactattaccctgtgtgtcgcaaatgtcatgccaatccaccaataaaataa

SEQ ID NO: 24819 - DNA, 1569 bp, Listeria monocytogenes
atgagtcaagatttgcaaaaagaagttgcttcacgcaaaacgtttgcgattatttctcacccggatgctgggaaaacgacgattactgagcaattattattattcggtggcgttatccgttcagctgggactgtaaagggaaagaaatctggaaagtttgcgacaagtgactggatggaaattgaaaaacaacgtggtatctcggtaacgagttctgtgatgcagtttgattataatggttcaagaattaatattttggatacaccgggtcactcggatttcagtgaagacacgtaccggacattgatggcagtggatagcgcggtcatggttatcgatgctgcgaaagggattgaagctcaaacactaaaactattcaaagtttgtcgaatgcgcggaattcctatttttacttttattaacaaaatggaccgtcaagggaaaatgccactggaattgcttgctgaactagaagaagttcttggcattgaatcgtatccaatgaactggccgattgggatgggtaaagagcttgctgggctttatgaccgttaccaccgtgtgattgagcaatatcgttctgaggaagatgagcgtttcttaccacttggtgaagatggcgatttgaaggaagcgcacgctattcaaaaatcactttattacgatcaagctctggaagaaattatgttacttgatgaggctgggaatgactttagtcgcgaacgtattattgcgggtgaacaaacaccagtatttttcggtagtgccttaacaaactttggtgtagaaactttcttgcgcacatttgttgattttgcgcctgctccttctagccatgaatcgaatgaaggtgtgattgaagcagataatccaaagttttctggttttattttcaaaatccaagccaatatgaatcctgctcatcgtgatcggattgcctttattcgaatctgttcaggtgaattcgaacgtggcatgaacgttacgttaacacgaactggaaaaagtttgaaacttgctaactcgacacagtttatggcagatgaccgggaaactgttaatcgtgcggtagctggtgatattatcggtttgtacgacacaggtaattaccaaattggcgatacgattactaatggaagtaaaaagctcgaatttgaaaaacttccgcagtttacaccagaattatttatgcgtgtttatgcaaaaaatgtcatgaaacaaaagcatttccataaaggcgtagagcaactcgttcaagaaggtgcgattcaattatttaaaacatggcgcacggaagaatacatcattggagctgttggtcagttgcaatttgaagtattcgaacacagaatgcgcggcgaatataattcagaaatccggatggaaccaatcggtaaaaaaatcgctcgttgggtcaaagaagaagatgcggatgaaaaactatccaccgctcgaagcatgctcgtaaaagaccgtttcgaccaaccgttattcttattcgaaaacgaattcgcgattaattggtttaatgataaaaatccagatattgagttaacttcattactataa

SEQ ID NO: 24820 - DNA, 1002 bp, Listeria monocytogenes
atgcaattattaaaggataaatttgggcgggtacacgattatattcgtatttcagtaacagatcggtgtaatttaaggtgtgtgtattgtatgcccgaagaaggcctgacatttttgccccatgaaaaagtactatccaaagatgaaattgtcagttttatggaattaatggtgaaattcggcatcaaaaaagtacgcatcactggtggagagccattacttaggaccgatattgtggaaattgttcgcgggcttggagcaattcctgaaatagaagatatttcgattacaaccaatgctatgtatttggcgaaaaaagccgaagcgctgaaggaggcggggctcacacgtgtaaacatcagcttagattcccttcacgcagatcgttttaaagcaattacacgaggcggtcgtttgcaaaaagtactcgatggcattcaaaaagcagaagaagttggattgtttccaattaagcttaatgtcgtcctaattaaaggacaaaatgatgacgaaataacggatttccttcgatttacaaaagataaagatattaatattcgtttcattgaatatatgccaattggtcatgctggtacgagttggaaagaaaaatatttgccgctggatacaatttttgaggcttgtaatgaagctggttatgagtatgaaccagtggactcaattcgtggaaatggcccctccgaaaatttccgtattaaaggagcgaaagggacgtttggtgtgattcacccggttagcgctcatttttgtgatagttgcaaccgactcagacttaccgcagatggttatattaaagcgtgtttatactgggatgaagaaatgaatattcgcccatttatccaagatccagtcaaattaatgcaactggtgcaaaaagcaattgataataagcctgaaaatcatgaaatggcattaaaattacaagatgaagtacaatctaataaaccaacttggcggcgtatgagtcaaattgggggataa

SEQ ID NO: 24821 - DNA, 2049 bp, Listeria monocytogenes
ttggagatatttttatatgttttagcattacttgtagccatctttatttctaatttactcaaccggtttgttccctttgtttcggtaccgctgatccaaattggtcttggtgtattaattgccattatgccgattacgtttaatttgcaattaaacccagaactttttctagtcatgtttattgcgcctttgctatttaatgatggcaggcagactgataaagcagctctttggggtatgcgaatgccgattttagtattagcgcttggactggtgtttgcaacggttgtcgtgattgggtattttgttcactggatgattccgacgattccactagcagctgcttttgccttagcagcagctcttgcgccaacggatgctgtagcagttagttctctttctgggcggattaatttacccaagcggattatgaatttgcttgaaggtgaggcattaattaatgatgcgtcaggactagttgccttccagttcgcgattgcagctatggtaaccggcgtgttcagtttaatggatgcgagtattagcttttttgttatagctattggtggtattttagtcggacttattttgagttggttaaaattccgattgttaaaatgggttcgcggccttggaatggaagatgttacgtttcatatgcttatccaaattttgacaccatttattatttatttagcagcggaagaaatacatgtttctgggattttagcggttgttgcagctggaattatgcattcaatggaacaaaagaaaatggatcctcagttggtgaaattaaatgtggtttcgcagagcacttggtcggttatcatttttgttttaaatggcttagtatttttattattaggaacacaacttcctgcgattacagaagtagtgtggaatgattctggaagtagtaatttacaagtaatggcttacattttgtctatcacggcagccttaattttactgcgctttatatgggtatacatatcgtggagcatcggcgcgaagcaaagacagaaacaaaataaaaaaacacaactacctaaatttagaccggttgtacttacatcgctttctggtgttcgcggggcagttacacttgccagtgcgctcgcaattccatttttcttagatgacggatcactatttccgcagcgctcactaattatttttattgcatccggtgttattctttgtacattagtgattgcgacatttattttaccgttacttgccaaaagtgaagaagtgacaacggaagatgaacgagctgaaattgcaacgcggattcgaatcctgagaaacgtgattagagaattaaaagagcagacgctacctgaaacgaaagcagcaacggatgaagtaattgaagattatcgcaaaagaatttacgatttacagcaaaataatagttcgaatcgaggcatggatgaaagagaacgtgcgaaacgattagaaatcatccagtgggaacgtgaaaacacccaaaaaatgaccgatgaaggacgcattgttgctacagatagttatcgttatcaacactatcttaatatgatggaacaagcaatcaaacaacgcttccggacaaaagtaaaaacagcatggatgttcctttatcgtctaataatgcttgtcattcacccgaaaaaatggggtagaataacgcataaagtgaaaaaaggtatttctaaagacagcgaacgattccaagcaattcgccaattacgcgaagataatgaaatacttataatttctaaactcaaagaacaattaacgaaagagaatgttgatataattggaccactaattaccgaacacactattttcttagaacgcgtgagaaaagagcacagtccaagaggtaagcgagcaaaattcgaacagaaaaaacgcgaagtccaagtggtggctttccaattagaacgtgatattatacagaatatgtttgaaaaaggcggaatctcgagagagttagcccgagacttacgccaaaatttaaatatgatcgaaacgtacttatatgatgactttttagaataa

SEQ ID NO: 24822 - DNA, 717 bp, Listeria monocytogenes
ttggaagaggaatttccaacgataagcctattagggatcgactttaatctatctaatattttgatgattactgtgacttgtgtcatcgttcttctaatagccattatctgtaccagaaatctgcaacgccgtcctaccggaaagcagaacttcattgaatgggttatggattttgtcagaggtattattaatagtaatatggattggaaaaccggtgggagattccatgtgcttggtattacgatattaatgtttgtcttcgttgccaacatgctaggactaccattacaaatcgcagtaaacgatgaagtatggtggcgttcacctacagcggatccaattgtcacattaacacttgcgataatggttcttggcttaacgcattactacggtattaaaatgcgtggtttcaagcactactttgttggtacttacttgagtccaatgaaatttttattcccactaaaattagtagaagaatttgctaatacattaacgcttggtttacgtctttacggtaatatttttgccggggaagttttgttaaccattattgctactcaacttgcacatattaatatatttgtaggtgttcttgcgataattccagcgattatatggcaggcgttctcactctttattggggcaattcaagcgtacattttcactatgctgacaatggtttacatgtcacataaggtcagtgacgaacattaa

SEQ ID NO: 24823 - DNA, 1014 bp, Listeria monocytogenes
atgtttggatttggtaataaagatattggaattgatttagggacagcgaacacacttgtctatatgaagggaaaaggtattgtccttcgtgaaccttccgttgtggcaatgaaaaaagacacacaagaaatagttgcagttggtagcgatgctaaaaatatgattggtagaacaccaggaaatattgttgcaattcgtccaatgaaagatggcgttattgctgattatgatacaacagcagcaatgatgaagtactacatacaaaaagctggtaaaagtgttaatgcaagtaaaccacgcgtaatgatatgtgtaccttctggaattacaggtgtagaaaaacgcgctgttattgatgcgactcgtcaagcaggtgctaaagacgcatttacaattgaagaaccgtttgctgcggctattggtgctggacttccagttggcgagcctacaggtagtatggttgtagatattggtggaggaactacagaagttgctgttatttctctaggtggtattgtaactagtcgctctgtgaggactgccggtgatgatttagatgaagttatcattaattacattcgtaaaaaatataatctattaattggtgatcgtactgccgaagcaattaaaatggaaattggctcagctagtccaaaaggtttggacttatctccatttagcattcgaggacgcgatttagtaaccggacttcctaaaactattgaaattactccagaagaaattagcgaagcacttgctgatacagtagcagctattattgatgctgtaaaaggaacacttgaaaatacgccaccagaattgtcagctgatattatggataaaggtattgtactcacaggtgggggagcgcttttacgtaatttagatacagttatttctgaagaaacaaaaatgcctgttattattgcagatgaaccacttgattgtgttgcaattggaacagggaaagctttagaaaatatggatatgtataaacgtaaaaaaatgaactaa

SEQ ID NO: 24824 - DNA, 1962 bp, Listeria monocytogenes
atgaaggattggaaaataaaaatccaaacgtttttaagcaagaattatggattttttgttctagccgtcattctttattggctaaaaacgtatatcgcatatcaacttgaatttaaacttggcatagaaaatctgatgcagcaaattttgctgttcattaatccattaagtggggccattttctttatgggtcttgcgctctttgccaagggacgtcgttcattcatttggattatcgtcattgactttttaatgagttttattctttacgcaaatattgtatattatagattctttagtgatttcattacgcttccgaatctaaacgcaaaacaaatgcaaaacatgggcgacatgggaagtagtatcacagcgttactcagctggcacgatattatttacttcgcggatattatcattttaattgcactacttgctttccgctttgtaaaaccaaacaaaacagcccgtattcgtgcgagaaaagtagttggggttctaacgcttggtatcgcaatgttctttgggaatttgggacttgcagaaattgatcgtccacaacttttaacaagaacatttgatagaaattatattgttaaatatctaggtatgactaactaccaaatctacgacgcagtgaaaagtactgaatcatctacccagcgtgcacttgctgatagtagtgatgttactgaagttttaaactatactaaatccaaatatgccgcgccaaacccggaatatttcggtaaagcaaaaggcaaaaacgtcatttatattcatttagagagtttccaacaattcctagtgaattacaaattaaatggagaagaagtaacgccgtttattaactctttctttaaagaccaaaatacactaagctttacaaacttcttccaccaaactggacaagggaaaacagctgactccgaaatgttacttgagaactcgctttacggcctgcctcaaggttctgcctttactactaaagggcaaaacacctatgaatctgcatctgctattttaggccaacaaggctatacaagtgctgtattccatggtaactataagagcttctggaatcgtgatgaaatttataaacaattcggttacgacaatttctttgatgccagttactatgatatgaacgaagcagatgtttctaactacggacttaaagataaaccattctttaaagagtccgaagaatatctatcgtcattacaacaaccgttctacacgaaatttattacgcttacgaaccatttcccttatccaattgatgagaaagatgcttcgattgctccggcaacaacaggcgattcatctgtagatacgtatttccaaacagctcgttatttagacgaatctgtgaagagctttgttgattacttgaagaaatctggtctttacgataactctgtcattatcatgtacggtgaccattatggtatttccgacaaccatgaagaagcaatgacaaaaattcttggtaaagattacaacacttttgaaaatgcccaagcgcaacgtgttcctttaatgattcacgttcccggtgttcaaggtggcgttcaagaacaatacggtggccaagttgacctacttcctacattacttcacttacttggtgttgataataaagagtacttgcaatttggtacagatttactttctaaagaccataaacaacttgttccattccgaaacggtgattatataactcctacctattcaatgattggtggtaacatgtataatcaacaaactggggaaccgattgctacggaaacaaaagaaatgaaagaaaccaaagaaaaagtagcaaaagaattagagctttcagattctgtactacaaggtgacttgttgcgtttctatgctcctgatggtttcaaaaaagtggatccaagtaaatacaattacaataagaaaaaatcaactgattcatccgataaataa

SEQ ID NO: 24825 - DNA, 342 bp, Listeria monocytogenes
atgacttcggaacaatttgagtatcacttaacaggcaaagaaattttggaaaaagaatttaaaactgggcttcgtggttatagtcctgaagatgttgatgagtttttagacatggttattaaagattacagtacatttactcaagaaatcgaagcgcttcaagctgaaaatattcgacttgtacaagagcttgataatgcaccgcttagaacttcaacacaaccagctccaactttccaagcagcggcacaacctgctggaacaaccaactttgatattctaaagcgtctttctaatttagaaaaacatgtttttggaaataagctggacgataacgaatag

SEQ ID NO: 24826 - DNA, 996 bp, Listeria monocytogenes
atgactttaaaagaagcaggtttaacagaagataaattaattaaaatgtatgaaacaatgctaatggcaagaagactagacgagcgtatgtggttgctgaaccgttctgggaaaattcctttcaccatttctggacaaggacaagaaacggcacaaattggcgcagcgtttgcctttgatttagataaagattacgcattaccatattaccgtgatttagcggttgtattggcgttcgggatgacagcgaaagacattatgttatccgcgttcgctaaagcagaggatccaaactctggtggacgtcaaatgccagctcattttggtcaaaaatcaaatcgcatcgtgacacaaagttcaccagtaacaacgcagttcccacatgcagcaggtattggtcttgcagcgaaaatggccggtgatgagattgcaatttatgcttcaacgggtgaaggatcttctaaccaaggagatttccatgaaggaatcaacttcgcatctgtacataagttgccagttgttttcgtgattcacaataaccaatatgccatttccgttccagcatcgaaacaatatgctgcagaaaaactatccgaccgagcaatcggttatggtatcccaggggaacgtgtggatggcacaaatatgggtgaagtatacgcggcatttaaacgtgcagcagatcgtgcaagaaacggcgagggccccactttaattgaaacagtttcttaccgattcacaccgcactcttctgatgatgatgacagcagttatcgttccagagaagaagtgaacgaagcaaaaggaaaagatccactgacaattttccaaacagaattactcgaagaaggttacttaacagaagaaaaaatcgctgaaatcgaaaaaaatattgcaaaagaagttaacgaagcaaccgattacgcggaaagtgcagcatacgctgaaccagaatcatctttactttatgtatatgatgaagaagcgaatagctga

SEQ ID NO: 24827 - DNA, 810 bp, Listeria monocytogenes
atgtttgattttatgacgttggaaaaagtgcgggaaaaagggccgttggtacataatattacgaatatcgtggtcgcgaatgattcggcgaacgggttactggcgattggagcatcaccgattatggcttctgcgaaagaggaaatggatgaacttgcgaaaatggcggatgtgctcgtgattaatattgggacgctagatggtgaacttgttacagcaatgaaaattgctgggcgtgcggcaaatgttgcggggacgccggttgtgcttgatccggtcggtgttggcgcgacttcatatcgtcgtaaagtggtgcaagaattattggcagaaattcagtttgcggcgattcgtggaaatgcaggagaacttgcggcaatcgctggagaagcttgggaagcgaaaggcgtggatgcgggcgttggttcggcggatgtgctgagcattgctggaaaagtggcgaacgaatggagcacggttgttattattagcggcgaagtagatgtgatttcggacggaacacgttttgcaaaagtggctaatggtagcgcgttgcttccaagaattactggctctggttgtttgctcagtgcggtttgtggtagttttatcgccgttcaggatgatgcttttcgagctagtgtcgaagcatgcgcgagttatgcggtggcttctgaatatgcggaaatggagttagaaaggaaacttcccggctcttttcgaccattatttttagatgcgctcgctagttggtcggtcgagaaaactcgtgccaaagcaaaaatccaagaaagcggtgaacacaaatga

SEQ ID NO: 24828 - DNA, 945 bp, Listeria monocytogenes
atgaaacaatatttggatttagaaaagtacgttttagagaatggaacacaaaaaggagatcgcactgggactggaacaatcagcacatttggttatcaaatgcgttttgatttgcaggaaggctttccaattatgacaacaaaacgggtaccatttaaacttgtagtaagtgaactgctatggtttttacatggagatacgaatattcgctaccttttacagcataataataacatttggaatgaatgggcttttgagcgttttgtgaaaagcgatgattacaagggcgaagatatgacagactttggactaagagcggaacgtgatccggctttcaaagaagtatatcaagctgagatggagaagtttaaaacacgtattatagaagatgaagcgttcgcgactaaatacggtgagctaggtaatatttacggtaaacaatggcgcgaatggaaaacttcgcaaggggaaacaattgatcagttagctgacttgattgaaatgattaaaacaaacccgaactcacgtcgtttgattgtgtctgcttggaatccagaagatattccgaatatggctttaccgccatgtcattcgctattccaattttatgtagcggacggaaaattatcatgtcagctgtatcaacgtagtgccgatattttcctaggtgtaccatttaatattgcgagttatgcacttctcacacatctgattgcacgtgaagtaggactggatgttggcgagtttatccatactatgggagacgcgcatctttataacaatcatattgaacaagtgaaagaacagttatctagaacaccgcacgcgcttccaaaattagtactttcagataaaccagcaacgatttttgattttgaagtagcagatatttcacttgatggctataatccagatccatcgattaaagcaccaatttcagtataa

SEQ ID NO: 24829 - DNA, 939 bp, Listeria monocytogenes
atgacaaaatcggttacggtaaaggatttaaaggaacgacttaatttagagctaatttgttcggaaacgggacttgaacggccaatttcaacaagtgacttatctcggccagggctggaacttacagggtttttctcttattatccagaagatcgtgtgcaactttttggcatgactgaaatatcgttttctgaaggaatggaacccgaagaacgtcttaaaagatataaacaaatgtgtacgaagcggactcctgcttttgtgatttctagaaatttagaagtaccgaaagaattagtagcagcagcgaaagaagccgatattccggtattacgttcacgacttaaaacgacacgtttatctgtttatattacgaattacttagaaagcagacttgcgccagttatttcaatgcatggtgttttagtggatatatatggtttaggtgtgttgattacaggaagcagtggtgttggtaaaagtgaaacagcactggagcttgtaaaacgcgggcatagacttgtagcagatgataatgtggaaattcgccaagaggatgaaatgacgttgattggttcttctccggcgattatcgaacatttactcgagattcgtgggcttgggattattaatgtaatgactttatttggagcaggagctgtccgttccagtaaaaaaattactatcgttgtgcaccttgaaaattgggatcctgataagcattatgatcgtgtcggattagaccaagaaaagacaaaaatctttgatatggatattccaaaaattacggttcctgttcgaccaggacgaaatttatctgttattattgaggtagcggcaatgaatttccgattaaaaaatatgggatacaatgcggcagagcaatttacacaagacctgaataatttaataggtcataatagcagtatgaatgattaa

SEQ ID NO: 24830 - DNA, 840 bp, Listeria monocytogenes
atgacaacccaagcgattattttagatattgatggcactttattgaacgacgacaaacaaatctcaccagaaacaaaaaaagcactcatcaccgcgcaagagaatggtgttaaacttattctcgcatctggtagaccaaccacagggatgcacgtatacgcggaacaattagaaatggaaaagcatcacggtttgctcgtttcatacaacggcgctaaagtagttgattgcgcgaccaatgaagaattattcaaccaagcacttactgttgaagaaggaaaagccgttttagaacacatgaaacaatttgaagtgaaagtaatgattgataaagaggattatatgtatacaaatgacgtatacgactgctacgtaccttaccgcggcgaagaaataaatattattcagtacgagtctcgcggtggaaatttcaaactctgtgaaaaagatgatttagctgcatttttagattatcgtctaagtaaaatcctcactgccggtgatccggcctatatgcaaaaaaattaccaagcaatgatggcgcctttcaaagatacacttaattgtgtctttactgctgatttttacttcgaattcacagcccagggcattgataaagccaaagcacttgataccgttttaacacctatgggcattcacgctgaaaatgttatcgcatttggagatgggcataatgatattaccatggtcgaatatgcaggaacaggaatcgctatgcaaaatgccgtccctgaattaaaagccgcagcaagctccgttactttatccaacaacgaagacggcattgcgcacgtgctaaacagtttaatcccaagttaa

SEQ ID NO: 24831 - DNA, 471 bp, Listeria monocytogenes
atgaaaacaatcaactcagtagacacaaaggaatttttgaatcaccaagtagcgaatttaaacgtattcacagtaaaaattcatcaaattcattggtatatgagaggccacaacttcttcactttacatgaaaaaatggatgatttatatagcgaattcggcgaacaaatggatgaagtagcagaacgtttactagcaatcggcggaagcccattctcgactttaaaagagtttttagaaaatgcgagcgtagaagaagcgccttatacaaaaccaaaaacaatggatcaattaatggaagacttagttggaacattagaattacttagagacgaatatcaacaaggtattgagcttactgacaaagaaggcgacaatgtaacaaacgatatgctaattgctttcaaagcaagcattgacaaacatatctggatgttcaaagcattcttaggaaaagctccattagagtag

SEQ ID NO: 24832 - DNA, 615 bp, Listeria monocytogenes
atgccaactcgcttaaaagaagatattgcaacaattataaagaatgaccctgcgacgaagagcttttttgatgcttttttaacaaatccgggattgcatgcgctttggtggcatcgtgtggcgaactttttttatcgtcacaaaatggttttgtttggaaaagtattatcgcagaacgctcgtttctggactaatatagagattcatccaggcgcaactattggtagaaggctttttattgatcatggtgcaggaattgttattggtgaaacagcagaaattggggatgatgtaacgatattccacggagttacgctaggtggaactgggaaagattgcgggaaacgccatccaactgtcggtgacggggcgctcgtttcggcgggagcgaaagtacttgggccggtggaaattggagcaggagcgcgtattggagcaggagctgtcgttttaaaagatgtgcctcctggagcgacggttgtcggaattccagccaaagttgttcgcttgaatggtcgtacagtagggcacgcggttcctaaaatggatgaactgacgttacgaattgcggaattagaaaatatagtagaaaaacttttgaaggaaaaggagtag

SEQ ID NO: 24833 - DNA, 999 bp, Listeria monocytogenes
atgaaaattataacaatagaagaacattttgaatccgaagtaattacgaatgaaatcaataaagtcactggaaatttagtaagtggacaggttaatccggaaatgtttcagtatatgcaaaaggaacttccatcagcggcggaaatgcaagatacggaaaaacgattaggctttatggaccaacatggtattgatatgcaagtactctcttatggaaatagttctccgcaaaacttagatccaaaaatttcggtatctctgtgtaagcgagcaaatgatgaactagcgaaggtgattcaacaaaatcctacgcgattttccggttttgctgtcttaccagtaggctcaccagaagatgctgctattgaattaaaaagagccgtagaagaactaggtttcaaaggcgcacttgtgaaagggcagtttgaaaataaatattttgataatagcttttattatccgattttcgaaatggcagaaaaactagatgtaccgatttcgttccatccatcgtttatcccagaaactattacagaacaatattttgccagtgatgcttggtctgatgtagtcacgggggtattttcatctgctggttttggctggcatatggatgtgggtattcaagtcgtgcggatgattctttcgggtatttttgataaattaccaaatttaaaaatcattacagggcatttaggtgaaatggtgccaatgtttttagaaagaatggacgatacactcggtcactggacaacgcttgaacacaaaatttctgattattaccggacaaatgtgtacattacaccaagtggtttattatatcgaaacgaatggaaatttttattaaatgaattagatgaaaatcatctcatttatgcgctagattatccttttgtaaaaccagaaaatgctggaactttcctagatatgcttgatttaacggatgaagtgaaagcaaaaattgctcataaaaacgcagagaaattattacatttataa

SEQ ID NO: 24834 - DNA, 630 bp, Listeria monocytogenes
atgagcatcgaaaaacaagtagctgagcaattattagaaattaaagctgtatttttaaaaccaaatgagcctttcacttgggcatctggaattaaatcccctatatactgcgacaatcgcctaacgctaggctttccaaaagtccgtcagtttatcgccaagtcattagccgaaaaaatcaagcaaacatttggtgaaatagatgttgttgcaggcaccgcgactgcggggattccacatgctgcatgggtgagtgatttactagacttaccaatggtctacgtccgatcaaaagctaaagaacacggcaaagggaatcaaattgaaggaccaatttctaaagggcaaaaagtagtggtaattgaagatttgatttcgactggtggaagttcattaaaagcagtggaagcgttggaagaagctggagcggaagtagttggaatcgcggccatctttacatatggacttgctaaaggaaaacaattgctagaagaatctggtacaaaactagtaacattaacgaactacgatgagctaattgaagtagctttaaatgaaaattacgtgactggtgaagatatggaaacattaaaagaatggaagaaaaacccagaaaaatggggtaaatag

SEQ ID NO: 24835 - DNA, 2070 bp, Listeria monocytogenes
atgtatttggatgagagaagtaattcacttttaaaagaactcttacgacatcctgacacatcgagtacgaacttacaagcaaaatttggtttaactcgaagacaagtcgactatagtttccaaaaaattaacaactggctagaagaacagacttatccgaagattcatcgagctgcaaatggtcgatttatcgtagaacctgacctgtttcaaatcattggtgaggaagatggcgaaaaaacagattggtacatcccgtcagaaaaggagcgcgccagtctaatcatcctcatgttaacaacaggaagtgaagagttatcccttaatcactttataagcgagctggaggtgagcaagaacaccgtattacgagacttgaagctggtacaaaagacactcgataaattcaacctcgaagtaaaatattcacgaatgcgtggctatttaattgatggagatgagtggaaccagcggacggcactcatttatgcggcagaacacatcatagaaagttttggcggcgaagagtatttacaggatttcatgcaagtggacgaagcgagaattaaagagcttcgggaaaaattggaacaagttgagcatcacctgaatttgcattttattgacaataaaatgcaaatactgccttacattttagaagctgtttttcggcggatgaagaaggggcaaacaattacgacatctttcctgattgactacaatgaattgtcagatactcgggaatacggagcagcagagatttttattgaagaagagccgaatatgccagaagcggagcgaatgtacatcaccttgcaacttttaacttccaatgtacttccgaaacaatatttaaaatcggaggaaacgcacaagttaaggctggcactggaacaagttctaagtgaatttgagaaaaaggcttgtattcaactagtagacaaagaatcgttacttgaaaaattatttgcacacattaaacctgcgtattatcgaattaagtatcatcttacaacagattacagcattttagacaaaattgatcaagaattccaagccgtgcattacatcgtgaaagagtcgttagcaccattagaacgttttattggtagcaaagttcctgaaaatgaaagtatatttattacccttttcattggagggcatttaatcgaatccacagagaaattacaaacgagactaaaagcagttgtggtttgtccgaacggattgtcgatttcgagattgatggaaaaaacattacgaagccttttcccggaaatatttttctatcaagcgatgtcgattcgagaatttgaacaaacaaagttaggttatgacattgtattttccgcagtgccactttcgaccgacaagaaatttttccttatcaaccaattgatggatgggaaagagcgcctggagcttagacgccgggtgatgcggtcggtttacttagtggatgaggtgaatataagcgtcgatcaattaatgaaaacaatttccaaatttgctgatattaaagatgctgcccgtcttgaaaaagtgctagcagactatttaatgccagttccagaagaaaatacatctaaacacgaaggcaaaagctcactcgcagatttgcttgaagtaacgcgaatcacacgtaagaaatcagtgaaagattggcatgaagcaatttatcatgcagctttaccgttactttcagcgggagtggtggaaccagcctatgtggaagaaatgaaacggcaatatccagcaccgattatgaacatcattctccgtaatacgatagctatccctcatgctgaaacggaaaaaggagtaaatagcctcggaatgagcttgctttatctagaagaaggcctgccacttgaaggcggtaaagaactacattttatcgttgtcattgcagctatagataaaaatgctcacttcacagctttactacaattgatggaattatcggagaacaaaaaagaactgaaaaaacttgcggatgctgcgaacacagaagaaatgcaccaaataattaaaaacttcacggacttggaaacaaaaaagacaatgtag

SEQ ID NO: 24836 - DNA, 2088 bp, Listeria monocytogenes
atggctagagagttctccttagaaaagactcgtaatattggtatcatggcccacattgatgcgggtaaaactaccactactgaacgtatccttttctatacagggcgtattcacaaaattggtgaaacccatgaaggtgcttctcaaatggactggatggagcaagagcaagaacgtggtattactatcacttctgctgcgacaacagctcaatggaaaggctaccgagtaaacattatcgatacaccaggacacgtagacttcacagttgaagttgaacgttcgcttcgtgtacttgatggtgctgttgcggttctagatgcacaatctggtgtagaaccacaaacagaaacagtttggcgtcaagctactacttacggggttcctcgtgtagtattcgtcaacaaaatggacaaaatcggcgcagacttcctatattctgtaggtactttgcatgaacgtttggctgccaacgcgcacccaatccaactcccaatcggggccgaagatacatttgaaggtatcattgacttaatcgaaatgaacgcgttgtattacgaagatgatttaggaaatgatcctcatattaaagaaattccagctgatctgaaagacttagcagacgaataccgcggtaaattagtggaagcagttgctgaacttgacgaagagctaatgatgaaatacctagaaggcgaagaaattacaaaagaagagcttaaagctggtatccgtaaaggaacacttaacgttgagttctatcctgtagtttgtggtacagcattcaaaaacaaaggtgttcaaccaatgttagatgcagtacttgattaccttccagcaccaacagatgttccagctattaacggcgtattgcctgatggagaagaagctgctcgtcacgctgatgattcagaaccattctcttccctagcattcaaagttatgactgacccttatgttggacgcttaactttcttccgtgtttattccggtactttgaattccggttcatatgtacaaaactcgactaaaggtaaacgtgaacgtgttggacgtatccttcaaatgcacgctaatcaccgtgaagagatttcgatcgtatacgctggtgacatcgctgctgccgtaggacttaaagatacaactactggggacactttatgtgatgaaaaagaacaaattatcttagaatccatggaattcccagaaccagttatccaagtcgctatcgaacctaaatcgaaagctgaccaagataaaatggggcaagctcttgcgaaactagcggaagaagatccaactttccgtgctgaaactgaccaagaaactggccaaactcttatctccggtatgggtgaacttcaccttgacatccttgttgaccgtatgagacgtgaattccgcgttgaagctaacgttggtgatccacaagtttcttatcgtgaaacattccgtaaatctgctcaagttgaaggtaaattcgtacgtcaatctggtggacgtggacaatatggtcacgtttggattgaattcggaccaaacgaagaaggtaaaggatttgaatttgaaaatgcaatcgttggtggggttgttccacgtgaatacatcccagctgtacaagcaggtcttgaaggcgcactagataatggtgtacttgcaggctacccactgattgacatcaaagcaaaactttacgacggatcttaccatgacgtcgattccaatgaaatggccttcaaagtggctgcttcaatggcattacgtaatgctgctaagaaatgtgatcctgtaatccttgagcctatgatggctgtagaggttgttatcccagaagaataccttggtgatatcatgggtaacattacttcccgtcgtggtcgtgtagatggtatggaagctcgcggtaacgctcaagttgttcgcgcatttgtaccacttgcaaacatgtttggttatgcaactcaccttcgttcaggtacgcaaggtcgtggtgtatacactatgcaatttgaccactatgaagaagttcctaaatctattgctgaagaaatcattaaagctaatggtggaaacaacaaagaagattaa

SEQ ID NO: 24837 - DNA, 360 bp, Listeria monocytogenes
atgaaaaaaaaatatagaattaaaaaaaatgacgattttcaaaaagtattccgaagaggaaaatcttttgctaaccgtcaatttgttgtttatactttaaagcaagaaggatcgaatcattttcgaattggtttatcggttagtaaaaaaattggaaacgctgtctgccgaaatcggattaaacgttacataagacaatcattccatgaattagaaagccaaatcaatcctgaaaatgaatatattatcatcgccagaaaaccggcggccaatatggattttcatgaagtgaagaaaagtttgattcatgttttaaaagtggggcgtgttttaaagcaaaagccaaacaattcaaagtga

SEQ ID NO: 24838 - DNA, 336 bp, Listeria monocytogenes
gtgaatgacatttgtgaaataacctgttttgatgaggaaaaggttcaaaaaattcaaacatcattagaagataaaaaaattagcgatattagccaaatttttaaagccctatctgaagaaactaggttaactattgcctatgcattaactttggaaaaggaattatgtgtctgtgatatttcaatcattgtgaaatcaacagtagcgactacttcacaccatcttaagatactaagtaaagctggagtagttcaaaataaaaaaataggaaaaatggtctattattcattaaataattctttagttgaaacattaatcaaagatattgtactttaa

SEQ ID NO: 24839 - DNA, 1509 bp, Listeria monocytogenes
atgataaaaatatctgtaattatccccatttataatgcggaaaattatatagaaaaagctttttccagtttaaaaaatcaaactttagcacaaaatgaatttgaaattttatgtattgacgataagtccacagacaacagccttggaaaattaaaacaacttagcaaaatccataaaaacatgcggataattaatttgcataaaaattcaggcggtccaatgattccacgtaataaaggaattaaagaagcaaaaggaaagtacattattttcttagataacgatgattatcttggtgaagaggcattggaacgcttatttattcaagctgaaaaaaatcaatcagaagttattttcgggaaatatgtgggcataaatggccgaggagttcctcaatctcagtttaaaaagggcaatagaaatgaagcagatattttagctgataatttagtttatacacttgctccccacaaaatgtttcaaactgcatttttgaaaacgaaaaagatttactttgatccgaatattcttattggcgaggaccaatattttgtcatgaaagcttatgttaacgccaaagtaatcaccgttttagccgattatgactattattacgttgtatctcggggcgatgagaatcttagtattaaagaatcaaaaatggatccaagagaaatctgtaaagttgttccagcagtcgtcaaggaaatcgaagcttctccactccatccaacttacaaaaaaactttgattcgcgcttacattcaacgttatttcaatgattatattactggcaattataaccttgattataaaaatatgtcagaaaggcaaaaaacttttgtacaagtgatgaaagatacaattgtttgccatcttgatgaaaaaatgaaaaatgaacttcctactaaaacacggtttatgattgatattattgctgaaaataatcctgaaaaattaatagatgttcgaatgcaaatggaaaacttttctaaaaaccaagtcgttaaagtagaaaatggttatataaaaggccgtttccgcaagatgcgacctcagttagcttacgatgacgtgtacgatattaaccacttaaatagttctaaagtgcagttgcattcagttacattacaaaacaataattacttacttgatatttcactagagcaatcccttctgacaaggtttcaaacagcattacgactatgcttgaaagaacgtgatggcaatctagaaatatggatttcaccattaaaaatgctatcaacagagcggggaatctatgctgtagatagcactctctttaaccacacgtgtatttgggatttatttattgagtcagaaattaatggctttaaaaatcgaaagcgcgttggtaaagatagagactttgaagaaattgtatcttctaacaacacaccactcctcattcaaaataacagttatcaaataaaggcgtattttacaacgccgtttagtaatttatcttttcaaataataagtgaataa

SEQ ID NO: 24840 - DNA, 1035 bp, Listeria monocytogenes
gtgggtggacttatgaaaaaaaatacattaattcttgggatagaatctagctgcgatgaaacagctgcttctgttgtaaaaaatggcaatgaaattatatcgagtgtcgtggcttcgcaaattgagagccataaacgatttggcggggtagttcccgaaatcgcctcgagacaccacgtggagcaaattacacttgtgattgaagaggccttaaaacaagcgaatgtgacaatggatgatttagacggggtagctgtgacagaagggccaggtctagttggagctctacttatcggagtgaatgcggctaaaacgctagcttttatgcacaatttacctttagtcggtgtacaccatattgcaggccatatttatgcaaatcgttttgaaactgaatttaaatttccgctactctcattagttgtcagcggcggtcatacggaactagttttaatgaaagcggacaatgagtttgaaattatcggggagacaagggacgatgcagctggtgaagcttatgataaagtagcgcgcacacttggtctcgcttatccgggcggcgtgcaaattgataaacttgccaaagacggcgaagacacttttcattttccaagggcgatgatggatgagggttcgtttgattttagttttagtggattgaagtcttcctttattaacacgcttcataatttaagacagcgtggtgaggagccgaatccaaacgatatggcggcgagttttcaagcaagcgttgtggatgttttagtaagtaaaacgattcgcgcagctaaacaatatgatgtgaaacaactgcttcttgctggaggcgtggcggcgaatcaaggtttacgagaacgacttattcaagaagtaaaactagaacttccggagaccgaattgattattccgccgttagccttatgcggagacaatgccgcaatgattgctgctgcagggacagtgagtttcttacaaggaaaacgtagtggttttgatatgaatgcgaatccgggattattgctggaagatatataa

SEQ ID NO: 24841 - DNA, 768 bp, Listeria monocytogenes
atggagacagttttacaagcaaaaaatgtgagaaaaatatacggtagcaagggaaatgtctacactgcactagaaaatatcagtatcgatattaaagaaggtgaatttactggaattatgggaccatctggggctggtaaatccacgttactaaatgtcttatctactattgataaaccgacttctggtcagattgtgatttccggacaagaactcgaaaacatgaatgaacaacaaatgtccactttccgacgtgacaaactaggttttatattccaagattacaacttactagacacattaactatccgtgaaaatattatccttcctctcgcactagcgaaacgcccagtaaaagaaatggaagagaaattagcaattatcagtgaaaaattcggtattacagaaatccttgataaatatccaagcgagatttcaggtggtcaaaagcaacgtactgcagcttccagagcaattattacatccccaagtttaatttttgccgatgagccaaccggtgcacttgattctaaatcagctaccaatttacttgaaagcctacgtgacttaaatgaacaagataaatcaacgatcatgatggtaacacatgatgcttttgcagcaagtttctgtaaacgaattttatttattaaagacggagaattatacacagaaatctatcgtggaactaaaacgcgtaaggagttcttccaaaaaattctagacgtccttgcaaaactggggggcgactcagatgacgttatttga

SEQ ID NO: 24842 - DNA, 1074 bp, Legionella pneumophila
ttgattacaataagaaacaaaatcggacaaatgctgattatgggatttcatggttctgagctgcatgataatagtccggttgctcaatggttatctaatgatggtctcggcggagtcttgttattcgacaaagatttatccacagggatttatggcaagaatttaaggaatcaggctcagataaagcaattaattcgacagcttaatcgttatgcatcaatgatttcaggaggtaatgacaatctgcctttatttactgcgattgattacgaaggtggagtggttgacagactaagcaagatagaaggctgtccgcctactatgaaggccagggaacttgcaaagttatccagtgatgattttgatgaagaagtaactcaaatggctatgacgttgcagtcattaggttttaatttaaattttgccccggttgtagatttaaatttaaatgctcatgcagggattattggaaacttgggaagaagcttttcttctaacccagaggttactattcgtttggccaagcagttcgttgatgttttcagtcgttatggtattgcttgtgcgtataaacatttccccggccatggcagcgccactggagatacacatgagggatttgtagatgttacagaaacctttcaaaccgatgagctaattccttatcgaagtttattaaaagacctgtctaaccctttcatggtaatgacggcgcatgtgattaataagcatttggatagtaagggattgcctgcaactctgtcctacgacgttttaacgttattgttacgtcaaagcataggatatgacggggtcattatcagcgatgatttgcaaatgcatgccatttcaaatcactattcattagaagatgctctttgtcttaccatcaatgccggggctgatatggtcatatttgccaatcagcttggaactattaccccaccggaagttatagatgtgattgaaaaattggtaattgacaagcaaattccctatcaacgtattgatgaggcgtacagaagaatagtacgtctgaagcaacaaattatatgcagtgaattaatcaatacg

SEQ ID NO: 24843 - DNA, 1056 bp, Legionella pneumophila
atgtcagggaatacctttggagcgttatttactgtaacaacctttggtgaaagccacggtcctgctatcggatgtgtagtcgatggttgtcctcccggcatgtctttaactgaagcagatatccaaccttttttagacaaacgtaagccgggtcaatccaaatatactacccagagacgagaggaagataaggtacagattctttctggtgtatttgatgggaaaacgacaggagctcccattgcattgctgatacagaatactgatcagcgttcccgggattatgaagacattaaaaatttgttccgtccaggacatgctgattttacctatcattataaatatgggcatagagattatagagggggaggccgttcttccgctcgtgagacagccgcacgagtcgctgccggtgctattgccagattgtatttaaagcgttatttaaacttggatattattggttatttacaacaaatgggcgatttgaagttacagtttgaaaatgaaaatgaaatcaataaaaatccctttttttgtcctaataataagcaaattcaggagctggctgattatgtagatcgtttaagacgccagggtgattccgttggtgctcgggtaaagatactggcacggggagtgccaacaggattgggagaccctgtatttgataaactggacgctactcttgcttatgcaatgatgtcaattaatgctgttaaaggtgttgaaattggagctggttttaatgcagtggagcagttaggaagtcatcatagagatcagatgactgccaagggattcttgagtaatcatgccggtggtattttaggaggcatagcgacagggcaacccatcgaagtgagcatcgctttaaagccaacttcaagcatcacaactccaggtcagaccattaatactgaaggtgaagaggttactgtagtaaccaaagggcgtcatgatccctgcgtggggataagggctgtgccaattgcagaggcaatgatggctttggtgttaatggatcattatttacggcataaagcacagtgtaaa

SEQ ID NO: 24844 - DNA, 948 bp, Legionella pneumophila
atgatttaccctaacatcctggccactataggccatactcccgttgtaaaaattaacaggcttggaaaagatctggaatgtgagctgtatgccaaatgcgaattctttaatcctggcggctccgtaaaagatcgtattggctatgaaatggtagtaaaagcagaaaaggaagggagaattaaaccgggagataccttgatcgagcctacttccgggaacaccggcataggtatagccctggcaggcgctgtattaggctacaaagtgattattaccatgccagaaaaaatgagccaggaaaagcaatccgtgctcgaacgcctgggagccatcatttatcgaacgccaacagaagcggcgtataatgatccagacagtcatatttctctggctaaaaaattacaagctgaaatccctaactcccatatccttgatcaatacgcgaaccccaataaccccaatgcccattattttgggaccgctcaggaaattattgacgacttcggaaaagatttacatatggttgttgctggcgttgggacaggcggaacaattacaggcattgccaaacgccttaaagaatttaaccctgccatcaaaatcattggagcagatcccgaaggctcaattctcggtggcggcacagaaatcaaatcttatcatgttgaagggataggttatgatttcttccctgatgtgctggataatacgttgattgatgcctacataaaaaccaatgatgcggattctttccgtactgccagacgcctcattaaagaagaaggactgttaattggcggctcatgtggagcagcgatgtgggccgcattgcaagcagccaaatccttaagcaaaggacaaaaatgtctggtgattttacccgactctatccgtaattacatgtccaaatttgccaatgatgaatggatgaaagaaatgggctttctt

SEQ ID NO: 24845 - DNA, 927 bp, Legionella pneumophila
atggaacaggtgaggcaattgttgtgtttatactatgcccattataacaggaatgccaaacaactctggagtgatgctcacaagaaaggaataaaaagcgaggttatttgttttgttgctgcaataaccggttgttcaagtgccttagatacattatgtcttcttttaacatctgatgagatcgtgaaagtgatccaggcagaaaattaccaagcttttcgtctggccgcagagaatggacacctccatgtgctaaatcgtttatgtgaattggcgccaactgaaatcatggcgatgatccaggcagaaaattaccatgcatttcgtctggctgcagaaaatggacacttgcatgtgctaaatcgtttatgtgaattggcaccaactgaagctacagcaatgattcaggcagaaaattattatgcttttcgctgggcagcagttggaagaggccatcataatgtcattaattttttgctcgactgtccggttatgctcgcttacgcagaaatacacgaatttgaatatggagagaagtacgtcaatccgtttattgcgaggcatgtgaacaggttaaaagaaatgcatgatgcctttaagctaagtaacccggatggtgtctttgatttagtcacaaagtcggaatgcctgcaaggtttttatatgttacgcaatttaatccgtcgtaatgatgaagtattactcgatgatattcgttttttgctgagcatccccggtataaaagccttggctcctactgcaaccattccaggagatgcgaatgagttactgcgtctggctctacgattaggtaatcaaggggcttgcgcattactattatccattccatctgtactagcattgactaaggcaaacaattattacattaatgaaacagggggacgactcgacttgcgtgcagtagcc

SEQ ID NO: 24846 - DNA, 1638 bp, Legionella pneumophila
ttacaacaatccttctcattattacgggcaacgattgagtcctcttcggatggcattctggttgttgatttacaagggaaaatcgttgattacaactctcaattcgtcaaattgtggaatatccccgaatccatcatgaaaaaaaccagtgaatcccaactcattcagtatatgtcaacgcaattactcaattcagaacagcatgcccaacatgttaaagaattttctattcacatcgatgattccagtatacaaatttatcattttagaaatggtaaagtagttgaatgctgttccaaaccgcatcgcgttggtccgcaaacagtaggccgtgtatggagcttcagagacatcactgaacaaacgcgattaaaggaaaaactggagtatcaggctactcatgacgcattaaccaatttacccaatcgcttgttattaattgatcgtattgaacatgctatcagtagctatgcccgccataaaatgaaatttgccatattattttttgacttggaccgctttaaaatgatcaatgacagcttgagccatgaagcaggcgatcaattactgtgtgccgttgctaaacgattacgatctttggtgcgaaaagaagatactctcgccagacttggtggggatgagtttgtaatgctttttcaatcgtttaattctgaagagcaaattgccggagtagctcaaaaaatcctcaaatcctttcaaaaaccatttcatatcgcggaaagagacatcaatattcatgtcagcatcggtataagcgtttatccaacggatggcaaaacagtaaacactttactcagtaatgcggatatggcgatgtatcaggcaaaatttcgcggcggtaaccaattctcattttatacagagaaactcaacaaaaaaacaaaccagcaatttcagctggaattagacttgcaaaaagcgattatccatcatgagtttttcctcctctaccagcctcaatttacagttaatactcatgagattcgttccatggaagcattaatccggtggaatcacccgcaaaaaggtattattttacccttggattttattcctactgccgaaagttcagggcttatcgtaccgataggggagtgggttttgcgggaaacctgtaaacaaattggtacctggcgcacaatggggctgcctgaaattcgtgtcgcttgtaatgtagcaagtaaacagttaagacaacgagatttccctgcaatggtggaggatcttttaaaagaatattcagttaaaccccattgtttggagctggaaattactgaaaatgtgattattgataaagaaatacaaagaacgatcaaaaagttgaaatcactgggtgtgttgattattttggatgattttggcacaggaaattccagcctgaatttattaaaacaggtcgctgtcgatagtcttaaaatcgaccaatcattcattcagaatatttcaaaatcgccaggagatgaagcgatcattgatgcgattattgctatcgcacaaagcatgaattttaatatcatcgccgaaggagtcgaaacgcaaaaccaactcaaatttctcaagaaaaggcgatgtaatgacattcagggctttttaatgagtaagcctataccctcagaa

SEQ ID NO: 24847 - DNA, 1476 bp, Legionella pneumophila
atgagcaaagaattgttattagttgctgaggcattatcaaacgaaagaggcgttagtaaagacgtcattatacttgccattcaggctgcactggaatctgcaactcgaaagattcttggtttagatataggtgtacgtatcaaaatagattctaaaaccggtgactatgaaacctttagatactgggatgtagtgaatgaagaagaattagagtttccggaccgccaactgtccttggaacaagcaaaggagcgaaagccctcggctgctgttggtgaccgaattgaagaaattattccttccatagaatttggaagaattgaagcgcaaacagcgcgacaagttattatgcaaaaagtcagggaagcggaacgcgaattgatcatagaccaattccgtagcaaacttggacagctaatctatggaactgttaaaaaagtaactcgtgacaatataattattgatttaggtggtaaagcagaggctttcttgccacgctctgaaatgttgcctcatgaaatgtttcgtcccaatgacagagttcgagcatatctgtacgaaatcacgccgcaggcgagaggaccacaattgttcgtaagcagaactcgaaatgaaatgctcattgaattattccgtattgaagttccggaaattggtgaaaatataatagatatcaaagctgcagcgcgcgatccgggaaatagagccaaaattgctgttaaaaccaatgatgggcgtattgaccccatcggcgcttgcgttggtatgcgtggagcaagggtacaagcggtttccagcgaattaggcggtgagcgagttgatatcattctatgggatgataaccctgcccaattagtcataaatgcgatggctccagctgatattacatctatcgttgtagatgaagatacccatactatggatttagctgttgcgaaagaacaattatcgcaggcaattggtcgaaacggacaaaatgttcgtttggctagccaattaactggttggacattgaatgtcatgacaacagaagagtttgaaagcaagaatcaagaggaatcaagtaaaatagttaatctgtttaccagcgcgctagaaatcgatgaggaaatagcgacattattggtagctcatgggttttcttctctcgaagaagtggcttatgttccgaaggaggagctgctggctattgaagaatttgatgaagagatagttgaagaattaagaaacagagcaaatgacaagttattggagatggcactgtcatcaggcaaaggattatctggtactccagatgattcccttatcaatatggaaggcatgacagaggatttggcaaataaattagcaagtaaaggaattacaacaatggaagatcttgcagagcaatctgtagatgaattaatggaaatagaaggcattagtgaagaaaaagcaggtgctttaattatgaaagcaagagaaccatggtttcaa

SEQ ID NO: 24848 - DNA, 1236 bp, Legionella pneumophila
ttgaatagtcggcgtgtggttattaccggcatgggtatgcttactcctgtcggacttaatgtagaagaaacttggcgaagtattttagctggggttagtggggtaggtttggtggaagattttgatactactgaatacccaactaagatttgggctaaggtcaagaattttaatgttgagaatcacatgccaattaaagacgcccgcaaaatggacgtctttacacaatatggtatggctgctgctgatgaagcgatgcttgactcgggtttaaaaattgatgaagtcttatctcgtcgaatcggtgtcgcagtgggcgcaggtattggtggtattcaaacaatcacaaataaccaggataaactggttgccggtggaccacgtaaggtttcgccattttttattccggcaggtattatcaatatggttgctggacagatttctattaaacataatttaaaaggacctaatatttcggttgtgactgcatgtactaccggaacacataatatcgggctagccgggcgtataattgcttatggcgatgccgatgtcatgatttgtggtggagcggaaatgaccacaacgccactttgtcttgctgggttttcagcagtaagatctttatccaaacggaatgatgagcctgagaaagcctcaaggccttgggataaagacagagacggttttgttatgggtgagggtgctggtgttttggttttagaagaatatgaacacgctaaagctcgtggagccaaaatttatgctgaattggttggttttggtatgtcaggagatgcttatcatattaccgcacccgatgaagatgccgatggagcttcacgagctatggaggcagccatccaggatgctggtatcgatcccagacaagttgattatattaatgctcacggtacgtcgacttatttaaacgatttaaatgaaacaaaagccattaagcgtgttttccagaaccatgcttatgatctggcggttagctcaaccaaatccatgacaggccatttgctcggagctgcaggtgcagtagaggcaattataagtattttagccataagagatcaggtggctccacctacaataaatttggataatcctgatgaaggttgtgatttgaattatgtagcacatgtaccacaaagcagaacaattaattatgttctaagtaattcacttggttttggtgggacaaacggtagcttactgttcaagcgaatc

SEQ ID NO: 24849 - DNA, 1413 bp, Legionella pneumophila
atgtttaaaaaaattctggtggctaatcgcggtgagatagccctgcgaatagtacgtgcttgcaaggagatggggatagcagcagtgactattcacagtgaagtggacagatttgccctgcatgtcaaaagagcttctcattctcactgtcttagtaaaaaacctttagatgcttatcttaacggacggcgtattattgagtgtgccaaggtggccggttgtgaagcaattcaccccgggtatggttttttatctgaaaatgccgagtttgctgaggattgtaataaggcaggtatcgtttttataggaccgtctgctccagtgatagccactatgggctccaagattgcagcaagagaagcgatgataaaagcaggggttcccaccataccaggaagcaaggggaatttggaaactatagatgacgctttacattgcgcagaaactctagggtatcctgtaatgctcaaagcgacttttggaggggggggtagaggtatcagattatgtcatgatgccagtcagataaagcaacagtttgctcgcgtgcaatctgaagcagaaaaatcatttggagactcccatatctacatggaaaaatatatagcgaatccacgccatatcgaagtacaaattctagcagatcatcatggaacagtacttcatttgtttgaacgggattgttcaatccaaaggcgacatcagaaattggttgaaatagcgccttccccccaattggatgaggcgacacgtcaagtgcttttgggatacgcagtcaaggcagccaaggaggtagggtataccaatgcgggtactgttgaatttattttggataaaaataatcgaccttacttcatggaaatgaacactcgtttacaagttgaacatccaattacagaacagattactggtattgatttagtccaggagcaaattcgaattgcagctggtgagcgtctaactatctctcaagaacaaattaaatacaatggttttgccatcgaatttcgcattaatgcagaagaccctcaaaacgattttttacccagttttggaaggattactcgatattacgctcccggaggacctggtgtaaggacagatagcgcaatttatactggttaccagattcccccggattatgattctttgtgtgccaaattgaccgtatgggcttttgattggccctcggtacttcgacgggcgcgtcgagctcttgaggaaatgcgcatgtttggagtaaaaactaccattccttattatttagaaatgataaaatcagaggaatttcagaaaggggtattcaataccggtttagtggaggcacaccccgaatggttaaagtattcaaataaatccttgcctcaacacaaggcagcggttattgcagcggcaatcgctttgcataaaacc

SEQ ID NO: 24850 - DNA, 465 bp, Legionella pneumophila
atgagagagataaaaacaattgttagtgatggtgtcacgtttccaatagcgctagttgtaagtacttttaatgaactgataacctctgcattaaaaaaaggggcgttagatagattgactgaactgggttttaaatcggaggacattaccttagttgaggttcctggcgcagtagagattccgtttgttgcacagttgctagcgaaaaaacaaaaagtagaagtcatagtggcacttggagcagttatccgtggtgaaacctctcattatgattacgtttgtgatcaggtcagccagggatgccaaagggttatgttagattataatattccggttatctttggtgtattaactactgaaaatgatgagcaggctttggcaagagtgggaggaactcacggccataaagggagagatgcgatagattgtgcggtttccatgcgttctattaaacaacaattgcaa

SEQ ID NO: 24851 - DNA, 378 bp, Legionella pneumophila
atgcaaacacctaaaggagagttgactatccaaactttggccatgcctttaaatactaatgccaatggcgatatatttggcggatggatagtctcccaaatggatttggcagcaggtgttttggcaaagagaatttcccatgggcgtgtcgctaccgttgcaattaattcaatgacttttttaaaacctgtgcatgtaggcgatgtagtgagctgccacgttgaattagtgaaagtaggtaatacctctatgactattcgggttgaggtatgggcttactcatcgatcaaaatggaaaaataccaggttactgaagggatatttgtttttgttgcgattgatgaaaatggaaagccgaggcaggtacccaaaacacaa

SEQ ID NO: 24852 - DNA, 996 bp, Legionella pneumophila
atgaaactcgccagtttgaaatcaactcgttcccgggatggagagctttgcattgtcaacagattgctgaccgctgcaatacgcgttcctcatatcgcatcaacacttcaatatgccctggatcattgggatgttgttgaacccaaattacaactggtttatcaacagttaaatgataatcaaatcgaagacgcctttgcgtttgctcccgagctatgtgcctcgccattaccccgtgcttatcaatgggccgatggcagtgcctatgtaaaccatgtcgaattggttcgtaaagccagaggagcagaaatgcctgctgatttttggaccaatccactcatgtatcaaggcggatctgatgcttttctggggcctcgtgatcctattttggtaagctcagaagcctatggaattgactttgaatccgaggtggctgttatcactgatgatgttcccatggggattgatcatacaaacgctgcccatcatatcaaactgttgatgttggttaatgatgtctctctacgcaatcttatacccgaggaactggcaaaagggtttgggttcttccaatcaaaacctgccagcagcttctccccggtagcgataaccccggatgagctaggttcttactgggatggacagcgtgtgaatttgccattaattagccatttgaatgaacagttatttggtcaacccaatgccggagttgatatgaccttttcttttccagaactgatacagcatgcggcaaaaacaaggtttttaactgcaggcactattataggttctggaacagtatccaacctcgaccgcagcaaaggctcttcttgtatcgctgaaaagcgaatgctggaaatgatcgaattcggacaggcaaaaacaccgtttatgcgatttggtgaccgaattcgcatagaaatgctcgatggtcaagggtattccctatttggctccattgaccaaatagtgacgaaatacgataaggactcctta

SEQ ID NO: 24853 - DNA, 477 bp, Legionella pneumophila
atgactctttgcccctgtggttcacaaaataaatatgagcaatgttgcgggatttatctggaaagcaagaaaactcctgaaacaccagaacaattaatgcgttcgagatatactgcgtattctcttgcaaaaatcgattatattaaacagaccatgcaaggcaaaccactaattgctttcaacgaatcagaagcaaagcaatgggctcaaaatgtttcctggctgggtttgaaaatcattcaaagctacatggagaggccagataaaggatttgttgaatttatagcaacctttcttgatggaaatcaattgaaaagtattcatgaattaagtgagtttcaaaaggataattccgtttggttttatgtggatggggaggctaaacagttaccaaacaaacaagacaagcaaaagataggccgcaatagcccatgtccctgtggaagcggtaaaaaatttaaaaactgtcatgataaa

SEQ ID NO: 24854 - DNA, 198 bp, Legionella pneumophila
atgtcaactattcaattagaagcacaatcaagaacggatatggggaaaggtgcgagccgccgcctacgtcgtcttgaaaataaagttcctgctgtcatatatggcggaagcaaaaaacctatggcaatccattttagccataataaagtgattaaagatttggaaacagaaagcatttatttcagcgtttttgacatc

SEQ ID NO: 24855 - DNA, 276 bp, Legionella pneumophila
atggctcataagaaagcaggtggtagtactcgtaatggccgcgactcgaatccaaagtacctcggtgtgaaacgttttggtggtcaatttgtaaatgccggtgaaatcattgtaaggcagcgtggcacacgttttcatcctggacctggtgttggttgtggtcgagatcatactttgtatgcgttggtagaggggttagtacagtttactaccaagggtgaaaaaaatcgtaagtatgtcactatattaccggagcaacgagaagaagctgcgagt

SEQ ID NO: 24856 - DNA, 1101 bp, Legionella pneumophila
ttgtttgagctaaccattaaaaaagaagatctgcttactccattgcttactgtttccggagccgtagataagaagcagtctttggctattttgtcccattttttattaaaactgtcggatggacttttgtatattacggctacagatttggaaattgaaatgtccgcacaggtggcatgtgattccaagaatactagtggttctattacagtaccagccaagaaattcattgatattatcaggtcattagatgaaaacgcttcgccatctatcgtttttgataaagctttagtgacgataaaacaaaaccgaagtacatttaaactggcaactttgcctgctgagaattatcctagtagtgaagatgaatgtaatgatgtcgagttaactatcccgcgtttggttttgttgcagttattgcaatctactcattttgctatgtctcagcaggatgttcgtatatttttgaatggattattgctggagtttgacagtaatattatttcagcggttgctactgatgggcacagaatggctatatcgcgatattcctgtaataatattgctcaaacaaaattgcttatacccaaaaaaggggtgcaagaattattaagattattgaattgtattaatgacgaacaagttttgttggcagcgggaaaatctcatattaagttgattaccaatcaatttgtatttttgtctaaattaattgaagcacgctttccaccttacactaaagctataccaagagagcaggataaatgtattgttattgattgcgcttcgctcaagcgtgcattatctcgtattgtcattttagctcatgaaaagtcaaaggctgtcttgttgcatttacaacaaggtcagttaactttaattgccaataataatgagcaagaagaggcaattgaaacattgagtgccgaaacacaaggtgatgaactcaaaatcggacttaatgcaacctatttgctggatgttttaactcatttttctgaaggtcaaatcaggttatcaatgtctaatactgaaagcagtattttaattgagtcattagtcaacgataattatcaatacattattatgcctatgaaaata

SEQ ID NO: 24857 - DNA, 162 bp, Legionella pneumophila
atggcagctgttacaattaaagtgaaaatggaatccacagcaggaactggatactataaaaccactaccaaaaatccacgtaaccatcctgaaaagatggaattaatgatgtacgaccctaaagtacgaaagcacgtgcttttcaaagagaaaaaagtaaaa

SEQ ID NO: 24858 - DNA, 732 bp, Legionella pneumophila
atggagcaaaaatcaaaatctataataagagtttggtatttaatacttttactcagtcaatattcttttgcgaatgtttatgtattgcctgaagccggaaataccgtcggtgaaattcaggtcgcattttcagagtatggagaaactatagatgaggttggccggcgttttaatgtcggttattatgaaatggtacgtgctaacccgggagtgaatgccagatatccgctagctgctaacacaaaattaattattccatctcgttttatcctccccaacgttcccagaaaaggtgtagtgattaatttagcagaatatcgattatattattttcctccagatgacaatgttgtcatgacttatcctgttgggattggtaaaaaaggatgggagactcctttgggattaagcagaatcatctccaaggaaattaatcctacctggcgacctacagtaaaattacaaaaggcagctgaaagcattggtgctcctattcccagtgagttcccccctggtcctcacaatcctttaggtcaacatgtattgcgtttagggtggccagctatcttaatacatggttctaatcgagttgatgggattggggccaaagtcagtgcggggtgtattcgtatgcttcctgaggatattgagcatctatatagtttagtgtctgtagggacgccagtaagaattataaatgctcctctacaagggcaagctgattttaagcaa

SEQ ID NO: 24859 - DNA, 1158 bp, Legionella pneumophila
atgaaaaaccaatcattaattgtcaattggaattacccgacacgaatcctggttggggctgggcgaatcaatgaactagcgaaagtatgtcgtgagttaggcatgaatgctcctctgttagtcacagacccgggattggcttcgtcgttaatggtgagtaaagtcatacaacaggctcaggcatccggtttgcgaacggggttattttgccaaattaaaacaaatcctaccggtgacaatgtgatgaatggagtctatgcttttaaagctggccagcatgatggcgtgattgctttcggaggtggctcggctttggatgccggcaaagccatcgctttaatggttggccaggatcgacctttatgggattttgaggacgtgggtgataactggactcgggtgaatgtttcagccatggccccagttcttgccattccaacaacagcaggaactggttcagaggtcgggcgagcttctgtaattaccgatgctgaaaagcaggttaaaaaaatcatttttcatcctaaaatgttgcctgctatggttattctggatccagtgttaacagtcggtcttcccaaatcacttactgcagctacaggtatggatgctctttcccattgtcttgaagcttattgttccaattattatcatcctatggcagaaggtattgcgttggaaggaataagattaatcaaggagaacttaattcaagcttacaaggatggtagtgacctggaggcaagaacccatatgctggttgcttcagcaatgggggctaccgcctttcagcgtggtcttggagcgatgcatgccttggctcatccattaggtgcaatttatgatgtccatcacgggcggcttaatgcggttttgatgccctatgttttattggctaatcgtagtgaaattgaaaacaagatagagcacctggcaaattatttgtcaatagcaaatggatttgatggttttttggattggatagagcagatgagattagagttaggaatcgaaaatacattaagtcagttaggtattgatcattcgcagatagacagactggcaaaaatggccaccgaggatgcggcagcagcttccaatcctgttctttttacattagagcaatacaaagaactattgagcaaagccattggtgag

SEQ ID NO: 24860 - DNA, 987 bp, Legionella pneumophila
atggacggaatagagcgagcagctattttattgttaagcatgggagaaaaaaatgcttcagaagtattaaagcatttagagcccaggcaagtacaaaaagttggaatggctatgtcaacgatgaatagcgtcagcaaggcgaaaatgcagaatgttctgattgactttatcagcgcaatcgaagatcaaaccagcttaaccgttgatacagagcattacctcagaaccgttctcattgaggcattgggtgaagaaaaggcaattccatttattgatagaatattggtatcaaataaagacagtggtttgaataagctgaaatggttggatggacgtctgatagctgaagtgattcgtaatgaacatccccaaatcattgccactatattaattcatctggacagtgagcagtccgctgaagtggttagttactttagcgcagaaaaaagagcagaagtgttattacgaatgtgtaatattgatacagtaaaacctgaagcaatttctgaacttggacatgtgattgaaaagcagcttagtggccaaaccacaggtaaatcatcgtctgtcggcggaattaaaaccgtagcagatgtgattaattttttggatggcgctatggaagaagaggtactggagagaattaaggattgggatgaggagttaagcgaaaagataagagataagatgtttgtttttgaaaacatcaaagacatggatgatagaagtgtacaaactttattgcgagaggtgacatctgatcaattaaaattagcattgaagggtactactgaaacaacgaaagaaaaaatctattcgaatatgtctaagcgagcagctgatctcctcagagatgatatcgaggtgcaaggacctgtaagagtcagtgatgtggagcgtgcccagcgagatattttagccatagcaagaaatctggctgaagatggcaagattagcctgggagcaaagggcggagacgaattaatc

SEQ ID NO: 24861 - DNA, 1320 bp, Legionella pneumophila
ttgattgatagtactcttattacacttgactaccatgatttttcatctgaatcctatgaaaaattcagtcgtttacctggatttgtcctgcttcagagtacagacaagtcaacggggcgttatgatattttaagtgcttatccatatgagaggatggttattgagaataatgtacatgataaagatttagtattaacagaattaaaaaataaactaaaaatagaggagtcagaatttgatcttccttttcagggcggggccataggctacgtttcttacgactttggttcactcttacataatcatgaacaatattcacaaaaagatctggcgcatatacctgttttaaatttcggattttatgattgggctatcatagttgatcaccatttaaaaaaggccactttatttgcgagaaatagccattcttcaacaaaaagcgttgtagataaaataaagaatatattgaatgatcaacccatgaaatcggtacaattttcagttcaagctgaatttttgcctttaatatcaaaagagaactacaggagctcattcaatgccattcaacaagccctgagagcaggacgctcttatcaggttaatttcacgcaaccgtttcaaacaaaattcaccggggatctctgggatatgtaccaaagggttaacaaaaataaccctgtcccctatgctgcttttatcagaactgaggaagctgacatattgagcttttctcctgagcgatttttactttatgacaacggtgaaatgttaacttcgcccataaaaggcactatccaccgatcgaaagatcctgttgtagataaaaaattaaaagaacagttattgaaatgccctaaaaacaaggctgaaaatgtcatgattgtcgatttgctaagaaacgatctagggaaacttgccaaggctggcagtgtaaaggtaatgaatctttgccacatccagagcttcaatgcagtacatcatttggtttccgacataagagctctatgcaaagaggatattcatccaattgaagcatttttctcctgttttccaggtggttcaattaccggggcgcctaaattagagacgatgaaaattatcagtgaacaggaaacctataaaagaggggtctattgcggttgcatagcctatttttcacaacatggccgtttcgatgccaatatcgcgatacgtacggtgacagccaaagataatgttttatatttggcagcaggagggggaatagttattgactccgattgggaagatgaatatcgtgaatgtttcacaaaaattactgcaattatcaatggaatcaaa

SEQ ID NO: 24862 - DNA, 390 bp, Legionella pneumophila
tcgactacgctcttcagcctcgccttaggggccgactcaccctgctccgattaacgtcgtgcaggaaacctgggacttccggcgtgtgggcttttcacccacattatcgttactcatgtcagcattcgcacttctgatacctccagcacacttctcaatgcaccttcatcagcctacagaacgctcccctaccacgtgcgccttcgcgcacatccgcagcttcggtgactagttttagccccgttacatcttccgcgcaggccgactcgaccagtgagctattacgctttctttaaagggtggctgcttctaagccaacctcctggctgtctatgccttcccacatcgtttcccacttaactagtacttggggaccttagctggcggtct

SEQ ID NO: 24863 - DNA, 904 bp, Legionella pneumophila
  misc_feature (203)..(203): n=g, a, t or c
gacgttcttctttgtcgttcaaccctaaaaataaatggcgatttactcaaaaaccaccaaataaagtttgttgcgacagcacaccagtggaaccgatcatattgattttccttttttagaatcacaaaacatatctattattgatgccaaaggatgcaatgccatatcggttgctgactatgttgtcgcttgcctgccctatntagatacacagcaacttattcaaggtaaaacagcaggaattattggtttagggcaagtaggtactaaagtttatgaacgactaaatgctgccgaatttcagttatgcctttatgacccacccaaagcaaccagagatacttcttttcaaagctgctctcttgaagatctttttgaatgtgacctcttatgtgttcatgctgaattacatagcgatgcgccctacccaagccttaacttaattaatcgggattttctcaaggaattaaaacctggctgcattatcatcaatgcttctcgaggaggtatcgttaatgaagaagcccttttgcatcttggctctgccatactttattgcaccgacgtctacaataacgaacctcatatagatagccggattgtctccaaggcaactctttgcacaccacatattgcaggacacagcctcgaagctaaatttgctgcagtcgcaatcgtcagtcgtaaattacatcaaatgcttggtcttccatacccacaatttgcaacccctgaaaaaccttatagattaaatgaaaacagcgactggagagagttggctttatcaatatataacccgattcatgaaacactagaattaaaacacgctggaaatctatcctcagcattcttgactcttcgcaagaatcatcatcaccgccatgatttcacaacttattttgat

SEQ ID NO: 24864 - DNA, 885 bp, Legionella pneumophila
  misc_feature (814)..(814): n=g, a, t or c
atgaaaaaaatggcatacttctggcgtaaaggtctttgggcgctgatgagcctgttttttctcctaatagtagctggcagccttctatacctttatctcgaaagccaattgcctaatgttgattcattaaaaactgtacaattacaagtgccattacagattttcagcaaagaaggtttattaattcaggaatacggtgaaaaaaaacgtattcccgtaacctatgacgaaattccccctactctgatccatgcattaattgcaacagaagatcaacgattttttgagcaccctggtgtagacgttatgggattgggccgagccgcagtaagcatgctcaaaactggaaccaaatctcaaggtggcagtacgatcaccatgcaagtagctcgtaattttttcttaagccgtaaaaaaacatttttacggaaattcaatgaaattatgcttgctatcaaaattgaccgggaattaagtaaagaaaagattttggaactttacttaaacagggtttatctgggtaatcgggcttacggtgttggtgcggcagccatggtttattttggaaaatcccttaaagaccttaatctggctgaactggctatgatagcaggacttcctcaagcgccctcaactcagaatcctatcgctaacccgcttgctgcaaaaaaacgtcgtgaccatgtactggagcgattactggaagaacattatatcaatgaagaacaataccaaaatgctgtcaatcaacccaattactgcaaatatcatgggactaatatcaaggtgaaagcgccttatgttgctgaaatgnatcgtcagtctctgtacgacaattttgggcccggagcgtacactaaaggctataaggtatatacaacccat

SEQ ID NO: 24865 - DNA, 1044 bp, Legionella pneumophila
atggaagaaaataaacaaaaagcactatcagcggcgctttcgcaaattgaacgccaatttggcaaagggtctgtaatgcgtatgggagatagcacggtatcacgggatattgaagcaatctctacaggttcattaggtcttgatattgccttagggataggcggtttgccaaaaggccgtattgttgaaatttatggccctgagtcttctggtaaaaccacgctcactcttcaagtgatcgctgaatgtcaaaaaatgggtggtacagcagcatttatcgatgcggaacatgctctggatccaagctatgctcagaaacttggtgtgaaggtggatgagctgttggtttctcagccggatacaggcgagcaagctctggaaattactgatatgctggtgcgttctgcagcagttgatgtcgtaataattgactcggttgctgccttgactcccaaagcagaaattgagggagaaatgggcgattcccatgttggtttacaggcaagattgatgtcgcaagccctgcgtaaattgaccgctaacattaaacgttcgaacacactggttatttttattaatcaaatacgtatgaaaattggtgtgatgtttggtagccctgaaactactacagggggcaatgctttgaagttttatgcttcagttcgtttggatattcgccgtattggttcaattaaaaagggtgaagaaatattaggcagtgaaacccgagttaaagtagttaaaaataaggtagcgccaccgtttaaaatgactgagtttgatattttatataacgaaggtatatctcgtgagagtgaaattattaatctgggtgttcaattgaatttaattgagaaatcaggtgcctggtatagctacaaacaggaaaaaatcgggcagggcaaagaaaatgtcagattatatttgaaagaaaatccccaagtcgctgcagagcttgaacaacaaatccgtactgagctcttggaaaaaaagttatctgtgttggctagttcatcagaagatctttttgagactatagatgac

SEQ ID NO: 24866 - DNA, 2289 bp, Legionella pneumophila
ttgattttgacaggagctctttttgttctcttgtctttatttacctattcaaccaatgatccaggttggtctcatgcctcccgttcaggtatgtccgtttcaaactcagggggacaagttggtgcgtatattgccgatgcgctttattttgcatttggatattttgctttcttattaccagtagcatttgtttacattgcctgggccattttgaaggattttcgctcttttaaagcgttggacagaatggttctgttactgagaacggttggttttatcctcatggtttctggtggttgtggtttattgagtataaatcatcgctttgaagcagtagataccattcacagttcaggaggtattatcggacaaacagttggaaatggttggtaccaaatgcttaacatggaaggcgccactttacttttattagcaatgtttcttgtgggaacaacctggctgactggattatcctggataaaggcaattgagttaatcggatgttacacattaaatcttttcacatttcttgataaattcatcagaaaaggaatgcaaattatttctgaaaattttaacaaagagaaattaaaaacaccattgatcaagaccgaacaactccctaaacctgataatgaaaaaaagaaatctgttcctaaattattccaggacaagaaagataaagagcaagaaaaagcaacacctgttttaattgcaagtgaagaaaaacctgaaattgtcaaacctaccaatgaattcaaggaaattcgtcctcctaaaacaataacccctggagctcttcccagtctgtcgttgttagataaaggccaaccagggaagccgatgggaggttatacacatgaggaattggaaagtctttcaagagatgtagaacaacacttgcttgattttggtattcaggcagatgttgtagccgttcacccggggccagtggtaacccgatttgaattgcaattggcagcaggggtcaaagtgagcaaactgaccgctttggcaaaggatttggctcgttcgttatcagttatttctgtccgagttgtagaggttattcctggtaaaactgttgtgggccttgaattacccaatcattcacgccaagtggtcaggttatcagatgttttatctgctgacgtatatcagcaagctcattctcccttatctttagccttgggagttgatattggcgggcaccctatggtggttgatttggcaaaaatgcctcatctactggttgcaggaacaactggttctggtaaatcagttggtattaatgccatgattttaagtattctttttaaagcaagtccagagcaagtgcgtttaattatggtcgatcccaaaatgttggaattatcagtttatgatgggattccacatttgctgactcctgttgttaccgacatgaaggaggcagcgagcgcactgcgctggtgtgtagaggaaatggagaggcgttataggttaatggctgcgttgggtgttaggaatttggcagggtataacaccaaaattacggaagcggcagctaatggtcagccattgttaaatccattatggaaacccgtcgattctatggatgaaactgcaccagaattgcaagcactgccttatgtagttgttgtaattgatgaacttgctgacatgatgatggttgttggcaagaaagtggagcaattgattgctcgtattgcgcaaaaagcaagagcagcaggaatccatatgattcttgcgacacaaagaccttcagtggatgtattaacaggtttaattaaatccaatattccaacaagaatatcatttcaggtgtcttcaaaaattgattcgcgcaccatacttgaccaacaaggagccgaacaattgctcggccatggtgatatgttatatctggcaccaggaagtggagctcctttgcgtgtgcatggtgcttttgtcgatgataaggaagttcatcgtatcgctgatgactggcggtcaagaggtgaacctgattatgttgatgacatccttaaaatgggaaatgaaaatggggatggtgctttcgatgatgatagtggggggcaatccgtagaagacgatgatcctctttatgatcaggcggtagaatttgtaattcagacacgcaaggctagtatttctgcggtacagagaagattaaaaatcggttataatcgcgctgccagaatgatagaggaaatggagaggacaggaatagtcggtccattggatggtggttatcgtgacgtattagtaacatcagtgactgaggac

SEQ ID NO: 24867 - DNA, 3257 bp, Legionella pneumophila
cactaaatgtttacgcacttaattgcctggtcgttacataatcgccccttgattttggccttaacgattattctttgtttgctgggtggttatactttaaaacaaatgccagtggatgtgtttcccgaatttgccccaccgcaagtagtggtgcaaacgcaagcgcctggtatggccacgcaagatgtggaaactttaattacctatcctttggaaagtgcgattaatggcacgccaggggtggttagtgtgcgctctaaaacgtctgtgggactgtccaccatcacggtggtgtttgacgaccaaactgacatctatcgtaatcgccagttagttaatgaacgcattcaacaagtagtcaatcgcctccctcctggcgttgagtcacccatcatgttaccggttacgtctgccgtggggtggttggtcaaatacgcgttggtaagccgcaccgaaagtcctgaaaccttgcgcactatttcggattggacgattcggcccaggattctggcattaggtggtgtggcttctgtagtctccctgggtggagaggtcaagcaataccaggtgcgcctcattcctgagcgtatgctcgcttatcgaatctcggtggaagacgtgcgacaagcgctgacatcggcgaatcaaaacgtacccggtgcctttgttcaccaggcaggaaccgaattcgtagtgagtactcttgggcggattaagacgcttaaagacatcaaaaaaacattgattgtggttcgtaacggggtgcctattaccatgaataatgtggcaaacgttgcttttggtggtgaaattaagcgaggtgatggagcctataatacccagaatgcggtgattgggacaatttccaaagcgtatggggctgatacggtcacgaccacagcgaaagtcgaaaaagcacttgccgaaattaaaaagtccttgcctcacgatgtgaccttagtgactaatgtgtttcgccaagccagctttattgaatctgccattcacaatttaactcgggctttgcttgaaggggctgtgattgttattgcggttctttttgtttttttgatgaattggcgtgcttcgtttattacgttcctttcgatgcccgtttcgttcgtagtgggtattttagtgcttcattattttggtattggcatcaattccatgaccttaggtggtatggccattgccattggagaagtagtcgatgacggcatcattacggtggaaaatgtggtgcatcgcttacggattaatcgtcaggaagcccatcctttacccaccatacaagtggtttttgatgcggtgcttgaaattcgaagttcagtggtttatgccacgattatcattagtttggtttttttacccatcttctttttatcggggattgctgaacatatttttagtcccttagccattgcctacattgcctcggtattaggctctctcgtggtctccatcactatggttcctgctttgtgttactggttactggtgcgtggtcaagaaaaacagcaagatgttgaagtgagtctgcacgctttatcgaataaggaacggcattatgccgtagaaagggaaggtaaccatcaggcggagtccgaaactcgctttgtcttgtggcttaaaaagcattttttaacagcactccaatggtctattgcccactgcaaaatggttcttgcgtttgctttatcggcttttgtctttgcactggcgttacttcctttttttggcacgtcttttttaccggagtttcatgaaggcaactttattgtcgtgatgagtaccttgccggggacctcccttaatgaatccatgcgtttaggtcaacaagtacaaaaagcattgcttcgctatccgcaagtgatttccattgcgcagcgggcagggcgcagtgagcttgatgaagatgcgctaccacccaacatcagtgaatttgatgtgcttcttaactttgataaagacaagtccatgaggcccgatgaattgctgcgtcgcattcgtgcggatttggcgaatattcctggggccgtatttaacgtgggacaatttattgctcatcgtatggatgaagtgctttctggggtacgcgctcaagtggccgttaagatttttggggataatttatccacactcaatgaactagggcaatcgatggagaccctgttaaaatcagtaccaggggtggtggatgtgaataaggaacaacagattaaagtaccccaattggtaattcaactcgatcgcgaaaaagcagcacgctatggtgtcaatgtggggcagatttcggaagacgtgcaagtgcttctgaatggcgtgagtgtttccagcgttttagaggggcaacgcacgtttgatttgtatcttcgaatggataaaccagggcgtgacagcgtcaagaacattcaaaacatgctgattgatgctcatggggtgggagaaggcagcaatgcgcaaatcccattgcgggctgtggctgagattgcattggaaccgcagccttttgcaattaatcgcgagaacgtgcaacggttgctggtggtttcttttaatgtgcagggacgagatttaggcagcgtgattgctggagtgcaacaggaagtgcaggaaaaaatcaaactgcccactggttattttattcaatacggcggccaatttgaaagccagcaacaagcttccagagtgattttggtttttggtggcttggtgatttttgtgatgctgattttgctgcataaagcgtttgggacgtttcgagaggctttattggtgatgtttaatttgcctttagcactcattggtggggtcatttcattgtttgtggtgagtggcgagatgagtgtggccgccatgattgggtttattacgctgtttggaattgcggcgagaaatggcattattttggtgagccactacaatcaattacgattgcagggaaaaactcgggagcaggtggtcattgatggcaccatggaccgcttggtgcccgtattaatgacggctgctacagcggcactgggcttgattcctttgttgtggggttcgcctgcaggaaaggaacttgagcgtcctttagctcaggtgcttttgggaggattatttacttctactgtactcaatatgtttgtggtgcctacggtgtataatgctattgaagtatggcgagaacagcggatgcaattcaataaaacagaacaaggagaaaaaacatgaagcacattactttgaaacaaaaaagccatttttgg

SEQ ID NO: 24868 - DNA, 1824 bp, Legionella pneumophila
atgattgaaaaaattcgcaatattgccattattgcccacgttgaccatggcaaaactactcttgttgacaagctcttgcaacaaactggaacgctcaatgagagagctccaaaagttgaacgcgtgatggactccaatgcacttgaaaaggaacgtggaattactatcttagccaaaaacacttgcgtttattggaaaggttatcaaattaatattgtagataccccagggcatgcggattttggcggcgaagtggaacgtattctttctatggttgacagcgttttattgctggtcgatgcagttgacggccccatgccacaaacccgctttgtcacccagaaagcatttgcccgtggcttaaaccctatagtcgtgatcaataaaattgaccgtccaggagcaagacctgattgggtcatggatcaggtgttcgacttgttcgataacttaggcgccaatgacacccaactagacttccctgtagtttatacctccgctttaaatggctatgccaaacttaatttggaagacaatgcaacagatatgtctgccctactgcaaacaatcgtagataaagtcacaccaccttgtgtcgatgccaatggtccgtttcaaatgcaaatcagctctctcgattattcttcttatgttggcaccataggcattggccggattacacgcgggcaaattaaggcaaaatctcctgtaaagattattgataaagacggtaatatgcgcagcggacgactgctccagttactgggattcaaagggctggaacgcgttgaagtcgaggaagccagtgccggtgatattatcgcgataaccggaattgagagcctgaatatatccgacacgatttgcgaccccaacctggtggaggcattgccagcacttttagtagatgaacctacaatcagcatgacttttcaggttaatgactcgcctctggccggccaagaaggtaaatacgtcacatcaagaaaaattcgtgaacgcttaaatactgaattactgcataatgtggcgcttcgcgtagaggactgcgatgatcctgataaattcagagtttctggtcgcggcgaattacacttgtcgattcttatcgaaacgatgcgccgtgaaggctatgaattggcaataagcaaaccggaagtgattattcgcgaggtagaaggtgaacaacaggagccttatgaacacctgacagttgatgttgaggaaaaccatcaaggtaccattatggaaaaattgggtgaacgccgaggcgaaatgcaaaatatggtgcctgatggcaaaggcagagtacgtttggattacatcatcccgactcgcggattaatcggttttcacaatgaatttttatcctgcacttccggtaccggattaatgtatcatgtctttgatcactacggtccgttgattaaaggacgcatagggaagcgtctcaatggcgtcatgatagctaattgtcctggtactgcccgggcttttgccttgttcaatttacaagaacgtggaagattatttttagagcctcaatcagtctgctatgaaggaatgattgtaggtatccatgccagagataacgacctggttgttaatgtcaccaaagaaaagcaattaacaaacatcagggcatcaggttcggatgaaaatattatcctgactcctccggtcaaattatctcttgagcaagcgctggaatttatcgatgatgatgagttagttgaggttaccccgttatctattcgtttacgtaaaaaatttctcaaggaacacgatagaaaaaaagcctctcgtaccgccacaagtgaagaa

SEQ ID NO: 24869 - DNA, 477 bp, Legionella pneumophila
atggatgaacaaatcagtaaatcacagaaaaaaagagatgctcattatttacaagatataggcattaaatttattgatttaagcgcatccaaactggattctttgccccttcccgataatttacgtcaagcaattgttgacgccaggtcaatcaaaagccatggggctaaaagacgacaggcgcaattaataggcaagttaatgcgtgcagccgattttgaagccattcttgctgcctatgagaaaatccttgaagaagagagttcagttacggcctcttttcatgagatagagctgtggcgcgacaggttattacaagatggaaaagacgctttgacagagtttatcgatgcttatcaacctgaggacgtgcaacaattaaggcaactgattaaaaaggcattagatgatcagatgaaagagaaaaatacgggtgctgctaaagcactgtttcgctatttaaggtctttaataaaa

SEQ ID NO: 24870 - DNA, 903 bp, Legionella pneumophila
atgattggttgcgtgtttttattgctcattgttttaatcccgggtattggtaaatcagtgaatggcagtcgacgttggttagctttaggtccgattggtgtgcaagtctcagaattaacgaaacttgcaatgatattctatctttccgggtatttggttcgccagcaagaggcggtttgtgaaagcatttttggattcattaagcccatggcaatactggctgttgtttcagttttattactgctcgaaccagattttggagcgacagttgtcatttctggtacagtaatggctatgttatttttagctggagttaaattaagatactattttggtttaatgctggttgtagtgacagcacttgctctgttggcggtatcttccccctatagggttgctcgcttaacagcctttttggatccgtgggcagatcaatacaatagtggttatcaattgactcagtcattgattgctttcggacgaggtggatggtttggtaccggattaggtgaaagcatacagaaattactctatttacctgaggcacatactgattttttatttgctgtgattgctgaagaattagggttatttggaattttagttgtcatcacattgtatagtatactggttattagaggattaaacataggatataccgcctatactcaagaaaggcattttgcatcctatacagcctatggtttgactatttggttagctttacaggcttctattaatatgggtgttaatgccggactgttaccaaccaaagggctaactctgcctttactcagttatggtggggccagtatggtaattaattgtatcgttattgcactattattgcgcatagatcatgaaaatcgttggcagtctcttgggttgagaccgctaacggct

SEQ ID NO: 24871 - DNA, 1029 bp, Legionella pneumophila
atgaataacatgcattattcaaattatcaaacttgtgcagtcaaaccacagatagaattatctgaatgggacattttgtccagtttgcctaccgccttggtaattttgaatgcccaaggcaaagtggtgtggttaaatccttcagctgaagcgatgcttggttatggactgattggttcactatgggtagatgtgattcaaaaagcatttgttccaagagctgatgatgggcatgaagtgtctctggctgatggaaggcgtgtgcacgtagccctttcgtctttagagagtttacccggtatattgattactttgtctgacattactgcaagcagggattatgaagaagccaaagaaaatgaaaaacgattggtttctattggtacaatgaccgcacaattagctcatcagattagaactcctttgtcttctgccatattgtataccgagcatttaaataatctcccaagtttggatcatcgcattaaaaactggattcacagattgcaagaatgtcatgccagtatagagcaacaaattcaggatttattattatttgccagaggaacctccatagagccaaagtatatcgatatggagttttggtgctctcaattaatgcaaagagctcagccatacatcgagtcttatgcagctgtattacatgttaataaccatcttattgctcgtgaatcctccatacatggagagtctttgattggagcaattttaaatctgataatcaatgcgctgcaatctgaggcaacccaaattgatttaacacttgcatccatggatgattcaggtatacaaatatcagtagaggataatggaaacggaatgtctgaagaagtcagggcacaagcattttcgccgttctatacaacaaaagcacaaggtaccggccttggattagcagtggtttttgctgtagtaaaagcgcatggtggtcgagtgactcttgagtcgactgaagggatagggacacaggtaactatttatttaccttgcctgaacagaaacgtaggg

SEQ ID NO: 24872 - DNA, 2286 bp, Legionella pneumophila
atgagtagccacatcacactaatcaaaactaacacaagcaatgaaaatcaaatgacccaatgcaactacccagtcgataatgatgtcatgattatccaggccatggtaaataatgttacaaaacaaattacacctgtatggcctctggaaaaatttattgcttgcaattccttgcatggttttgaatcgatgtcctttgaagaggctgtgatacaaaaccagacggctaaaaaaggcactccattcaatgaaaaactagaaagagtcaattggcacatgatcaaatggtgtgggagctttcttgacattggacaaggcacgattgaaatgcctcatcgtgataaaggcttatattttggttttttaaagctagccccttttgacagcacactgcatcaaaacaataaatcaacaaagaactggttatcaaatctgccagaaatgcctgaacaagctattcgactttgcctcgataaacttggcgtattaaaccaaagacaagaggaatttctccaatccactctgtctcacttacctggatgggctggatacattaagtggataagtgaatggaaaaatcgtaatggcaaggaagaaaatcctgtaagcctagtcgattttcttgcagtgaggctgataatcacctgcatattatggccagaagcaaatctggaagaaaaaaaaaaggaaaaagatagtgcggatactaaacaacttattcaaaatataaaacacaaagaagatgattacaggcaattgcttttaaaaaagcttttgcctgagttaaacaaagttcagataaaaggaaacagagctaaagcccaaatggttttttgcattgatgtccgctcagaaccatttcggcgatgtatagaaaaactaggacactacgagactttgggatttgcaggattctttggtttacctgtgagtatcaaagattatgacggtgaaacaataaaagactcctgcccagtactattaaagccacgatttaatatccatgaaaaagcaattgctgcaaatgaacattgcctagagcatcatgagaaaggtaaagagtttaaaaaaattttgaaccgggtctatcagcaattaaagtacaatttttcaaccccatttgccttagtagaatcattaggaatctggtgtgggattacaatgttcctcaaatcatgtagcccaattttcgctagacgccttacccaagacctaaacgaaatgatatgcccctcgattcaaacacagcctgtttttgaattggatttattagagaaagaggtagggatctcacttcaagaacaaattgcctatgccgaaatggcattgagactcatgggactgactgataactttgccaaacttgttattttctgtggtcatggcagctctactcaaaataatccttatgcttcagccctggattgcggcgcttgtggaggtaatcaaggtggaaaaaatgcacaattactggcgtctatcctcaataaaataacagtgagaagggctctggcagaaaatggaatcaatattcctcaagacactgtgttctgtggcgcgcaacatgacacgacgacggatgaggttgaaatttatcattcaaatgtcagtcaattcattgaccaagatatcctcgaccagcttagagctgacttaaacatggctaagcacaataataatttagaacgaattaactatttgaattccatagattgtgcggagaaagacattgtacggagaagcgcagattggtctgaaacaaggccagaatggggacttgctcgcaatgccgctttcatcgtagcacctcgccaactgaccaaaaacattgatctggaagggcgttgtttcttgcattcttatgactggagcaaggacgaagacggtaccctgcttgaaaccattttgactgcgcctatggtggttgcccaatggattaatactcaatacctgttttcaacaatcgacaacgtggcatatggaagtggcagtaaaatcactcataatgtcgcaggaaaaattggagtcatgcaaggcaatgccagtgatttaatgcatggattgccactgcaatctgtcatgagccatgatgagaaatcctttcatgagccacagcgcctgttaactgtagtctatgctcctcgcgaaatcatcagtgaactagttgaaaaacacgatgtcttaaaaaccttgttttttaatgaatgggttcatttggtagcgattgatccacggagtcacttgttttacaagttagagaaaaccaatacatggtctgtaattaag

SEQ ID NO: 24873 - DNA, 3198 bp, Legionella pneumophila
atgtttactcgccttattgcctggtctttgcataatcgtctcttgattttggcattaacgattattctttgtttgctgggtggttatactctaaagcaaatgccggtagatgtttttcctgaatttgcccctcctcaagttgtagttcaaacccaagcgccaggcatggcaacccaagatgtggaaacattaatcacttatcctttggaaagtgccatcaatgggactccaggggtagccagtgttcgctcaaaaacctccgtcggattatcaacaattaccgtggtatttgatgataaaacggatatctatctcaatcgtcaactggttaatgagcgcattcaacaggtaatcaaccgtctccctccaggtgtttcctcacctgtgatgctgccagtcacatcggcagtagggtggttgcttaaatatgctttggtgagtcacacagcaagccctgaaaccttgcgcactatttctgattggactattcgtccacgtctattggctttaggcggagttgcttcagtagtttcactgggcggagaagtaaagcaatatcaagtacagcttgatcccaagcgtatgctggcttatggcatcacagtcgaagaagttcgtcaagcgttggcaacaggaaatcaaaatgtacctggtgctttcgtacatcaggggggtacggaatttgtcgtaagtaccattggtcgtattaagacgttggacgatataaaaaaaacactgattgtagtccgcaagggagttcctgttactgttaataatgtagccacagtcgcttttggcggtgaaatcaaacgcggtgatgcttcgttcaatgcagaaaacgctgtcattggtactgtttccaaaatttatggagctgatacattaactacaacacgtaaagtggagcaagctttagctgatataaaaaaatccttgccggcaggtgttgaattaaatacagaagtatttcggcaagccaatttcattgagtcagccattcacaacctaaccagggctcttattgagggagctgttattgtgattgccgtgctctttctatttttgatgaattggcgagcttcatttattacctttctctctatgcccgtttcctttatcgcaggtatcttggtccttcattattttggttttggcattaactccatgactttgggcggaatggcgattgccattggtgaagtggtggatgatgggattattactgtagaaaatgtggtacatcgcttaagactgaatcgtttggcagaaaaacctttgcctacgattgaaattgtttttgatgcggttttggaaattcgcagttcagtagtttatgcgaccattattattagcctggtgtttttacccatcttctttttgtcaggaattcccgagcggatttttagcccattagccattgcttatattgcttccgtaataggctctcttgtcgtttctattactatggtaccagccctatgttatctccttttggtgcgaaaaactgaaaagaatcaggatgctaaagtggaggtgcatgctttatccgaagacgaacgttatcattacgcacaagaggaaacggttaaacagactcaaacggaaacgcgttttgtgatttggctaaaaaagcattttttaaccggtttaaattggtctttggcccattgtaaaacagttttagtcatatcaattgcagcattcatttttgctttgagtttacttcctttttttggaacctctttcttgccggagtttcatgagggcaactttattattgtgatgagtactcttcctggaacttcattggatgaatccatgcgtttgggtaagcaagtaagtaagacgttattgaaatatccgcaagtaatttctattgcccaacgagcgggtcgcagtgaattggatgaagatgctttaccaccgaatattagtgaattcgatgtacatctgaattttggtaaagataaaaccatgtctcctgatgaattgttacaatctattcgagctgatttagcgaatattccaggagcgttatttaatgtggggcagtttattgcccatcgcatggatgaagtgttatcaggagtcagagcgcaagtagccgtgaaactctttggtgataatcttgctacccttaatgaattgggtgaatcggtagaatccattttaaaaaccgtcccaggagtagtagatattaataaagagcagcaaatcaatgtacctcagctggtcattaaaattgatagggagaaagcggctcgctatggtgtcaatattggtcaaatttccgaggacattcaaatccttcttaatggtgtgacggtatccagtattcttgaaggccagaggacgtttgatttgtatttgcgtattggtgaaacagaacgggatagcgttaaagccattcaaaatatgctgattgatgcccatggtgcggccaataatcaagaaacaaaaatccctttgcgtgcggtggctgatattcagttagagcctcaaccgtttgcaattaatcgagaaaacgtgcaacgtgttttggttatcggttttaatgtgcaagggaaagatttgggtagtgtgattcaagaagtacaacatcagattaaagaaaagatttcgttacctggtggttatttcgttcaatatggtggccaatttgaaagtcaacaacaagcatctcgtgtgattgttctttttggtgcattggcaatttttatcatgttagtacttcttcataaggcttttggcacattttgggaagccttgttggttatgttcaacttacctttggcattaataggtggagtggtctctttattccttgccagcggtgatatgagtgtggctgccatgattgggtttattactctatttggaattgcggcacgtaatgggatcattttagtgagccactataatcaattacgttctcttggccggggacgtgagcaagtagtgatccagggaactctcgatcgcctggtacccgtattaatgacagcagcgacagcagctctggccttaatacctctcttgtggggatctcctgctggtaaagaacttcaacgtcctttggcacaagtgttattgggaggattattaacttcaacggttttaaatatgtttgttgtgcctacagtctataatgcctttgaaatctggcacgaaaagagaaaacaatcaaaagaaagttct

SEQ ID NO: 24874 - DNA, 760 bp, Legionella pneumophila
agatatgacgccatcatttggaattgatgatcgaatttttttaggtgagggattatttgaaacaattagagtcaatagttccaagccttcctttgcttatatgcattgggagagactaggcaattcagctcgtcagttgggtattccttttgaaatttcatttgatgattggtttgagcatcttattcaaaaaatccaaaaagataacctgtaccatggtggcattaaagccattttgagtggtggtcctgcttcgagaggcttggcagaacgaggacaagtcagccaattaatatttcagacttttaattattctatacaaaagcatcctgttcggttaatcagtattaattggctaagggataaggccaatcctctttatcaattaaaatcagtgaattatttagaggcgattattgctcaacgtcaagcgattgcggttggggcagatgatgccttatttttcaacacagagaatcatgttactgaaacaacttgtgccaatttattcttgattgaaaataacattttgtataccccgcgagtagaggatgggatcttacccggcattaccagagcacgcctcatttcacattgtcagcaacacaaaatgtcagtgcaggaaatatcattaacgaaaaagaggattgaggacgccgatgctgtttttttaactaatagtctgcagggtatcagaagggtgctctccctggataacattatttttgaagtcaatcatccaattatcgataagttgatc

SEQ ID NO: 24875 - DNA, 432 bp, Legionella pneumophila
atgaatttaaatacattatcgccagatccaggttccagaccctcaagaagacgagtggggagaggtattggttctggattaggcaaaacttgtggcaaaggtcataaaggtcaaaaatcaagagcaggtggttaccacaaaattaattttgaaggtggtcaaatgcctatacaaagacgattacccaaaatgggtttcaagtctagagtaggtcgaaccattgatgaggtgagtttgggtgagcttgcaaaattgaatgatgaagtaattgatttagttgctttacgtaaagcaggtttaattaataactcaatcaaagatgttaaagtaattttatctggcgagctgactgcagcaattaagcttaagggtttaagagtcactaaaggagctcgttctgctattgagagtttaggcggtagtatagaagag

SEQ ID NO: 24876 - DNA, 1242 bp, Legionella pneumophila
atgtcagttaaaaatgcaatctacgcccagtctggtggtgtgaccgctgtaattaatgcatccgcttgtggtgtcatccaaaccgccaaactatttccagagcaaattggtaaagtttatgctgcaaaaaatggcattatcggtgccttaaacgaggaattaatcgatacttcattggaaagtgaagaagacattgccaaattgatgcaaactccttccggagcttttggctcctgccgctacaaattaaaagacaatggtgaagagtatcaacgcttaatcgctgtcttcaaggcccacaacataggctatttcttttacaatggcggcggggactcacaagatactgcccataaagtatcccagttaggtaaaaccatgggctatcctattacctgcataggtatccctaaaacagtagataacgatctgccttttacagacaattgcccggggtttggatcagtcgcgaaatacattgccatttcaacgaaggaagctggttttgatgtcgcgtccatggcggcttcatcgacgaaagtgtttattcttgaggtgatgggaaggcatgcaggctggatagctgcggctagtgggctggccgagcaaaatccaggcgaaccgccacacattattctattacctgaggttccttttgagccaactcgttttctaaaaaaagtgaaggactgtgtcaattcatatggttattgtgtgattgttgtttcagaaggtatccgcaataaggaaggaaaatttctcagtgaagcaggattacgtgatgcattcggacatgctcaattaggtggtgttgcacctgtcatcgctcaattaattaaatctgaactgggttttaaatatcattgggcagttgcagattatcttcaacgggcagccaggcacatagcctcgcaaactgatttggatcaagcttacgctttaggtaaagctgctgtggaatatgccgttaaaggatataacgcgattatgcctgttgtcattcgtgagcaggacgaaccctatcaatggtctataggccaagtccctctggctgaggtagctaaccaggaaaaggctatgccgccagagtatatagctgaagatggcatgggaattacggacgcatgcaaacgttacttgtcccctttgattcaaggtgaagcttatccaaattacaaaaatggattgccagattatgtccgactaaaaaaccagttagtggctaaaaaaatcaaccaagat

SEQ ID NO: 24877 - DNA, 342 bp, Legionella pneumophila
gtgtttgcatttaaaaaagcgcaacggctattaaaaaaaaatgattttgatttcgtgtttgaaagcgcgaaaaaaataactacagatgactttattttccttttcagagaaaataagttaggctatgcacgccttggtttagcattgtcaaaaaaaatgatagctaaggctcatgacagaaatcgcattaaacggctacttagagaaagttttcgtcatactaacttgcctgctgtagatataatcattttggcaagaccaggtctagcaaagaaaaccaatttaggtataaatactaaattaaataaaacatgggaaaaattagcctcatgctacggcaaa

SEQ ID NO: 24878 - DNA, 417 bp, Legionella pneumophila
atgcctagaggtgtgtatttaggttttgatttcgggtataaacgcataggagtcgctgtaggacagcggctaacttgtagtgcctctcccttatctactatagaagctaaagccggaatccctgattggaataccattcaaaaagtgataacccaatggaatccacaagctttaattgtaggtcttcctacctgtattgatgaccgtgaattgtatacaacatcagctgctcgtcgttttgcaaagcaattgcacaagcggttttctttacctgtgcatttagtcgatgaacgactttcaacagtagaggcaagagggtatttgtttgagcaggggggatatcgccagattaaaaaagccgaggtagatagtatagcagcttgtgttatactggagcagtggttgcaacaatcggaa

SEQ ID NO: 24879 - DNA, 891 bp, Legionella pneumophila
atgggtcacttttggttgaaggagcacaaaagtttaatttggattggcccgaatctcgttcctgaatcaggcattatgatacaagccggacgacatcctgtcattgagccattattacaagaacggtttatcgctaatgatttggaacttaaaccaaatcaaaatatgttactaatcactgggcccaacatgggcggcaaatcgacctacatgaggcaaaccgccttaatcgttctgttggcacatattggaagttttgtacctgctgataaagtgacattaggtccattagaccgaatctttactcgcattggggccagtgatgatttatcctctggacgttccacttttatggtggaaatgactgaaacagctcaaatattaaggcaggcaaccagccaaagcctcgtattaatcgatgaaattggtcgtggtaccagtacctatgatggaatggcattagcttatgcaagctgtgcctttcttgcgtcaacaataaaagcctatactttgttttctactcattacctggagttgactgaattacccaaagaattctcttgtattcgcaacgtgcatttgcaagcatccatcaagacaggacaaattgttttcttgtaccgtgtcgaagaaggttgcgcaaatcgtagttacggattagaagtcgcagaattagctggcatacctaaagaagtgctaaagctggctcatgaacatctgaatcagatacaagatactcaatctatcctggtccagactcaaattataaagcctcccacatctccagttttaactgaactaaaaaaaattgatccagatagattaactgccaaagaagcgttggatttaatttataagttaaaacacctggagtgtgccgagagcatcaat

SEQ ID NO: 24880 - DNA, 1212 bp, Legionella pneumophila
atgaataaactagttcaaaaaatgatgctctcaggtcagtttttgatgatattggccttggaaatgacgaatccttttctgccactattgatcgcgcaccaaagcaacacaccagtaccatcggtagtgatttataacacgctgagtctagttctaccgatgctggctaacattctattaaccccaatctggggcttggcagctgatcgatatggctataaacccatgttaatgagagcatcctgggccttggtgttgacccaggccagtatgatttttgttaattctgtattctggattttaatcatccgattactgcaaggagcttttgcaggttttcttgttgcaatgcaaacctatgccctaagcattactgaatggcaaagcaaaagcacacagttatctcgcttgcaatcctccaaggcaattgccacttctacagccggatttctcggaggattagctttaagcttcactaactatcaaggattatttggtttggcaacattgatatgcctgggcactactgtagtgatgcactacaaattaccctccccaccaaagcaacagataaagaaaagatcacaaacattaaatcattcttacacatcaaaaagtgttttcttctttctttgcgtattaatcatgctaacccaaattgccaagtttttacctgatccagggtttaccctgtatctcaataagtattgttcaaataatctggtactaattggatttctttattctttaccggcaatggggatgctatgtagttcagtatggtgtggcaaacagtttgactactgtcgaagtcaaccttctttggttaaccaatatttaatacgctatagtgtattcggagccatcctcatgatcattcaagccaatgtagataatttctatctgtttgctcttatacgtattttgtgggggatcgtacttgcagccttattgcctgcgttatttgctttgtgcagtgatcgtaatttgttaccaggttatgccttgggattagccaattcatttgcaaaactgggaaatctaattggattgttattgggtggtctttttgcattttatctaccatatcctgcaatttttatgataattgccggaatttatagtttattcgcgatttttgtttacgggtatgatcggctaaatgtcaggcagatgacagatttttccaattcttattttaacgtgaaatca

SEQ ID NO: 24881 - DNA, 4875 bp, Legionella pneumophila
atgtcctataaatttgaagaaggtaaagacgcaatagtaaaaagcgttgttgaaaaaattaagcaaacaatgactggcgaacaaacagagttttgcgctgaattcgcgaagcaattttatgggactgtcgcccttgaagatcttttagagtgggagattgatgatctttatggagcagcagtcaatttctggtctttgatttgtgaacgcgctccacacgaaacaaaaatcaggatttataatcctgattatgaacgtcatggatggcaaactacacatactgttgtagaagttatctgcgaagatatgccttttattgtagattctctgaggatagtaattaatcgaatgggattaacatctcatcttactatccatatgggaggaattagggtgaaaagagacagccataacagggttactgaaattcttccaagaaatggtggagctgctagagatgatgttttacatgaggctcccatttttatagaaattgatcgacaaacagacccggctaccttaacggagctgcacaaaaattttgaacgcgctcttgaggacaatcgagcggtatttgaagattgggataaaatgcgtactaaagtacgagaaattattaaggagcttgatactgtaccaaagacaattgatatcagtgaaattgaagagacgaaagcctttttaaattggatggaagatcaccattttacttttttaggattacgagattatgatttggttaaaaaaggaaaagaaaccattttacaacctattcctgaaacaggattgggcgttttgcgccaaagtctgagcaaatcaaatgcaagaagtattacggcaatgggaccagaggcacaaggattaatttcatcaccccgtattcttgtaatgtccaaaacaaatactttagcctctgttcatagagatgcttataccgattatattggtgttaagcgcttcaataaaaaaggagaggtgattggcgaaaggcgcattataggactgtatacttctgcagcttatcatacaaatcccaagcatattccgtttttgcgacataaagtcgcattaattatgaaaaattctaatttaaatccctatagccatgcaggtaaagtattattgaatatacttgaaactcttccaagagatgatttaattcaaggcactgaggatgagttactggaaatagctatgggtattttctatatgcaagatagaaaacgtatccgcctgtttgccagagccgatgtttacaagcgatttatttcatgcttggtatatgttcccaaggatcggtttaatactgaattaagatatgccatgcaaaaaattttggcagacagttttaacgctgaagagattaccttttctactcagttttcggaatcggtattggcaagaattcattttatagtaagggttaatcccaaaaatttacccgattttgatttaaaagaaatagagcaaaaattgattgaagtggggcggtcgtggattgatgatttgcaacatcatttacatgaagtctatggcgaagaacaagccaattcactttactctcggtataaaaatgcgtttccaatatcttattctgataccttttcacctagaacggctgtctatgatattaagcatattgaaatgctaagccctgaaaattcgctcggtattaatttctataagccattggatgaatctgagaagagctttaggttaaaggtttatcagcatgacaccactattcctttgtctgatgtattacctatcctggaaaaacttggtttaagagcaattagtgaacgtccttatgttttaaaatttgaagatggtaaagtagcatggattaacgattttgccatgcaatacaacaaagaaagcgagtttaatatcgacgaaataaaagagttatttcaaaatgcatttgccagagtatggtttggtgatgcagaaaatgatggctttaatttattggtattagcggccggactaaattggagggaagttgctgtattaagaacctatgcaaaatatttcaggcaaatagggtttacatttagccaggattatatggaaacagcactaaataataatgtaagcattgccaagaaattagttaggttatttgaaattcggtgcaatccccatgactccaaaaagagagaggatagatacgttgcacttgtcgctgaaatcttatctgatcttgataatgtagccaatctggatgaagacagaattataagacaatacgtgcatgccatcggtgccactcttcgtaccaatttttatcaagtagacgctcaaggtaatcctaagaattatatttctataaaattgtccagcaaactcattcctggtgtaccaaaaccataccccatgtttgaaatttttgtttactcgccacgatttgaaggggtgcatttgcgctgtggtaaagtggctcgcggaggtttacgctggtcggacagacgtgaagatttccgaaccgaaattcttggcttaatgaaggctcaacaagtaaagaactctgtaattgtccccagtggcgccaaaggtggttttgtacccaaacagataccagctaatgctactcgtgaagaaattatggaggagggaatcagctgttataaactctttataagaggtttgctggatataacagacaattacaaagaaggactcattgtaaaaccccaaaatgttgttttttatgatgaagatgacccttatcttgtggtcgctgcagacaaaggcacagcgacattttctgatattgccaattcaatttcccaggaatatgatttttggcttggagatgcttttgcctcaggtggctctgttggttatgatcataaaaaaatggggattactgctaaaggggcatgggaatctgttaaacgccatttctatgaattgaacagagatatccaaaacaatgatttcactgtggttggcataggagatatggccggggatgtctttggaaatggcatgttgttgtccaggcatatcaagcttgtaggcgcttttaatcatattcatatatttatagaccctaatcctgaagctgaagctagctttaaagagcgtgagcgattattcaaccttcccagatctaactggacagactatgataaaaaactcatttccaaaggaggaggggttttttctcgtagtgcaaaatctatcccggttagccctgaaatgcagaaagtatttggaataaaacaaacttcgattgaacctaatgatctaattaaagcaatattaaaagccgatgtggatttactttggagtgctggaattggaacctatgtcaaatcgagtactgaaagtaataccagcgtaggagatcgaacaaacgatgcaactcgtgttaatgccaatcagttgagatgcaaagttataggcgaaggtgggaatttgggattaacccagttagcacgagtggagtatagtttacacggcggcaaagtctatacagatttcatagataattctggtggggttaattgctcagacaaagaagttaatattaagattttattgaataatgttgtatcagctggggatctgactccaaaacaaagaaatgagcttttaagtaatatgaccgatgaagtagccaaattagtgctcagagataatttcctacaaacccgagccattagcttaactgcttctcaagccttaagagccattgaattacatgcaagatatattaacgaactagaaaaaacaggaaaaattgacagaactttagagtttttacctgatgaaaaagtcctaatggaacacaaactaatggggaaaggattaactcaacctggaattgctgttttaatgtgctacagcaaaaccatactaaaagagcaagttcttgcttctgaagttcctgaagaagattatatgaatcaaatacttattggttcatttcccaaacctctgcaagagcgttttagtaaacaaatgcaagatcatcccttaagaagggagataattgctacccgtttaagtaacattattgttaatgaaatgggcttcacgtatgtttacaggttacaagatgaaactggggcctctgttgcggcaattgtcagggcctatatgattgccagaagtgtcttgaatctggaagcaatatggaaacaaattgaggaacttggtacaaaagtcagcgcgcaagctcaagttgatatgatgatgctgtatgttcgactatccaggagagtgactaggtggtttttacggacacatagaaggtcgatgagtataacgcaggcgatagagttatatgcaaaaggggttgatgaactgaaaaaatccatgcctgccgtttttggtgaaacaggccggattcaatatgaagagcattaccaagagcggataaaagaagggataccgcctcaacttgcccatgaattaacagtgactcgaggcttgtttgccgcaacagacattatagaaattgcctacgaggaaaacataaaaatatcaaaagtagctgaaatatattttggtattggcgaatttcttgacatagcttggcttagaacccaaattattgttcacacaactgaaaatcattgggaatctttatctcgagaggcattacgcgatgatttggattggcaacaacgccagttaacagctgccataatgggctttgagcctaataataaggatttgcaagaacgattaacaagatggggagagacacacgtttctttaattgacaggtggaactatattctgacagctctgaaatcaagtacagctttgaactatactatgtttttagttgctacccgagagttgctggatttaacccaaacgacattacaatccaatttaaaaatggaagagtcattt

SEQ ID NO: 24882 - DNA, 1188 bp, Legionella pneumophila
atgaacctgattaaaatgagcgacattgatctgtctggcaaaagagttctgattcgtgaggatttaaatgtcccgatcaaagacggtatgattaccagtgatcaaagattgcaagcggccctgcctacaatcaaatccgctttggacagtggcgcagcagtaatcgtattgtctcatcttgggcgtccggaggaaggcaaatacgaaaaaaaattctctttggagcctgttgctgattatttaagggaaaacctggaatatcctgttcgcttcgtcaaagattacctgagcggcgtgggtgtaaaccctggggaattggtcgtatgcgaaaatgtccgatttaatcccggtgaaaaagccaatgacgaagctttggcaaaaaaactggcaagcctttgtgatgtctttgtcatggatgcttttggcacggcacacagggcacaagcgtctacctatggtgtcgctcaatatgctccagttgccgttgctggtcctctgctaatccgtgaacttgaagcgttaaaccaagtgcttaaagcgcctaaaaaacctatcgtcgctattgttggaggagccaaagtctcatccaagctcagtctattgaaacaattggtgggtatggttgatgttcttatccctggcggcggtattgccaatacttttctgaaagcccaagggtttgaaattggtatttccctttacgaacctgatttattggatgaggctcgccatatccttattctggccaaagagaaaggttgccaaattcctctacccaccgacgttgtagtaggcaaaacatttagtgaaacctgccctgctttcaacaaatctctgtctaatgtggctgcggacgatatgatccttgatattggcccagaaaccataagagattatgtagacctcatccatgacgccaacaccatcatctggaatggtccggttggtgtattcgaattcccgcagtttgcttatggaactagagccattgctatagcgattgccgagagtgatgccttttctattgctggtggtggtgataccttggctgctgttgatctttatgatttgaatcaacaaatttcttatatttccacaggaggtggggcatttctcgaatgtctggaaggaaaaaccttgcctgctgttgctattttgcaggagcgcgcaaaacatgttaagacgaac

SEQ ID NO: 24883 - DNA, 1488 bp, Legionella pneumophila
atgagtgaagaacatgtacatttagatgaaagtgaagtttatcatattcgcaagcaaaaattagcggaattgcgcacaggtgggtttaattttccaaacacttttcgccgcgaacatttagccgatgctttgctgaagcaatactctgaaactgagaaacaaacattagaacaaaagcatgtgaaagtatctgttgcaggccgaatcgttctgagaagaattatgggtaaagccagtttttttcatattcaggatgtatcaggtcggatacaagtttatcttcgttcaaatgatcttcctgacatttatgaacagtttaaacattgggatttaggagatattgttggtgtacagggtgagttgtttaaaacaaacactggtgaactgaccattaatgcagaacatgttgagttgttaaccaaatctttaaggccacttcctgataaattccatggtttggctgatcaggaattgaaatatcgaaaacgttatgttgacttgattgcaaatgaagacagtcgaaaaacttttctaatacggtcacatttaatcaaagccttcagagaatttatggatgataatcattttctggaagtagaaacaccaatgatgcatccaattcctggaggtgctttggctcgccctttcgtaactcatcacaatacattggatatgaccatgtatttgaggatagcccccgaattgtacttaaaacgcttggttgttggtggttttgagagagtatatgaaattaatagaaatttccgtaacgaaggaatttctactcgtcataatccagagttcacgatgctggaattttaccaggcttatgccgattacaatgatttgatgaattttactgaacaattgtttcattatctatgcgataaagtattagctactcggcaaatagaatatcaaggccaggtcattgatttcaataaaccttttgaacggttgagcgtaaaagaagctatattaaaatatcatcctgatattaaggcgcagcagttagaaacggtagagggatgcagaacacttctgaatgatttaggtctgccttataaagaaactgatggcctgggtaaactacaaattattctttttgaggagacagtagagcaccaattatttcagcccacttttattacggaataccctacagaaatatctcctttagcgagacgttctgataccaatccggaagtcaccgatcgatttgagttttttattgctggtcgtgagattgcgaatggattttctgaattaaacgatgcggaggatcaagctgagcgctttcgaaagcaagttgaagaaaaggatgcgggtgatttagaagcaatgcattttgatagtgattatattgaagcattggaatatggcttgccgcctacagctggtgaagggattggaatcgatcgcttggtgatgttatttactaattcgcaatcaatcagagacgttattctatttccgcatttgagacag

SEQ ID NO: 24884 - DNA, 1104 bp, Legionella pneumophila
atgaaaaaaaaactggcattggtcatgcgattactggctgttattcttattcctgtcctcatgtcctgtaattcagaatccaataagccagtggtacataccttggcagaagttgacgtcgcgctaccagtaaaaaagaatattgtagaatgggacgaatacacaggacgatttcaagcagtagaagaagtggatgttcgtgcccgtgtcactggatatcttgaggcgatcaagttccaagacggccaaatggtaaaaaaaggagacgttttattcgttattgatcaacgccccttcaaatatgctctggcaagagcagaagctcaatacgccttagccaaagcgcaatatgaacgtgccataaaacttcaaaaagagaaatttatttcagctgaagtgatagatcaacgatttcaagacgtacaagttgctgaaaccagagtacaggaagcaaaattgaatctcgaatttactgaggtcaaatcccccatcagtggcaaaattagtcgagattttgtgagtgcgggtaatttaatccgcatgaacgacacagtcttgactaaagtagtttctgttgatcccatttatttttattttgaaaccagtcaaaatgatttgctcaaatacatacgcctcgatcgcgctggaaaaagactcagctccgagaaaaaaccaactccagtcttaattaagttacctgatgaaaaggattacttgcatcaaggaacagtggattttttagataatgtgattgactcaggcacaggaactatccttgccagagcacttgtccctaatcctgataacgtcatttatcctggtctttttgcacgtgtaaaattagttggaagtggggaatatgaagcaattttactccccgataaagcaatcaatacggatcaagcccgcaaatttgtgtatgtggttgataatgaaaataaagtgaaacgagtgtatgttgagttagggccactgcgcgaaagcgggttttacattatccgaagtggattgaaaggggatgaaaaagttatcattcatggaatccaacgtattcatggcccaaaccaggaagttaagcctgtggtaattgaggtgactgaaaat

SEQ ID NO: 24885 - DNA, 669 bp, Legionella pneumophila
gtgttagccttaaaaaacaaaccaccgaagaatgaaaaagaacttttggagcaatgccagcgaattgaggggttgagtttcgctcagttagctcttgaattgggtctatttacccctgtaaaccctgttcatcgaaaaggatgggttgggcaagctctcgagttagctttaggtgctgatgcaaaaaatgagtcgctacctgattttaagcagttgggcattgaattaaaaacgatacctattaataaatcagggaaaccagccgagtccacatttattgtttctattccactactgaccatccatcagcaaagttgggagtcttctcaatgttacgctaaactcaaaaaagtattatggattcctatagagggagatacagatattccctttcctcacagaagaattggatgtggatttttatggtctccgaataaagatcaggaatctgttcttgcagaagattggaattatttaacaaatcaaatagttctgggacaattagaaacattaaattccttttcgggagagtatcttcaagtgaggcctaaggctgccaatggaaaatctttatgttatggttatgacccagagggtaatcgtataagaacgttaccacgaggattttatttacgcgcctgttttacatccgtaattttaagtcaatcc

SEQ ID NO: 24886 - DNA, 1026 bp, Legionella pneumophila
atgcaaaacgaatacagccaatttgaacagcgtaagcgcgatcacatagaactggccttaatgccagccaatcaaagcagcgaattaaatccctttgatcatttttctttggtgcatgaagccttacctgaccttgattttaaagacatttccatacaaagcatccggtttaaaaaaccggttgaaaaaccatttattatcagttcaatgacagcaggccattccaatgctctagaaattaactatcgattaatggaagcgtgctcaaaaacaaaatgggcaatgggcgttggctcacaacgcagagaattaaccgataaacaagccgcatttgagtggacgccactccgtcgtgatttccccatggtcagcctgttcagtaatctgggaatcgctcagttaattgacactccaatttctgcaatccagcgcttaattgatacattgcaagctgaagcattgattattcattgcaatccattacaagagtgtattcaacctgaagggacaactaattttcaagggtgctggacagcattggaagcgttagtcaaaaagattgcttctccagttataataaaagaaactggttgtggtttttcaaaaaatacgctgctccggttaaataatataggtgttgccgctgttgaaatcagtggtgtggggggtacgcattgggggcgaattgaaggacatcgggcaaacaaggatccgataagacaacgaactgctgatacttttcgaaattggggcattgatactttacaaagcactcgtaacgccattagccttaatccctctttcgaaatttggggttctggcggcgtaagaaatggtttggatgctgcaaaactgtttgcgctcggtgctaccacagtcggcttcgcgaaacccatgcttgaagcggctttgggctcaaccgggcaagtactgacccaaatgaatacaattgaatatgaattgaaaactgctatgttttgtactggcagccgagttcttgatgatttaaaggagaaggcatgtcca

SEQ ID NO: 24887 - DNA, 1131 bp, Legionella pneumophila
atgatgattgcaaccttaatggaatcagcccaggaaacgcgagtagccattactcccaactcggccaaacaatacataaaactaggctatgatgtagggattgaaaaaaacgcggggcttagctcagattttgctaacgaagaatttgaaaaagctggcgcaataatattcgatagtaaaagtacattactcaaaaaaacacaaattcttttatgtgttaacgaacccgatcccaaaaacctgaatggcttacctccagattctctaataatcggacatatagacaataacccacttagcccgcttgttaagtggtgtctggatcaaaaaatgacattattttcaatgaatctcattcccaggataagtcgtgctcaaagcatggacagcctatcgtctcaggctaacctagctggttacagggcagttttggaagctgcggcaacatttcatagagctatacctatgatgatgacagcagcaggcatgatacaaccggccaaagcacttattcttggtgccggagttgcaggcttgcaagccatagctactgcgaaacgtttaggtgcagtggtttatgcctttgacgtaagaaaggcagccaaagaacaggttgaaagtttaggcgctgaattcatagaggtaatgcaggagcaagatagtgaaacagctgggggatatgccacagaaacaagcgaagaatataaaaaacttcaggctgaactcattgatcaatatgcaaaaactgcagacattgtaatttctactgccttgataccagggcgtcaagctccggttttactttataaaaaaactgtcgagcaaatgaaaccaggttctgtcattgttgatctcgcaacgtctcgaggtggaaattgtgaactcagtgttgccgataaaatcatcaagcatggtgagattactatagtgggattaagtaatatggcaggtctcgtccctgctacggcaagtgacctttattctaataatctggttcatcttataaacattttggcgaaaaatccggctgaacttaacttaaatcctgatgatgagattatccagcaagccgttctttgccataaaggaacttacctgccctttcaaggagtaaaggagaagcaaaatgcc

SEQ ID NO: 24888 - DNA, 1356 bp, Legionella pneumophila
atgaaattgtcttttttaggtgcgactggtacggttaccggctctaagtacctggtagaatcaaataataaaaagattttggtagattgcggacttttccagggtttaaaagaattgagactaagaaactggtcaccccttcctgtgtctcccaaatcaatagatgctgttgttttgacccacgcacatattgatcatagcggttatttgccattattggtgaaacaaggatttaaggggcgcatctatgcaactgctgcgacaaccgatttatgttctatcttactgcccgatagcggttttttgcacgaggaagatgccagaagggcaaataaatatgggtatagcaagcaccatccggctttacctttgtatactcaggaagatgcaaataataccttaaagtattttgaatcagtagaatatgacaccccttatcctttaatggatgattgcgaaatcagttggcatagggctgggcatatattagggtctgcatttattcaatttcaaacaaagcaaatcaagttattatttagtggtgatattggaagactcaatgatcctgttatgaagccttccgagttaatgaaatctaccgattatttggtgattgaatcaacttatgggaatcgcttgcatgataaaaccgatcctttagcgtttatagccaacatagtcaatacgacttgtaaaagaggcggtacagtgctaattcctgcttttgcagtcggtagagcacaaactatgttgtattatttgtatattttaaaacaaaaaaaattaattcctgatgtccctgtctatctggatagccctatggctattgatgccactgaattattattaaaacatcataacgaacaccgcttaagtgcagaggagtgccgagccgtctgccaaatagcgacttatgtccatgccccaaatgaatccatggcagtggattgggagcgcgaatctaaaattattatttctgcaagtggcatgatgacagggggccgggttttgcatcatttgaaggtatatgctcctgatcctgcaagtactatccttttgactggattccaggctgctggaacgagaggtgaaaaaatgttaaatcatgagccgtccgttaaaatccatggtgatgattaccccgtcagggctcaggtagctacgttaaccaatgcctctgctcatgcagattatgaggaaatactaatttggctaaagcattttgagaaggccccaaaggaagtctttattacccatggcgagcctcaagcggcattgggattaaaggggcatattgaaacggaactggggtggaattgtaagatacctgactatcttcaaaaggtaaacttggat

SEQ ID NO: 24889 - DNA, 1026 bp, Legionella pneumophila
atggataatgcgataataaaatggggaattttaggtacaagttttatctctgaagtgatggctaatgcaattcaggaatcaaaaaccagtgagcttgttgctattgggagtcgaacaagcaagatagccaaacgattttctgaaaaattcgctattccaaaattttatgacaattatcaatcattaattctcgatagtgatatagatgtggtttatatagggttacctaatcatctgcataaagaatggattattcgttgtgcgcaggcaggaaaaaatattttgtgtgaaaaaccttttgttgttggtatagaagaaatccatgaggttatttcagtaattgagagaacaaatgttttttgtatggaagctctaatgtaccgatatcatccctttataaaaaaattacaagagatcattcaaagcaacacaataggtaagataaagttatataatgcgacatatacagcaaacattgcagaaatagccaatcctgttgcgggaggaagtatacgtaatctcggatgttacccaatttccttagtgaggctgcttgctaacgcagagccaatcgaaatccgtggtattggaagaatgaattccaggaataacacggatagtcaagccagcgttcttttaaaatttgaagacgattcaattgcagcagtttccactgccgatgatattgaaatgcattggcaattcgaggtttatggaacaaaaggccatttaaaagtagaaacgaatccctggttgcctggctctgagggtaacaaaatttatatctctctcaatactcaatcaacacccagagaaataagcgtgaaagcagaaaagtcactttatacctatcaaatagattttatcaatgagcaagtattgaaaggggattccagacaatttagcaagacgtctttattagatagcatgggaaatacaatcgttctggaaacctggctaaaacaaatactctcttcaaaaccaagccttgaattatccagattaaaagacaggctgcctcatgca

SEQ ID NO: 24890 - DNA, 756 bp, Legionella pneumophila
atgtgcgggatatgcggatgttcagtagaaaaaggtcaaaccatggataatgggcatcatgctgctcaccatgagcattctgtgcctcatgaacattcagttgatatcgagcagaatattttagcgcaaaacaatgaatttgctgctcataaccgggattattttctcaggcataaaattttggctttgaatttgatgtcaagccctggatccgggaagacaacattgctttccaaaaccatttccgaacttggcaaggaaatggatattgcagtcatagtaggtgatcaacaaacaaattgtgatgcccaaatgctaaaatctcatggaggggatgcctggcaaattaatactggaaaagtatgccatttggatgcccatatgatcagtcacgccatacaagatatttccctaaaaaagcaatcgcttttatttatcgaaaatgtgggtaatctcgtttgcccggcttcatttcatctgggcgagcaattcagaatagtagttctttctgtgacggaaggagagaataaaccgctcaaataccctgatatgtttcattcagcagatttgcttctgataaccaaagcagatttattaccccatgtgaattttgatttggatttatgtaaggaatatgtacgccgcacgaatccatccatagacattattaccctgtcagcggttaatggtgttggattgaaggattggcacgattggttgttgcattcttttaggttgaatgtccagtcttcttca

SEQ ID NO: 24891 - DNA, 501 bp, Legionella pneumophila
atgtctgctaattcagcaaaaatattaagtcaattgatgccggcaaaccgtatgctcgatattgatcattggatatcaaaatatcccaaagatcaaaaacaatccgcggtcatgagtgctcttcgaatagtacaagaagaacatggtcatttaacaacggaattaatgaatgcagtagctgaatatcttgatatgccgcccatcgcagtttatgaagtagcaagtttttatacaatgtatgaacacaagccagtggggcgacatttaattaatgtttgtaccaatatttcttgcatgctgagggattctgctggcgttgttgaacatttagaaaaaaaattgggtgttaatctaggtggaacaacagaagatggtcgatttactttaagatcagttgaatgcttgggtgcttgtgtgaatgcgccaatgatgcaagttgataaagattatcacgaaaatttgactgctgaatctatagataaagtattggaacagtaccaa

SEQ ID NO: 24892 - DNA, 837 bp, Legionella pneumophila
atgacaagaaggagtaatcaattgaactctaacaaggatttggctattggtgtattcgattcaggcatggggggacttacggttttaagggctctgcgggataaattacctcatgaatcttttgtttatttgggagataccgcccgtttaccttatggcacaaaaagccctgacacagtcaaacaatatgctatgcaaatggcaaaaattttggttgagcgccgcataaaagctttagtcattgcctgtaatactgcaacgacggctgccttacctcatttacagagcatgttaaccgatattccggttctgggtgtggtggcacctggtgcagccgctgctgtgtcagctaccaaaaatcatcgtattgctgttctggctacagaaacaaccattgcttccagagcctatcatgatttgatcataaagaatttgcctgaggcagttgtcagtagtcgggcatgtagtgttttagtcgccttggcagaggaaggtatggtgactaatgcagttgctcgtgaggcattgaagcattatctcgacgatttttcggatgaagatgctgtgttattggggtgcactcattttccagtatttaaacccttgctatccagcttattgccaaaagatgtcgcaattgtcgattctgctcaggcgactgcaatttctctttatgaattattgcaaaatcaaaatctgcacaatgacaatttggaagctccccccagaatcaactatttggtaacagattctatcaataggttccagaaggtaggcgagatatttttaggtgagcaattgagtttgagtgatattgaattgattgatgctatgggt

SEQ ID NO: 24893 - DNA, 1182 bp, Legionella pneumophila
atgcacttaaaacggactttatcattaacactgctggccttttatgggcttggaactatattgggcgcgggaatttatgcccttgttggtgaggtcgcaaaagaagcggcacaatttacccctctatccttcttaatcgcctccatcatcgctctttttactgccatttcttatgcagaattaagctccaggttaccgcttagtgcaggctctgctctttacgtgcggagggcattccatcaaaaatggctatctggcttaataggttggattgtggttttaacaggtgtgatctcggcagccaccctatcccatggttttgtcaaatattttcaattgtttttacccttaccaccttctctcatcatcactatattaactgtcattttagcgggagttgctgtttggggtattcgtgaatcagcgactcttatcctgtacatgacgctcatggaagtgggtggattattgatgattatttattacggtcgttattcattcgcttctatcgacatccaatccttctctcttcctcattcttttgatggggtgcttattggagcttttattgctttttatgcttttattggttttgaagatatggttaatacagcagaagaaacaataaatcctgaaaaaactcttccaaaagctatttttcttgctttaatatccgcaaccattttatatgttgcagtcgcctgggttatcgtttcgaccataccatccaatgctttagtcaaaacggacatgccccttattgaaattattaagcttcaaggacaatcccccttgttgttttcaatcattgcactaatttctattaccaatggaattctggtgcaaattattatggcttcgcgacttatttatggtatggctaatcaacaaaatgcccctcaaatattctcctttgtttattccaaaacgcaaacaccagtcaactcgaccttactggtgtctcttattattttactctttgcctatgccctccctattacaaccctggctaaattaaccagcagtatcatattgtgtatttttatcatcattcatgcctcgctaattaaaatcaaactgacaaaaaagaaaccaacaaacgccatttcattccctattgttttcccgatgatttccattttattaaccctggcctttttgatcatacagttttttttaaag

SEQ ID NO: 24894 - DNA, 486 bp, Legionella pneumophila
gtgcaagttatggcggaattaaaagcggcttctgaccgaatggaaattgtcgctcaatcaccatatgttcttgttgattatgctcatactcccgatgcattggaaaatgttcttatcaccgtaaatcaaataaaaaaagggagattgtgggttgtatttggttgtggtggggacagagataaagccaaacggcccattatgggaaaggcagccagcatgtacgctgataatattgtcattaccagcgataatccaagaagtgaagatccggaaattattctaaatgaaattgcgtgtggcattcctgcctctgcgcctgtctctaaactggtgaatagagaagaggcaattgcttatgctttaagaaaggctgagcataacgatatcatattaatagcaggaaaaggacatgaatcgtatcagcagattgggaatacaaaacatgttttttctgatcaggaagttgtaagacgtttgatgaataat

SEQ ID NO: 24895 - DNA, 1008 bp, Legionella pneumophila
atgaaatatcgcaaattgggaaaggtggggcctgatgtctcagcattgggctttgggtgcatgggattatcagagttttatggcaaacccgctcgccttgatgatgcaatcaaaattattcgtaatgcgcatgaccaataccaagttaatttctttgatacagctgatatttatggaaaaggtaaaaatgaagaattagttggtaaagcgataaaaccctttcgtaaccagattatacttgcaacgaaatgcggagtagtaaggacaggctctaatgatgaaatgagtgtcaataattcatctgcttatatcagaacagcctgtgagaaaagcctaaaacgcttaaatactgaccacattgatctctactatttgcatcgttatgaccatcaaacaccaattgaagaagtgatggagataatgcatgaccttattgatgaaggcaaaattggttatattggtttatctgaaactgatgctgataccattcgggcagcttatacagcagtcaaggacaaactggttgctgttcaaactgaatattcacttcgagttcgagctccggcgacagcagttttgggcacctgccgtgaattgggtatttgttttgttgcctactgccccatagcacgtggtttcctcagtggaaaaattaagaagcccaatcttttaaggacaaatggctttgatttcagaactaatattccgcaattccaacctgaaaactttgatcaaaatcttggcttagtcaatgaacttgagaccataggagaaaaaacaggctacaccccggcacaattatcattagcttggctattggctcaaggagaagacattatccccattcccggaacctcgaatccacaacacttagcagaaaatatgcgctcaattgatatttttctaactcctgaacaaatgaaagatttggaaaatgcttacaaaaataatcctgttgccgggaaacgattatctaaggaactgatggcaacctttcatttaaaagaa

SEQ ID NO: 24896 - DNA, 1380 bp, Legionella pneumophila
atgattgcaagaaacagaaatacaaggaaccttgtctttttctctacaaattttacaatgaatcgtttacaattcgttaattcccttaaacaaataaatcaagattctatggtatttgtagcttgcgggcttaatcataaaactgctccaattcatgtgcgtgaaaaagtcgcactgcagccagccatgcaagattctctattgagcagtctgcttgatttacctgaagtcaatgaagcggctattttatctacatgcaaccggactgaaatctactgtgataccaatacccctgaggttcttggaaactggttagctcatgaacaccaattatcagaggaattattatctcaatttttgtatatccatcagggaaaagaaggaatcaaacataccttgcgtgttgccagcggtttggattccatgatgataggcgaaccacaaatccttggccaaatgaaacaggcgtatcaacatgcttgtcgtcttggcacagtaaaaacacaattacggcctgtgtttgaatatattttcagagcgtccaaacgcatcagaactcgtagcggaattggggctaatcccgtatcgattgcctatgctgcggtacaactgatagggcaattatttaaaaactatcattccttaagtgtctttttaattggttccggagaaacagcctctctggttgctaaatacctgcatcagcatggtgtccatcgttttttgatagcgagccgcactctggaaaatgctcaaaaattagctgaaactttcggtggaaaaacactgtccattggtgatatcccgcaatatttacctctggccgatgttgttatttctgccacagcatgcccactcccattcatcaataaaagcctggttgagcatgccttagagcaaagaaaccatgcccccatgtttttattggatttggccgttcctcgtgatattgaaggaaatgtcaatgaattggaacaagttcatctctataatgtagatgatttacaatccatgatagaaaaagggatggatgaaaggcgaaatgcggcattacaagcagaacaattgatcgaaagcgaactggataactacattagatggcatcgctcgcttagagccaaagacgtcatttgcgattaccgcaatcaaatgcacactttggctcaacaggaattacaacgtgctttgaaaaaaatatccgctggtcaaaatcagcaagacgttttaaatgaattcagtatgcgcttggtcaacaagctaactcataatcccaccataggtttaagacaaatagcatgggataacagagaagacttacttgacctcgcgcgatatctctttgatacaacagccaatcaatcattatatgaagaaatctct

SEQ ID NO: 24897 - DNA, 2565 bp, Legionella pneumophila
atgaaaatcaacttagacttaaatgacttatcaacttatgaccagaacctacttttaaacgagttaaatagttcattggaaggactaaacaatttccaagcgcaaaaacggttaactcaatatggtacgaatgaaattctaagaaaaccctatcatctgattatccttgaagcaatctcgcactcaattaatcctttagttgccatcttattttttgctgctttaatttcagcatttacgggaaatgtagttaatgcagcgataataattagcatcatcatcattagcattggcctggattattttcaaagtcatcgcgctcttgttgcaattaaaatgttacaaaagaaaatagcaactacagtaacagtcttacgtgaaaatcaatggctggagatacctgcaaaagaattagttcctggtgatttatttcgattatccgctggtgatatggtgcctgcagactcaatactattaaaatcaaaagaccttcatattcaccaagctgcacttaccggggaatcaatgccagttgaaaaggaagcaatccctctaaagaccaaacctaaaaatcctcttgatgcactcaacatcgttttttcaggctcatctgttattgggggtagcgcaacagcactagcaattaatacaggaagtaatagtttatttggtcacatcgcagaaagcttaaagaagaaaccaccacatacagaatttgaacaaggtatgatgcggttcagcacttttatcatgaaaatggtatttctgttagtaatctttgtattttcaatcaacatatacatgcacagaccattgcttgattccttgttgtttgctgtagcgctagccgtaggtcttactcctgaattacttcccatgatcacgacagtgaccttagcctctggtgccgttcgcatgtcaaagaaaaaggtaattatcaaaaatttatcagcggtccaaaacttcgggagcattgatattttatgtagtgataaaacaggcaccctgacaagcggagaaatgaatttaacaaaatacctggatttttcaggaaagcaatcggaatttgtaatgttattagcctacttaaacagcttatacataacagaaattaagagtccctttaatattgcagtattaaaaaaagcaagattaaatccattagatttagcaatcttaaaacatgatcatcccgatattcaaccataccataaagtagatgaaattccttttgattttgagcgcagacgttcaagtgtcattgttagcaaaaatgagaatcacctgttcatttgcaaaggcgcacctgaaaacattatgagcgtatgctcctattatgattttgcaggcgaaagagaactgtttaccgaaaaagaacaaaaacaatgtgaattgcttttccaatcgttaagcagcgaaggttatcgagtcttagctattgcctacaaactaatggatcgacaacttaaatatactcaaagtgatgaaaaagaaatgatctttgcgggttttttagcctttactgatcccctacttgaagatatcccaaaagtaattaaagacctgcgtcaggaaggaatcaatataaaaatcttatctggtgataatttaatagttactcaacacatctgtcaaacagttggtatggatacaagccgtattttgacaggggaagaaatttcaaaaatttcggatgacgcacttccctcactagcagaaggaattgatatttatgctcgtataaaccctatgcaaaaacagaggataatctctgctttaaaaaaaagagggcatgtcgtgggatatcttggagatgggataaatgatgtaccatctttacatcacgctgatgtgggaatttcagttgcttctgctgttgatattgctcgtgaagcagcagatattgttttgctggaacatcatctaaaagtattattaaacggaatcatcgaaggtcgtaagtcgtttagaaacgtcatgaaatatctcatgatgggtacaagctcaaattttggcaatatgattagtatggcagttgcagtcctgtttttaccttttttacctatgctacccagacaaatcctattaaacaatttactttatgacatctcacaaataacgatacccactgatcatgtagatccaagctcgatacatcaatataagagattagatattaatataattcgccaatttatgttctacgttgggcctattagctctgtatttgattttttaacattttttgtcatgttaaaaatattttctgctaatgaagctttgttccaaacaggttggtttgtcgaatctttggcaacacaaactttagttatttttattattcgcacggccaaaaaaccttggcaaagtatgccaagtctccctttaacagctactgttctactgatagttatggtgggaatatggttaccatttagtccattttctggattatttggatttgtgcccttgccgccattgtattttctttttttggttacagcgacttttacttacttatttctggttgaattaattaaaaaaaagataatgcggaaattatat

SEQ ID NO: 24898 - DNA, 1368 bp, Legionella pneumophila
atgacacttactgcattaaacgcgatttcacccatagatggtcgttatgtcaataaaaccagagcattaagtccctattttagtgagtttgcattaacctattatcgtttaatggttgaaatcaagtggtttgaatcattagctgctaacgacactattccagaagtacctgctttggataacaaggctcgtaaatttttatctgatcttatttccaattttaatgaatcagaagctgaaaaaataaaagaatttgaaaaacaaaccaatcatgacgttaaagctgtagagtattatcttcaggataaatttcaggaaaatgaacaactcaaatcttgcgttgctttcatacactttgcctgcacttcagaggacatcaataacctggcttatgctttaatgatcaaacaagcgatagcccaagttatacaacctactatagctgagatcatgggaagcattacgcttcttggaaaacaacatgctgacgttgcgatgctctcaagaacgcatggtcaaccagcaacaccaaccaccatgggtaaagaattggtcaattttgtagctcgccttaaacgaccccagcaacaattggcagaagtattaatccctgccaaatttaatggagctgttggcaattacaatgctcacgtagcagcctatcccgaagtggactggcgtaagcattgcgctaattttgttacatccctaggtttatcctttaacgcctataccactcaaattgaaccacatgatggcatagcggaagtctcccagattatggtgagaattaataatattcttctggattatacccaagacatatggagctatatttctcttggctactttaagcaaaaaacaattgccgaagaagtaggctcatcgaccatgccgcacaaggtaaatcctatagactttgaaaatgccgaaggcaatttaggtctgtctaatgctttatttattcattttgccaacaaattaactcaatcacgcatgcaaagagacctgtctgattcgactgtcttacgtaacttgggcgtagccttctcttacagtttgattgcctatcactcagtagccaaaggtaatgataaattacaaatcaataaatcagctctacaaaaagatttatccgaaaactgggaagttttagcagaggccatacaaactgtcatgcgccgctacaatgaacccaatgcctatgaacaattaaaagagcttacacgaggacaaatgatagacgctgaaaaccttaaaaaatttattaaaaccctgtctattcccgaagaagcaaaagcagagttaatgaaattaactccagagacttacacaggtcttgcaacccaattggtcaaggctttttca

SEQ ID NO: 24899 - DNA, 668 bp, Legionella pneumophila
ggaattccctgggggctgaattattctttatgtacaccaccatgctgattgcggtacctaccggtatcaaggtgttcaactgggtgagtacaatgttcaaaggggctatgacctttgaaacgccaatgctgtttgccatagcgtttgtatttttattcactataggtggatttacaggcttaatgttggcattggtaccggccgattttcaatatcaggacagctattttgttgtggctcacttccattatgttcttgtgcccggcgttatctttgctctggtagctgcgacttattattggttacccaagtggactggacatatgtacaatgagcgtttgggtaaatggcatttttggctttctgtcatttcagttaatttgacttttttccccatgcattttctggggctagctggtatgccaaggcgaatccctgactatgctttgcagtttgccaattttaatatgattgtaacagtggctgcttttgctttcggtttgtcgcaattgttgttcctgtacaatgtggtagccacagtaagaaaaagaggcactaataaggatgtagcaacgagcagggtttgggaagggtcacatggattggaatggactttgccatctccaccaccttaccatacgtttaccactccacctgagattaaataa

SEQ ID NO: 24900 - DNA, 999 bp, Legionella pneumophila
atgattgttagaaaccctacttggaactctcttacccccccacttcctaaatttgtttcttgtgatacagtcgagacaaatttcctgaaagaaaaattaggagaagacggcggcatttatactgctcaatttgatctaaaatcaacctatgcttttttgtttcagcgtaaaaatgatcaaaaaaaattttttatcaagaaagtatccgctgagcataaaaggcaatatcagcagagcgaagatttggctcaatttatcgcttgcccagattatatagtcaatattgcaattaattgcatttctaatgaagaagaaaactcactctattatgtttatccctatattcatgggaaacgcctctttgctgaaccagagcaaataataacccttgcaactgcgttagcaaaattacatcttaaaaaaaaatcttatcctgaccaacagttgattattaaaaataccacggaacgaacatcacagcttaattttataagaaaggctttagctgatggatgttattcttacattccacatttctcttttgtcaaaaagatggctcaacaatatgattttgattggattaatcaagaagatgcccaaccaattcatggtgatttaaatgcaggaaatctgttactatccgaagataatatgatttgcttttttgactttgaagacgcattacatagtttccatccagtagtgttagatttgctattcgttattgagcgcattatttttaatcaaaatagttcgactgaacagctattaaaccttggtctcatgtttattcatgcatataaagaggctggtggtacataccagtataaaacgagagatgaatttggattaacaattcttgctttaaaagcattttgtttgttgactttgctagcagagaaaaataaaaatatacttaattcagaatgggataaattttttaaattaactcaaaaagcaggaaatgagcgggatttaataaaaacaattttacaagga

SEQ ID NO: 24901 - DNA, 2223 bp, Legionella pneumophila
atggcagaatcaaaattagagatagtcaataaaacagaacgtgaagaaagtgtaatcctggatggtaatgggattttacgctgttataacatgtttcctactcaatttggaagcatagaggaaatgattgactatcttcctcaattacaggccatgggatttaatgctgtatggataaatcctgtacaaacagcaggggatgttcagggtttatttaagcgtgataagacaattggcgtcagagcttataatgaggtgacaagaagtctatatgctatgacagattgtgatttgataagtccttattttaacccgctccctcccaatgttgatcctaagttgaaaaagcagctggatatggaagcaatgcagaagttcacatcagaagcccgcaataatggtttggtaccgatgtttgatttggttttaaatcacgttgccgccgattcacggcatagaaaagaacatcctgaatggtttcaaaaggatgtccatcctgattttaaggatgctatcgcgtttgactacagtgaccctcaaatccgagatgaaattattgaacaattttggaagccttatatttataagtacatgattgattatggctttgagggtgttcgcattgatgctgtaggctatttaaatccagaattacgcaaacaaatttatgcttatatttatgatcttgcagagcagtttaataaacctaaacccgttatattggatgaacttcttttcagtgggagtcagaagcttaccgatgtggttgatggtttgttgcttccagaaaaagggccaacccatattactcgcggtacctattatgcgcaaagagatggttatggtggtttacccggatggtgtaaggaggaggagggagttaaggctcaagtagtattcctggataaacaaaagaaattgcatccccatgccaaaggcggatgtattgctttctccggtaatcatgatcataactccttagccatgacaatattggaagaaatggcagaacatcgtttggcaaatcatcacactttgcacggtgcgcaagaaaaatttaaacatgaaaggagctatgattatgacgaagctttagagtcagtcctgcgctattcttttgtgaaagatattcaaaatgagattctaagcggtaatgaatcaacaatcaaagaagtagaaacaagaatgcgtgaaaaaatagctttctgtgctttaacatcaagcggcgggtggtatgctctatcaggtgatgaaacaggtgatttattggcaaaacctgtattcagaagggttcacgctctggaccaaacctattatgcacaacgtactcatataatctttgataaaaaatatcccgacaacaaagtagctatggaggtattaaccgaaatggctatagagaatatccaaaaagaaaaagctggaagcatctataacagtttacagcatgataaacaatcgcaagagcgattgctcgttccttatctggagactttgcaaaatcaaattaattgtggcgatacagttgtttgcaaagcattccaagaaaaactcgcccagaaaaatataacgattggttttacagacgaaaattatagtccggatcccagaacacctcaaaatggttggaacggccaacatgatatgaggaaatttatgtttgaaatcaatagtatattaagttccttgccgagttccaatatggggttttggagtgaagttatcccaatccagtcaaaaccagggttgcttgcagtagtacgtaaaaatgggctaggcttaagttctgatactgatattgcgatcgttaatatggatccaagtcaaaaagtcgagttaaccagagacgatattcatcaattagcctgtaatttccagaaacgagtaattcctgaatatacttattacaatgatggtaaagacaaacagtataattggcatacaaataatcctgattttaatatggcttatcatacagtgatgtcgtgtatcgaagccaaaaggatacatgttgatgattcgattaaaactaatttccctgttcattcagcaaatccctatggcatgtttagcaaaaagcaatcatcgaaaatgaatatagccaagatagcaaaaatgtctggggaagataccactttaattgaaaaaggtactaatgatactgagggtatcatacacgatgatgagcaaattcaacccactataactgtagaaaacaaaaaa

SEQ ID NO: 24902 - DNA, 939 bp, Legionella pneumophila
atgtataaaatacaccattattttttatttggtgttctagttccatttattagccttgttagtctattcactattttctcttctgactttttaacccttactacttgggcaagtattttggcatccgcctctgatattggcatcattgtccttggagttactcttctgcttataggaggagagtttgacctctctgttggagcgaattttgctttatctggcttgctattcggttcacttacgttattaggaatcaatagttttttagctttaacaattgctttggcaataggagcctgtataggattaattaatgccgcatgcaccgtcttttttaaaatcccctcatttattgtaactttgggaagcatgttaattttacgtagtcttatccttttgtacacccaaggtttgcctgtatctgttgaggacacaaatggtgttatgcaagtattagcaggtgaattatcacaaaatttattgtcttcttttatttggtggtttgctattggtttttatctaatctatcttcttaattggacaaaactggggaatcatatagttgccactggtaacaattgtgattccgcttatctatctggcataaatacaattcgagttaaattcttttgttttgtgtgttgtggaataatagccgcattttccggagtaactcaatttagccaccttaatagtttatcccccattgcgggtgaacaatatgaattatatgccatagcagctaccgtaatcggtggtacctcactaaaaggaggtcaaggatccataataagtacgctattggctactttattattaagcactgtagataccggcatagtacaaattggtgtttcaacttattggtatcgatcttttattggacttattttaatctttgcgatgactattaatgtttatctgaggaaatctgactca

SEQ ID NO: 24903 - DNA, 1311 bp, Legionella pneumophila
ttgaatagcattcctcatctgattttaggggatattatcactcctacacaagctgggcagagtcttcttatcaagaaaggctatgtcttgatcaatggtgatagcattattgaggtgggcgagcaggctcatttcaataaagaaatatcctatacggtgtcaaattatcctgatcatttaatccttcctggtttaattgatacacacagccatctttcccaatacgctatttgtggagctggtgatttgccattgatggattggttaaacactttggtttttcccgctgaaaccgctttctcgagtaatctgcaaagatgccaacgtcacgctgagctttatatgcatgcttgcctgggttctggcacaacgactatcaatacgatggtaaccagcagtcgccaagcgacagaaatagtttgtgatgtggcagcccgccttggtatcagagcgtttataggcttggttttgatggatagaaacgcacctgataatttgcttgttgattgtgctcaggcatttaaagatctgactgttttaaaagatcgttaccacggtaaaaataatatacatatcactgtttctccccggtttgcagtgacttgttctgcggctatgttgaggcaagcaggtgagttcgcccgtgcaaacaagctgatattgcatacccatcttgataaggatgaagggtttgatgaattgattcaaagcttgtttagtacagctcatgattattttgatgtgtttgaatccacacaatgtattgctgataagactgtgtttgcccatggcactttgttatcacttcacgaaatgaaacgcatgggagactatgccaagcaagttggaattagccattgtccctccagtaatttttcttttgctatgggaatggcaccggtttctttttttaaaggcttggggattgaggttggattgggctcagacagtggtggaggggacagtctttctctttttgatgaaatgcgttcagcgagttttactaataaagcattatggaggcttgataaaaagacagctttgattgatgctaaaacctggctatatcatgctactcttggaggagcgaaattgctgggattagagaagcaaattggcagcattgaagcaggtaaaaaggcggatttgattatcctggatgacaggaataactatcctctggcagagctttcttctttgtcacaagagttagcccttgatgaacttcaatatcgtctggcaagagtgattgccagatcctgcgaaaacaagttagttgctgtttatattgatggaaagaaagtttatcag

SEQ ID NO: 24904 - DNA, 1011 bp, Legionella pneumophila
atgaataagcaagatttttattttgatttgccttccgaattaatagcccaatatcctctggcgaatagaagtgattcacggcttttaatttataatcgacagacagaagaatatggccattatcaattccgggaaattgcagatttcttacagccaggggacttattggtaatgaatgacagcaaagtgataccagcacgcttatacggccacaaagccactggcggtaaggttgaactgttagtagagaggataactggcgattttactttcctggcccatatcaaagcgagcaaatcattaaaatcaaacgatctcatttatcttgatgctggtaagcggcttgaagtattacaaaggcaggatgatttatttctttgtaaggcgtgcgaaaatattttagatcttttaaatgatcttgggcatattcctttaccaccttatatcgccagagaagatgaatcactggataaggagagatatcaaaccgtctatgccaagtgcgcggggtctgttgctgcgcctacagcaggattgcattttgatgatgctgttttatccagtattagagcgcgaggagttaatattgcttatgtcactctccatgtaggggcaggaacattcaggccagttcgctgtgaacgcattcaggatcataaaatgcatagtgagtggtttacggttagtcctgatctgtgcactgcagtgaaggctgccaaatctatgggaaatagagtaattgctgttgggactactgcattgcgcagccttgaaagcgctgctatgggaggagagctaattccatgtagtcgtgataccgatattttcatttatcctggctaccagtttaaagtttgtgatggattaataactaattttcatttgcctgaatcaactctggtgatgttggtgtcggcttttattgggcaccaggagtgtatggctctttatcaagaagcaatcgataaaaggtatcgtttttttagttatggagatgccagtttattgtta

SEQ ID NO: 24905 - DNA, 393 bp, Legionella pneumophila
gtgagtatgcatgatccaattgctgatatgctgactagaattagaaatggtcaacaagctaaacatcagcaagtaacattggtttcttctaaattaaaagaagaaatagctcgagttttaaaggaagaaggatatatacaagacttttttattgaaacattaccaaatggtctgaagtcaattactttaaagctaaagtactatcatggaagaccggtaattgaatttattaagcgcattagtcgtccaggtttgagagtatataaatcatataaggatttgcattcaatccctggatttggtgtggctattctttctacgtctaaaggtataatgacccatgtatcagcaaaagtaaaaggtgttggtggcgaagtcatttgtgaagtggct

SEQ ID NO: 24906 - DNA, 117 bp, Legionella pneumophila
atgtttgaattaatggaaagcagccagcaagaaaataatgctgtcatcaaggttgtaggtgttggtggtggcggtggtaacgctgtcgaacatatggtcgctgaaaatattgatggg

SEQ ID NO: 24907 - DNA, 1311 bp, Legionella pneumophila
atgaaaatactctttttgcttttgttaatttttctgagtgtcattcctgctcaggccaaaccagttgagctggttttttggcatgcgatggcagggcatttgggtgatgaagtccgtttgcttgctgatgattttaataaaagtcagaatcaatatcgagtcaaaccgatttacaaaggaaattatacggaaactcttaccaattttgctgctgcattcagagctcgtcaagcaccatcaatagttcaaatttttgaagtaggcacttcaattatgttagctccccctggtgtgatcaaacccgttgatttgttgatgagtgagcaggggatcagtttgcctaaagatgattttattcaatcagtgcgtgagttttatagcagggatgggcaattaatggcgatgcctttcaatctctcggcaccagttctgtactataatgctgacattttagccaaggtgggatatggcaagcataacttccctcaaacctggtcagcaatggaaataatggcagaaaaaattaaaaaagccggttatgactgtacttatactacggcttatcctggatgggtgttatttgaatcttttcttgctatccatgggttgcccataactcaaggtaatcctgctcgtgctgttttccatactccccaattaatggctcattttcaacgtctaaagcgctggcatgatttgcattattttcgttatggtggtcgtgttgatgatgctaccattttatttaccagtagtgtttgtcctttatttagtcaatcatcgggggcttataatagtttgtctgcccttgttccttttcatttgggtgttgcaacaatgcctttggatacgggggccagtccgataagacatgcgaatgtggcagggggtgctgctctatgggctgtaggaggacaaacagaagagcaatatcgaggaattgccagattttttgcatttattgcaaaacctgaagtgcaaaagcgctggcatgagcatacgggttatttgccgttggggttaaaaggaatttacgctagcattgtgcaatcaagtcaacatcccgctttattattagccagaacagatctcgaggacaatttacctgagaaaccttataaacacatgggcccgcaaaatcaaattcgtggaattaatgatgaggttttagaggcaatgtttgcagatttgatgagtccggaggaagctctgaacgaggcgacgatcagagcgaatcatttattgttacgttttgccagaaatactcaaagagaaagggtagttgatgataaagtgggcaagggtttgggc

SEQ ID NO: 24908 - DNA, 459 bp, Legionella pneumophila
atgctgcgcgtcagtaaattggccgattatggaacagttgtaatggtttatctagccaagcattcgcaggaattatgcaatgctcgagatattgccttacatacgcatttaacagtacctactgttagtaaaatactaaaacgcctgactagcgcgggtttgttaacttcggtacgaggtgtatccggaggatatagactgcaaagaccagcagctgaaatttcggtgtctcaaatcatatttgctttggaagagcacaggggtttcacagaatgcagtatgcaacccaatgattgttttttacagggagtatgtaccattcaaggaaattggcgattaataagccatgcgatcgaaactgctcttgatagtgtcagtttggaggcattggcaaaaccaactcttccaacaagggatgttgagcgagttcggcaattagcaagtggagtaaatcgtggc

SEQ ID NO: 24909 - DNA, 309 bp, Legionella pneumophila
atgtatgcggtaattaaaactggcggtaagcaatataccgtgaaagaaggtgacgttttaaaaattgaaatgctgcctgaaaatgttggcaatgaaattaaattttcggaagtattaatgctagtagatggtgataaggtcacttgtggcacaccttttgttgctaaagcaactgtaaaggccgaagtgcttgatcatggtcgtcacaaaaaagttaaaattattaaatttcgtcgacgtaagcaccatatgaaacaaatggggcacagacaatattattcgcaagttaaaattactgcgattggtaaa

SEQ ID NO: 24910 - DNA, 934 bp, Legionella pneumophila
tatcggccagccaaccctgcgctttggcaaggcaggaaggacaccgccaaccaggaacgtttttttcaaaaaattacttttattgataatcaaaatgaattaatgactaaagacaaaaaaaccatatttcttggatttgccagtgataccggaattaaacgcaatttaggcagaacaggagcaaaattaggccctgatcaaattaaaacccaacttgccaaattaccatgtcataataataaacattatgttgatcttggaaacgtggtatgtgaaaacgatgaattggaattatcccaatctcaatttgctcaaatagttcatttttgccatgaaaatggccatcagatctgtgctttcggcggtgggcatgaaatagcctgggcgcactatcaaggattgtcctcactctatccgaaattaggggttatcaactttgatgctcattttgatttacgcccttataaaaaaggtgagtttggcaactcgggaactcctttctctcaaattgccacctattgcgaagaaaaaaaaatgccttttcattattgttgtattggggtgcaaaaatttggcaacaccccatctctttttgaaaaagcaaaaaaattaaatgtgagctacctctcagcagaagacctttatgagcaaagccaggcttggcaaattgcatttcttgatgattttatccttaatctggaccatatttacttaacgatatgcctggatgttctcgccgaatgctatgcccctggtgtaagcgccccgcaagcactgggtctttctccctggcaaataatgccactgttgaaataccttatacaaagtggcaaagtagtaagtttagatattgcagaaactttcgccgccactagattccgaattgaaaactgctagactagcggcacttattatcgcagaattgttagatact

SEQ ID NO: 24911 - DNA, 1995 bp, Legionella pneumophila
atgttgaatagccaacaaatggctgcagtaaaatatattgatgggcctttgttggtgcttgccggggctgggagtggtaaaaccagagttattacacaaaaaattggttatttaattaattcatgtggttataatgccaactccatctgcgccgttactttcacgaataaagcggcgaatgaaatgcgcgcaagggtttcggcctttttaccagctgtaagcaggcggggattaaaggttgcgacatttcatacattaggcctaagcatcatcaagcgtgatgtttctagatgcgatttgaaaccaggattttccatttttgatagtgaagattgtttgcaaattttgcggggttttttacctgttaataaggcaaccgatagagattttatcctcaaagttcaacaacaaatttctctttggaaaaataatttattgaatcccgaattaatactccaaaaccctccggaaacacttttatgtgacgaggcgttaacaatttatccacgctatcaagaagcattaaaagtatataatgcagtggactttgatgatttaattcggttacctgtcgatctactgaatgatcatgctgatgtgttggaatattggcagaataaaattcgtcatttgttggtggatgaatatcaggattcaaacactagccagtatcttctggtaaaaaaattggcaggggttcgtgcccactttacggttgtgggtgatgatgatcaatcgatttatgcctggcgtggtgccaaaccagagaatttggcgcagttacaaaaagattttcctcggttaaagattattaaattagaacagaattacagatcaaccagccgaattttacatgctgccaaccatctgatcgctcataatcaacatttatttgaaaaaaaattatggagtgatttggggcatggggaattattgagggttgtcagctgtaaggatgagcaggatgaggcggaacatgtgatcgctgatttaataagccataaattacgtaatcggacaaattatagtgattacgctatcttatacagaggaaatcatcaagcaagaatatttgaaaaggtattaagacatcacggtattccttatcatatcagcggaggccagtcctggtttgccaagttagaagtcagggacatttttgcctatcttaaattactttgtaatgaagcagatgatgccgcttttttgcgagcaattactacccccaaacgaggtataggagagagcagtctcgatgccttgggacgctatgctcagtccagagggataagtttatatcacggatccgatcatttggccttgtctgagtttgttgctgacaagcagagaatgatttttcatgatttcaaattgtggatggaagacattaaaaaacgtatcagttcagattcagttctggagcatttaaggcaaatggtggaagatattgggtatgaagcttatatttatgaacaatgtgattctcccgccaaggcacaaaaaaaaatggataatgtatgggagcttttagaatgggttaatcgtttattgaataaggaacctgaacaatcgctcatggatgttgtgaataaattaatactaatcgatatactggaacaatctgatgaatcttcaagtgatgtagtccaattaatgacattgcatgcctcaaaaggtttggaatttccttttgtttatttggtcgggatggaagaagaattattaccccaccgagtgagtatcgatgatgaccaaattgaagaagaaagaagattggcttatgtagggatcacacgtgcccagaagggattatgttttactttagcgaagcagagacgtcgagctggagaactgcaagactgtgttccaagccgatttttggatgaattgccgcaagagagtctggaatggttcggtaaaggcggggagcgttgtgaagaacaatcaaaaaaactggccaaatcccacctggaaggactgaaaaacttgttgagt

SEQ ID NO: 24912 - DNA, 378 bp, Legionella pneumophila
atgaatttaatgctgggtattagagcttcacattacgggctgatgcttttggcaactcttttagggctgtctatctcagttcggcaaatgtatattcatttaacaccaggtgatcctggttatggcggcctcatttttggtttgcatctttatacttggtcagcaatcatatttttagtcattatcttattaattgctggggctctaatccttgataagggcttcatgcccgattataaagtacgaagcaagtcggcaaaagtaatgatatgggtattttttatcttgattcttgccaatggaatcagtacattcttggaatgtggaccgcacgaatgtccagataacccgagcaaatattatttactaaataataat

SEQ ID NO: 24913 - DNA, 2889 bp, Legionella pneumophila
ttgtggtgctttttcctgcctctgtttttattattttttagtttttcactcttttcagcatcagttaaagaaaataatgccacgctagtagaatatttggctcatgaaaaaactcatttgactattgctatcaatgaaattaagcaaaagagcgctcccaaggatgagcaagagtacaatgagaagttaagacaaattagaactattctttcaatgaataaagcaaaaattgagagtttgaatagttttagtgaaaatcaaaagaaagaagaagtcaatttgaatgaccaactaaagcgtttgcaacaaatgccacttgccaatgctgaagtaaccattcaggaaaaagtaggtaaaatcgagaccttgcttactgtcaataaaaaaaccactgagttaattgcagaaactttggatttggccaaacaatatcaattacttttaaatgatgttttgaatgaattaaaactttggaaagccaacttcgatttgaaagaaaagcttaagtcaattaaagccattagagctaaattgaataaagagctgaatatcctttatgagaatgcagtatccagccaagataaaaagcaaccggaactaacgattagcgaacagattcaatatgaagctaatttgtacatcaataatcaaagaattgcagttattcatcaaaagttgaatgcattggagttacagaaaaagataattaaaacgaatatcctgttattaaataatttggatactaaagccttgcaatcagcaattgataattacagagaggttattaatcaatattcggctatagagagttctttgcaaacaattctgaattctcttacaaatcaggccaatctttttgttgagccagggttacaaaaatccgttagcttattgcagaatgacgttaaaacagaattaaaggagacctctaatcaaaaacttatcttatccaaaaatttagaggattatcaaaatcaattaaagaaacagatttcaacaagacaaagcttaagcgaatacaatatagacagttgggcagtcattctcaacaagctaattgatatccctaatttgttttataaatacatcaaaacactaaccataaaggtttatgatagttatacctggctagatacttttcctgcaatttttttatggacagttcttatttttatcctgagcctgttttatattttaaatcatgttttgaagactctagcaagagataaagaacgctcaagatttactggttatctttatggtggaatactcgttttactgcaaagaaacatacctcatctttgcttcttcgctatgttatccttcattttatacttcaccagtatttcttatgctaactctcaattattaattaaactcattatcgtgtggcttacctttagagttttaattttaatagcccgtttgattttgttagaaagtatatcggattcatcaggtaaggacgttaaattatattatcgactaaaatggttgttgctttttggtggatggacaaccgcgttgatgacatttagtcacttgttacctttatcaattctactgcaagatatatttaatcgattattcatgctttttatgttaacggtatccttggtcgcatggaaaagtaaagatgtaattccttatctcattagaccattactgaaatcaaagaaaagatattttaaaaatgcaatttctttattggtcattttagttcctataaccttatttacaaccgcaattattggtttaattggctttgtgaacctggcatggactatgagtcgttatcaagcttatattctgttggttttagtaggttatattctcgtaagaggtttgatatttgacgcattagagcttttctctgagtggatgatctcttcattgaaaaatggttggttatggatagaggttttcctcaaaccaatcgataaaatcttgcgtattgtcttgtttttaacaagtgtattaattttatttcagttgtttggttggtattctgattcactggttgtgactagcctcgaaaaagtagttcaatacagtattcttaatattacgggcatacatattacagtcgccagtatcattgaatttcttattctgcttgctgttttagtatgggcagcaaagtggacaagagaattttgctttcgatggctatataagaataccaaagatgtgggtatacgccatagtttatctgtatttacacagtatgcgatcatattactgggtacctttatcactcttcatgttctgggactggattttagcggtatgtcgatgatacttggtggacttgctgtcggtatgggtttcggtttaagagattttgcttcaaatattgttggaggcattatgcttttaattgaaagacccgtaagggaaggcgatttgatcaccataggtgaatacgaagggcaagtggctcacataggcattcgctcgatgcgcgtatcttcatgggacaatactcaggttttgattccgaatgctgaaacattcaataaaccttttacaaactggactcatcaagatggtattattcgtacggtcataccaataaaggtaagcagagccgatgatccagtgatgattcaacagttaatacttgatgtgttggcaattattccggaaattgttccagatcctcctgcacaagtttttttaaagaaaatcgatacagctttaatagaatttgaagcacggtattttattaacatccagaatcataaccgggttgaagtaaggtcaaaagtcttgtttgccataactgcacagtttaaagcggcaggaatacagccgccaattgagcctattactgttgaactaaaagagagctccagtgttagccttaaaaaacaaaccaccgaagaa

SEQ ID NO: 24914 - DNA, 1629 bp, Legionella pneumophila
caaagtgaagaatttgatgcaataaaaattgcactggcgtcacctgaattaattcgatcatggtcctacggcgaagttaaaaaacctgaaacaatcaactacaggacatttaagcctgaaagagatggtttgttttgtgctaaaacttttggtccagttaaagattatgagtgtttgtgtggaaagtacaagcgactaaagcatcgtggtgttatttgcgagaagtgtggggttgaattggctcttgccaaagtgagacgagaaagaatggggcatatcgaactcgctagcccagtcgctcacatatggttcttaaaatccttaccatcaagaattggtttgctcctcgatatgacactaagagatatcgaaagagtactctattttgaagcttttgtcgttgttgatcctggaatgacagaacttgaaagagggcaactacttaacgacgaagcctatcttgatgcgatggaacagtatggtgatgagtttgacgcgcgtatgggcgcagaagcaattcgtgatttattgcgccaaattgatctggaagatgaaattagaaatttacgtgaagagcttccaacaactaactctgagacgaagattaaaaaaatcaccaaaagactcaagttattagaagctttttacgagtcaggaaataaaccagaatggatgatcatggatgtacttccagtgcttccacccgatttgaggccattggttccgctagatggtggacgttttgctacttcagacttgaatgatttatacaggcgcgtcattaataggaacaaccgactaaaacgcctgctggatctaaatgcgccagacattatcgttcgtaacgaaaaacgaatgctgcaagaatccgtagatgctttacttgataacggcagaagaggtcgtgccatcactggtacaaataagagacctcttaaatcactggcagatatgattaaaggtaaacagggtcgtttcaggcaaaacctcttaggtaagcgtgtcgactactctggacgttcagttattgtagttggaccaactttaaaattgcaccaatgcggattgcctaaaaaaatggcgttggagttattcaagccatttatattttccaaattggaatttagaggtttggcaactactatcaaagcggccaagaaaatggtcgaaagagaagaatcggtggtttgggatatattagatgatgttattagagaacatcctatccttttaacccgtgctcctaccttgcatagattaggtattcaagcatttgagcctgttttaattgaaggtaaagcgatccagctccatcctttggtatgtacagcatacaacgctgacttcgatggagaccaaatggctgtgcacgtgcccttgacactggaagcgcagctggaagctcgttcattgatgatgtctacaaacaatatattatctccagccagtggtgagccaattattgttcccagtcaggacgtcgtccttgggctatactatttaacacgagaaaaggttaatgcattaggcgaaggaaaaatatattcaagtgctcaggaagcgcaaaatttctatgaagcaggtcatttggatatccatgcaaaaattaaaattcgtatgcctaaagaa

SEQ ID NO: 24915 - DNA, 834 bp, Legionella pneumophila
atgagtatcgcatttgttaacggcaagtattgttgtcaatctgaagcaaaaatttcaatatttgatcgagggtttctttttggtgactcggtttatgaagtgctgcctgtttaccatgggcagccttactttgtagaccaacatcttgaccgattattctcaaatatgaaaaaaattaagatgattataccaaattatgattggcatggtttaattcatagactaatatcagaaaataatggcggtaatttacaagtatatatccaagtcacacgagggaatcaaggggtgcgcaagcatgatatccctacttccatcacaccttctgttatcgcattcactatgcataatccatttcccaccctcgaagataaggaacagggaatgtcagcaaaactggttgaagattttcggtggatgagatgtgatataaaaactacttctttaattgccaatatattactgaatgatgaggctgtatctgcaggattccacactgcaattcttgcccggaacggtctaattacagagggaagtagtaccaacgtatttattgtcgcacaggatggtgttattaagacaccacccatgaataatttctgtttaccaggaattactcggcaagttgttattgaaataattaaaaaattagatttaaagttcagagaaatagaaattagcatttcagagcttttttctgctcaggaagtttggataacaagtacgacaaaagaagtattccctattacaaagattaatgactctttgattaatggcggaaaagttggcgaatattggcggataattaatgattcctaccaacaactagtaaac

SEQ ID NO: 24916 - DNA, 1653 bp, Legionella pneumophila
atgacagaacaaactgaaaaaagagctcactttattagacaactcattatagatgatttggcaaatggaaaacatcagggaatcgttactcgtttccctcctgaaccaaatggatatctccatgttggacatgccaaatctatttgtcttaattttggtttggcagaagagtttaagggaaaatgctttttacgttttgatgacaccaatccaattaaagaagaagaagaatatgtaaacgcgatcattgatgatgttcgttggttgggatttgaatggtgtgccatgacgcattcttcggattactatcatgagctgtatgaattagccatttatcttattaagaaagatatggcttatgtcgatagcttgagtatggaagaaattcgtgcttttcgcggcactctacaagaaccagggcgcgaaagcccttatagaaacagaacaattgaagagaatctggatttgttcgctcggatgaaagctggtgagtttcctgatggaactcatgttttgagagcaaaaatagatatgaaatcaggtaatttaaatatgcgtgatccggttttatatcgtatacgccacgcccggcaccagcgtacaggagatgaatggtgtatttatcccatgtatgattatgctcatcctatttctgatgccctggaaaaaataacacattctttatgtacgttggaattccaggatcatagacctttgtatgattggctggttgataatttacctttgcctgccaaaccagtacaaaccgaatttgccagattaaatttatcccatactgttacgagcaagagaaaattacgtgaattggttgaaaaaaaaatcgttacaggatgggatgacccacgattgcccacattacgcggtatgcgcaaaaggggatacccacctgctgcaattcggcaattctgtgaaataattggcatatcaagaagtgattcagtgattgatatgagtttacttgaggaatgtgtacgcgctgaatttaataaaactgcaaaacgggctctctgtgttatggatcccttaaaagttgttattgtaaattatccggaaaataaagtagaacagcttcaagcagctttctaccctcaaaatcctgagtcagcgagtaggaatttacccttttcccgtgaaatttatattgaaaagtctgattttatggaaaatccgcctaataaatatttccggttatctcctggagctgaagtacgcttacgtcatgcctatgttataaagtgccaggaagttatccgtaatgaccaaggcgaaataacagaattgcattgcacttatgatgaaaatactcttggcaaaaatccggaggatcgcaaggtgaagggtgtcattcattgggtgtcttcatcacatgcctatcctgtcactatttatcaatacgacaggttatttacagatcctaatcctgcacgggaagaggattattttcagtttctgaaccataactctttacaaaccctccagggattttgtgaaccggcaatggctgagcaggcagaaggagatgtgtttcaatttgagcgtttaggttattattgcgtcaattcagtggctgagggctgtgttcaagcctttcatcgggtagtggatttgaaggacacttggggtaaagtgagt

SEQ ID NO: 24917 - DNA, 1251 bp, Legionella pneumophila
atgaatactaatattgctaaccaattaagggccgctaaaaaagcaactactgatcttaacttaatacaaagtgatacccgaacaataattttgaaaacattagcggctaatttagagaagcacattgaaaacataatacaagaaaatcaaaaagatttaagtttaatgcttgagcaagatcccagatatgatcgtttattgttaaataaagagagaattttgtcattggtgaatgatgtgagaaaagtagccaatttacctaacccattaggagttaatctctttgaaaaatcaatgccaaatggtttgagtattaagaaaatcacagtacctttaggtgtcatcgcagtcatttatgagtcaagacctaatgtaactattgatatattcagcctatgctttaaatctggaaacgtttgtattttaaaaggtggaaaagaagcacattttactaacagttatctgcttttattaattaaaaatacattaaagaattttaatataaacacagatattgtttgtttattaccaccagaaagagcattgatgactcaattattaaatgccacaggtcttgttgatttatgcattccaagagggagccagaatttaataaattttgtcagagacaatgccaaaatacctgtcattgaaacaggggcaggtatcgtgcatacctattttgataaaagtggagatttgggaaaaggtaaaaaaattattaacaatgctaaaaccagaagagtaagtgtttgcaatgcgctggatactttgattattcatgctgatcgtttaaaagatttgccagaacttgtggagaccttgtctcaaaagaatgtgattatctatgccgaccaggatgcatatcatgttttagataagaattatcctgaacaacttttaattaaggcaaaaccacaagactttggccatgaatttctagactataaattagcaataaaaacagtacccaatataaaagcagctattgatcatattcaacaattcagttcccatcatagtgaggctgttattgcagaagatgagtctgcaattgataaatttctaactgaagtggatgcagcagctgtctatgccaacgcttctactgcgtttacagatggcggggaattcggattaggggctgaaattggaattagtacgcaaaaagttcatgcaagaggacccatgggactagaggctttaacaagctacaaatgggtgataagagggacgggacaaattagagat

SEQ ID NO: 24918 - DNA, 2367 bp, Legionella pneumophila
atggcagaagtgatgttggcgtcagccgcaattattgcagatgaacttaaggtcaaagtatcgcaggtagaaactgctattcggctgttagatgaaggagcaacagtaccttttattgcgcgttatcgcaaagaagcaacgggagggcttgacgatgtgcaattgcggtttcttgcggaaaggctaatttatttgcgtgaattggatgagagacgaacagtcattttgcaatccattcgtgaacaagaaaaattaacaccggaattggaacaaagcatattagctgctgaaactaaaacacgcctggaagacttgtatttaccctataggcctaaacgtcgtacaaaagcacaaattgctattgaagcaggattagagccattagctcatgctttatggaaagatcctgctttggatcccgaagagcaggcttcccaatttataaatagcgaagcagggattgaaaacactcaggccgccctggatggtgcgcgacatattttaatggagcattttgctgaagacgccgagttaattaacgaattacgagagtatttgtggcaacacggaatagtcaaatcagtaggaaacagtactaaaaaggatcaggcgaataaattttctgattactttgattattcggaagcgattaaaaaaattccatctcatcgggcactggctttgttccgggggcggcgtgaaggaattctgcaagtaagtctggttttacctgatcaggatgccaattatggagagaataaggttgctgcttactttaatgtcactgacaggcaaagaaaagcggatggctggcttatagatacggtcaggatgacttggaaaattaagttatttaccaagctggagcttgagttattaactcgtctgcgcgaaatagcagatgaggaagccattaaagtgttttccaaaaatttacgtgatctgttgctggctgctcccgcaggtcctcaagtgacgataggtcttgacccgggaattagaacgggtgttaaagtggttgtcgtggatgctacaggtaagttgttggattactctgttatttttccatttgctcctcaaaatgaatggcatcaatccattgcggatttggccaagcttgctgcgaaatatcaggttaatttaatcagcataggaaatggcaccggttctcgggaaacagagagattggtagctgatttaattaaaatgtaccctgatttgaaattaacaaaaataattgtcagtgaagccggggcatctgtttattccgcatctgaaattgcagccaatgaatttcctgatttggatgtttccctaagaggcgctgtatctattgcacgaagattgcaagatcccttggcagaactggtaaaaattgaagccaaatcaataggtgttggccagtatcaacatgatgtgaaccaggcaaagttggcgcgttgcctggatggtgttgtcgaggattgtgtgaatgctgttggcgtagacattaatacggcctctgcagctttgctatcccatatttccggattgaatgatactttagctaaaaatattgtgcaatttcgcgatgaacatggtgctttcacaaacagaaatcaattaaaaaatatccatcgtatgggagaaaaggcttttcagcaagcagccggctttttgcgcattatgaatggagataatgctttagatgcctcttgtgttcatcctgaagcctatcctttagtggaaaaaattatttcagataaaaaagttagtattaaggaaataatcggcaatagagaattattgcagagcattaacgctgaacaatatgtggatgagaattttggtttgccaacaataagagatgttttacgtgaattggagaaaccgggccgagatccacgaccagaattcagaaccgctcaatttcaggaaggtgttgaggacattaaagatttggaacaaggaatggttctggaaggtgttgtgagtaatgtgactaattttggtgcctttgttgatattggcgttcaccaggatgggttggtacatatttcagcaatgaccaatcgctttattacagatcctcgttctgttgttaaagccggtgatattgtaaaagttaaagtggttgaagtggataaagaacgccgaaggattggtttaagtatgaagctgaatgatgagcaggctcctgctgtcttgcagaaagctaataaaccacagccggctagaaaacaagcggaacaaaagcagcctgaatttaagaagaagcaagaacataagaaaaaaccagataagataaaaaaatcggagccagtcaaaaaaaccgtatttaatacagccatggccgatgctttggccaaactaaaacgtggtggagaa

SEQ ID NO: 24919 - DNA, 1260 bp, Legionella pneumophila
atgaaaataaataacttagttggttttctgcttgccttctgcctgacttctttatcttataatatcagtgcagctgaatctcctgttgtatctcatcctaaaattcaaaaggaaatgagcaagtacttcaaggtttatcataacaaagaaaaatttacagccattgctgtctcagtatttattcctcaagagaaaaataaggatgcattagatgttgcgacttttgtcaaaggaactatgggatatcctccactgtcccaggaaattaccccattgaatttgtttgatattggaagcattaccaaatcattcacttcattgattttgcttcaattgcagactgagggcaaattgtcactagatgatcctttgggtaaatggctgcctcaatacaaagagtggaaagatgtaaaattaagacaattattgaatatgaccagtggcatccccaattattccgaagatcctgaatttgcaaaaaagatggaggataattttgcggcaatctggggcgatgaggagttgttaggttatgctcatccagaaaagccaatagaaaccgacagagcaaacaggtatgagtattccaattctaactatattcttgctggaatggttattgaaaaagtgactcaagatacttttgaaaatcagttaaaacaaaggattattaatacaaacaatggattaaacaattcattttatcctgcagggccacatggcccagaagtcgaaaaatcaatccgggatagacgagtccatggttacttttatgatgagaacaacaaaaaactaattgatactataagcaatgatttatcctgggctggcacagcaggtgctgttatcgcaaatactgaagacgtcggtcgttgggtgcagctgctataccatgggttactgatagaacctgcttttagagacgaggctttatccgaattggagtcagtggtttcaataaaaacagggttacctatcccttcagtcacagaagatgagccctacggttttggattgggagttggtttttattatgataaaaattccaggcagcgcttttggacttaccagggcagtactttaggttacagggtgatgtatttgtggaatccttgtaataatgtaacggttgttgtggctttgaatgggaaaggtggctcaggcaatgagaaatcaaaaatcggcaaccatatccatgagctttgtttgaatatacataaagttatcgttaaaaaccatccacacctacaatgtgcaagc

SEQ ID NO: 24920 - DNA, 1203 bp, Legionella pneumophila
atgagctcaacagtcagctcttctaaagtagggttctcttttagtgatttaccagtcacttgtaaattattattggctctttcttttatagaggctattggaggcggcctatcttaccatattgcgtatttttttagtgtaagcaccaattttaataaattaaatataggcttcttaggcttttcaatggggattggagctattttgggcagtatatgtggtggatacgttacgggaaaagcacaagcaaagggtataattggggcaagtttcttactcatgggcgtcgcatttgttattctagcaaaagtgagttcttttcatttatctgttgtctttgtattgttaatgggatttgggatcaacttgttcatcacttgcagtaactcatctttcttgcagatttcaaaaaataccaatcacagtttaacgattgcccaatcctataaaaatgcactggaaaatactggtggtattgtggcaatggttttgataatgcttttagcgcaaaatcattttaaattagcaatgactttggtcggcgttactttgatattgttttcaatagttatttttctaaaattagaaatcagtaatcaggatgtggccgcaaaacccagtaataaagaagaaattgagtcagtctatagctcgcttattccaatgttattttcagtattttgcatcggtttaacttatgggatacaaaaaacagtactaggcattcacttaaacgaaacaataggaaattctttaatcattggattttttttcgcaactgatcccattttaatcgcattatttcaagtaaaattatcaaaaaggattgagcgattcaataaacatatagttgcttgtatcggctgtattttattaggggtgtcaacgtttgctatgggcctgtcttctacaatacaaggaatgttttgttcgcttttagtatttactcttggtgaaatgttgtttatggcgtactccgttgcattatgtcatcaatatggaagctctaaccacagtggcctaggtataggggcgtggcgcagcgcatatgcattaggcatgatgattggccctctcatatcaggagtagcaatgtattatttcaatgcccaaagtgcttggacaatatcttctttgctttgtttcatgagtgccttcttagtatttaattctaaaagagcacagcgattagaagctgtttat

SEQ ID NO: 24921 - DNA, 1731 bp, Legionella pneumophila
atgtctggcttaatcccacagccattcattgatgatctattaaaccgcactgatttggtggaattaatagacggatatgttcctttgaaaaaaagaggcaacagtcatattgcatgttgccctttccataatgagaaaacaccatcattcaatgtcgttgcaaaaaaacaattttatcattgttttggttgtggcgcttcaggtaacgccatcagttttgtaatgaattatctgaatcaaggttttacagatgctgttgaaaccctcgcgacacgcttgggtttaagtgtcccacgggatggtacaggagagaaacataaatcatctctcaatctctataatctcatgtcagaagtcagccaatattaccaaaaaaaattaaaatataatggacaagtggcaattgactaccttcgcaaccgaggtcttagtggggaaattgccaaacgatatcatttaggctatgcacctgaaggttggcataacctggaaaaagctttcccaaacaatcagcgtgaactattgagtaccggtatgctcattaaaagcgatgaaggtaaaatttatgatagatatcgtaatcgaattatgttccccatccatgacagaaacggtcgtgtgattggttttggtggacgtgtactcgataaagatcaaaaacccaaataccttaactcgcctgaaacagtactttttcaaaaaagtcgtgagttatatggcttacatcaagttctatctcagcagaaaaatcccgacagtattattgttgttgaaggttacatggatgtcattgccttggcacaacatggcatttttaatgtggtagcaacattgggaactgccaccagcacattccatatacaactattggcaaagcataccaaacatctcattttttgctttgatggtgatgcagcgggtaaacaagcagcctggcgagcattggagagcagtttaccgcatttgaatgccggattagatgccggatttattttcttgccgaatgaacatgacccggatagcctggtaagaaatgaaggaaaaaacggtttcctcgagctcttgcaacaagcaacaccactccaccgctttttctttgatacgttaagtaaagacattaatttgtcaaaccctgcaggaaaaacacagcttatcaacgcagtgaaaccctatttgcaaaaaatggttgagggctcatacaaacagttgcttattgatgacctgtcacgcttaacccatattgaaagccatcggttaactaatttgattactgataaatcggaaagcaagccggaagtacaagctgctatttctcgttcaccactgcgtattgctatcgcgctcctcttacaaaaccccgaaatttattctatagcaatacaacaaatcaatcctgctttgctccatgaacaggagcatcatattttattgaaattattgcaacaattaaaagacaagcccaatgccaatactgccaccctcattgaattctggcgcaatagcagttattttgaattgatagttaaattggcagcctgggatcatcaagtgcctgagcaggagctgactaaagaatttattgatgtcttattatttttacaaaaacaaaatcgtgagatattgatacgacaatacatagaaaaatccagaaaaactggcttaacagaagctgaacggctcagtttacaaaatttattaaaggaaagacatgggcaagctgaaattgaaaaa

SEQ ID NO: 24922 - DNA, 1582 bp, Legionella pneumophila
ctattactaccaactcatgaattgctatcgagatgatgaagagatacttgctcattaccgcgaacgcttccaggctattttagttgatgaatttcaggataccaatacgattcaatatgcatggatccgcttgcttgctggtgatcatacagcggtattggctgtaggagatgatgatcagtcaatttatggttggcgtggagccaaagtggaaaatattcagcagtttgttcatgattttaaagatacacatatcataaggcttgaacaaaactacaggtcgaccgcaatgatattaaatgcagcaaatgcattgattctcaataacagtactcgtatgggcaaagagttatggaccgctggtagtgagggagaaaaaattcttgtatacagtgcattcaatgaattggatgaggcacgttttgttactgaacgaattggcatggaattaaatcagggcgccagtgcggatgagattgcagtgttgtatcgttcgaatgcccaatcccgtgttttggaagaggctttgttacgtgcaggtatagcctacaggatatatggaggagtccgtttctttgacagggcagaaattaaagatactttggcttacttacgattgttagttaatccaaatgacgatactgcgtttgaaagagtagttaattttcctactcgaggaataggagaaaaaacattggatgaggttcgccagtacgccagagcagaacagtgttcgttgtggggcgcttccaagggcatacttcaatccacaggattagggcaaagggggagcttggcattagccaagtttattgatttgatcgaaaaattacaggttgtggttgctaataaggagttggatgagcagatctctgatgtaatacagcatagtggtttatacgcccactttagcaaaatcaaaggtgataaatcagaatcacgtgtggataacctgcaagaattaattaatgctgccaaacaatttcgatatgagtacgatgaagaggaggagttaccgttggttaattcattccttgctcatgcttcattagaatcgggggaattgcaggctgatgaacatgaacgctccgttcacttgatgaccttacatgcagccaaagggcttgagtttccgattgtgtttttggttggtatggaagaaggaatatttccaggcagacaatcgcttgaagagcctggtcgcttggaggaagagcgtctattatgttatgtcggcatgactcgcgccatgcgtaaatagggtctatcctatgctgaggtcataagacaatatggtcgtgaagagtatcacagatcatcaagatttttgcgtgaaattcctcaacaatttcttgatgaagtaagagttaaatcacgttctcagtggcctggaactacaaaaagcaaattgccagtggctgacgaggtgtcgggcattacaattgggcaaaatgtgcagcatgccaaatttggacagggtgtcgttcttgccattgagggcagcggggctcatacaagagttcaagtaaaattcagtgaacatggtgtaaaatggttggttttggcctatgctaatttgact

SEQ ID NO: 24923 - DNA, 1356 bp, Legionella pneumophila
atgaaaacaaaacattttgaccttatagttcttggaggaggaagtggcggaatagctagtgctgttcgtgctgctcagtatggagccaaagtagcagttattgaacaaaaccacttgggagggacctgcgtgaatttaggatgtgtccccaaaaaaattatgtacaatgcttcatcaattgcagaaacactccataaatctcctgattacggttttttcctggaaaataatgccaagttagattggaagcgactagtgaataaacgcaatgcgtatattgaacgtttaagagaaaattatgagaaacgattttcacagcacaaaattactctgattcaaggtaagggcattttccacgatcaaagttctatcacgatagatcatactatttatcaagcagaacatattattattgcaactggcagtgagccagctctaccagcaattaatggcattaagcatgctattgattctgatggtttcttttcattaaccaaattaccagctaaggtagctgttattggtagcggttacataggtgttgaattagcaggaatccttaactctcttggtagtgaaactcacttattaatgagaggtacacggccactgagtcgctttgatcatatgattggcgatactttaatggaaattatgcaaaaacaaggaatctgtattcatcaaaaccataaagcccaagctatccatctccatagcgacggcagaaaaagtattttgtgccaaagtggctctattattgaaaatattgatgtcattatatctgctgtaggtcgaaaaccgcggactggcaatttaaatcttgataaaataaacgttaacatggatgacaaaggattaatcctggttgatgcattccaaaatacatcggttaaaggtatttatgctattggcgatgtcactaatgctcccgcactaactcccgttgcaatagcggcagggaggcgtttggcagaccgaattttcgggaatcaacctgatgcctgcttaaattatgataatatttgttcagtagtgttctctcatcctccatctggttctgtcggtttaaccgagcatgaagccattgaaaaatatggtaagaataaaattaaaatatatcaaacccgtttcatccctatgtatgatgccttgagtattgataaaacccctactgcgatgaaattggttaccttgggtaaaaaggaaaagattattggtttacatgtcgtcggatacagcgccgatgaaatgctacaaggctttggggttgccataaaaatgggcgcatgtaaaaaggacttcgataatacaattgcaattcatccaaccagtgctgaagaatttgtaactatggtg

SEQ ID NO: 24924 - DNA, 1728 bp, Legionella pneumophila
atggtcttaaggatacatcaactttcgccagcaatagccaatcagattgcagcaggagaagttatagaaagacctgcttcggtagtcaaggagctgctggaaaactctttggatgctggtgccagtgtgattggtgtcgatgtcaattatgggggattgctgcagattacggttagtgataatggttcaggaatcgttggagacgacttgcctttagctattgcagctcatgcaaccagtaaaatcagaacgcttgatgatttatattccattgatagtatgggctttagaggggaggcattggcaagtattgcctctgttgccaaagtgactatcatttcaaagcctgaggagcaggacaatgcaatgatgttgcgagtagagggggagaacaggactctctctccttgtgcgcgcaatattggcactaccattgatgtttctgatttgttctataatgccccagttcgtaagcggtttttaaaaaatgaaaaactggaatttcaagctattgaaatggttgtgaaacggtttgcattaagcgctcctcagattgcattaacgcttaagcataataagaaactgattttttcattaccgccagccttaagtgagcaagccaaagccattcgtatgggtcgaattttgggcaatactttcatgagagaagctatttttcttgatgtggagcacagtggtatgcgtctttatggctggataagcaaccatcgcttgcaacgcagccagaatgataggcagtggatttatgtgaatcaacgcatggtaaaggataaattactccaacatgcagtgaaacaagcgtatgatggcttattgcatgcaggcagatttccaatttgtttgttgtattttactttacctgcttctgaagtggatgtgaatgtacatcctacaaagcatgaagtgagattccaacagccccgcctggtacatgatttttttacttcccaattgacgaaagcgttgcaatcgactcttgaccattcagaaacaatggaatacgcatatgctgcttcctcttgtaatgagcagcaaaatacagtttcggaaccttcccatatctgcaatgacagagagtcctatgaaggggcaagagctttatccccaagctggagtgacaattcattatcatcatctataacctgcaaagggtataaaaaaaccagctctgtatatcatccagaaacagagttccagtgggttatcttaaatgagcggtttattttggttttgataaagcaacagccttaccttgtagacatcgtaacattgtttcaagaatggatagaaaagcagctaatgcaaaaggcattgcccttggagagccggcctttattgatctcaattcgttatccattaccaaaccaatggatacataagctggatcacttaaagcatgagttgactcgtgttggaatacagattgagtaccctaatgctgatgacttgttaattcgcagcatccctttgaatgcgccctatttagatgttcgtcgtttttttaatgttctctgcgaactggatttttttgatactgagcaattgatagcgttaattagccgttctcaaatgtttgacccaaaacaattaacagttgaagagcgtattgaaatgaatcaattgttgctggaactctctcttcaagaagagaaatgtaatacatgtaaagcgttaaccattgatgattgtcggatgttattgcatgaa

SEQ ID NO: 24925 - DNA, 645 bp, Legionella pneumophila
atgaaggaacctttagagaaagcacaagcttgtgtcatatggatgcatgggttgggggctgatgcctctgatatgatgggtttagctgatcagctaacaatagaagataccgctttaaggcatgtatttcttgatgctcctcgaagaccagtgactctgaatggaggaatggttatgcctgcgtggtatgatatttatggattaggctttgtcgatgaagaagataagtttggcattgagcaatctgaattgttaatacgcaaggtggttgacgctcaatataattgtggctttaaaccgcatcaaatctttttagctggcttttctcaagggggagctatggcattgcacacggctcttcatatgaccgagcgattatgcggcgttattgcattgtccgcttatttgcccttggctaagcataataagccgcaacttgataagaatactcccatctttatgggagcaggacaatttgatcctttagttctgccaaaatggactctacagagtaaggattggctcttggctaatgggtataatgaagtctcttttcatcaataccctatggaacattccatatgttttgaagaaattaaagatcttagcctttggcttaataagcaggttcaaggagttttacaa

SEQ ID NO: 24926 - DNA, 882 bp, Legionella pneumophila
atgaaaaaattggcatcaactctcttgtgtttctcgctactgataagcgcctctgtctttgcgagagataaatattatttgataacccatggttcacaagatccttattggacatctttattccagggagcaaaaaaagctgctgaagaactgaaagtcgatttacaaattttagctcctccaggagccaatgatgtacccaaacaggttcaattcatagagagcgcactggctacctatccttctggaattgctactaccattccttcagacacagcttttagcaaaagcctgcaaagggcaaataaacttaatattcctgttattgccgttgataccagaccaaaagacaaaacaaaaaatccttacctggtctttttaggttctgataacctactcgcaggcaagaaacttggtgaaaaagctctggaattaactccaagcgctaaaagagcactagttcttaacccacaacccggccatatagggctcgaaaagcgtgcctatggaattaagaccattcttcaagataaaggaatcttttttgaggaacttgatgtaggtactgatcctaatcaagtacaatccagagtcaaatcttactttaagatacatccagaaacgaatattattttttgcctaacctcacaagcactagatccacttggacaaatgttattacaccccgacaggtatgattttaattatcaacctcaagtctattcctttgataaaacacccaatactgtttctttaattcataaaaaactggtgaattatgtaatggatcaacaaccatttctaatgggttatttaagtatcacccaactggtattgatgaaccgatatcaattgaatccagtaaatatcaatactgcaatg

SEQ ID NO: 24927 - DNA, 690 bp, Legionella pneumophila
gtgggagaagaaggattcttagcgcattttgccttttcaatcggtggattacccatcacacaaagcgtcttaaccacgtggttcattatgatctccttattcatcatggcatggagtaccacttacaaatgctctctcctacagccaagcacgtaccaactcatttgggagggtgttttaagcaccatgtacgatgcaataaaagaagtattgcccgagcacgttgaactgatatttccttttgtagccaccttgtggatttttatccttgtttccaatttaattggtgttattccgggattttattcaccaacagcggatttatcggtgacggcatcccttgcgataatgacttttttatcggtacactggtttggaattcgtgccgaggggtggcgagagtatttgaaacattatattaagccaactccttttttattgccttttcatttaatcagcgaaatctctcgaaccttagcattggctgtccgcttgtttggtaatatcatgagcttgcaattaaccgccctgattgtcctcatgattgccggatttttagttcctattccaatactcattttacatattattgaagccatcatccaagcgtatatttttggcatgctggccttaatatacattgctgggggcattcaagcccatgagcttaaaagccaaggagaatcgtta

SEQ ID NO: 24928 - DNA, 468 bp, Legionella pneumophila
atgctaaaaattaccattatcactcttggcaataaaatgcccgactgggttaactcaggagttaacgaatacgcaaagaggtttcatgatggcatccagataaaactcatcgaaatccctttgctgcgtcgtaataaatcctcggatttagcaagaatactagaaaaagaaagtgctttgactaaagatgcccttcctgccaatgctcgccttattgccttggacatgctgggaaaatcctttagcagcgaggaattagcacttaggttgacgcaattacaacaaatttcaagtcacctttgttttataattggcggcccagaaggattatccaatgaaatactgactctttgcgatgaacgctggtcattatccaaattaacccttcctcatcctctggttcgcattattttgctggagtccctctatagagcatggtctatcattaacaaccatccttatcataaa

SEQ ID NO: 24929 - DNA, 246 bp, Legionella pneumophila
atgagtacagttgaagagcgtgttcgcaaaattgttgttgaacaactgggtgttaaagaagaagaattaaagaatgatgcatcctttgttgatgatttgggtgctgattccctggatacagtagaattggttatggctcttgaagaagaatttgaaacagaaattcctgatgaaaaagctgagaaaattactacaattcaagaagcaattgattatattgaatctaacttaaataaagaagaagct

SEQ ID NO: 24930 - DNA, 987 bp, Legionella pneumophila
atgaataaaaaaaccattgccatgttaggtgccggctcctggggcactgctgtcgcaattcatttagctaaaatagggcataaaacgctgctgtggagtcataatccacagcatgttgccctcatggctgaacagcattcaaatccagcttaccttcctggtataccttttccagagaatttgattccttctgataatttaattgaatgcgttcaatcagcggattatgtcatcatagcagttccttctcatgcctttgcggaaataatcaataaaatccctaaaccaacccaaggattggcgtggcttacgaagggtgttgatccagcgagtcatgaattattaagccaactggttgccagtcgatttggggttgattttcccatagcagttatttcaggcccatcgtttgccaaagaagtggctcgcttcctgcctacagctctcactttggctagtaacaatacgaactatcaaaaaaaaatgcatcaactatttcatcacgacaacattcgtgtctatttaagtgatgatttaataggtgtgcaattatgtggcgctgttaaaaatatcctggcgatagcctgtggaatcagtgatggcttagggtatggcgctaatgccaaggcagcgcttattacccgtggacttgctgaaatgactcgtttgggattaagcatgggagcacggcaagatacttttctaggcttggctggtgtaggggacttggtattgacttgtacagatgatcaatcgcgcaatcgccgctttggattgctcttgggtcgtgaagtgcctattcctgaagccgaacaccaaattggccaagtagttgaagggaaacacaatgccgctcaaatttgcgctatagccaacaaaaataaggtggaaatgccaatttgtgagcaaattaatgcgctattgcatggtattgttcatgcccaagaggccgtgaacaacttaatgagtcgtcccgccaaggaagaa

SEQ ID NO: 24931 - DNA, 843 bp, Legionella pneumophila
atgaaagaagcagataccttacagcgttttatttttgagcatgcgaatatccgtggcgaaatcgttcatattgaaaaaacatttcaaaacattatgaaccaacgtgattacccacccatggtaaaaaatcttttaggtgaagcgttagtctcatgtttactcctggcaagcagcattaaatttgaaggaaatttaagtctgcaatttcaaggtgacgaaagattatccctgttactcgttcaatgtgatcataatttaaatataagaggctttgcaaaatgtgcagagggtcttgaaattgctgattacgcgaccgcttttcttcaaggccgaatggtcattacgctcagtcaagacaaccaaactcaagcctatcaaagcctgatacctattcaatccacgtccatgagcgaaaatctgatgacttattttgcccaatcagagcaaattgctactcgtgtttggttagctgtcaatgaagacatggctgcaggtatgctattacaacttatgccaggtcaagatacaattcaaagagaacaattttgggagtatgccgttcagctgggacaaacagtaactgaaggtgaattgctgaccatagacaatcaaacactactctatcgtctttatcatgaaacggaattaagaatattcgaaagccgatctacccgtttccaatgccgttgtaatcaggaaaaaatgaaacaggtcattactgtactgggagaagaagaggcaacagatttaatcaaagaaaaaggaaaaatagaaatcacttgcgatttttgcaatcaaaaatacacttttgattcaatcgacgtgactctactatttcgcaaa

SEQ ID NO: 24932 - DNA, 588 bp, Legionella pneumophila
atgtctcaatctaatgttattattgttcatggtgcctatggtcatccatttgaaaattggttcaattggatgaagactgaattagagagtttaggtattgaatgttttgttccacaactgcctacgccagatggccaggaattaaagaactggcttcacgtatttaattccacagtatcaccaatgattactcatgatacgattttaatcggccatagcttgggatcggcatttttattgaggtggcttgagcaagctaatcagtctgtatttagcactattttagcaggttcgtttataggaactgttggcatacagaaattcgataaaattaatgagagtttttttgaaaatgggtttgattggcattcaataatcaataaatccaaacagtttttttgctaccatgggagcaacgatccttacatatcaagaagtaactttaattttattgcaaacaatctacaggctagaaaaattatcatctctcaaggcgggcatctcaacgaagcagcgggtttttcgtcatttccccagttacttattcaattaaaatcattattaggtattaattatggcaaatttatt

SEQ ID NO: 24933 - DNA, 213 bp, Legionella pneumophila
atggatatacgacgtatagttttatatatggcgcttgcgcttattggtttatcactttggaacgcttggcaaattgattatccagccaaacaaccagttgaagagaagacagcaagccaattaacatcagatgggcatttgttaccacaaataattccttctaatgcagagcaacccgtaactttgaaagcagaggaaaaagcagggtaccga

SEQ ID NO: 24934 - DNA, 1104 bp, Legionella pneumophila
gtgaaatacatagaagagtttcgtaacggtgcttacgcacaagccattatcaatgaaattatcgcaacagcagagccgcaaagacattatcagtttatggagttttgtggaggccatactcatgctattcatcgttatgggattccaagtttgcttcccaacaatgttgaaatgattcatggccccggttgtcctgtttgcgttttgcctatagcgagaattgataaggctattgcgcttgcctcaatgccgcaagtgattctgtgcagctatgctgacatgctgcgagtcccgggaagtggacaaaaaagtttgttaaccgccaaagcatgcggcgctgatgtcaggatgatctattctgcgaatgatgcattaaaaatcgctcaggaaaaccccgataaagacgttgtgttttttgctataggctttgaaacaacaacacctcccactgcttttgtcattaagcaagctaaaaaattaaacatcactaatttcagtgtattttgtaaccatgtgttaactcccattgctatggatagtttgctgcaggccaatgaagttgccctggacggctttgttggcccagcccatgtcagtatcgtgattgggagttttccttatgagcaagtttgtaaaaaataccaaaaacctatcgtgatatcagggtttgagccgttggatgtgttgcattctattctgatgttaattcaacaattgaatgaggggcgttgtgatgtggaaattcaatacactcgtgcagtgaatcgtaagggtaatcttttgtcacaacgcatcatggccgaagtcctggaaatacgcgatcgttttgaatggcgtggtttgggttttattccatccagcgcattaaagatcaaagagtctttttctgagtttgatgctgaacagcgtttcgaattaccggagagtgcagcgcaggaacataagcaatgtctttgtggtgaggtattaagaggagtaaaaaaaccaactgattgcaaattatttgccaaggcttgcttgccagaaaatcctttaggatcctgtatggtttcatcggagggagcttgtgcagcagtttatgcttatggacgggttaatgcttta

SEQ ID NO: 24935 - DNA, 1008 bp, Legionella pneumophila
atgagttatgaagaattatcaaataccatggagcaaatgctgcatgaaggaaaaggtattttagctgcagatgaaagcaacagtacaattggcaaacgctttgcgtcaatcaatacagaaaataccgaggaaaatcgaagagattatcgcttgttactagcgaccactcctgatttagaacagtatatcaacggcgtcattttatttgaggaaacttttactcaaactgatgagcatggaacaccaattcctgagctttttgctaataaaggcattattcctggaattaaagtagacaaagggcttgttgatttagccaatacagaacatgaaaaagttacccagggattagatggtttaactgagcgtctacttcattttaaaaaattaggtgcaaaattcgcaaaatggagaaacgtttattcaatttccgaatacactcccagcctaactgcaatcaaaacaggagctgaaaatttgggccgttacgctgctgcttgtcaatcagtcggcatcgtcccaattgttgagcctgaagtattaatggatggcaaccatagcatagaacattgtgcagaagtctgtgaaatggttctccatgagctgtttcataccttgtttatccatcaagtggagttggagcatattatacttaaaccgagtatggttacctgtggtaaagaagtggccccgtttagcgatcctgaagaagtggctgactacaccattagtgtatttcgtaataatgttccagcgtcagtacccaccattaatttcctctccggtggccaaacaccccaacaggctaccgctaacttgaatgcaatcaatcaaattggccaccaaccctggttattaagtttttcatttggaagagcattacaagaggattgcttaaaggaatggtgtggaaacaaagcaaatattgccaaagcgcaagaggctttaattaagagagcccgcttaaacagtatggcttgtttgggtgaataccaaaacgacatggag

SEQ ID NO: 24936 - DNA, 1485 bp, Legionella pneumophila
atgcaaaacaaattattacagtttatttgcatcaaaaaattgtacaaacagaaacagtcttataaatcaataataaaatttgccagtttgcctttagcaaagaaacaaattatgtgctccattgcattactcttcgttataaaattgtcttgggcaactcatcattatgacacaataattatcggtgccggggtatccggattaaccgcagcgcatcatttacataaggcacagcaaaaagtactgattattgaggcaaaaaaccgccttggaggcagggtatataccagctatgattggggtttcgccactgatttgggggcatcctggattcatgccattgaaaacaacccattaatgccgctgattggtaaacagtcaattattatcaatacttacagtaactctgatccagtagccatgctgaataattatgctttatatgacagcgaaggaaagccagtatcaaaacaaacgcagactttattttcaagtttaaccaaggaattcttaagatattgccaaactcgcaatcaaatgatctctttcgcgcaaaatctcactacctttgcaaaacaaaaaaaacttacttctgaacaacttgccttactgagttatgccttggaaaatatctatacttacgaatttgctgataatttgactaaattatcacgcaatgtccattccgcatccgaggcatccatagcttctggaaaaaatgcccttgtacctgaaggctatttccaacttttccgcccacttactcagcatgttcctattcatttaaaccaaatagttagccaaattaattacggagctgatggtgtcaacatcataactcaacatgaaaaatatcatgccaaccaagtcattattaccgtcccattaggcgtgctcaaagccaatgcaatcaaatttcatcctgctttacccaaagataagcgcacagcaatctctcagttaggaatgggaagttatgaaaaattgtacttattatttgacaaggttttttgggataaagacaaggaatggattggcatgctcccccaaaatgagcaagaagcattcaatatctttaattattacaagtacacaaaaaagcctgtactcatcgtatttaccagtggcaaacttgcgcacgatatggaaaaagaacatttaaccgaatgggtgatgcaacatttaagacgaatttatggaagcaacatcccgaaaccaattaaaaataaaaaaactcattggggcagtgatccattcacacgtggcagttattcctacttgccggtaaacgttgataagagtgttattggcattctcgcccaacctgtagctaaccgtctctattttgctggagaagctacctcaaccacagatcccagtactgtgcatggcgcttatctatcagggatacgcgcagcagaagaagtactggccagcatcaaacactctggaaaaaatagagaaaaagataaagctgtcaactca

SEQ ID NO: 24937 - DNA, 2379 bp, Legionella pneumophila
atgaaagtaagtaagttatggttacgagaatgggtaaacttctcattaactgaacaagaactggctgagcaattgaccatggctggcttggaagtcgacgcagtgaatcctgtagctggccaattcactcatgtcattgttgctgaagtcctagataccaagcctcatccagatgctgataaattaaccttatgtgaagtgaatatcaataaagacaagccgttgaaaattgtttgtggtgcggctaatgtgaggcctggtttgagagttgccctggccatgattggggcacacttgcctggcggtttgcaaattaaggaatccaaattgcgtggagaattgtctcagggcatgttgtgttctgcgacagaactgggactggcagaacattccgaggggataatggaactgagtgatgaggcaccaattggaatggatttacgcgagtatcttgcccttgatgaccatgtatttgatattgatttgactccgaatcgcgcagattgctttagtattttgggtgtcgcgcgggaagtggctgttctcaataaattacccttaatagagcaacccatagttacagtgccgccagccatcgatgatggtcttcgagtgaatttaattcattccgaggcatgcccccgatattgcggtcgaattatccgtaatttaaatcttgaagcgaaaacaccattatggatggctgagcgcttacgtagaggcggcattagaacgttgcaccctgtagtcgatgtgatgaattatgtcatgctcgagcttggacaacccatgcatgcttttgatttagcaaaaattaatggtgaaattaatgtacgttatggcgtttcgggcgagcaattagaattattggatggtcaagaagttgtattaaacgacaatgtgttggtaatcgccgataaagaaaagcctttggctatggccggaataatgggaggagctaatagcgcagttcaagagcagacacagcatgttttcctggaaagcgcctattttaatccggtgacaattgccggagttgccagaaaatatggcttattcagtgattcgtcacaacgattcgagcggggagtggacccttgtttgcaatcaaaagctcttgaaagagcgacggaattgattttatctatctcaggtggcgaagctgggccagtgatagagtcttttgacaaaaagtttttgccaggtacggtttcctttttatttgatacaacaaaagtgaaaaagttaaccgggctgtctatccctctaaacgaaatgaaaaatttactggaaggtctaggtgttgtcatcatcaaagaaactaatcatttttttgaggtcaccattccctctcatcgagtcgatttgcaacaagatgctgatttggttgaagaaattattcgtttatatggctatgacaagttacaagctcagccaatgcaaacatcagtacaagctggtttaatcagtgccaaggaaaaaattgcgacacacgtttcatcgtggtttagtgccaaaggctaccatgaaaccatcagttatagttttgtcgatcctgagttgcaggaagcgctttacccacaaaaagagtttatggaactgcttaatccaatttcctctgaattatcgcaaatgcgtgcgggaatgtggccaggcttaattgcatctatgatttataatagccacagacaacaaaccgcagtgaaattttttgaaataggcgtggtttttgatctggacggagggcaattaaaggagcgttcatgtattgctggcttgttaatgggggagcaaggcaatttgaattggagtgaatctgcccgtttatttgatttttatgatttaaaaggggatttacaatccttgtttgcttcattgaagctggatgatgttgaatttattcaatcatctcatcatgcgcttcaccccggccagtcagctcagattgtgattaacggcaagcattcaggctggatcggtgtgctgcatcctcgcttgtcggatgcctttgatcttgaccaggatgtggttttgtttgagttgaatcttgaatcattaatcaatccgactattcctctgtataagcctatttccaaatatccacaaataaggcgcgatttgtctttcctggttgataggcagataagtgccatgcagattgagcgagtaatcagaaatacagttaaagaggattggttaaaatcgtttgacgtctttgacgtgtatatgggtaaaggtattccagaagataaaaaaagtattgctgtggctatgacactacaagacgatactcgaactttagttgatgccgagatcaatttaacaattagtgctataatcaagaaactggaaaatgaattttcaatccttttgagggaa

SEQ ID NO: 24938 - DNA, 762 bp, Legionella pneumophila
atgaataatgttagtatgcgtgaattgctcgaagcaggtgctcattttgggcacagaacacgtttctggaatccaaaaatgagtgaatacatttttggctcaagaaataaaatccatatcattaaccttgaaaaaacattacccatgctgagtgacgtaacgaattacgttagtcgattggcagcaaacaaggcaaaaattctttttgtaggcactaaaagagcagctcaagacagcattcgagagcatgcaaaacgatgcgggatgccttatgtagaccatagatggttaggaggtatgctgaccaactataaaacagtccgtcaatcaatattccgtttaaaagaattaaaagaaatgaaggaaaagggattgtttaatgacatgattaagaaagaagcgctaatgctgacaagagagcttgaaaaactggagcgtagccttggtggaatcgagaacatgggcggcctacctgatgcgttatttgtggttgatgttggttttgaacatattgctgttgaagaagcgcgtcgattaagaattccggtaattggtgttgttgataccaataatagccctgacaacattgattatgttataccaggcaatgatgattctatgcgtgctgtggacatttatgttcgctgtgtcgctgatgctattttagatggtaaaaatagcaatactgtaggaagagtatcatctgattcagagtttgttgaggttacttcaaattctaatgaagaagaaaaatccggagaa

SEQ ID NO: 24939 - DNA, 1350 bp, Legionella pneumophila
atgaaagtgaaaacccagtttgtttgtaatcaatgcgcggccatttttaaacaatgggcaggacaatgtactcaatgtggcgcctggaattccattgttgaagaagggattatgcctgaaaacaagactttacgaagtgggcaatgggctaatcagcgctctgtcatcactgctgttgaagacgttgtaatggacaaaatagtacgtatggattgtggtatatccgagctcaaccgggttttgggaggggggctggtttatggctcggttgttttgattggaggggatccggggatcggtaaatccaccttactgttgcaaacgctggctaatttatctatgcaagaaacagtattgtatgtgacgggggaagagtcattacaacaagttgccatgcgtgcccaaagattgggactacctttggccggactgcggctattggcagaaactcaggttgaatccatcattgctcaagcccaaaaggaaaagccgcgaattattgtcgtcgattcagtacaaacgatattcactgaagccataagttctgctccgggaggagttagtcaagtcagggaatcggcagcacaattggtgcgttatgccaagatgaccaatacggccatcttcctggtagggcatgtcaccaaggaaggaacattagccgggcctcgggtgttagaacatatggttgatagtgttctctattttgaggggcaaaatgatagccgcttcagagtcattcgcgccattaaaaatcgttttggcgctgtcaatgaattaggtgtatttgcgatgactgacaaaggcctgaaggaggtagccaacccctcagctatttttttatctcgccagcccgaacctacgcctggcagtgcagtgatggtgacttgggaaggatcaagacccatgttggtagaagtacaagcattggttgatgaggcccacggtcagcaagcgaaacgcgttactgcgggtcttgagcataatcgcctggctatcttgttagctgttttacaccgtcatggaggtatcgctacttacgatcaggatgtttttatcaatgtagtcgggggagtgaaagtgactgaaacagcgagtgatttggctttgttggctgcagtgatttcaagtttacgtaatcgtatatttgatagtgaaaccatcatattcggtgaagtgggattagcgggggaaatcagaccagtgcaaagtggtcaagaacgcattaaggaggctataaaacatggattcaagcgtgctatagtcccttttgccaatgctcccaaacagcaaatcgattccatgacggtagagccagttaaacatttgcgagatgtattggagaaaatg

SEQ ID NO: 24940 - DNA, 429 bp, Legionella pneumophila
atgtataaaagggtattgtttgctactgactttgatgaggttggggtgcgagcagctgagaaagctaaaaaaattgctgacgagaatggtgctgatttaattttagttcatgttgtagagcctattccagcttatgcttacccaggttttgctggatttgcagaagtagaaatgtctattcgtgagcaagctgaaaaagaacttaatgaattggcagaaaaactgggtgtagatgaaaagcatcgttttatagagtatggttcaactaaaaatgaaatcctaagggtagcaaaagaacataaaattgatttaattgtgacaggaagtcatggaaaacatggcctttctttattattaggttcaaccgctaatgcaatcttgcacggtgctgaatgcgacgtcttgattgtaagacccaaaataagccac

SEQ ID NO: 24941 - DNA, 795 bp, Legionella pneumophila
atgtttatgcaacgattgatcacgacattaatattagtgcccctggttttgctagctattttttatgctccttcctggattttatggggtgttgttcttgttatactcctgcttgcaggaatggaatgtttcaaattgattcctgtggacaatttaactgtacaggcttgttttttgatatttttgttgatgtgcttttgggcctgtggctatttctattcctattggttgagcgtgggcttattggtttggttattaaatgggttagcaattcttacttatccgcgctcacaaaattattggggttatccaatcgttgttgccatagcttctttgatattactaccgttatttactcaaagtcttatgcaaatttcttttttacagcaaggaaaggaattacttgtctatttgctttttttaatttgggcttctgatattggtgcttatctcactggaaaacaatggggaaaacataaattaatccctaaagttagtccgggtaaatcttgggaaggtgttacaggcggagttattttagctatgatagtcgcgactttgggctattattattttataccttactcaatttatatatggtttggtttagcattatctactgtagttatttcaatttttggtgatttgttcatcagtatattaaaacggcgttgtcaattaaaagatactggaaatattattccaggtcatggcggtatattagatcgattggatagtctaattgccgcgttaccatggttttactttggattaacctacataccactgggaatt

SEQ ID NO: 24942 - DNA, 1161 bp, Legionella pneumophila
atgaaaatcctgactgtactggacagctatcctcccgacttaaatggtggtgcttattttactcaccgtttggcaaaattcttacaagccaaagggcatgaagttcttgtgatatgcccctctcgaagcctgaagcaaggttatacaagctatgaaggagtcaatctctatggagtacgatcatggccagcccttggttacaaaaactttcgtgtttgctggcctttcttcatcaagaagggtattttaaaagcaataacagactttaatcctgatgtcgttcatttgcagggaaaatttttcttaggtggaatttgctatcgagcctgtcgtaaaaagggtatcccgttaatggctactaatcattttatgccagaaaatttttttcattatactcaccttcccaagtattttgaaaaatggtttcatcgcaccacatggaatattgtgattgacatgctaaatcatgtaaagatagtcactactcctacccacactgcagctaacttacttaaagaagtacacatacaaaaagaaattcatgttgtttcttgtggagtggatctacaaaaatttcaaccaaaacaaaatgccaatctcattagacaacgttataaaatccctgataagccaattctattgtatgctggtcgtttggataaagaaaaaaatttatcaatagccataaaagcattttataaagcaagacaatccattgatgctcattttgttttaaccggtcgtggtgcggaattacaaagattaaaaaaactggttcagacactgaatctcactgagcatgtcacttttacaggatatctatcagacgcggaatatccgctggtatatagtttagcaaattgttttgtaaacccgggaactgctgaattacaaagtattgttgccttggaagcaattgcttctggattgcctcttttggctgcaaaagcgatggctttacctgaacttgttaaagaaggagtaaatggttatctctttgaccctaatgacgttgagacattgtcttgttatatggtcaagattcttagtgataggactttcagtgaacaaatgggaagggagagcagaaaattatctcaagagcatgatatcaaacgaactatcgaacaatatgaaacactctatcaatcgatggtgagt

SEQ ID NO: 24943 - DNA, 772 bp, Legionella pneumophila
  misc_feature (679)..(679): n=g, a, t or c
  misc_feature (722)..(722): n=g, a, t or c
  misc_feature (731)..(731): n=g, a, t or c
  misc_feature (743)..(743): n=g, a, t or c
atgagaattttaagttgtttggttttaatcattagcctggtagcttgcagtagtaagccagctcccaataccttggtcatcggcacaattgctggccctgaaacagaacttattgaaacagcaaaacaagttgctgaaaaagagtatgggctcaacataaaaattgttgaatttaatgattataatttgcccaatgaagcactgcaagatggcagtctagatgctaatgtttaccaacatttaccttatttaaaagctgctatactgtcccatggttatgatttgcaggcaatcggcagaaccttcgtttatccaatgggtatttattcgaagaaatataaaacactcagtgaattacctgagaatggaataattgcagtccctaatgaccctagtaatgagatgcgcgccttcttgttattggagaaagctcatttaattactcttaaaaatacaacgaatagcggtattcaagatatcgaaagtaaccccaaacaattcaaattcaaagagatagacgccgctcaattaccaagagtgctccctgatgttgatgccgcagtaattaacacgacgtttgccttgcctgccggattaagcccatcaaaagatgctttatttactgaaggcaaagattcaccttatgccaatatcattgtgatacgccgtgacactgaanaaaggccacagcttgaatttgtttgtgaaggcgttgaattcanaagaagtanaagagaaagcanaaaaacttgtttggagaagatgcaatacc

SEQ ID NO: 24944 - DNA, 765 bp, Legionella pneumophila
ttggaagttgagtccattgagggttataaaaacagtgaaagtattggtatattgtccatagtctttaacattaataatggccccatactaatgaacgattcaggttggtttttgatttcaactgctctcttgcttgggatgcgtcatggttttgatttggatcatctggcaacgatcgatgcgataactcgcacagttcgttataaaccttctttatcgcgcatggttggctttttgttttcactaggccatggtttggtagttattattgtgagtttgatcattggcgggggtattatttcagcgagtactcctgaatggttaaatgaagtgggaaatattgtatcagttacctgtttattgttatttgggtttttaactttgtggaatacggttcattattcatcttctgccatcataccaaccaacttaaggagttatttattcaggaagcttgctgataacaatgtacatcctcttatgattcttttcattggtgcgttgtttgccttatcttttgatacgatgagtcaaattgtattgttttcacttgcagccagtgctttatcaggttttctattttccgggttattaggttttgtttttatgctgggaatgatgatgtcggatggattaaatggattttttgtagcaagcttgattcggcgtgctgatgggttctcattacttttctcaagattagtaggatttggcattgctttttttagcataggtattgctataatcaattgctgcaaattgctt

SEQ ID NO: 24945 - DNA, 2034 bp, Legionella pneumophila
atgaatttgttagcagattatgtgcaaccactgacttattggctacaagcaaacccacattggtccctgtttattactttcttaatcgctttaagcgaatctttagctgtcattgggagtattatacctggctctgttaccatgactgcaatagggatattagcaggttctggaatcatgcgtatcgatttgacattgcttgctgctactctgggagctatttgtggagatagccttagttattttttgggatatttctatagtgatcgtttaattgagatttggccttttagaaaatacccgggcttattgaagtatggtaaagatttttttgcaagccatggcggtaaaagcgtattaattggtcgctttgttggcccattgcgttctatcattccagtgattgctggaataatgcatatgaaacagtggaggttcctgatcgcaaatatagtttctgctatcggatggtctattttatatgttatgccaggggtgctgattggcgcggcaggacatgaattatcagcagagggagctacaaggttttttatcttgatattggtcattcttgctgttatttggttgagtagcctcgttctcaaatggttatttattaggttaaattcatttttgagaagtaacttgcatcgtttttggttagaaattaagacaagccccagattatctaaagtgtattatgctatcacccctgttcaggaagaaaatcattacaatacggttggtttattacttattgctctcgtgattttttttctctttttaactttagttatttttaccattgaaggtcaactgctagactatattaatgtgcctgtgcatttttttatgcaaagctttcacagttccttactggaagcagttttcattgtatgtgctcaattaacaagcaaatcaaccttaactgggttatttgtcgcttcttgtacatggtttatttatcataaaaattaccgagctacggtttatttaagcagcataaccctattgagcggtgttattgctttatttttaactaaaattattgatagccccagaccgcaagggctattggttactttgcctggttcctcttttccatctgttagtatttccattgcaactgcattgtatggttttgttttattttacataaatagcaagtattccttaataaccagcagttttaaaacaattattctaattgtgctcggattaagtgggtttgctaatatctatttaggtgacttttggttttctgatattttagctgcttatttgttgggagctgaagtatgtttaattcattgtttggtatatagaaggtttagtacttctgttataaagaatgaacatcctttaattatgctcatatcactgcttatggttattgtatttgcgacagctgtttcaacagttgtgaattttaaagagcaggttcatgatcatatgccctatcacaaggagtttactttaacagaaaaacaatggtgggatcagcaaagacctcttttacctttgtataggttaagcagaattggaaaacgaataagtctcttaaacattcaatacgtaggtgatctggatgcactgcaaaataagttagaacaatttggttgggaaccacagagcgataaaactttttttaccagattgctgatgcgaatgaataatgcaccatcaaacgttaaactgcctttactcactcaactatatgaaaataaaaagccaggcttgataatgacgtatcaagataaaaaatcaaagttgatttttgatttaactatttggcaatcgaactattatttatctgagcccaaaagaattgtgtggataggctccattcatcaaaatatttttaatttaaagcaaaaaaaatccaggcataatttaccgccagtattaaatccattgtcttatgtaatccctgctcttgatgactttacccttagaaggattatgctatctgatgatttggtaaaaacatcggttttccctactgccccctatattcttttgataaaaactaaa

SEQ ID NO: 24946 - DNA, 255 bp, Legionella pneumophila
aagaacaccatggaagcgttctatggagaagtaggtagctgctatgttagggagattttagtcatgttgattttgactcggcgtataggtgaaacattaatcataggtgatgatgtcaatattactgttttaggtgtaaaaggcaatcaagttcgcttaggaattaatgctccaaaagatgtttctgttcatcgtgaagaaatttatttacgcatacaacaagaaaaagaatctgatgattcggaacaagcagta

SEQ ID NO: 24947 - DNA, 195 bp, Legionella pneumophila
gtgcaagtttctttaattaccagtcgtattaaatatttaactgatcattttaaagaaaataaaaaagatttccattcgagacgtggcttgcaagagttggttaacaagcgccgcaagttactaaaatatttgaagcgtaacgatcaagatcgctatcaaacattaatccaaaatctgggattgagagattcctat

SEQ ID NO: 24948 - DNA, 588 bp, Legionella pneumophila
atgatagaaagcatgattaacgggactcctgccatatgtgtataacgtgtcgcctggttttggtggtaggttgcatagaattgagcttgctcaataaacgagaattaaccgataaacaagccgcatttgagtggacgccactccgtcgtgatttccccatggtcagcctgttcagtaatctgggaatcgctcagttaattgacactccaatttctgcaatccagcgcttaattgatacattgcaagctgaagcattgattattcattgcaatccattacaagagtgtattcaacctgaagggacaactaattttcaagggtgctggacagcattggaagcgttagtcaaaaagattgcttctccagttataataaaagaaactggttgtggtttttcaaaaaatacgctgctccggttaaataatataggtgttgccgctgttgaaatcagtggtgtggggggtacgcattgtgggcgaattgaaagacatcgggcaaacaaggatccgataagacaaccgacctggtgatacttttcgaaaatggggcattggtactttacaaagcactcgtaacgccattagcctt

SEQ ID NO: 24949 - DNA, 876 bp, Legionella pneumophila
atgtcaacaattagtgctgcattagtaatgcaattgcgtgagcgcacaggcgcaggtatgatggaatgtaaaaaatttctaatagctactaacggtgatatcgagcaagcaatcattgaaatgcgtaaagctggccaggcaaaagcagacaaaaaggcagatagagttgcagcagaaggtataattgttattgcacgttcttctgatgaacgtacagcggtaatgcttgagattaatagtgaaacagactttgttgcacgagatgagaatttcactaattttgcaaatgctgttgccgatgttgcattaaccagccttccaaaaaacatagaagacttgtccaatcaggcattatcttctggtgctactgttgagcaagcaagacaggagctggttgctaaaattggtgaaaatattaaattacgccgattggaaaaaatgcattgcgacggtgtaatcgggtattatttgcatggttcgcgtataggagttatggtcgcattaaagaatggaagtgaagcattggctaaagatattgccatgcatgttgctgccagcaaaccgatggtggttagtcgtgatcaggtaccagccgaagcgattgaaaacgaaagagaaatattcactgctcaagcaaaagagagtggtaagccgcaagagatcattgacaagatgattgatgggcgaatcaataaatttattgatgaggtaagcttgttaggacaaccttatgtaaaagatcctaacattaaagtgggtcaacttctaaaagagaaaaatgctgaagtaatatcctttgttcgttatgaagtaggggaaggaatagagaaaaaagaggacaattttgttgaagaagtgatggctcaggttcgtaca

SEQ ID NO: 24950 - DNA, 1290 bp, Legionella pneumophila
atgaattttcttaaaaaattatatgtacaagttcttctgggtgttttcattggtattttgcttggatattttttgcctgatgtaggggttcaattaaaagctatagccgatgtttttatcaaaatcattaagatgctaatttctcctattatatttctcaccctggtctccggaatcgcagcaatgaatgatatgaggcaagttgggcgcttggcaggtggggcattgcttttttttacgttcatcacaactctggcattgctaataggtcttctggcgacagattattttaagcctggtgttggtttaaatgtgaatcccaattctctggatgccaaggaagcgagttcataccttgagggggcacataaggtaaccaatgtgactgatctgctaattaatattatcccgagaacttttattagcgcttttgtcgatggtgagctgctgcaagttatttttatttcgatattgtttgctataggtctgattcttacaggcaatatgggcaaatctttggttaatgggatgcaaatcctgtctaatgtcttttttaaaatcattcatcttgtaatgtatatggcgcctatagctgcctttgctgctatggcgttcagcgttgggaaatttggagttggccctttgtttaatttaattggattattggcttgttattatctgacctccattttctttatcttgattatcttgggaagtcttttgcaatggtactgcaaaattaatatctggcatctgttacgatatttaaaggatgagcttttaatcgtatggagtactgcttcctccgaaaccgtactgccaagtttgatgcagaaactggagcgattggggtgtgagcaatctgtagtcggtttgatcttgccattaggatattcttttaatttggcaggaactgcaatctatttaacaatggcagctatgtttattgcacaggctaccaatactgatttaactgtttggcaggaactgtcgcttctgggagttatgatcattagttccaagggtgccgctggggtgtccggaagcggatttattgtgttggcaagctcattagctacgataggacatattcctgctgcaggtgtcgttcttgttttgggtatcgataaattcatgaatgaagccaggtcaattattaatatgatggctaatgcaatcgccacgattattatttccaggtggcaacaatctttggattaccagaaaactcaatttgaattgcaagaaaaaggacaagcagaaaccaaaagtgtttatgctagtgagatg

SEQ ID NO: 24951 - DNA, 495 bp, Legionella pneumophila
atggagttgtttttggaggctttgcgaaaagagatagacgatttaaaccagcatggaatacggttaaagtttactggcgatagagaacctttgtctcaaatattacaaaagcaaatgtgtgatgcggaagctcttaccaagaataatcaacaattaattctcaatgttgttgtgaattatggtggtaaatgggatatagtgacggcggctagaaaattaatacgcacggttttggatgggaagttggcatatgatgaaatcaatgaagcagtattcgctcaatttcttgatacgaatggcatgccggaacctgatctgtttattcgaactagtggtgaattaaggataagtaatttttttctttggcagttagcttatactgagctgtattttactgatgttcattggcctgattttaatgagcatgagtttgaattggcattgatttcttttgccaagcgggcaagaaggtttggacaaatttcacaatctgaa

SEQ ID NO: 24952 - DNA, 225 bp, Legionella pneumophila
atgcagattagtgaattaaaacaaggggataaagtacgattggtcagttttggtgcgactgatatgcagtatcgacgcaggcttttatccctgggtattacttgtggagttgagttttctgtagtgaggatggctccattagggtgtccggtacaaattgaagtaaggggaacatttttaactttgcgtaaagatgaagcgagtcaattagtgttggagcatcta

SEQ ID NO: 24953 - DNA, 567 bp, Legionella pneumophila
atgaatacaatagcagcaatggatgagacaagaaataatgaatttaccaatcccggctacgagctggcggctcttcgccagcaaaaagggtattcaatcgagtatgttgcgagcaaacttcatctacgagctcgtattatagagctcattgaagcaggagattttgatttattgcctcagccagtttttgtaaaagggtacttgcgcgcctattcaaaattattaggagtttcacctgaaccttttttaaccctttttaatgcacaatattgttttgaaaaaaaaccggaaagagcagccctatggcaaagtaaaaaggagtctcataaagcagaacattttataaaatggttcaccattttatttgcgattggagttttagtcgcagttgggatatggtggcaaaaaaacaaggatagccagtctatagataccccaaaagagaattcatctggattatcaatcagtgaaaccagttcggaaattaaattgactgatttatcaaaaatggaatcgttattaacgcccaacaatacacaaatgacacctttggagaaaaatggtggt

SEQ ID NO: 24954 - DNA, 759 bp, Legionella pneumophila
atgaaacggatagtatttatactgttgtttataagcaacgttctagttcacagtgaatcactcaaggtgggtgtcttacaatttgctcctcctttctcatctatatcagacaaagcaaatcactattatggtttcgttgttgccctcatgaatataatatgcaaccgtttgcaagaaaaatgcgaatacatccctattcctaaagaaggcgagttaaaaggtctggataaaggtgtttatcatattgtttttagctcaacccctatcacgacatcattacctgctaactatcggtacagcttgccctacttacccagtgacggtcaatttctgacattaaaaaacaactcgattgataccttgaacgatatcaattttaaaaaagttggtttctttaagattaattttcagcaatctcctcttttaaaaaaatacgaaaccaccaatacgcttatagagtacacagatccggcagaattagttaatgcactaacaaccaaaaaaattgatgcgattttaatcaattatcaagcgtcacgattcatcgtgaataatctcaaccccactgaagacgatcaattaaaattgattggcgataaaataccgataggaagcggatatgggatcatagcccttaaaaaccaatcggcattgattgataaaattaatcacattttgctggaaatggaaaaagatggttcctacctccgtatctacaacgaatattttggtgcaaatccagcatataatcttcatcat

SEQ ID NO: 24955 - DNA, 546 bp, Legionella pneumophila
ttggaacaatttcatgggacaacaatactttcagtacgacgcggtaatcaggttgtcattggcggtgatgggcaagttaccctaggcaataccgtgatgaaaggcaatgcacgtaaagttcggaggttgtataaagataaagtgattgctggttttgcaggtggaacagcagatgcttttactcttttcgaacggtttgaagcaaaactggaaatgcatcaggggcatttgattagagcagctgttgaattggctaaagattggcgaaccgatagaattcttcgtcgattagaggcggtgcttgcagtagcggatagcaaggcttctttaattattaccggtaatggcgatgtcattgagcccgaagaaagtttaattgcaatcggttctggcggcccctttgctcaagctgcagccagagctcttatggaaaacacacagttatctgccaaagagattgtccagaaagctttaacaatcgctggcgacatttgtatttatactaacaataatttaaccatagaagaattaaatgatgaaggcaaa

SEQ ID NO: 24956 - DNA, 2880 bp, Legionella pneumophila
atgaaattcacagatctattcatcaagcgcccggtactctccatagtggtcagtatgttgatttttctattcgggataaactccatctataaaatgcaaattcgccaataccctaaaatggagaatacagtcataaccataatgaccggttatcctggcgctgatgctgaactcatagcaggatttatcactactcctcttgaaagtgctgttgccagtgctgaaggaatagattatatgacttcatccagtcagcaaggccttagcacaattaccttaaacatcaagttgaatttcgaccctcaaattgcttttactgatgtcatgagtaaagtgcagcaaacactcaatcagttacctaaagagtcacaacaaccggttatcttgaaaaaatcagactcatcaaccgcattgatgtacattagtctcgacagtaaggatatgacccctcagcaaatcactgactatgctacccgagtcgttcaaccccagttgcaaacagtggatggagtagccaaggctgatattttaggtggtcaaacttattccatgcgaatattcatgaatccaattaaaatggctgcgcttaacgtcactccggctgatgtgtcagctgttttggccagtaacaacttccttactgcagccggaagcactaaaagtgaatacgttgccatcaatgtcacggctaaaaccgatttgaataatgttgaggaattcgaaagactgatcgtaaaaagcgataaggggtcaataatcagactcagggatatcgctaaagtggaactgggttcacaaaattatgatagctcagtgactttcaacagtaaaaaagccgtctttatatcgatcactccaacaccaactgctaaccccctcacagtaattaatgatgctagaaaactgtttccttcaatagtaagggaattcccgccatcattaactggcacaatagtatacgatgccacagcattcattcgggcatctatccatgaggtaatggaaactatcattgaagccgcagtcatcgtgattatcgttatctttttatttttaggctctgttcgttcagttcttattcccgttgtcactattccgctgtcattggttggtgtctgtactttgatgctcatactgggttacagcatcaacttgcttacccttcttgcctttgtgttagcaataggattggtagtggatgatgccattgtagtggtagaaaatgtacatcgccatttggaagaaggaaaaaccccctttgaatccgcaattataggcgccagagaaattgctaccccggttattgcgatgacaatcaccctggcagctgtttatgcaccaatagggtttatgagtggactgactggcgctttgttcaaggaatttgcttttacactggcaagtgcggttattatttcaggggttattgccttaacgctgtcccccatgatgtgttcaaaaattctatccgaagaagccactagtggaaaatttgctatttttctggatgagttttttaacaaactgaaacgcgtttaccagaatgcacttcatagcttattggatacccgagaaatgatgttgctgttagcaggggtagtgattttaatgttgccctatttgtattctaacacggctgctgaaactgcgcctgatgaagatcaaggcttcttttttgtaatggctactgctccacaatatgcaaccttagactacatagaagcctatacaaagccctttgatgccatttataaaagttttcctgaaacagaaaactattttacggttaacatgagccaacctatttcaggaatggtattgaaaccatgggatcaaaggaaaaaaagtcagtttgctctaaaacaacctttacaaaacaagttatccaaaattgctggacttaatgctttcgctattgtcccccctcccctgccaggcggcggtggcggtcctgccgtacaatttgtggttaagacaacgaatgatttccagagcttaatggatgtgtcgaataagttaactgaaaaagccaggaatagcgggttattcatttacatagacaattcccttaaatttaaccaaccacaagtggagtttagcatcaatcgagcaaaagcttccgaaatgggcttggatatgagagcgcttggaagcagcctgacaagtgctctatccggcaactacatcaattacttcaatctggaaggtcgaagctaccaggtaatcccacaactggcgcgcaaattccgtcttactatagaacaattaggccaaatttatgttaaaacgctaaacgggactatggttccattatccactgtgataaccccaaccgaaaaaactcaacctaatgcagctacccattttcaacaactcaattctgcaacgattcaggctgtgatgatgccaggtaaaacattaggccaaggtttggagtttttacaaaaagcagcccaggaagtcttgcccaagggatttacttatgattatggaggagaatccaggcaatttatgcaagaaggaagtgctctcatctttgcattcctttttgctattgttgttatctttttagtgctggcagcgcagtatgagagttttcgggatccattaatcgttctcatcagcgtacccatgtccatctgtggcgcgcttatcccgcttaaccttggagtagcgactattaatatctacactcaagtgggtttgattactttaattgggctcatcagtaaacatggaatattgatagtggatttcgctaatcatttgcaacgtgaaaaaaatcttgataaacgtgctgctgttgaggaatctgctggaattagattacgacccatattaatgactacagctgccatggtgtttggagtaaggggatcc

SEQ ID NO: 24957 - DNA, 624 bp, Legionella pneumophila
atgatagataatacgaaaataagatcattgcttgaaaagggtttagccgagtttaaactcgattccatcggcgacctcttgcttgattttttgctcctgctcaataaatggaataaaacatataacctcactgcaatacgtgatattgaaaccatggtcagcaagcacctgttcgacagtctggctattttaccctggataaagggaaaccatattatcgatgtgggtactggcccgggtttacctggcatccctttggctattgccaaacctgacttacaatttgtattattggacagtaatgggaaaaaaattcgctttctcaatgaagtaaaacgtcaactcaatataaaaaacattgaaccaatacaaattcgagtagagaactaccacccaaaccaaggttttgatacagtaataagcagagcatttagcagtctcgaacaaatgataaaatggactcaacatcttgtcgctcaggatggtttgtggttagccatgaaagggcggtttccggatactgaattggttccgattcatcaaacataccgagttgagaggtatgctgtcccgggtatcgagggagagcgttgctgtgtgcttattaacaacacgaacaaggaa

SEQ ID NO: 24958 - DNA, 321 bp, Legionella pneumophila
ttgatccctttggacattgaattcaccgaaagtactatgatacaaaaatcaacgcccattgattcaacgttaataaaaatttcccagttgggcattaaaatggcaattgatgactttggtaccggttactcaaatttaagttatttaaagactttccccttcgataaacttaaaattgatcgttcatttattcaaaactgcaccactaacccaaatgatgcctccatagttgaagcaattattgccatggcccatagcctggaactcaaagtattggcagaaggagtattatttggagttggctcttacttgtgggcgcct

SEQ ID NO: 24959 - DNA, 1425 bp, Legionella pneumophila
atgatgagagcgtgggtcttaagtctgttattatatctaccaagttcttttgctgtattttctgcacaattaaagaatattacagtttctcagcaaccaaccatgacgtctctttatctttctatacaaggttcatttacccataagctatttaccttaagtcagcccaatcgtgtggttttagacttaagtgatacacaattagccgtcaatatcagtcaattgggtttaatcaattcgcttattcagcaggtaagaagcggtagtccctccaaaaacacgctcaggcttgtcatggatgtaaaacaaccagtcaaggtgcgctcatcttcatggaaaccgaaaggagaattgaatgggatcagaattgatcttgttaatgatactcctttagtcataaataatcgcaggcagttgagttcgcctgttaaaacgattaaagctccagtccagcaaacccaatcaaaaatatccagccagccatcagaacaacgaataactgtgcataaaacacctgttcaggttcctcataacccatcaaaaaaacctttgcgtgatgttgttgtagtgttggatgcagggcatgggggcaaagatcctggtgcaagaggtccgcgtcgtagtaacgagaaggatgttgtgctggccattactttaaaacttaaacgattgatagacagacaaccaggtatgcgcgcagtcctgacacgctcgggagattattacgttggacttagacaacgcctggatattgccagaaaatataatggtgatgtattcatttctatccatgccgatgcattcaataatcctcactctaatggagcctcggtatttgccttgtcacaaaggggggccaccagtgaagcagcacgctggttagcagaaaaggagaattactctgaactaggtggagtgaatttaggtgaattggatgatagtaatggggtagtacgttctgttttgatcgatttatcacaaactgcaacaataaatgctggtttggaaatggggggaaaagtattaggtcaattggataattttaccaatttgcataataacaaagtggagcaagcccgttttgttgttctgaaatctccagatattccttctattttggttgaaaccggttttatctcaaatccccgtgaggaaagaaatttaaccaaccctgcctatcaggagcgattgagtcaggcaatatttcaaggactaaaaaattatttttgggatcatcctcctcatgggactcgaattgaggctatgatttctccaaattttcatatcgttaaaaagggtgaaactcttcctgctatcgctgctcgatatagggtatctgtgaacgcattacaatcaattaaccgccttcaggcaagggcaagacttatgcccgggcaaaaattagtgatacctggcacatggtct

SEQ ID NO: 24960 - DNA, 1632 bp, Legionella pneumophila
atgacaaaagaaagtgaaattaaaattcctgatatcggtggcgctaatcaagttgatgtcattgagattttagtgaaagagggtgatcagatcgaagtagatacaccattgattacgcttgagtctgagaaggcaagcatggacatcccttctccaatatctggaacggtaacgcaaattctcgttaaagtcggtgacaaagtatccgaaggtgatctcattgtcaaagccaagtcagatacaacgacaaatatttccagttctcaagaacaaaagactgaaccagaaaaacagaatttgcaaaccagagcagaagagcaatctgttgatacaaaggcaactgcatctacacctagttccaaagatattgaaatatctatcccggatattggtggtgcaaatgacgttgatgtaattgatattttagtcaaaccagggatggaagtagaaaaggatcaggcattaattacattagagggtgataaagcaacgatggatattccttcgccctatgcaggtaaagtcatcgaaatgaaaattaaattaggggataaagtatctcaaggtactcctattctaactctaaaaaccctaggaaaatctgagacacctgaaatcgaaaaaagccagattaaaaatatctcagaacaatctataaaggaaatagagaagccatatgaagaactaaaatccgaagcaatatcaattaataaccttgagatagctgaatcaaaaagtatcttaatatctgcaggtccagccgtaagaaggttggcaagagagtttggagtcgatttatctttggttcagggaagtgggagaaaatctcgtattacaaaagaagatctgcaaaattatatcaaagtacgtttaagtgaaaaaactacgtctggtggcttcagcttaccgtcaaatccagccatcgatttcagtaaatttggttcaattgaaacaaagcctttaaataaaattaaaaaacttactggaacaaacgtacatcgctcctggataaccattccacatgtcactcaatttgacgaagcagatattacagacttggaagcgtttagaaaatcagaatcagagagcgctaaaaatcaagattacaaattaaccctgttagcatttgtttgcagcgtagtttgtaaggctctccatgcttacccgcaatttaatgcgtcactagataccagtggtgaaaatttaatttataaaaaatattataatataggtatagcagtagatacacctaacggtctggtggttcctgtaataaagaatgttgataaattgagtgtgattgatattgcaaaggaaatgtccagactcagtacgaaagctagagaaaagggattaacacctattgatatgtcaggcggttgttttacaatttccagccttggtggtataggcggaacggcatttactcctattgtaaatagcccggaagttgcaattttgggcttatcaagatcaataataaaacccatatacgataataaagagtttaaacccagattgatgttgcctatttcactttcttacgatcatagagtaatcgacggcgctgaggcagcccggtttactcgctttctttgtgattgtttaggtgatattagaagagttttactc

SEQ ID NO: 24961 - DNA, 1071 bp, Legionella pneumophila
atgatgtctgttgacaatattaaaaatgataaccaggttttggctgaagaagatttcctcgaatacgcattgtctcatggatttggtgatttacattttaaggtggatccgcaaacggggatgaaggctatgattgcaattcatagcaccaagttgggacctgctttgggtggttgtcgatttattgaatatcctaatactgctgctgctttgaaggatgctatgcgccttgccagaggcatgagctttaaggctgcttcagtcaatttacctttgggcggtggaaaatcagttattattaagcctaaggggttttttaatcgagcagaatacatgcatcggtttggtgaattcgttaatgaattgaatggcaggtacatcactgctttggatagcggtactgaattaagtgacatggatattattgctgagcatactgactatgttgccagtttatccagatacaatggagatccttcaccttctacttccaagggtgtgttaagagggattcaggctgctgttgcctttaaattaggtaaagactctctcaaaggtttgcatattgctattcagggtcttggccacgtcggttatgctctggcaaaacaattacacgaattgggcgcgacattaactgttgctgatatttcacctgctgctgtgaacatggcggttcaagagttgggagctaaagcggtcggcactgacattatccataaagtaccgtgtgatgtatttgctccttgtgctttaggtgcgattatcaatgatcttactattccccagttacaaaccagtattattgctggcgctgccaataatcagctcgcacacacataccatggcaagattttacacgaaaaaggcattctgtttgctgtggattatgtgattaatgcaggtggtttgatatttgctgcctctaaatacttacaaacgcctgaagacaaggtaagtgagcaaattgatagtatctatacctctctgactgaaatttttactcgctctgctaaagataatttacctactagcgagattgctgatactttggctaaggaaaaattggct

SEQ ID NO: 24962 - DNA, 990 bp, Legionella pneumophila
gtggttaatagtattttttctaaattatctatagcgccgatgattgattggactaacagtccatttcgtactctgatgaggttattggctcctaacgcccttttgtatactgaaatgcaaacaacaggggctgtgcaaaataatcctgacagagctttgtattttaattctgttgaacatcctctcgctattcaattgggtggggcagataaatccgcattagttaagtgcgccattattgctgaacaaaaagggtttaatgaaattaatttgaatttgggatgtcctagtgacaaagtacaggcgggacgatttggggcctgcttgatgaaggagccagaacacgttgctgattgtattcgtgcaataaaacaggtagtaggaataccagtcacagcgaaaacgaggatcggtattgataaccaggacagttatgagtttttcagatctttttctcttcacttggttgaagcaggttgtgataagcttattattcatgctcgtaaggcttggttaaatgggttaaatccaaagcaaaatagaacgattcctcccgtaaattatgattatgtatatgaactaaaaaaagaaattccccatatctttattacaatcaatgggaatatattaactgttgaagaaataaacaaccatttaaagcatgtcgatggagtaatgctaggacggcttgcttgcgataacccctatcaaattgctgaaattcatcaagccttatacccagaattcatcaaaattaaacgtagccagttgttaatgaattatctagattattggtttgatcaatctcgagccaatctctcgttaagcattttggttaagccactttttaatttagcttttggattaccgggagccaaacattggaaaaagaaattgatgaatattattcaggagaaaaatacttccggttttagtgagttaatccagtatttattaaatttggaagcaataaatcaagtcgagtttgta

SEQ ID NO: 24963 - DNA, 2010 bp, Legionella pneumophila
atgactagtgaacgaaaaatgttagtgaccagtgcactgccttatgctaatgggcatttgcatctgggacatttggttgagcatattcaaacagatatttgggtccgtactcacaaaatgttgggtattcaatgtattagcgtttgtggggatgacgctcatggaacacccattatgctgaaagcagagcaactgggaattactccggaagctttaaccgccgaaattaagttaagtcatgaaaaggattttaaagccttcgccattgattatgattattaccataccacccattcacctgaaaatcaggcattggcgactaccatatttgaacgtttgcaggcaggcggtgatatagtcaagaaaacaattcgccagttttatgatcccgtaaagcaaatgtttttgccggacaggtatgtgaagggaacttgccccaaatgtgctgctgtcgatcagtatggcgataattgcgaggtttgtggcgccacttattcgccgacggatttgattaaccctgtttctgttatatcgggagtcagcccagtagaaaaagaatcagagcattatttttttgatttgccgcgttacgaagagttacttaaggattggacaagaaaggggcatttacaaaccgaagtaacgaataaactcagcgaatggtttgaggcgggtttaaagcaatgggatatttctcgcgatgctccctattttggcttccctatccccggtgttccggataaatacttttacgtttggttagatgctcccataggctatatggcaagctttaaaaagtattgcgatgagcgtggcgtttcttttgatgagttttgggataaggcttcaaaaacagaattatatcattttgtaggcaaggatattgtgtattttcatgctttgttctggccagctatgttagctgccagcggtttcagaacacctacggccgtgtatacccatgggtttttaacggttgaggggcagaaaatgtccaaatcgcgcggtacttttatagaagcacgcgcttatctggctcacttgcatcctgaatatctgcgttactatttcgctgccaaattgaatggtcgagtagacgatttggatttgaattttgacgattttgtcaatagggtgaatgcggatctggtcgggaaggtagtgaatattgcaagccgatgtgcgggatttattaataagcgttttgataatcggttgagctcagagttgaatgatcaaaaattatacaacgacttgctgagcgcaagagagtccgtgattgacgcatttgtttcaagagactatgcgcgggcaataagacaaatcatggattgtgctgacaaagtcaatcaatacatcgatgccaataaaccttgggtattggctaaagatgaaagcaaattaaatgaagttcatgccatatgcacaatgggaatcaatttattccgcattttaataacctatttaaaaccagtcttgccaatgatggccaaagcttcagaagaatttttaaattctgagcctttacactgggattctatcgataaacctttgctaaaccatcgtatcaatacttttaagcctttgatggttagagtagaaaaagaaaaaattgaagcgatgttggttcaaagcaaggaatctctgatgactaccccagtaaaagaaaacacgccagttgaggacgctaacttaatcagtattgaggactttgccaaagtcgatttacggattgcaaaaattgtcaatgcagagcctgtggaaggcgcagataaactaatgcgcttgattttagacttgggtgatgctcaaaagcaggtttttgccggcataaaaaaggcttatgatgctgaagaattgattgggcgtttgacagtaatggttgctaatttggagccccgcactatgcgtttcggtgtttctgaaggcatggtattggcggcaggggatgggcagggaatttatttattacagcctgatgcaggagcacttcctggcatgaaggtgaag

SEQ ID NO: 24964 - DNA, 2688 bp, Legionella pneumophila
atgaaaccgcctctgattctaatagacggatcttcctatttctttagagcgtttcatgcccttccaccattgacaaactccaaaggccagcctacaggcgccatttatggagttgccaatatgattaaaaaaataatcaaagattatcaaccagaagaaatagccgttgtctttgatgccaaagggaaaacattccgagatgaatggtatccagaatacaaggcacacagaccaccaatgcctcaagaattaagctctcagtttcaaccgctaatccagttactgcaagcaatgggattgcccttgcttatcatcgatggagtcgaagcagatgatgtgattggcactttggcaaaacaagccacagagcaaggcataccagttgttatatcaaccggtgataaagacatggcacaattggtcaatgaacatgtctccctcattaatacaatgagtaattacagtatggatattgatggtgtcaaagcaaaatttggtgtaacacctgagcaaatcattgattacctcactctcattggagatagtgtagataatattccgggagtagagaaatgcggtcccaaaacagctgtaaaatggctgacagagtatcaaacgcttgataatttgcttgcacacgccaacgaaattggcggcaaaattggtgaatatttgcgtgccagcatccctcatttgccactctcaaaaaaattggtcactatcaaaactgatttggatttgcccttaaatttaaaccaattgatgcccaaaccggctgatagcgagcaattaattaaattaactcgtgaattagaatttaagtcatggcttaaagagttactacaggaagaagagaatcaaaaatcacccaaagaaatggatgccagcaataataaatcctatgaaataataacgactcataaacagttaaatcattggcttaataagctagagcaaagtcaacaattttgcatcgacacggaaacaaccaaccttgatgtcatgcaagctgaattggtaggcatctctttagcagttgaggaagaaaatgcatcttatattccccttgctcatactgatggcagtacacagttagtaaaagaagaagttttaactgctttaaagcctattttggaaaatccagctataggaaaaatagggcaaaacattaaatatgattacagtgtccttaaaaattatggcattaccttaaaaggcattgggtacgacaccatgctggaatcctatgtgctcaatagtggtgcaggcagacatgatatggattctctagctttaaaatatctgggttataaaacaataagttatgaggatgttgcgggaaagggagccaaacagctccgttttgaccaaattccagtagtgaaggccgggatctatgcagccgaagacgctgacattactttgcgattacaccataagctgtaccccatgctggatgagtcattgcgtaacgtgttgcatgatatcgagatacctttactcactgttctcgcagacatggaaatgcacggcgttctcatcgacccagtcattctggaaaagcacggaagtcgtttgaaagaacaaatgaaatctctggaacaggaagcagttcaactcgctggaaaagcattcaatctcaattccccaaaacaattacaagaaatactatttgatgaacaaaaactgcctgttgtagcgaaaacccccacgggacagccttcgaccgcagaatctgttttacaggaattggcttttgattatcgccttcctgctgtaattctggaataccgaagcttatcaaaattggtcagtacctatattgatgccttacccaaaagaatcaaccccaaaacacatagagtgcacacatcctataatcaagcggtagcagcaacaggccgattatcttccagtgatcctaacttacaaaatatccctatacggagtgaagaaggaaggttgattcgaactgccttcatagcaccagaaggaagtcttatcatggcggctgattactcgcaaatcgagttaaggataatggcgcatttatctcaagatgataaccttttacgagcttttgctaatggctgggacatccatgccgcaacggcgagtgaaatctttcaaacgaatttggatgctgtgtccaaagaacaacgaaggcgtgccaaggcagtgaactttggtttgatatatggtatgtctgcctttggactggcaaaacaaattggtgtggagcgtcaggatgctcaacattatattgatacttacttccgccgttatcctaaggtacttgaatacatggagcgtactcgcaaacaagcgcatcaacttggttatgttgaaaccttgtttggccgtcgtctctacttgcctgaaattaattcacgcaacctaatgagacaaaaagcagctgagcgcactgccatcaacgggccaatgcaaggaaccgcagctgacattataaaaaaaaccatgctggctatttccagttgggagcattcgcaaaagaacccctctgcaaagatgatcatgcaggtacatgatgaattggtttttgaagtccgaaaggaagcggttgaagaatgtcgcgccattatccacaagctcatggaacaaactgtaaaattatctgtacctcttgttgtgtctattggcacaggttctaactgggatgatgcgcat

SEQ ID NO: 24965 - DNA, 2373 bp, Legionella pneumophila
atgcgctcgatagtaattatacttttagccttcgtttgttgttcattagtacgtgctaatgatgtcaatatttcaaccgtaaccaaagatggcaatacatttttttatcttcaagctggtgcctataatctcgaaaaagacgctaaaatacgccaaaatgaacttgccaaattagtcgatcaaaaagttgaaattaaaaacctggctgacaaacatctttaccttgtgcagattggtccaattgatgattaccaaactgcaagagcactcaaagaaaagttatctcaaaaaacagaaaaacagtttaataaaattagcaaaaatcaaacctcttcacttgaggtaagccaactgcctaaaaatatggaacaagcgcaaacggctcctccaggcagtaaattatggaatttacgtaacgctgatattagagccgtaatcgcagaagtctctcgaattacaggtaaaaattttgttattgatcccagagtacaaggaaaagtatcgattgtttcatcaacgccgttatccagccgcgagctatatcaagtctttctctcagtactgcaggtatcaggttatgccgcaatacctaatggagaaattatcaaaattattcccaatattgatgcaaaaacacagtcacctgatttactcagtggaatgaagagtcctccacgaggtgacgatatgatggtcgccgtaataccggttcattatgttccttctgaacaactggtacctgttctaaggccactaatgccccaatggagcagcgtatctgcctatgctccttctaatatgttgattctgtctggtcgagcaaacaatattaaaagccttgcggaaattatcaaacaagtagatagctcaagtgcaaacggcatagacatggttcgtttacatcatgctttggctatggatgttgcaaacactttaaaagacctggttaaaactcaacctggtatcggcagcagaacacaaattaccattgctgcagatgaccgttccaactcaattttagtcagtgggagcaaaacggatagaattcgtttgcgaatgctcatattgaaactggataaagacagctcaacaggagtcaattcaaatacacaagttgtttacctgaattatttaagagctgaagatttagtccctatactggcaggtatagcccaagccaattttagtggaaatgtaggaacaaccattggaaccattacaagacccgcattagacagcaccaaccctgcctccagtcttgccaatacctctgccgatgggcaaagctcttcattaagctccacttcgaccagttctgcccctatgaatgcctcaggagcgacagcaaacacgacatcagcaagtactcaaaatgaaggctctaccaagcctactgtacagataataggagaaccgaacactaactctattattcttaatgcacctgcttcaattattcgtattctaaaaacagtcatttctcagctagatataaaacctgctcaactattaatcgaggccctcgttgctgaagtggatgaaaaggacgttaacaatctgggaatagagtggggatcaaatcaacaaacaggcaatcccaaggacttcagaccaggctttgccattataaacagtaaaaccaggattgacgatttccaggctcaaatttatgccttggcaagagagcaaagagcaaatattttatcaactccctccgtagtagtccttgataatcgtcaagcaaaaatactcataggtaaacaggtctcaatagcaacaaccagctaccccaataatgcaggaggcactaccacagcaagtcctttcacaacatttgacagggttaacgttgcgttgcacctttatgtaaggccgcaaattactcgcggacaaggaattcaactacagattgatcaagggaatgatactttggatcctgcaactgctacaacagacaacacaacaacccccacttttaatataagcagtattgtaacttcagttcatgtagaaagtggtgatattgtagtacttggggggttgattcaggacagtattggaaatgacaataataaattacccattttaggagatatccctggaataggcagattgtttcaacgtaatattcgtaacagagacaagcgagtactcatggtatttattaaacctatcatattacgcaacgaaagagataacttgcatgtcacaggcgaaaaatacaattatgtccgtcaatatcagctggattggattcgctcccaagaggcttttgaacaaacagatgatgaaacagtgttgcccccattaactcaaggcaatctaccagtaccttttagtactcctccccaatactcatcaaaaatgaccaaa

SEQ ID NO: 24966 - DNA, 555 bp, Legionella pneumophila
atgatcaatgagattaagcaagattcagaaaaacgcatgaaaaagactattgaggctttgcatacggatatgtcaaaaatccgtaccggcagggcgaatgccagtcttttagatcatgtcatggttgattattatggaagtcctacacctttaagccaggttgccaacatcactaccagtgactcccgaactattttagttacaccctgggaaaaatctatggtcgcagctattgaaaaggctatactaaactctgatttgggtttgaatcctgcaactgctggaacagccattcgagttccgatgccacctttaacagaggaacgcagaaaggaattgattaaagttgttcgccatgaaggggaacaaggaagagtttcaattcgaaatatcagaagggatgccaataatcagctaaaggaacttgttaaagaaaaagcaatttctgaagacgatgaacgacgtgcagcagaagcgatccaaaagctgactgatagatatatttctgaagttgatgcagtattagccgagaaagaaaaagatttaatggaaatt

SEQ ID NO: 24967 - DNA, 555 bp, Legionella pneumophila
ttgccttacctggatataccattgcaacatgccaattcacgcatattaaaagctatgaaaagacctgccagtagtgaaaataccttattgcggattgcttcatggagagaaatttgccctgatattacattacgctccacattcattgtaggttttcctggtgaaaccgaagaggagttttcagaattactagccttccttaaagaggcacaattagacagagtcggttgtttcaaatactcccctgttgagggagccaaagcaaatgatttggataatcctgtttcggaagatattaaagaagagcgttatcatcgttttatgcaagtacaagcagaaatcagccgtaataaattaaaaaataaaattggcagtactcaaaccgttttaattgatgagataaacgacgatcaaatcatagcccgcagtaaaagcgatgctcctgaaatcgatggtctggtttatttgcctaaaacatccgggattactgtaggatccttcgctgaggttgttatcactgacagcgacgattatgatttatatgcttctttagtc

SEQ ID NO: 24968 - DNA, 2249 bp, Legionella pneumophila
  misc_feature (2213)..(2245): n=g, a, t or c
ttggtcaatacacgcggcgagcgatctctctcaggcctggtctttttgaacgccaccgcagtgacgacggatggggatggggacacagcgaccgccagtgcgtctttggatttgggcggcaatgtgaagtttgatgacgacggtccgagtgtgacgatggcggtgagcgataataatgcgatcaccttgaacacccaggatgccgatacgattggggcagccagtgacagcgacagcgcaagctttgcggccgcctttgcggtgactcctaattacggggccgatggtgcgggcacgacggtgaccacctacgccttgagtgtgtccgcccaaggggtggattccggccttgataacaacggcaacaacatctacctgtacaacatcgcaggttctgtggtgggttcaacatcagccacgcaggcgggtattaccacaggcaacaccatcttttcattgggcgtgaacagcagcagtggggtggtgactttaacgcaacaccaggaagtggaccacggtttgccgggagccagttccaattacgcggctcaggaagcgatattgaatacaggcctggtctttttgaacgccaccgcagtgacgacggatggggatggggacacggcgaccgccagtgcgtctttggatttgggcggcaatgtgaagtttgatgacgacggtccgagtgtgacgatggcggtgagcgataataatgcgatcaccttgaacacccaggatgccgatacgattggggcagccagtgacagcgacagcgcaagctttgcggccgcctttgcggtgactcctaattacggggccgatggtgcgggcacgacggtgaccacctacgccttgagtgtgtccgcccaaggggtggattccggccttgataacaacggcaacaacatctacctgtacaacatcgcaggttctgtggtgggttcaacatcagccacgcaggcgggtattaccacaggcaacaccatcttttcattggatgtgaacagcagcagtggggtggtgactttaacgcaacaccaggaagtggaccacggtttgccgggagccagttccaattacgcggctcaggaagcgatattgaatacaggcctggtctttttaaacgccaccgcagtgacgacggatggggatggggatacggcgaccgccagtgcgtctttggatttgggcggcaatgtgaagtttgatgacgacggtccgagtgtgacgatggcggtgagcgataataatgcgatcaccttgaacacccaggatgccgatacgattggggcagccagtgacagcgacagcgcaagctttgcggccgcctttgcggtgactcctaattacggggccgatggtgcgggcacgacggtgaccacctacgccttgagtgtgtccgcccaaggggtggattctggccttgataacaacggcaacaacatctacctgtacaacatcgcaggttctgtggtgggttcaacatcagccacgcaggcagggattaccacaggcaacaccatcttttcattggatgtgaacagcagcagtggggtggtgactttaacgcaacaccaggaagtggaccacggtttgccgggagccagttccaattacgcggctcaggaagcgatattgaatacgggcctggtctttttgaacgccaccgcagtgacgacggatggggatggggacacggcgaccgccagtgcgtctttggatttgggcggcaatgtgaagtttgatgacgacggtccgagtgtgacgatggcggtgagcgataataatgcgatcaccttgaacacccaggatgccgatacgattggggcagccagtgacagcgacagcgcaagctttgcggccgcctttgcggtgactcctaattacggggccgatggtgcgggcacaacggtgaccacctacgccttgagtgtgtccgcccaaggggtggattccggccttgataacaacggcaacaacatctacctgtacaacatcgcaggttctgtggtgggttcaacatcagccacgcaggcgggtattaccacaggcaacaccatcttttcattgggtgtgaacagcagcagtggggtggtgactttaacgcaacaccaggaagtggaccacggtttgccgggagccagttccaattacgcggctcaggaagcgatattgaatacgggcctggtctttttgaacgccgccgcagtgannnnnnnnnnnnnnnnnnnnnnnnnnnnnnnnngctc

SEQ ID NO: 24969 - DNA, 1146 bp, Legionella pneumophila
atgagtttagcattgaaaatcaagtcaattattttatctttttttcttgttttggtgactacggtagcttgtgccacacaagtgagtttgagagataaaattgggcaaatgttaatattaggattccagggcaaagtggttgacgagaaatcacctattgcccaggcaattgagaaaaacaacattggtggtgttattctttttgattttaatcagcagtcacaaacttttgataaaaatatagaaagtccggaacaagttaaccggttaaataatcagttacaaacacttacgcaaaaagccaatcgtaaatatcatagagataatttaccattacttatttctgttgattacgaggggggaaacgttaatcgattgcatccccgttatggattccctgaaatgccttcagcaaaagatattggctccatgtctctggaaagagctgatgcatcagcagaattgatggcaaatactttaaaatcaacaggatttaatttgaattttttccctgaattagatgtgaatataaatccagataatcctatcataggcaaaaaagacaggagtttctcttcgataccggaaattgtcactcaatacgcgcaactttatacagagcaatttataaaacatcaaatacattgttcatataaacattttcctggacatggcagttcattatctgattcacatttgggttttgtagatataagtgacacctggagcgagcaagaattaatcccttttttacaattattatctcaacccaatcattgcgatatggtgatgatagctcatattgtgaatagaaaactggatatgacagggctacctgccagcctttcttaccagatcattaacggattattgcgtcgtgatttaaaatttgacggggttgttatcaccgatgatatgcaaatgaaagcaataacgaattattatggattagaaactgctgttactctttcaattaatgcaggagcagatatgctaatatttggtaatcaattggtagaaaaatttcaagactcgacagaaatcattgacatgatcgagcaaaaagttcgatcgggagagatttctgaacaaaggattaatgaagcttatcaacgaattgtaaaaatgaagaggtcttttaattat

SEQ ID NO: 24970 - DNA, 1353 bp, Legionella pneumophila
atgctggctgctggagtcaacgtagtacgaattaatttttctcatgccgattcctccgccctgcaattaattgcactggttcgtaaaatcgcagacgaattaaaccacccggttgcagtcatggctgacttacaagggcctaaaataagagtcggccgttttcaaaacaaatccatcactttaattgatggacaaaattttacattggattgtatggccccagatactctgggagacataaatggcgtatcggtcgcttatcctaatttggccaatgaactcagtattggtgatcatcttctgattaatgatgggttaattgaattggaagtcatagagatttccgggtcaaaaattcattgcaaggtagtggaaggtggagtactcactgatttgaaaggtttgaatcgaaaaggtggcgggttagcagccagaactttaacagaaaaagatagaaatgatttacgtacagcaattgaagcagaagtggactacatcagtttatcttttgtaaaagacgcagaggatatccggcaagcaagagcgctaatgaaagactatggggcccaaataacccctattatcgctaaaattgagcgcatggaagctttggatcacttaactgatattattcgcgaagcagacgccatcatggtggccagaggagatttaggcgttgaagtgggtgctgctgaagttcccgccattcaaaaacacatcatagaacaaacgcgacttttagataaagtggtgattaccgcaacacaaatgatggaatccatgataagcaatcctcagcctacccgtgccgaggtttctgatgtagccaacgcgattctggacggaactgatgctgtgatgctttcggctgaaacagcaagcggcctttttccagtcaaagtcattaccatggtcaataaaatatgtttaagcgctgagaagcatgccagctttttttatcatagtgatccggaaacctgtcattatcaacgggctgaccaggcaatcgctatggctaccatgcataccgccaatcatttccccattcaggccattatcacactgaccgaatccggagacacggctttatgggtatcccgacaccacagcaccgttcctatttttgctatatcagccaataagagaaccattggtcgtttaagccttgtaaacaatgtctttcctatctacattgattttcatcaattcaaccccgaaggattgaatcaacaaattttacatgaattaatcaaatcagggcaccttgaaaagagaggctatgtgttattaactcgcggaacccaaattggaatgcctggcggcaccaactgcatggaaattatacctgttgtc

SEQ ID NO: 24971 - DNA, 1122 bp, Legionella pneumophila
gtgttcatagaattaatttcctattccttgtacatttggcattggcctgtattggctttaattcgctatttaaacattgaagagtccaatttggttctgttggttacttttgggttgatatcgattatcgcttatctttcctggcgatttattgaaaaaccagcaagaaaattacatcgaatccggttcagctatacagtggtttgtttattaattatgccggtttttgtcactcacttgagtgattatctgattaaaaagaatgcgggttatccttatcgcttcaatgaagcaatccaggtttatgcggaattaaacaagtacaaaaatccacagaggcctttgtgtctggagcgcaaaaataccgaagtcaaccctcagtgcgttctgggagcaaaaaactcggatagtcgaaccggctttatgataggcgattcttattccaatcagcattggggatttatggatacgttggcaaaggaggccaatgtatccattttggctcatgcaacggttgcttgtcttgctttacctgacatatatcaatttgattggaatgttaaaaataagatttaccaggaatgccatgatcaaacgaatcgctattttaatatgattaaaaccaaccactatgattatgttattttaggccaaaactggaatggttattttggtgatagaattattaatcaattgaatgacaatcgatctcaagagctttctttaaagcgcattgaaaaggctttggataaagctctggagcttattaccacttcaggagcgaaacctgtattaatcaaatcgatagcactgtctaagggaaatccttacaattgtttttttgagcatatcaagctgcataaaaaatacaatcccgagcggtgtgattttaacctggatgtcagtgaacagatttggttcgataatttgtttgcaaaaatgcagcgaaaatacaagacactggtcattattgacccacgagtagctcagtgtccgtcggggatgtgtaaggtagatatcaatggtattccagtatttcgcgattcaggacatatcaccgattatgcttcctatcatttggccaaattatacttagagaagaataacaatcccttagtgagt

SEQ ID NO: 24972 - DNA, 900 bp, Legionella pneumophila
atgaagaatctattacattcacttgcctgtctattgatattaataagctcagcaaaactatcctatggtctggctctaccagaaaatcattctgtcaatgggggactgactattattccaattgatttcaatcagaagcctgaagcctatttcgaggggaaacgcatcccggttcttcccagtacccaaccccggcaatggttattaatcgttgcaatcccgcttaaaaataccaactctgttcaatacatcaacgtgacaaaacccatcaaagcatctattccctttcatgttagtgaaaaattttacagtacccaatttttaaatataaaagatatcagtaaagtggatcctcaacccgaagatttaatccgtattgaaaaagaaaccaaaaaattaacccaaatttttgctaattactccaataccaatccatttgagaaacaattcacagcaccactgagaggacctataaccagtttatttggcctgaagagagtttataataaacagccaagagatccgcattctggattggacatcgccgctgacgaggggaaacctgtgtatgctgtaaatcagggagttgtagcagataccggtgattattttttcacaggcaatacggttatccttgatcatggcatgggagtattctcggtttatgctcatcttagcaaaattctggttaaaacaggagaaacaatcaaacaaggccaagagcttggattagttggtatgacaggaagagtaacaggcccccatctccactggactatggtagttaaccaaactttggttgagcctttactttttgtgccgtttcgcaaaatcacagttacaccagttataccagataaaaaatcaaacaaatcaacacaagatgcaacggcaaaatca

SEQ ID NO: 24973 - DNA, 2292 bp, Legionella pneumophila
atgcttaaaatacttaaacggatagtacaagatgttaccgctgccagtgatttgaaagaagcacttggcattttggtgcaacgtattaatacagccattaatgcagaggctgtttccgtttatcttattgataataaaaatgctgaatacgtattgatagccacggaaggtttgaacaagcaggcagagtttagagtcagaattgctcttgattgcggtcttatcgggttgataggacgaagagaggaacctatcaatatagaaaatgctccctctcatccggatttttatcataatccattaatcggcgaagatcacctgaacgcttttttaggcgtccctattattcaacatagaaaattatacggtgttttagttgtacaacagcttgaacaacgttattttgatgatgctgaagaatcatttcttattaccttggcggctcaattaggcgggattattgctcatgcagaggcaacaggtgaattggccgagttaacacaacctaaaaagggtataggcgtcgacaaggtagaagcgacttatactgcactgactggaataggcagtgttcctggtataggaattggtactgccgtggttgtgtacccacctgcggatattgatgctgtccctcgtaatccggttgaagaattggaagatgaaatcaatgcgttttatgaagctttggaaacgacaagagatgatatcaggcgtttaagtaaacgcatgaaagaaactgttgctgaggaagagcatgctttattcgatgtgtatttaagaattttggatagggatagcttgggtgctgaagtagagcatgtgattcgtgaagagaaaatcagcgctcaagctgccctggctacagtgatcaagaaacacgtgcagcaatttgaaagcatgggcgatgattatctgcgcgaacgagccagcgatttccgtgatttgggccgaagagttttggcggaattacaacgtacccaaagagaagaaattgtttatccgaagagaaccattttaataggagaagaaattactgctgccgctctggcagaagttccagaagggcaattggctggtgtcgtttcagctaaaggctccaataactcccatgttgctattttagcgagagctctcggtgtacctactgtgatggggttgagaggattaaaagtagagttggtatcgcgtcgggctttgattgttgatggctattatgggcatgtttatatctctccttccaaatcattattagcggaatttaagcaattagctcaagaagaacaggaattaaaccaaagcctggtaagcttgcgtgataaaccagctgaaactactgataactacagagtctctttgcaagtcaataccggcttggcaatggatgccggtttatcaatgagtgttggcgctgaaggagttggtttataccgttcagaagtaccatttatgagtcgagatcgattcccttcagaagatgagcagaccattatttacagacagactctcaaggcctttgctccacgtttggtgactatgcgtaccctggatattggtggagacaaaattctaccttattttccagttgaagaggaaaacccttatttaggatggcgtggaataaggataactcttgatcatccagatgtcttcctgattcaggttcgtgccatgatgcgtgccagtgaggaactggataatttacgtatcatgttgcctatggtcacaacacttagcgaagtagaggaagccgtttatttgattgaacaggcatttgaagagctggtggaagaggggtgcgaaatagtaaaacccaaaattggtgtgatgattgaagtgcctgccgctgcttatctggcaagagaaatggcgaaacgagtagattttatttcggtgggtagtaacgatcttacccaatatttattggctgtggatagaaataacgcccgagttgccgcactttatgatcccttgcatccagccatgttgcgtacattgctaaaaatagtcgaaggagggcatgcggctggtgttgaggtgagtatttgtggcgaaatggccagcgatcctttagcggtgattttgttaattgctatgggttttgacaccttaagcatgaattccgccagtttacccagggtgaaatgggttattcgcaattttgctatcgcgaatgcccgtaaaattctggcagaagttttggaatttgaacatcctgctgaaatacgatttcatttgcaaaaggctctagaagaggaaggattagggggattaatcagagcaggaaagtca

SEQ ID NO: 24974 - DNA, 447 bp, Legionella pneumophila
atggaagtaatcttattagaaaaagtacgtaatctgggaaatctaggtgataaagtacacgttaaatcaggttatggacgtaattatttgataccacaaaataaggccgtctttgcaacagaacaaaatattgaattatttgaaaaacgtcgtgctgaactagagaaaaaagcgcaacaggctttggctaatgcagaacaacgtgctgctaaattgaacgataccacgatagttattagtgctatggctagtgacgaaggtaaattgtatggttcagtcggagttaatgaaattaaagacgcattgatagaaaaacaaattgaaatcagcaagcgtgaaattgttatgcctgaaggccctctacattctataggtaattatgttgttgaagtacatgtacatagtgatgtagtagctaatcttcaagttgaaattatccctgctaaa

SEQ ID NO: 24975 - DNA, 1200 bp, Legionella pneumophila
gtgctcctgcatgtccttgcctcaactcctcccttgtctaatcaacttttggctgtccatattaaccatggcattagtggaaattctctgaactggcaaaggcattgtgagcaattgtgcctggatttaggtattgcttttattgccaaagcgattgaatttgatcgttctgcaaatgttgaagaagcagcacgcaatgcgagatatgattttttttcctccttattagaggataatgattgtttggttttggggcatcatcttgatgatcaggctgaaacagttcttttgcaattgtttcgcggtgcaggagttgatggcttggcagctatgcaggaatgcagcaatttgggtgctgggcaattggcaagaccatttttgacctgccccagagtggaattagagcattatgctcgtattcatgaattgaaatggatagaagacgaaagcaatcaagatacaaaatattctcgcaattatctgcgtcatcgcgtaatgccattattgcttgaaaagtggccgggagtagcaggtaatatttcccgagctgcgactcattgtcagcaggcaaaagcgaatcttgaggtattggctataaaggattgtcctgatttgttaaacgctactgatcatttgctgattgaacccataaaaggacttgaatttgagcggattacaaatgttttaaagttttggcttaaaaaaaatagaattcaattgccttcgtccaagacgtttcatcgtatcattcatgaaataatttttgcaaagctcgatgctatgccaacagtgagttggaatcaaatacaagtacgtcgtttccaacaacatctttatttgcttaaggcagaccagatcaatttaccgaaggctattaaatggcaacaatttccagcttctttaacttatccagacgctgatattaagttgtctgcagtaaaggcccaaaagggattaatgatcccgaaagatgcgcaaatagaaatacgattcagaaagggtggtgaagagatttattggcatggtcaaaccaaacatctaaaaaaactatttcaggaatggcaaattcccccatgggtaagggatagagttccattggtttacattaatgatcaattggcttgtgtagtaggttatgcagtgagcgatttgttttttactactaatccactggaagcttggtctataagtaataattct

SEQ ID NO: 24976 - DNA, 441 bp, Legionella pneumophila
atgactataaaagaacaaatcaacaatgacattaaagacgctatgcgcgcaaaggacaaaaacttgctcaatgctttacgcttaatcagtgctgcggtaaaacaaattgaagttgatgagcgcattgaagtggatgacgagcgcatgttagtcatcctggataaaatgtccaaacaacgcaaagaatctattgctcaatttgaaaaagcaagccgtgacgatctcgttgcccaggagcagtttgaattgaatatcatttcaaaatacctgcctgaacctttaactgacaatgaaattgaagagttaatctgcgacgcgatcaagtctactggcgctgaaaaaatgtctgatatgggtaaagtcatggctatccttaagccaaaattacaaggacgcgcggacatggcccaagtcagcgcccggataaaggcgaaattaagc

SEQ ID NO: 24977 - DNA, 537 bp, Legionella pneumophila
atgtctagagtagcaaaggccccagtaattcattcagcaaatgtcgaagtaacatttgttgatggagtaataactgtaaaaggccccaaaggaatattaactcaaaaaattaataaattggttaatattcaacatagtaaggaatcaaacaaattagaattttcacctgcttctaatgatccaatgggatgggcacaagctggtacagctagagccttagttagaaacatggttcaaggagttactgagggatatacagttacactagaattggttggtgtaggatatagagcgcaatctaaagacaagtcaattagtttgtcattaggatactcacattctatagagtatgatttaccaaaaggtgtaaccgtagagactcctaataacacaaccattttgctgaagggcgttgataagcaagttcttggacaaatagcttctgaaattagagcatttcgaccaccagagccttataaagggaaaggtgtgaaatatgctggagagcagattgttcgtaaagaagctaagaagaaa

SEQ ID NO: 24978 - DNA, 822 bp, Legionella pneumophila
atgcctgaattacccgaagtcgaaacaacaaagcaaggtattaaaccccatcttgaaggccgtatgattaccgcagtgcaagtgcgtaatcgaaaacttagattaccagtacctctaaacctgaatgaattatgccaaggaaagcatataacagctattacccgtagaggaaaatacatcttacttcatatggataaaggttatcttctcatccatcttggaatgtccggacatttgcgtatcgtatcccagacagcaaatcctcaaaaacatgatcatgttgatctgcacattaataatgggcttgctctcagattctgcgatcctagaagatttggcttatttatttacattgatgaaaatccttaccaacacccactgctggcacatttaggcccggaacctctgtctgatgactttaatagcgagtacttattacgtaaagctgcgaataaatcgcaatccatcaagtcatttattatggatagtcaaattgttgtcgggatagggaatatttatgcggcagagagtctttttcttgccaaaatccatccaaatacctctgcaaaaaagataactacagaagaattcaattctctgactggtcacatcaaaaagatacttgaatctgccatagaggctggagggacgacacttcgtgatttctattcttctgatggtaaaccagggtactttcgttttgctttaaaggtttatggcaggaaaaatctcccctgtttggtatgtgaaaataaaatagaaactgtcgtgattgccgggcgccactccgcattttgcccacattgccagccaatcattaca

SEQ ID NO: 24979 - DNA, 1422 bp, Legionella pneumophila
atggctaataaaattaagacagatgtagtggtattaggtagtggaccaggcggatacacagccgctttcagggctgccgacttggataaaaaggtggttttggtcgagcgttttgactcactaggtggcgtttgtttaaatgttggttgcattccctcaaaagcattattgcatattgctaaagtagtagatgaagcccatgaaatgtcagagcaaggtgtagcatttggtaaacctaaattcgacaataaaaaattggttgcctggaaaaactctgtcgttgcaaagttgaccgggggactaaaagctcttgccaaacaaagaaaagtagaagtaattactgggacaggtaagttttcaggtacccatcaaattcttgttgaaacgaaagaagggactgtagaaattgaatttgataatgccattattgcagtaggctcagaatccattaaattaccatttataccagaagataaacgaatatttagctctacaggggcattagaactcgctgatatcaaaggtgacttacttgtattgggtggtggtattattggcttggaaatggcaactgtctactcctcgctgggagttaatgtaacagttgttgaatttatggaccaattaattccgaatgctgatgccgacttggtcaatatactgcaaaaacgaatgactaaaaagggtgtcaaatttctattaaaaacgaaagtaactgcagttgaagccaaaaaagatggtatttatgtttcaatggaaggagaacatgcaactgataagcctctttgctttcagcaagtacttgtttcagtaggcaggaaacctaacggtggagcaatcaacgctgaaaaagcagggatcaaagtagatgaacgtggctttattccagttgataatcaattaagaacgaatgttcctcatatttttgctattggcgatgtcaatgggcaaccaatgctcgcacataaagcaatccctgaagggaaagttgcagcagaagtcattgcagggaaaaaacattattttgagccaaaatgtatacctagtgttgcttatacagatccagaattagcttgggctggtctaacagaaaaagaagcaaaagagaaaggaataaactatgagaaagcctcctttccatgggctgctagcggtcgtgcactcagcatggggcgagaagagggaatgaccaaattactattctgcccagaaactaaccgtatcctgggagcaggtattgttggggttaatgccggcgatttaattgcagaaactgccttagccattgaaatgtgttgtgatgttgaagacatcgctcttactattcatcctcacccgactctatcagaaaccatagctcagtcagcagaagcatttgaaggcactataacggatctgtatttgcctaaaaagaagaaaaaa

SEQ ID NO: 24980 - DNA, 693 bp, Legionella pneumophila
atgagcattagtcagaacataaacaaagtaagagaactgataacccagacagaatcatccagtaacaggcaaccgaacagcgtcttattattggctgttagtaaagaacaaagccccgaattaatcagagaagcattccaacaagggataagacactttggtgaaaactattttcaagaagcccaggaaaaaatattggcattaagagatctgcctatctgttggcattttatagggcctatccaaagtaataaaaccaaaggaatagcgaaatattttaattgggttcacagcattgaccgaaataaaacagccaaacttcttaaccagttcagatctgagcaactaccaccgctcaatgtctgtttacaaattaatttgactggagaaactacaaaatcaggcattcctccagaacatgccatcgaccttgctctcgaagtaaagcaattgcctaatttgcagctaaggggactgatgacaatccctcctcagcaaaacaacatgcaaacacagtacaatttattccttaaactcaatcaactcaaggaatccatcaataaggcacttcatttaaaaatggatactttatcaatgggtatgagtgatgatttggttccggcaattaaagcaggttcgaccatagttcgaattggacgagcaatttttggcgaacgaaaaggtaaattatta

SEQ ID NO: 24981 - DNA, 1002 bp, Legionella pneumophila
atgaatataatacttaatgtatttttaatatttgtctcagcaattttgactaaattatttgccttgtttgcgcagcatacaaaattgattgatattccaaatgaaagaaatttacactccagacctactgtccgaggaggagggcttgtctttattggtcttagtttattttgttggttttttatttgtaactcacaattttttttaacattggatcaattcattttttcgatagctattattttcatagcaactataagttttatagatgatttttataatttgtcagttacaattcgattcttttttcaatgtctgattgcattcctgatagttatatttatattgccttcccagttagattttggtttatttctatttgaaaacacctatttaattgctttttttctattttttgcagttatttgggcaattaatcattttaatttcatggatgggcttgatggtttttgcgcttcccaagcgatttttttgttagccgcatatgctttgtttttcaactcagcaggttcattaatttatcaagatttttgcctgattcttatttctagtttggcagggtttttaatttttaatttcccaccagccaagatatttatgggagatgtagggagcgcctccttaggattaattacttttttcatagcaatcattgctcaaaagaattatcaaattccaattctatattggtttatcctgaactcattatttctcttcgattctacagtgactttaattcgaaggattataaagcatgaaaaatggtttagtccccataaaaagcacgcttatcagagattaaagcaattgggcattaactctaggtttattttgttaggtcaagcaataataaatggtagtttatttctttctgtcatgtttatgcattttcaattttttaatcttaaaaatctaataattattcagttatgttatttatctgccatatattttttcattgaaaaaaaatatcctatggaa

SEQ ID NO: 24982 - DNA, 1014 bp, Legionella pneumophila
atgatgccgtcagaactgtctgctgcgggtactcaaattattctgggcggtaatacctatcatatgttgtgtgcgcctggcatgaaggtgatagaaaatgcaggggggatgcatcgctttatggggtggcatggacctatgctaacagacagcggtggttttcaagtttttagtttatcgaagaacaaggaaatttgttctatagatgaatctggtgctcattttaaattgcctggcagtaaggggattatccatatgaccccggaaatgtctctggagacccagaaaataattggtgccgatattataatggcatttgatcagtgtactcctgacagctgctccaaggatgaagtaagtcaaatcatgttgcggacccacagatggctaaaacaatcgattgactaccatcaacaatatcccaactctcgatacggatataaacaagctttatttggcattgtgcaaggaggagtttttcaagatttacgtcgagaaagtgctgattttgtttctgcaatgaatacggatggtattgcaataggtggagaaactgtaggctttgatatggatactacagtggaagtcattcgttgggtgtatgagtatcttccgggcaataagccacgttatactatgggagttggaatgtcacctcaagatctgttggatgtggtggcggaaggtatcgatatgtttgattgtgttgcaccaacacgtaatgcccgacatggtgccttatattgtggtaaattggtaagagaagggaattggctaaaatttcaaagcgaacatgaaaatggacgaattcaaataaagaaatcatgttttgctgatgatttggcacctgttatggagagttgttcttgttatacttgtcttaattattcaagatcctatttgcatcatttatcaaaacaaaaagctaatttatttactgctttggcaagcatccataatgttcatgttttgcatgatgtttgtaatcacatgcgtcatttgataataaattcc

SEQ ID NO: 24983 - DNA, 675 bp, Legionella pneumophila
atgaaagcgaacggtttttttgatgagcaatcttcccttaagaaaagtaaaattgggttgaatttagtatggatgttctcacttggtcatatttttctaataacgctcagtaatgttctggttcaatatccatttgatatgatgggatttcacacgacctggggggcgttcacttatccagcaatttttattttaactgatttgacaacaaggatagcaaccgctaataaggcgcggaaaattattatgctgagtatgaccccaggattaatattgtcctatcttgttgcgagctatattgaggcaggcaataatttgaatgagagcggtctatccgttttacacctcatgccattacgtatcgccctggcttgttttatagcctacgttgttgggcaattgctggatgtggcagttttccaacgctatagaaatcggcctgcctggtggctggccccaactctatcggcggttgcaggcaatttcatagatacagcattattttttaccatcgcgttttatcactgctccaatccatttttaagtcagaattggcctgaaattgcgatggtcgatgtcttttttaaaatcatgattagtttaattgcttttgttccggtttatggtctggttttaagtattcttggtataaaaactaccaataaattaatggta

SEQ ID NO: 24984 - DNA, 237 bp, Legionella pneumophila
gtggacaatagagaaaaatcaaggttattatggaaatgcaggcgaggaatgctagagcttgatcttgttttacagaaattcatagccaatgagattgatcgacttacagaaaatcaattgaaagcatttgataatctattaacccacaatgaccctaatttatatgcctggttaatggggcatgaggaacccgaaaaagagttgcttgaaattgtatcattcatcagaaactgtgat

SEQ ID NO: 24985 - DNA, 1518 bp, Legionella pneumophila
gtggataaatttttaaatgggttatcgatttcactcatgctatcgcccttgatagcgatgctattctatatcttgttaggaaaaacaagaaatattcaagcaacttattacggtaccacagttataggttttggttttggattgagtctcttggcactaattgtttctgcaaatactgtaaaccaaaacagttattttttatttcatgccagcacactaagcctcttgctaagcacattaatattattcatcagctttattatccaccgtttttccctacgatatatgcatggtgacaagtgctaccgacgttattttttcaaactttcagccataactttaacaactgttgtgatggctttagcagacaatcttttattgttctggcttgcctggtcagctagtaacttgctcttgataaacctcatgattcataagtcacaatggaaagcagcctacaactcagggatactgactttaaaaacactattaccaggaagcttgttgcttatcacggcattttggattctttttacgttaaacaatactctgtcaattgaaacaataaccagcgaagtgagcaataagtcatcccttgctattgccgtggcacttgggtttattatcttagcagcgatggcacaatcagccatatggccttttcatcgctggctaatgagctcattaaactctccaacaccggtatccgctctaatgcatgctggattagttaatggagggggctttctgattgttaaatttgctccgctgttcgtaacgcaagaaaatttattgaccattttattcattttcggcgcactgactgctttattaggcaccctctggaaactgttgcagtggaatatcaaaagtatgcttgccagttccaccatggcacaaatgggttttatgatgatgcaatgtggcttaggacttttccctgccgctatcgcccatctatgctggcacggcttgtttaaatcctatctttttctcaattcaggctctgccgtccaacaaaagaaatatcaaaataaatcacgtcctgaaaaattgacaaacttattgactgcattttttggaggacttagtggaatgtatggctttgcccttatcacagggaaacccatcttatctctgcatgcctccacctttcttttaggttttgcattcatcacaggaacacaactcaccctgggcttgattgcatatgagaagcatttcaaaaaagtaattttagccttggctttagttttctcaattggaattttttatgggggaagtattcatctcatcgagtcactcttacctaatctaacaggatttcctcaataccaattaagcagcttacaagtcttaactctgattatcttcttttccctttggcttttattcagcatggggttattcaaaaaaatcagagagaccagactttgggattggttttacatgtacatgtttaacgcaagtacgcctcaccccaaaactattacggcaaatcgccacacttattactat

SEQ ID NO: 24986 - DNA, 1692 bp, Legionella pneumophila
atgggtggcttaactagcgagcaatatcatagtcaagtagtcggtaaaatcggatatatcgccagatgcatgcaaactatagatcctgaaaataatttgaaaaaaataagggaagattaccaagatgtattgatatgggcagagaaaaattatcgttttgaggaaatattggaagccagcaaatctggaaaatgccctaatgatctggatgcattaagtcgacgatcgctaatactccaagaattgctgcggcttgtttcatcaattagtccctttaaaatgaaattagacctgattgagtctcaatatgagaaaatgaagcagcatgtgaatttatggaaaagtgattaccatgtaaaactaaatcaactgaatcaattaacagattacctcaaaaatgcagcaccaactcctaaaaataattttctaagagcaatgacctctgtattgcagatgcagatagcccaatatgggattacagaagataatgaaggcatcaaccagttgtttaaactgggattgcatttgctcgcaatggctaacgaaaaaatagatgaacaatatcacctgtttaaagggtatgtaaaagatcagcctgaagaatctccttttgaaggtattttgcctgcggaagaccagaaaattttagttaaaactatgatagattatgcaatgccgaagctttcaagcaaggttttacaagataaattatcggcactatccagttctgatgtattaacaaaaacattacttgatagcatcgacagaattgttaaagaaaacgaaaaattaaatgctttaagcaaagtcaaattaggtaaatttggcctggatatcagggaaattgaagtgatttactctcaagctctgaaaatatcaccacaagatgctttgcaatatactgctcaacaatgtgatgcccaattattaagcatggcatttcctgattcccaaaattacattattgaatctatatcgaacaaaaaggtcaagaccattgcagagctaatccatagtaaagaatttatttatcaaattattaagacagaagtttttaaacaagttgatcctaatgagaaaattcgactacaagctgcgacagaattgtatcagcttcttgggagaataatggataaacagattaatctttttaccaagatgaatctcgaacaaattaatgaatatattcaaaccaaaaccaaagcaatcctggacaaaattcctgaaagagttgagttattaacttttatgggctttgaaattccaactttcaagggaattgagacacttatgaccgacatctcccattctcaggataatgaaactctggcgatagcccaagaattttatacaaatataaaaaatgcaaagaaccaattgttgggtgataaactgattgaagacattactccacaggatgtagagaaattttttaatcaatgtagtcaatacggttcagaagcagctgaaaagttagctgacaatcgtccggtattgacaaaaatagccgatattttgacagccattgcccgttgggcgattagtttaataggtttcaatacgccaccgcagtttttggctccaaccagaacctgtgtggatcaggtatctgatgaaatcactaaaattaaactcaaacttgaagatactttgggaagcttgcaaaaagtacaggaagaaagcctaagcctt

SEQ ID NO: 24987 - DNA, 843 bp, Legionella pneumophila
atgaatgaagtagtctatgatccttatttaccaaaagaagttgaaattattcaacgtacacaggagtcgtcttcaatttttactctgcacttccgctttactgatgaagaacatcataagcaatttcaattttatcctggtcaattcaatatgctatacctttatggggtcggtgaagtggctatttctattgtttcagatcccagaaagaaaacttttctaagtcacactattcgagcggtagggcgggtaaccaaagccatgcaaaaactgcaggttggtgatcgtcttggaatacgaggtccttttggagtaggctggccactacaaaaaacgataggtaaagacattattgttctaaccgggggattgggttgtgctccatctgtttccattatcaattatattttaggaagacgacgtcattacggtaagctcagtattttgcagggagtaaaacacagcgaggattttatttttagaaagcagtatgccaaatggcaaaaatcagatcatactgaagtttatatagccgcagatcaagctggtcctaaatggccttggggtgttggttatgtgactgacttgattgaccacatcattatacaaccagataactctgtggtgatgatgtgtgggcctgaaatgatgatgaatacagccgttaaagtgtttacccaaaaagggattcttgaaaacgacatctacctcagtatggagagaaacatggaatgtggaattggtcattgtggtcattgtcaatacggtggtttattcgtgtgtaaagatggtcctgtatttgcttattctcaagttaaagagttattcaaagaatctggattt

SEQ ID NO: 24988 - DNA, 591 bp, Legionella pneumophila
atggatgctctaagccgattggtagaggcgcttcgctgtcttcccggtgtgggaccaaaatcagcacaaaggatggtgttccatttattgcagcaccaaaggcagcgaggtttacaccttgcctcctgtttagaacaggcaatgaagcacattagtcattgtcagcagtgtaataattacaccgaacaaacactgtgtgctctttgtcaaaatcctaatcgagattcgacattgctttgtgtggtagagagtccagcagatgtttctgccatagaacaaagcaattcctttcaaggtaagtattttgtccttatgggaaaaatttctcctcttgatggcttgggacctgatgacataggtctaccgaaacttaaggagttaattactagggaaaaaattcaggaagttattcttgcattaagccccagtgttgaaagccagaccacaattcattttattcatcagttgctaaaggatgaaaccgtcaatatcagtcagttagcacatggaataccatcaggtggtgaattagaatttttagatgggaatactataagcagtgcccttaagaacagagctgtgattaatgtc

SEQ ID NO: 24989 - DNA, 1358 bp, Legionella pneumophila
aatcaatactggtggcctaaaatgctcgatcttagcccgctgcggcaacccaatgccacttcgaatcccatgggtgaaaaattcaactatgccgaagaattcaatagcttagatttgaatgccgtgatagaagatctcaaaaaattaatgactacctcgcaagactggtggcctgctgattatggtaactatggtccattattcatacgcatgtcatggcatgcggcaggaacttaccgcatctatgatggccgtggtggagcaaacggtggcttccagcgtttcgccccgcaaaacagctggccggataatgccaatctggacaaagccagacgtttactgtggccaattaagcagaaatatgggcgcaagatttcatgggctgatttgttggtacttgctggaaatgttgcgatggaatctatgggcttcaagaccattggatttgctggagggcgtgaagacgcatgggaggccatcaatatcaattggggccctgaaggcaaatggctggaaagtaagcgccaggataaagatggaaaacttgaaaaaccgcttgctgcgaccgtaatgggcttaatctatgtgaatccggaaggaccaaacggcgttccagatcctcttgctgcggccgaaaaaattcgcgagactttcgggcgtatggccatgaatgacgaagaaacagttgctttaattgcgggcgggcacgcattcggaaaaacacatggagccgcgtccggcaaatatctggggccagcgccagaagcagcaggcatagaagaacaaggctttggttggaaaaacagttacggcagcggcaaagggaaagacacgattaccagtggtttagaaggtgcctggaccgtaacacctacccactggagccataactacttacaaaacctgttcaatttcaattgggttaaaaccaagagccccggtggagcaatccagtgggtacctgagaattcgaatgcctcgtcaatggttcccgatgcatttgaccccagtaaaaggcatgcgccggtcatgctgaccacagacttggcactaaaatttgatcctgtttacagtaaaattgccaagcgttttcttgataatcctaaagagttcgatgacgcatttgctcgtgcctggtttaagctgattcaccgagacatggggccacgttcacgttacctcggctctttagtgcctaaagaagccatgatttggcaagatccagttccgccagttgattacaaattagttgatgccaatgatattgctaacctcaagggtaaaattctcaactcgggattgaccacatccgagctggtcaaaactgcttgggcctcggcatccaccttccgtggcac

SEQ ID NO: 24990 - DNA, 1828 bp, Legionella pneumophila
aatgttaaattaccagatggaaatgtaaaacattttgaagcgccactcactatttatgatgtggcacatcacattagccctggattagctaaagcagcgatagcaggccgtgtcgatggcgtcttggtggatacatcctatcttataaaagaagactgctctttgattatcgtaaccgagaaacatgaagacagtcttgaaataatcaggcattctaccgctcatttattagctcaggctgtaaaagccttatttccatccgctcaagtgactataggtcctgtaatagaagacgggttttattatgattttgcttttgagcgctcgtttactcccgatgatttgagtttaatcgaagcgaagatgcatgagctggcaaaggctaatctttcgatcactcgtcgagaattacctagaaatgaagcaatacaatattttaaggatttaggcgaagaatataaggcaaaaattattgctgatatacccgaaaatgaagcgctctctctatataggcaaggtgattttgaagatttgtgtcgaggtccacatgtcccctccactgggtttttaaaagcatttaaattgacaaaagtagctggcgcttattggcgtggtgactcaaataacgaaatgttgcagcgaatttacggcactgcctgggctgataaaaaatccctggaagaatatttgtttcgtttggaagaagcagaaaaacgtgatcatcgtaaattaggcaaggcactggatttgtttcatttccaggatattgctccgggaatggttttttggcaccccaaaggatggactatttatcaagagctagagcattacatgcgaaatcgcctggtcgattttggctatcaggaaattagaacaccgcaattagtagacagatcgttatgggagaaatcaggtcattgggcgaactttagagatgaaatgtttgttaccgaaacagagaatcgacattatgcagtaaaacctatgagctgtccctgccacgttcaaatttataatcatggtttgaaaagttaccgggatcttcctctcagactatctgagtttggaaattgtcatcgctgtgagccatcaggcgcgctgcatgggttgatgcgggtacgcaatatggtgcaggatgatgctcatattttttgcactgaggatcagattcaatctgaagtggctatgatgctggagttagtgcaatccgtatataaggactttgggtttactgaaataaaataccgattggctttgcgccctgaaaaacgagtcggttcagatgacgtttgggataaggcggaaaccgcccttaaactggctatgcagggaagaaatattgagtgggtggatgcgcctggagaaggagcattttatggacctaaaattgaatgctctctctctgattgtttaggtagaatttggcagtgcggaacgattcaagtggatttctctatgcctgcacgccttgaagcaagctatgttgctgaagatggaagcaagcaaacaccggtgatgttgcatagagccattttgggttctttcgaacgatttatgggaatattaatcgaacattatgcaggtaaattgccattatggttatccccagtgcaagcgattgtgcttactattagtgagaagcagaatgagtatgccgagaaagtgaggataactcttgcaaaaaagacggattcgcgccaatttagacctgagaaatgaaaagattggatttagaattcgcgagcatactcaacaaaaaattccatattcatcggttgttggcgataaagaggttcaaaattgtcaggtagctgttcgcactctagat

SEQ ID NO: 24991 - DNA, 1473 bp, Legionella pneumophila
atgaactatatactagctattgaccagggaacaagtagtactcgcgctatgatctacacccttcaaggtgatttaatcgcaaatagtcagtatcctcttactcaatattaccccaattcgggttgggtagaacacgatcctgaggaaatatggcaaaaaactctgaatgcgatgagggatgtcgtatctcaagttcaaggaaaagcaattttatgctgtggccttaccaaccaacgggaaactactctgatttggaacaaaaaaacaggggaatgcctcgcgccagctattgtgtggcaagatagacgtacggaggagttttgttattccttgtctgaatactcgtcaatgatacaagagaaaaccggattacttcctgatccctatttttcagcgagcaagttaaactggttactaaagaataatgctcaagctcaatcactaattaaccagggggatttggcatttgggacaatagacagttttttaatatggcgcatgactaaaggtgcaagtcatgctaccgatatcaccaacgcatccagaactatgctgtttaatattcatgatgaaaaatgggataagcagttgctggagcttttttctatttcagaatcggtattaccagcggtatactccagtgataatcattttggggtgatagataaagaatggctgggagtagaaataccaattaccggggttgcaggtgatcaacaagccgctttaattggacaaggttgttttaatggaggaatggttaaggctacttttggtacggggggatttttattactcaatacaggtgataaaccagttttctcaaagcataaattgttgactactattgcctataaaattaaagaaaaaacagtatatggtttggagggtagtatttatcatgccggaactactgttaaatggttacgcgatgaaatgaagttgatatctcattctgctgaaactgaagtattggctcgaagtcttgatagcaataacggcgtatatcttgtttcatcttttactggtctgggagcacctcattggttatcaataacgggaacagccattataggtgtatcccgttcaacgaatagagcacattttgccagggctgccttggaaggagtttgttatcaaacacgtgatgtattaacctgtatgagagatgatagtcaattggatttgactttattaagagcggatggagggatggcagtaaaccaatggtttctacaatttatggctgatcagtgccagttgacaattcaaaaacccaaagacattgaaacgactgccaaaggggcagcagtattagcggcaataggttctggactatttgattcagtttcttcagtaaataagatatgggacgttgagaacgagtttcagccattcagggaaagagaggtagttgaaaaagattttcgcggctggctagaggcgttgtcaatggttaaagcaaggcatgca

SEQ ID NO: 24992 - DNA, 1248 bp, Legionella pneumophila
atgagcaatacagaataccaaacaattgataacaagactcaatatatcaatggaaaagaaaaacatcaaaaccatgcttatcctgagtacatcaatcattccatggaaaaatattacgagggacgagtcaataaatcctggcaagggaaacacatacttaaaggcaaaaccccgactgcaaattcactgattttttcgagcaatgattatttaaacatcagtcaacatccgcaattaattaaagcgcaaattgctgcgatgcaaaaatatggtaatggtcaaatgcaatctgctgtatttttaaataacagctcttttttgctcagccaatgtgaaaagaaattcagttcctttttaaattattctgcggccctgctcactcaatcaggctggagcgctaacgttggtctcatacaaaccctggccaagtacaatacaccagtgtatctggatttttatgcccatatgtctttttggtctggtgtaaaagcagcaagagccaaatctataccgtttctacataattcagtcgattcactaaaaaaacgaattgagcaccatgggccaggaataattgcagtagattctatttatagtacgctgggtacgattagtccattggctgactatgctgacattgcaagaaaattcaaatgtttgctcatcgtcgatgaatctcattcattaggtacgcatggttcgcaaggcaaggggatggtggctaaactgggattatcaagccaaatagacatcataacagcaagcctggctaaagccttatcaggacggggaggcatcattacaggagataggcaacttatagaatatatcagatattcatctctaccctctatttttagttctgctttaatgcctcatgatttagcaggatttagcgcatcattagaaattattactcaagaagaatggagaagagcaaaattacaaaccaatgctgattttttacgagaagccttatcatgcgaaggaattaatataggaagtagtggctctcaaatagtccctttagttacaggcagcgaggctaacacgctttggttaagggatgagctagaaaaagaagacatctttggagccgtgttctgttcacccgccactcccaaaaataaatgcctgattcgtttatccatcagcgcgcatcacgaaaaatcggacttgctcagagtgattgagtgcctggtcagacttgcaagaaaaagacccgatattcctttgtttaagggtaat

SEQ ID NO: 24993 - DNA, 465 bp, Legionella pneumophila
ttgaatggtaaaatgctcctcatgtctatttttaatacacctgtgggtaacttggaagtagcccatgatgagcattttattttcaatgcgtccttcacagacaaatctggcgctccagcccaaaaccaattggcccatttaattgccagtgaattgaaggcttacttcgacaatccccatcaccgttttcagctccctctgaaacctcagggaagcctcttccagcaaaaggtttggaatacgttgttagtcattcccgttggcagaacagttacctatggagaactcgctacaaaactgcaaagtagtccaagagcagttggacaagcctgtaaatgcaacccactggctttatttgttccttgtcatagagtagtagggaagcatgatcttggaggatacatgggaaatccaaacgccatttcttataaaaaaaatctgctcgctcatgaagcaaaaatcatc

SEQ ID NO: 24994 - DNA, 660 bp, Legionella pneumophila
atgaaacctactgataaaaaacactggtctaaaatcgaatatctacaccaaagcgtaaaaaatccaaacatccatatcaagggtaaacacagttattatagcgatgcctggactggtagttttgaggaaaccgtcgttcggtatctttatggagatgaatacagtttacaaacctggcaaccacaatggcagattgatcaattatatattggtgattatgtttgtattgctgctgaagtgataattctgttaggtggaaaccataatcaccgagcggactggttttgtttgtatccatttgcagataaatacgtagaggcttatcaaggcaaaggcgatactattattaaggatggtgtctggcttggcatgcgtgctgttattatgccaggcgttactattggcgaaggagcaatagtggctgcaagcagtattgtaaccaaagatgtggagccctacagcattgttgctggaaatcctgcgaaaccagtcaaaaaaagatttgcagaaaacgtgattgaacgaattctggccttaggtatttattcctggagcgaagccaaatttaacttattaaaagactatatttgcagcaataacatagataaattagagcaggctagcaggagctatgatcaaaaccataccatagaaagcaaa

SEQ ID NO: 24995 - DNA, 1149 bp, Legionella pneumophila
atgagattattatcttttaaaaaatccaaaattgtttcaattggaactgaattggagtttcagattattgattgcagttcattgtctctggtttctcgttcaaaagaattgatgagagccttaaaagacatgcgctatcgcgaccaaattaagccagaaattacgcaaagcatgattgaaatcaattcatcaattcatcaatccgctaaagaaatgtatgacgaactgttagagctacaaaaaattttagtagaaactgctgcaagcattgatattgctttttgcggcggagggacacacccatttcaacaatggaccatgcaaaaaatttttccatcgaaacgattcaaaaaaaaatttaaccaataccgttatctcagcaagcgcgctactgtttttggacaacatattcatatcggctgcccaacaggagacgatgctatttatttaactcatgccttggcaagatatgtccctcactttattgcaatcagcgcttcatcgcctttctatctgggtattaatacaaattattgctcatcacgctcgactatttttaatgcttttccattaagtggtgtcattccctatctgagaaattggcaagaattctctgattattatcgcaaaatgtatcgttggaaaatcattgaaaatatgaaagacttttattgggacattagaccaaaaccagaacttggtacaatagaaataagagtctgcgacacccctttaactcttagaaaatcgattcttattactgcttatattcaagcattggcactctatctcctcgaagaaaaatctgtccagctgtctcatgatttatactatgtctataattacaaccggttccaagccagcagacatggtctggaaggagaattaactgtcactgataaagacagacccatacctatcatggatgacattcttgaaacaataaaaaaaattgaacaatacattaatggacttggaaacagcgaatatattgaggaactgtatagtgacgtcatcaataaacaaaatgatagcgttctcataaataaaatttataaacaagatggctcatttagcaagctggtagcagcacaatgcgaactatggttaagtgattcaaaggataggaaatggatgacacaaccttct

SEQ ID NO: 24996 - DNA, 1059 bp, Legionella pneumophila
ttgggaggtcaggaaaatgcttttacaaacaatgattataccgcctattatgaaaaattagatgctggccatctggctacaagcttcgaattggaagccgatcgcatgaataatttactgcttaatagcgaggaattcgctaaagaaattaaagtcattcaagaagaaagacgtttacgtactgacaataacccgcaggcacttgctttcgaacgttttctggccacagcgcatcttacagcgccgtacaatcacccggtgataggatggatgaatgatttgaaacaaatgaaagtagaggatttaaaaaaatggtacgaaagttattacgcaccaaataatgccaccttggtagtagtaggcgatgtgaatcctgagaaagtacatgccttggctgaacattatttcggctcaatagccaaacgtcccatagcgtctcgtaaaccccagcaagaaccctctgcgcttgggaaaaaaatggtttacattaacgcgccagcgaaactgccattactgttaattggctatactgtacctagtgtaaaaactgctaaaaataactgggaaccttacgccttggaaattatcgccgggatacttgatgccggggaaagtgcgcgctttgccaaacacctggtgcgaggcaatcaagtagccactggtgcagaagcctattataacctctattcaaggtaccaaagccaatttattgtctatggggcgcctagccaagatcatcaaataaaagatctggaaaaggcattaattacggaattggaagccttaaaaaaagcgcctgttagcaatcaggaattacaaagggttaaaaatcaaatcatagcacaaaaaacttttgaaaaagattctatttttggtcaggccatggagttgggattgttagaaacaataggtctgggttggaaaaatacggaaacatacaccaaagccatcaatgaaataacccctgagcaaattcagcaagttgcgcaacgatattttcaagaaaataacatgactgttgcagaattaaagccaatcaggcaagaagaggtaagacca

SEQ ID NO: 24997 - DNA, 341 bp, Legionella pneumophila
aatatgctggagattggccctggtttaggcgctttaactcagccattattgcaaaaactgaatcaattaacagccattgaaatcgatacggatttacaaagctatttaacctgcttgcctgcatctcaaggcaactgaatttaattcctgctgatgcgttaaccgttgacttttgtcaattcggcccccatttaagagtagtgggtaatttaccttataatatttctactccattgctgatctatttattgaaatttataacttgtattgatgacatgcattttatgttacaaaaagaagttgtagaacgaatagcagcagcccacggcactaaagcctag

SEQ ID NO: 24998 - DNA, 1314 bp, Legionella pneumophila
atgaaaagccgcttatctgttttaagtcttgccttaatcactgtttgctcggttgatagcattagaaatcttccagcagccgctttagcggggaaccagctgttttattactttgcattggccttgctattctttcttctcccttgcgccattgttgcagtttggttctccaggcaatcagaacaaggtgtgtatgggtgggtaaaacaaggactagggaatcagtgggcattcatcgccatttggtttcaatgtattcagaatgttttaatttaccctaccttattgagttttattgctggcaccctgctctacagcatctcccctgatttagttcaaaacaaaagtatgctttttctaattattatttttttgatttggagtttaacctggattaatttaaaaggaattcatctctcaagtcgttttaactcttattgctccataacgggattaattcttccttttattattatcctgttcgtgggattgtactggtggattacgcaggttaaacctggtaccacagttctaccaccagccgaaccttattcctggacttcgcttactgcaattattttgtcattttgcggtattgaattagccgcggttcacgcacgggacagtaaacaaggggctttccctaaagccatagctatttcagttattacaatctttctgacgatgttatttggttcgatcgtattggctatgatcattcccccagaacaattaaattttatcagcagcattccccagctcatacaattattttttaataaaattggttatggatattttgcctttattattaatggattgatcgcaataggttgtataggtgcagcaaataactggctcattgcacctataaaaggattagaatttgcaataaacgaagggttcttaaataggcaactcagtcaagtgaataaacataacgcacctttcagattgttagtcgcacaagctttctgtgtatcgattattagtgctttatttcttatcgtaccttcgattaatgcatcttactggatcatgttgaatgcagcgacacaaattaatttattaatgtacctcttgctcttcattagcgctatcaaaatagtttcctcaaaaccgattttaagtaagctaaatataatgattcccgcttacctggggttggcaggcagtggcattaccttaattgtaagtttgacgccaccgccatcactcgccattagctccaaattgatttatgcattgcttggcgcaattttcctggtcataatgaccttgattcctatttggaggagacctagagttcttaca

SEQ ID NO: 24999 - DNA, 1110 bp, Legionella pneumophila
atgattaataaatcagcaattttagctttagctgatggcactgtttatgagggcctgtcagtaggggccagtggtgattctgttggtgagttggtttttaacacgtcaatgactggctatcaggaaatgcttactgatccttcgtatgccagacaaataattaccttaactactgctcatgtgggaaataccggttgtaacatggaggacatggagtccacaaaagtctgggcagccggcctcgtcatgagaaactgcactgcaatccctagcaattacagagctgaacaatccttcccagactggttaagtaaaaatggagtagttgcaatttctggcattgatacgcgcgcgcttacactgaaattgcgtgagaagggttctatcggagcctgtattagcaccaatgtggagaaacctgaaattgttgtggcaaaggctaaatcctttgcagggcttcagggtgcagatttggctttagaggttacaagacaaacgatagagcgttggcatgaaggtcggggaatgtggagtctagacaaacagcctcaacagcttcatgttgttgcctatgattttggtgtaaaacataatattttacgtatcttacatgataagggatgccatattactatagtccctgctaaaacttctgcagaagaggttttagccatgaatcctaatggtgtctttttatccaatggaccgggtgatccccaagcatgcgattatgccatcaaagcaacacaggtgtttttagacaataatattcctttatttggtatatgccttgggtttcagattttggctttggcatgtggtggtattactaaaaaaatgaaatttggacatcatggttccaatcatcctgtagttgaaacaactggcaaaaaacgtgtttttataacaagtcaaaatcatggttttgctgtagatgaggattcattgcccaattgcctggaagttacgcatcgttcattatttgataacagtttacagggaataaggcacaaaacaaaaccggcatttggttttcaaggccatccagaagcaagccctgggccacatgatatagatattttatttaatgaatttttaaatctgatgaaa

SEQ ID NO: 25000 - DNA, 1146 bp, Legionella pneumophila
atgaataaaagcctgatttttttagcaataggcatgtttacagtaggttgcaatacatttctaattgctggtctgcttcctcaaataggcgaaacgctcgagcagtcggttgcggtaactgggcaaggagtgagtctattcagtttgacttatcttttttcagcgccacttttttctctgattttggttaatcagccggtaaagcgtatgattcagcttgcgcttactgtcttcatgcttggcaatttaataacgctactttctgaaaatatcgtgctgtttttaattggaagatctctggcgggagcaggaaccgggatttttacgccgttatgtatcagcattgccattcattttaccaggccatctgccaaaggacgaattttaagttttatctggagtgctaacagtgcgggtgtagtatttggcgttcctgccggactttacttatcctccttgtttcattggcagttatcgattgccagtcttattattttaagtttgcttgcattgattggtttttcaatgcaaaacattgatataaaactacccaaaccttcgccatttggaggcaggcttcgtcttctgatcgagccaaaaacgctatcggtaattggaattacttgctttaccgctttggcaagtttgggattatactcgtatgtcaccctgattcaatcaggatcccctaattcgctcagtatgacgctattgagttggggactgggtggatttataggaagctcactgattggggtgtttatcgatcgaacgggtaaaccaagggttattatggccttaattttggttggcctcatgtttgctctgattgccataccattcaccaggaatctgccttacctgggattaatccctttttttatgtggggtgcttgcggatgggctatagtgactccccagcaacacattttatatgaattacatgaaaatcagggaactatccttgccgctatcaattcatcggccttgggcttggggtcagctttgggaacgttgcttggcggcttattgatttcctctggattcaggggaatctatcttcctttttctgctgccactttattgtttttcgtattgataattcagctgatagtaattaacacttcacataaggtaaataacata

SEQ ID NO: 25001 - DNA, 1881 bp, Legionella pneumophila
atgctgtttcaatacattaaaaagtttttcctatttctatgggttcaagcagtatctatttctttcctgttggcgatggcttctgtttcctttgctcaactcacagcacaagaccatgctgcccatcatcaaggagaaaaagaaagtgagggaatggggggcatgatgaaaaacatagggactccctctaaggaactgtacccttctttaatgaatttacccacattatcccccgaaaaacgccttgcaattcaacaaaaggcacatcaacgcatcacatccggcatggcgctcatgaaaggtggacttaacgagcttttgttggcatccaacaataacgattacgctaaaatgcaagaagctttagagaaattacgggaagggatagcgcaatatgagagtgcactggctgcacttcgcgcactgtctgaaggaaaaaatcctcgcgacatcgctttgcagtggtttaaacgtgaaatgaatcttcttccaagtactcctcaagccaaaaatgtcttaggcggtcctttttttcatttaacgattatcgctctatttggtctgttttttttggtcatgatttggatgtattttttcaaaatgagaagagcggctgctttgctcgatcgcttaaccaaacaaaatgcgactgtatcttcagagacaccaccccaattctcaaaagcacctgaaccaaccccttccttaacatctgtagagcctattaaatcctctcaagtttctaaagtgccatcagaaacagccccaactacgcctcctacctgccccgctcataaatgtcctgtcccgcaatttccagtcatgagatcgctcaccgaaccggaagagaaatgggaaggacaacttcgtgtttgccgtatctttcaagaagccccgggaatcaaaacgtttcatttggcatcaacccatgaggtggctttgccatttacctattatcctggccagttcattacgctcaccgccttaattaatggtaaaaccgtaagacgcagttacaccatggcgtccaccccaacccaattgcattattgcgccatcacggtcaagcgggaagaacaaggcgtgttttcccgttatttgcatgacgaaattaaagaaggggatttactggaggtgatgggacctaatggtaaatttacctttactggtgaagaggcaaagagcattgtactgatttgtggaggagttggtattaccccgatgatgagtatcatccgctacctcaccgatattggatggcacaatgacatttatttgctgtactgttgtcgcacgacgagtgagtttctctttcgcgaagaattagagcaacttcaagaaagataccttaatctccatgtgtacgcgtcgatgctgcgttcagagggaaccatttggatggggttgcaaggcctatttaccaagaacatcatcagccatcttgtccctgatattgcctctcatcgtatccacgtttgtggtcctcctgcgatgatggcagccatccttggtatcttaaaagaacttaaggtgcccgctgatttgattctaacagaagcatttggaccagaaaagaaaccagaaataatccaagaagacttagaggccatcaaagccgatacccgttcgatgatttcttttcggaaatctgaaaaaatggttccgattcttccagaccgtacccttcttgaaatcgctgaagccaatggaattgcgattgataatgcgtgtcgaaccgggcaatgcgggttatgtaaagtgaaattgctgtcaggggaagtgaccatggcttgtgaagatgcgctttcaaaggaagacaaacaacagaggctcatcttagcctgtcaggccaaagcgactcaaaacattgaggtggatgct

SEQ ID NO: 25002 - DNA, 504 bp, Legionella pneumophila
atgtcattcgatgaattacccaagtcagatggataccaagaaaaattggtatcggtaactcgtacggctaaagttgtaaagggtggacgagtttttggttttgctgttttagtagttgtaggtgacggaaagggtaaagtaggttttggacgaggtaaggcaagagaggttccaatagcaattcaaaaagctatggaccaagccaagaaaaatatggtttacattcctctttcaggtactacaatattccacgaaatcacatggaactatggagcttccaaggtgtttatgaagccagcaagtgaaggtactggaattattgctggaggtgctatgcgtgccgttttggaagtattgggtgtgcaaaatattcttgcaaaaagcattggttctaccaatccaagtaacattgttcgtgccactattggtgcattgacacacattggtacgccggactatgtagcagccaaacgtggaaaaacagttgaagaagtaatggcaggc

SEQ ID NO: 25003 - DNA, 690 bp, Legionella pneumophila
atggtttttaataatgaggttcctgtcattacgttggatggtccaagtggaacaggaaaggggacaatttgtcatttggtagctaagagactgcattggaatatgcttgacagtggtgctatttatcgtgttctagcttatgctgctcggaaaaatagcatcgaaccgaatgatattaaaaaattgactgctttggcccgttccctgaatttgcgttttgaatcatctgcggataatgaaacaaaagtaatacttgatgatgaaaatgtcagccagcaaatccgcagtgagcaatgtggtcaggatgcctcacaaattgcagtgattcctgaagtaagagcagcactgcttgaacgccagagaaactttgcccaatttcctggattggtgaccgatggacgcgatatggggacggtggtttttccaaatgctgttttgaaggtttatttatatgcaagtgcagaagaaagagcaaatagacgatatttacagttgcaagataatggaattaatgttagcctcgcccaggttgttgaagaactggctaaacgggatgcaagggatacagctcgtacgcatgcgccattgaaaccagctgaagatgctgtcttgatcgatacaaccggactaacaattgtacaagtgttcaatattgtattaaaattaattgatgaacgtttgaataatttg

SEQ ID NO: 25004 - DNA, 993 bp, Legionella pneumophila
atgaatgaatataatttgcctttgaggttatctcgtttaagaaaaaatgctatgtcgagagcattagtaagagagaccaggctgcacgcacaacaactgattgctccattgtttattagtgaatatttaactgaaccaaaagaaatcggcgctatgccaggccaatttcaactcggcctcaattgtatccctgaagaaatcgaaattttatcaaaatcaggcatccctgcagtcatcttattcggtatccctaagcataaggatgcttatggcagtgaatcatttaatagtaatggaatcattcaacaggctataaaaaaaataaaatctgttaatagtgacatgttagttatcaccgatctttgcttttgcgaatataccgatcatggtcattgcggggttctgaatgggactcaaattaatattgctgccactttagagttgttaggaaaacaggcggtaagtcatgctgaagcaggtgctgactgggtagcacccagtggcatgacagacggaatggttttagctatacgccaagccctggatcatgcttcatttcatgaaattcctattttaagttatagtgccaaatattgctcgtgcctttatgggccttttagagaggcagcgcagggtgcaccacagtttggcgataggaaagcgtatcaaatggatccggcaaatagtgaggaagctgtaagggaaacccgattagatctggaagaaggcgcagatatgattatggttaaaccagccggtttttatcttgatattatttataaacttaaacaacattttgctgatgtaccgctttgtgcctatcaggtcagcggtgaatattcgatgataaaaaatgcagcaaaaaataatctaatcaatgaagaacaagcaatgactgaaagtctcattgcgattaaacgtgctggcgctgattttattatttcttattttgctaaaggcatggctgagttattaaactctcaaaattttatt

SEQ ID NO: 25005 - DNA, 1020 bp, Legionella pneumophila
atgctaagaaataacattccggatcaacacctcattgagcttttgaaagtctattatggaattgatattcatactgtacaactcatcgtgggcggtgctgatatgaatgcctttggatataaagcagattcagaatccaattcttatttcgtaaagctaaaatacggccatcatgatgaaattaatttatcaatcatccgtctcttgcatgactctggagtaaaagaaattgtttttcctatcaacacactcgaagcaaacttatttcagcaagtggatcatgttaaaataattgtgtatccatttattgatgcgcccaatggtttcaccaaaaatttaacagaaaaacagtggaaacagcttgggaaaatattaagacaaatccatggaacctctgttcccacctcgatacaacagcgattaagaaaagaaacttactcgcctaaatggcgtgaaatggttaggtctttttacagtcaaattagatttgatgagtctgatgatcaaattaccactgacttcaaatctttttttaatcaaaatatcgactctatccatcaattagtcaattcttcagaagaactgtctaaaaaaattcgacctgatttcgaaaaatatgtactttgtcattctgacatacatgcaggcaatgtgttggtcgttgatgaggagtccatttacattattgattgggatgagcccatgttcgcaccaaaagaacgtgatttgatgttcattggcggaggcattggtaatgtatggaataaacctcatgaaattgattgtttttatgaaggttatggtaaaacaagcatcgataaaaccattttatcttattacagacatgagcgaattgttgaagatatagccgtgtatggacatgacttgctttcacatgatcaaaatgctcagtccagacttgaaagttttaaacattttaagtcgatgtttgatccaaatgatgttattgaaatagcttttgcatcatattttaatctcttatttttccgcattattcaa

SEQ ID NO: 25006 - DNA, 744 bp, Legionella pneumophila
atgcatgaccatatgataacgtttcaactagcaactcattttttatcaagaattgccttgcgcctggagtacctctttaaaaccatcaatgaagcttgtaatgagtctcatgaggttattcatcgttttgcattaaagaatataattgagattgttgaaatagttgaaaagccggaattaaaaagcagatttatcaaagagttaattagaattgagcatgtacttaaaaaagccaatctattgaatcatagtgagttatttgatgatctggaaacacaaattcatgtgttaaatcatgtaccaggtcgatttagtaacaaaatccatgatgatgaatttttaaaaactttaagacaaatacaccaccccaatactaaagaatgcgaatttaattcccctcatttggtattgtggtttgattcagatcccctaatgaggcaaaaaacaattagtcaatgggtgtcatgcctgaaggatctggaagatactgtaaaaatttatttgtcattgttacgaggtgttactcagtatactcccattagagcaaataatggattctatcagcatagtctttcacctaaatcacttaaccatctgatcttgttaagaatagataagaaattgaaaatgatacccaaaatccagttagggcatcatagtttaactatcaggctttatgagcttgtcactggtcaagaaatcagagataaaacaatagagatggaaattgcattttgccaaata

SEQ ID NO: 25007 - DNA, 1140 bp, Legionella pneumophila
atggggtggaatgagccagagaagggcaaagatccatggtcgggtaaaaatcaacctccggatttggatgaagctcttaaacgtatccaggataaattgaagaaaacattttttggaggcacgggcaaatcaaataataattcgtcaggtggttccagtggcggattgcttgctgtaacagttttattaatagcttttattctttgggctctttctggtatttttattgtggatcctgcagagcaagctgtgatactccgctttggtaaatatgtagaaacagttggccctggtcctcattggattcctcgttttatctcatcaaagattgttatgaatgtggatagggtgctagattactcctactccgctcaaatgcttaccagtgatgaaaatttagtatcggtctctttggctgtccagtaccgcattaatgatttgagtgagtatttgtttaatgtcgcaaatcctgaggaaagcttacaacaggcaacttccagcgctttaagacaagttgtaggtacgacaaccctggatcagataataactgaaggtcgagaagtttggggaggtagagtacaagaaactctgacgaaaactttagaaagctataagaccggaattttaatcgttaatgtgtcaccccaacctgccagagctccagaaagtgttcaggatgcttttgatgacgcgattaaagctcaagaggatgaaaaacgtttcaaggaacaggcttatgcttatgcagcaaaagtggtgcccattgcagaaggtaaagcgagtcgtattcaacaggaagcagaagcttattcgaagcaagtcgtcttaagggcacagggagaagtagcggaatttttagccttacttcctcaatacaatgcagctcctcaagttacggctaaacggatgtatcttgaagctatgcaaaaagtaatgaataagagcagtactattattgttgacagtaaagcaggaaatttattgtatctacctttagataaactacttggtaatcaatacgttccgcaatctgaaaatctaaaagccataaaaaatggtacgaatgtcagtaatgaggaggacaacttgattctttctggaagagatctcacaagaccaacttatagtcaagggagagat

SEQ ID NO: 25008 - DNA, 267 bp, Legionella pneumophila
atggcagaaacgttgtgtgacgaattaaaattaaataaaccagttgctaaagaaatggttgaaaatttttttgaagaattacgccatgctcttgaaaatggtcagcatgtgaaattatccggttttggtaattttactttgagagataaaccacaaaggccaggccgcaatccaaaaacaggtgaagaaattcctgtggaagccagaagggttgttacctttaagccaggtttaaaattaaaaacgaaaattgaaaaaataggaaag

SEQ ID NO: 25009 - DNA, 2376 bp, Legionella pneumophila
atgattaatattattaaaaacagaaacaagaaaaaccatactgcttccactgagttgaaatcaaaaattaagaaggagcaggtcaaactgctttttgatcaagttggtatggctatatcaggtgaagctttaacagtaactatactacctattgcattatggtctgttacaaatcatgagctgcttattatttggatgatttttacttatgttttttcagatctttataaaagcatgctgctcttctattacaataaacaaccaacattattttcaaccgaaaaatggttgttcctttttaacttgggtgttgtaagttctggcttggcatggggatttgccagttcaattatgattccagcctcaagtacattgcatcaaatctttgtcgtttttcttattacaggagttacagcagcagccaattcgctctattcacctgtgcgattatcctattttttatttctggtcactgcttttgttcctttcactatatggttattttcaaaaggacaagtttatttattgttggggttttgcggcattatttatttggggattatgttgtttatttcatattactcaaacaggattttgattaataccttaaaaatgcgctttaaaatctctaatttgaattcaaccaaagatattttagaaaaaaaagtagcggacagaaccaaagaattggaaaaaatcttggctttaaccaaatcaactttagagtcaacagcggatggtattttagttgttgatctcaaaggtaatattgaattctgcaatcagcaatttctcaagatgtggggaattgctccagggtttattgacagtcataatgacacagaaacaattcaatatgtattgaatcagcttaaaaatccggaagaatttttaaaacaaattaaagaactatacaataatccaaagcaggaaagctttgatgaattgcatttcaaagacggtaaaatctttgagagatactcacaaccacattggttagacaataaaattatagggcgtgtttggagttttagagatgagacattaagaaccagattagcttatcaagccaatcatgattctctaactggtttacccaatcgtacagctctatacgatcgcctggatcacgcgattaattactgtaaacgattaaacacctcattatcggtattatttctggatattgataattttaagttaattaatgacagcctgggccatgatgccggtgatatattattgtatgaattttccaggcgtcttaaaggatgcatacgtcatagcgatacagttgctcgatttggcggtgatgagtttgttttgttattgatgaccactgaacctaaagatgttattctaatagcgcaaaacattttaaaagctgtagcgcaacctatcaaattgcctacccaggaagtcatagtgacgacaagtataggaattagccttttccctaaagatggcattgatgcaagcaccttactcaaaaattccgataccgcaatgtacctggctaaaaaggaagggcgcaataatttccaattttataataattcgatcaatcaacaatcgctcaaacgccttgagatacaaacacagatacacaatgcaattaaaaataatgaattttttattctttaccagcccatttataatttacgtagcggtgaattagtaggtgccgaagccctgatacgttgggggcatcctgcaataggactcctctctccggatgaatttattcctattgctgaagaaaccgggttgattaaccaagttggcgagtgggtgttaagaaatgcctgtgttcaaaataaaacctggcaacttatggggttaccgcatattagtatttccgttaatgtctcatggagacagttaaaaaatagcaattttatcgagattgcagaatctgtattaaaagaatccagactagatcctcagtatttggaaattgaattcaccgaaagtactatgatacaaaaatcaacgcccattgattcaacgttaataaaaatttcccagttgggcattaaaatggcaattgatgactttggtaccggttactcaaatttaagttatttaaagactttccccttcgataaacttaaaattgatcgttcatttattcaaaactgcaccactaacccaaatgatgcctccatagttgaagcaattattgccatggcccatagcctggaactcaaagtattggcagaaggagttgacacgattgataaagcgttttttatgcatcaacatggctgtgatgaagtacaaggtttcctttatggcctacctgttaaagctgataagtttgtgaaattaatgcaaaaaactaaaatccgccattcaaaatttattaataaaaca

SEQ ID NO: 25010 - DNA, 1020 bp, Legionella pneumophila
atgaaaattttttcattgctgctcgctcttcttacatttaaggcattctccaatccagtcgtcaatgtctatgcctggggaggtgaaatccctaaaaaaataattcatcaattcgaacaagagtcaggaattaaagtcaatttttcgacttatgatagcaatgaaaccatgtatgccaagctaagagccagtcaaaagaccatttacgatgtcatcctcccttccgcttattttgtagagcgcatgcaaaaacaaggcatgttgcaattactcgatcataaactgcttccgaatcttcataatctggatgaacaatttgttaaaaatgattatgatccgggtaaccgttatagtatacccatcatctggggagcaaccgggattttctttaatcataattccgtatcgaacccgccaaaaaactggcaaggcttatgggataaaaagtggcgtaatcagctaatgttacttgatgattcacgcgaaatatttgccatagctctgatgagtttagggtttgatcccaatgataccaatccaaaccacataaaagcagcctatgaacacttattgcaattggtacctaatattaagttatttgccagtgatagtattcaagccatcatgatagatgaggatgcttttattggatcagcatggaatggcgatgccttcaaagcacatacggaaaacaaagccattgagtttatttatcctcaagatggttttgtgatttgggtagattgtttggctatccctaaaaaccccccacacctgaaagaggcgtatcaattcattaattttattctgaaaccggaaacaagcgctcaaattgcactaaaggaaggacatgcaattaccaatgccgcaggaagagctttattgccattgcctataaaaaataatcctgtggtttatccgccagacaaaacactaaagaagggttatttccaacgcgacatcggcgaagaaacactagcgctttataatcaatattgggaacagttaaaacttgctttt

SEQ ID NO: 25011 - DNA, 1278 bp, Legionella pneumophila
atgttagataatcaattacttcgagagaatcctcaatatgtagcaacccaattgctgaaacgaggatttcaatttgatgcggtcactttcagtcagttggaagaaaagcgtaaggctttgcaagtaagtacgcaatcattacagaacgaacgaaatttgcgttcgaaagccatcggtgaagctaaatctcgaggtgaaaacatagggcctatgcgcgaagaagtgaataaacttggcgctatactggagcagcaaaagactgaactggacgaggttcttaaacaaattgaggtaattagcctatcattacctaatattcctcatgaatcagtacctgttggtaaagatgaattggataatcaggaaatcagaaaatggggcgacgtacctgctttttctttccctgtaaagtcacatgatgaattgggtgaagcgctagggcaaatggattttgcgcttgcagctaaaattacgggcagccgttttgtcgtcatgaaagggcatctggcccgattacatagggctttaattcaatttatgctggatatacatattcagcaacatggttaccaggaaatatatgtaccttatattgttaatgcggatagcttactagggactgggcagttaccaaagtttgaggctgatttatttaaattaacaggagataatgggtactacttgacgtctacttcagaaattccagtgaccaatacagtaagggaaatgatattgtctgctgagcaattacctattcgttatgtttgccattccccatgttttcgtagtgaggcgggttcttatggtaaagacacaaagggaatgattagacagcatcaatttgagaaagttgaactggtctggattaccaaaccggaagattcttataatgctttagagcaacttactcagcatgctgaaattattttacagcgtttgaacttgccttaccgagtggttgctttgtgtaccggggatataggtgccggttcagccaaaacctatgatcttgaggtttggttgcctagccagaatacttatcgagaaatatcctcttgttccaatatggaggcatttcaggcacgccgaatgaaagcgcgtttccgcaatccggatactaatgagattcaattagtccacactctaaatggatcaggtttagctgttggaagaactttagttgccattatggagaattatcaagatgagcatggaaacattcatataccggatgctttgaagccttatttaggtggtattgatatcatctctgtgaaa

SEQ ID NO: 25012 - DNA, 4317 bp, Legionella pneumophila
atgattaaaagcaagacatttagttgctatattatcggtgaagctaatataactcttcaatgtgcagatatcctattagcaggaggccataaattacttggcataatctctccatcaaacaccataaaaaaatggtgtactgccaattccattgcttatcttgagaacatcaaggaatttgaaaaaaatcatatggacgaagaatttgatttcttgtttagcatagtcaacagtgaaatcattcctcaaaaaattttaagactccctcgttattacgccataaactatcataactccccattacccaaatatgcaggattatatgccacttcgtgggcgatccttaatggcgaaactcagcatggtattagttggcacattatgaatgaagtgatagatgcaggtgatattctaaagcaaccaacttttccaataaatgatctggatacggcgtttagtttaaatctgaaatgttatgaacaagggatctattcctttcatgaacttgttgaagagctttcatcccacactacgacttcggttaaacaaaatctgtcatgccgttcttattatggtctaaaaaacaagccggcaaattttggatttatttcatgggaagaatcttcagaaagcattgatcggctctgcagggctttaacatttggaaattataccaatcagttagaagtacccaagattatgattaataaggaaatttatgttgtaaaatcttatgaaaaattaaatatatcctcaggagtaaaaccaggcaccgttgtgaataactcgaatggtggcttacaagtagctaccggaacaacagatatattgattctagagcttactgatcttgagggcagaacatgctcaatggaagaattaggcagcttatttaaaatgactcgctactcacaacttgacacaattgaacctgcgttttttgaaaagctaacaatttgtcctgctaaaaaaccaaaaatagagaagttctgggtcaatgagtttttgaaatgtgctcaagaaaagaattcatttttatctccactatcccaactcgataaaacatcatgttcacttcacgatagaaaaacagtaacacaagtacctggtgagttactcgcaaaattgaaaaaactatgccctgagcattggcaaataaagaatatcttattaactagcctcttaatttacctatatcgattaaataattacagtaatctctcgattgcattcattaattcacaattgagcagtaatgatcctgatttaaataagcttttatcagactatgtgcctttaacaacgcaatttgatagcactatgacatttatggacgcattgacatttgtctcaaaagaacagggaaagttatatgaaaacagcacttacactagagatattttcatacgctaccctgagctacataatgctttcaaccatattgatgtcagtatcacctatattactgactcaaaagcagtggcaccttgtgtcggcgataaaaagttaaacttctgtattgcagaggattgttcctggttttatgttaataataaaacaaattatagagcccatttggaatcttatgctttttttgaaaatatgaatgagcatttgctgactttattggaagatatagtcagtaaccctgataaaaagatattcgaactttcaataatcagtaaaaaggaaaaaaacgatttattggtagtctggaataacactcagtgtgattacgattatgaaaaaccgattcatcaatattttgaagagcaagtttccaaaacacctgacgaaatagctgctgtctttgagaacaaatcaataacttatgtagaacttaaccgaaaagccaatcaattagcacactatttaagatctcaaggtgtaaaacaagatgacctggtagggatttctttaagtcgcagtttggaaatggttatatgcattttaggcattttaaagtctggaggagcttacctgccattagatcctaattatcctgatgagcggatttcatacatgctaatggacagtaaaactaacctgctgataacagatcaagaattcataaagagaaaaccacatggattcaatggcaaaagtattgagataaattcctttttaaatttaaaaaacctgtcttctgaaaatcttcaagcaattaacaaaccatccgatttagcctacattatttatacttccgggactacaggaaaacctaaaggtgtagccatatcgcatcgttctatttgcaatcacatgttgtggatgaagaaggaatacgcttttaaaaacaaggatgtatttttacagaaaacccccttctcgtttgatgcctctgtttgggagttttttatgccacttctggttggtggtaaactggtcgttgccccaaatgatgcacataccagtcccaatcaaatgatacgcctaatcagagagaacaaagttagcgtattgcagatcgttccttctatgctaaaagaattagtatctaacgaagagtttggtctctgcaaatcactcacgcatgtattttgtggtggtgaagcccttttatcagaaacaattaatgctttttttaagtacaacttctcagatacaaaactacataatctctatggaccaacggaagtaaccattgatacaactgcttatacatgtaccgcaggagatgcaaaaggcgatgtaagccgaataggcaaaccgataatgaacacaaaagtgtatgtattagatgcaaaaatgcagcctgttcctattggaataatgggggagctttatatttcaggagatggtttagcacgtggttatttaaacaaccctgaatttaccatacagaaatttttacccaacccattcagcaacaataaaaatgatcgattatacagaacaggggatcttgtcaaatggaattccaacggagtcctggaatatcacggccgatgtgataatcaagtaaaaattagaggatataggatagaaatcaatgaaattgaatcctatttggaaaaaattccttccatccatcaatgcattgtgaaaccggaaaaaaaccaggacgactcaatgtctttatcagcttatttggttttggaaaaaaattctcaaatatccgctgtagatattcgggctatattaaagcagaatattcctgaatacatgatcccggcccgattttatattgttgacaaattttttagcaccccaagcggtaaaatagatagaaaaatgttaccaatcccatccaaacgattacgttcgggtactaattatgctccccccaataatcctaaagaacaattattacacaatatctggtgttcggttttaaaaatagataatttgggaatttacgatgattttttcgaacttggcggtaattcactatcagcaatgaacataatatcacatatacgggaacaattttcactgacattgagcgttagaacattatttgattttcccacaatatcctctttatctaaagcaatagagaacatataccataagaagactgattgtatatacaatcagtcttctggaaatcatatcatccctcttagaacagaaggagaaaaaacacctctgtttttagtacatccaattggtggaagtgttttttggtacaaacttcttggacaatattttgataaagatagaccattgtatggaatacaggatcctgggcttgatagaaatgaattgatatttagtaacctggaagaaatggctagtgcatatgtccattcaattcaggctattcaaccaagcggaccttacatacttggtggcgcatcatttggatgtactgttgctattgaaatggcgaaacaattagaggaaaaaggagaaacagtaatttctattatctcccttgatggttgggcattttacccttccttacaaaacaatgagctttattttcaagaagttatgaaagaacaaaattcaagaattctaaagaaatatattgaaaataacgtcagtaactccaaatttttattagaattacaatggcatagagaaaacatgttgactcaatataaaatgccaattattaaacccaaatttattttatttaaggcaaaaaaacttacagaaatgtttcaatataatgctagtttgaattggtgggaaaattatacaagtcaaccaattgaactacatttaactcctggtgatcatgaaagcatgttttatgagcctaatatcaaaatcctggctaccaagctcaatgatagcttaaatgagcaggatattaagcattaccaattcaatgatacactgaaggattcatttatagatcaactc

SEQ ID NO: 25013 - DNA, 1515 bp, Legionella pneumophila
atgaagcatggtttatttgctcatctcaaacacgacttaccagcatccattgttgttttttttgtggctttacctttgtgtctgggcatagcattagcttcacatgttcctcttttttcaggaattattgctggtgttattggtggagtagtcgtagggtttatcagcggctcagcgcttggagtgagcgggccagcagcaggacttgtagcaatagtcatttcctctgtagagacattaggcagctgggaagcttttttgttagctggggtaattgctggaatattgcaattaattgcaggttttctgcgaggtggaattattgcttactattttccctcctccgtaatcaaaggcatgctcacgggaatcggtattattattgttttaaaacaaattcctcatttattagggcacgacgtcacgccacttctattgagtatgtcggatggtgaattggatattaatgacatcagagaagcattggatgatattaatcctgaggttgttattatcagcattgtttctcttttaaccctgattttttgggagaagctggtaaaaaaacacaaactgtttgaaatgatacaaggcccccttgtcgtggtcatcctgggaattgctttgaacttgttttatgaacaccgattaaccagtttttcccttgatccatcggaactggttcaactgccgaaatttaacaaagcatccgaattatttaattatttaacactgccagatttttcgctaattactcatttgaaaatatacaaaatagcaatcctcattgccctaatcgccagtttggaaacactgctctgcgtagaagccgttgataaactggatccctacaagagagtaacgtctacagaccgtgaattaaaagcccagggagtaggaaatattctctcttgcttgattggcggactaccgattacacaggttattgtgcgtagtagtgccaatgtcgcttttggagcaaaatccaagctgtccgctattttacatggcttattactttttatttgtgtcatcagcataccagaaatactcaatgaaattccacttgcatcattagctagtattttgattattataggctataagttagccaagccggctttattcaaacaaatgtataaaatgggatgggaacagtttgtaccctttatgattacaattattgggattatttttagcgatttacttttcggaattacactaggattttcactagctatttttattatcttgcgacatcactttcttaattcacatgatatgattaaaacccgtggcaaaaacaaaacccaatactgccttaaactggcagaagaggtaacttttttaaacaaaggaagtataatcaacgaattaaaaaatataccagaaggtgccgaggtagttattgatgggtctcgctctaaaattattgatcatgatattaaagaagtcattcaaaatttcatattgaattcaaaaaccaaaaatattcaagttaaattaataggaatt

SEQ ID NO: 25014 - DNA, 1401 bp, Legionella pneumophila
atgacagaagtctttactataaaacaatgtctcgacggcgaaatcagtattgatgaaaccgttacggtaagaggatgggtgaaaactcgaagagattcaaaagctggcttgtctttcatcagccttcatgatggctcttgcttttctcccatacaaatcgtcgctaccgatcagttatccaactaccacaaagaagtaacaaaattaactgctggctgttcaatgatagcgactggaaaattggtagcatcacaaggaaaagggcaattttttgaaatccaggccgaatctattgaagtggtgggatgggttgaaaacccagacacataccctattcaagccaaacgccatactcttgagtttttaagagaagtggctcatctgcgccccagaaccaataccataagcgctgtcaccagagtacgtcattctttggcgcaagccattcatcgtttttatcacgaacaaggctttttttgggtgcatacaccgatcattactgccagcgactgtgaaggagcaggagaaatgttcagagtatctactctggatttattaaatatccctaagaatgataaaggacaaatcgatttcagtaaggatttttttggcagagaaacgttcttaactgtttctggccaactaaatgtcgaagcttattgtatggccatgtctaaggtctacacttttggaccaacatttcgggctgaaaattcgaatacaagccgacatttggctgaattctggatgatcgaaccagaaatcgcttttgcaaatctggaagacatttgtaaactcagccaaaatatgctgcgttatctctgtaaaacggttcttgaagagcgtgccgatgatatggactttttcaatcaatttgtcgccccaggttgtatagaacgtatggaacatattgcggattctgaatttgaaattatgacctatactgatgcgataaaagcacttgaggcgagtgaccaaaaatttgaatttccagttagctgggggctggatctgcaatcagagcatgaacgttacctggctgaagtgctttgcaaaaagcctgtcattgtgacaaattacccgcaagaaattaaggggttttacatgcgtcttaatgacgatgggaaaacggtagccgccatggacgttttagctccaggcatcggagagattatcggcggcagccaacgcgaagagcgcttggaaatactggatagacgcatggacgaatgcaacctgaataaagaacattaccaatggtatagagacttgcgtcgttatggcactgttcctcatgccgggtttggcttgggctttgaacgccttatcagctatgttacaggagtatccaatgtgcgagatgtgatacctttccctcgcacaccaggccatgccgattat

SEQ ID NO: 25015 - DNA, 984 bp, Legionella pneumophila
atgaaattgttacgcggttctactcattttgctatatttgataagggtgcagttgccactattggcaattttgatggcgtgcatttagggcatcagcatttgattaagaccctaagagcaaaggctgatgaaatgaacttgcctttagttattttattgtttgagcctcagcctaaagagtattttcacagagagaaagcaccagcacgactttctaccttgagagaaaaaatagatgtcttaaacttatgtcaggtggattacatctattgcatcaagtttgatgcaaggctggctcaaactcccgctttgtattttgctcagttttatttatttgaagcattgaaaatacgctaccttctggttggccaggattttcgttttggcaaaagcagagaaggtgatgttaatttactcaaaacactaggtgctaattattcctgtgaagtgacagtgcaatctgattttcttatagaaaatgaaaaaatcagttcgacgagaatcagagaagccttgcaacagggaaatttacgtttcgcagccaagttgttgggaagaccatacagcatgtgtggacgtgttatcaaaggggatggtcgtggtcgtcaatgggggataccgacagccaatttaggcatgcatcgtttatcgatccctttgcaaggtgtatatgctgtacaagtccatattaattcgaatgttttttatggggttgcaaatattggaaagcggccaactgtagctggaaccaaaaatattttggaggtccatttatttgattttcacggatctctgtatggtcagctagtgcaggtaattttcttgcacaaacttcgagatgaagttaaattctcaagtgtggaagcgttaattacgcagattaatagtgacatcatattggcaaaggcctatttaaaacagaattggcttgatagtgtgattgattcatcgaatgatgttgcgaatggaatcaataataccgtt

SEQ ID NO: 25016 - DNA, 618 bp, Legionella pneumophila
atggcaatcgttgcaaagcgcaccataatgtctttattttctgatgtagatgatgtttatagtcaccaagttcgtatcgttctggcagaaaaaggagttaatgttgaaattcttgcagtaaagcaagatgagcctggagctgacctattgtctattaatccttatggaaccgttccaacattaattgatagggaacttgtattatatgaagcaagaatcattatggaatatttggacgaacgtttccctcatcctccattattaccagtttatccagtagcccgtgcggaagctcgcaaaatgatgcatagaattgaacaggattggtattatttaatgaacgctattttgcgggaggaatctgtagagcaagccagagctaatttacttgaaagtttaaccagtttagatcctgtctttgcagataaaccttattttttaagtgatgagttttcgcttttggattgtgcattggctcctttattatggcggttacctaaattaggtttggaaattgcgcctaattttaaaggaataatttcctatatgcagcgtgtgtttaaacgtgattcttttcaaacaagtttgacggacgctgagagacaaataagagcagca

SEQ ID NO: 25017 - DNA, 1464 bp, Legionella pneumophila
atggaaatttacaaaatgtacattgatgggaaatttactttagccaaaagtggggctacacgtgacatttttgatccggctaatggggatttgattgcaaaagtgccagaaagtgctaaagaagatgccatacttgctatcaaagcagcgagaaaagccttcgatgaaggagagtggagaaaatcactggcgcttgatcgaggcaaattgttattcaagcttgctgatttgattcgagccaatgctaaaatgttggcagaactggaaactcgaaattgcggaaagccgttactcgaagcggagtttgatgtcactgatgctgccaattgctttgaattttacggtgggcttgcgactaaaattcatggtgaaacgatgtcggttccagcgaattcatttagttacgtagtacgtgaacccataggcgtgtgtggtcaaatcattccatggaattttccactgcttatggcggcctggaaacttgcccccgcacttgccgcaggcaataccgtggtattaaaaccatcagaattgaccccgataacggcacttgagttattcaagttgattgatgaatgcggatttccagcgggcgtggttaacctcattactgggccgggtataggagttggagaggagttggcaagtaatgctatggtggataaggttgctttcaccggaggatcggcaacaggcagaaaaatcatgcaggcggctactggcaatttgaaaaaaatctcgttagagcttggcggaaaaaatccaaatattgtctttgcagactctgaccttgaaatggcaatcgacggtgccctttttggtgcttttgcaaatcaaggggaagtctgttctgcgggttcccgcttgctagtggagcgctctattcacaaaaaaatagtagagggaatgttgaaaaaaattccaaatatcaagcttggccatggtttggacgccggggtaaaaatggggcctttggtttcaagtgcacatcgtgaaaaagtggaaagctatgtcaagcttggaatggaagaaggagccaaattactttgcggcggtaaacgcccgacaggcaatgaatttgcaaagggacattttttcgagccaaccatttttgatgaagtgaaatccacgatgcgcattgctcgtgaagaaatttttggtccagtactcgtagtgataccttttgacactgaagaagaggccattcgcattgcgaacgatactgattatggtttatctggggctgtatggacgaagagcgttactcgggcccatcgagtcacatctcaaatccgtgccgggattctttgggtgaatcattaccatccaacctataatgaaatgccttggggcggatacaaacaaagcggagcgggtcgtgagttaggtttgtatggcattgagagttaccttgaggtcaagcaagtgaatattaatctggatgaaacaccaattggttggtac

SEQ ID NO: 25018 - DNA, 1605 bp, Legionella pneumophila
atgagtagtgataagacactaaatgtaaaagcaacagggatcattgcccttgctgttatgtgtagtcgagtattaggtcttattcgagaagtcttattcaatgctttatttggcagtgcttccatggggatttttcttatcgcattccgtgcgccaaaccttttgagggatttgtttgcagagggcgctctctccgtttcttttattactgttttctctaaaaaaattgaaactgaaggagaaaaatcagcttggcagctggcttcaaaaatgcttacattgaccagtgttttcatgagcatcttatgtctctttgggattatttttgccaaatacctcatttttattttagcgcctggtttttcagtgaaggatgctgaaacaacgattttcctcactcaattgatgtttcctttcattttattagtgtctcttgctgccatagtaatggggatgctgaattctaaaaatgtttttggtatgcctgcgttagcctcgagtttttttaacattggctctattcttggtggcgctttatgtggatggtttattgatccatcatttggagagagggcacttattggtttggcaatcggaacggtaatagggggacttttacaactcggagtacaatttcccagcttaagaaaggttggtttttattttaaacccaattttcattggtatgattctggggttcgaaacactttgattttaactattccagcagtgatcgccgcaagtgcagtgcaaataaatgtacttatcaattcaggatttgcctcataccttggaaaagaagcagtaacatggctcaacagcgcatttagacttatgcaatttccacttggagtgttaggtgttgctattgctacgattacattaccagtcgtatctcgtcttgctgcaacgaacaatcactctcaatttggatcaacactggctcgcgcgatccgtctagcggtgtttttgacaatgccagctgcagttggactttggttttttgcaacccccattataagcctcatttatgaacacggaaaatttcatgcgtcggattccttgcaaaccgcatatgcattgcaattttacgctcttggacttgtggcttactcatgcatcaaggtgctttcaccagccttttacgccattgataaaaaatggactcccatgattgtcagttttgcaaccattatcttaaatattattttgaattattttttaattttcaaattgagtatggggcatcgtggactcgctttgtccacaacagtttctgctactgttaattttttggttctatatgttctcatgacccgcttgcataatttgcagaatagataccttttcaacactatattacggtgtgttttagcatctgcaatattaggttttatgtgtcaatctatctttgcgtatggagctgacttcctttaccatccttcattttggatacgtgcagtttcccttgctatttcaatttctttcgctgtcttagtgtatctgagcatgtgtgtaatccttcgagtggatgaggcaaagagtatttttatgatcattcgtcatcgattaggattccctattaagttcaaatcaaaacaggta

SEQ ID NO: 25019 - DNA, 1380 bp, Legionella pneumophila
atgcttgatttgcaaatatctaaaaaaacggttgatccactaaaacgccccccgcattctgtagaggctgagcaatccattattggtggtttgatgctcgacaatcaagtctgggataaggtaagcaataaattatgcgaaaccgatttttatcgtactgagcaccgaattctttttagagccatttctgctttagccaaaaaagatcaaccttttgatgtagtgacgcttcttgatgctttaaaaacacgcaacgagttagatgatgctggtggagaagcctatttatttgagttggctaataacacaccaagtgtagcgaatgtgaccgcttatgcggatattgttcgggaaaaatcagtccagaggcaactgatagcggtagcaacagaaattgctgattccgcttataatcctgctggaagagaagtgcctgagctattggatatggccgaaaccaaagtatttgctattggtgaacaaacagcgagtgacgggggtccagaaaatattaaatccattttggtacgggcggtagagaaaatagatgccctctatcataatggtgatgcgattacaggccttgcgacaggcttatccgatttggatgaaatgacatcgggtttacagccttctgacctgattatcgttgctggccgtccatcgatgggaaaaacaactttggtgatgaatatggcagagcatgcggcaattaaagccggtaagccagtattggttttctctatggaaatgcctgctgattccctggcaatgagaatgatgtcttccttggggcgaatagatcagcatcggattcgtactggtaaattagatgataatgactggccacgagtgacctccgcggtgcatatgctttctgaagctcctttgtttatagatgatactccagctttaagtcctggagaaatgagggcacgtgccagacgtttagcaaaggaacatggttcgttagggcttatcgttgtcgattatttacaattaatgaaagtgcccgggtttaatgcagacaatagaacagcggaaatctccgaaatttctcggagtcttaaatcgctggcaaaagagttacaggttcccgtaattgctttatctcagctgaatagaagcctcgagcagcgagcagataagcggccagtgatgtcagatttgcgagaatcaggagcaattgagcaggatgctgacttaatctgttttatttatagagatgaagtatataatgaggacagtcctgataaaggcactgcggaaatcattgttgccaagcaaagaaatggacccataggcaaagtcagggtagcctttttgggtaagtacacacgatttgaagatttggcatttaatggttatcaaggggtagaa

SEQ ID NO: 25020 - DNA, 2205 bp, Legionella pneumophila
atggcacacaaccaccatgaaggtcattcccatgttcataatgaacacctttgttgccacaagaaagataatgcacataaaccgcaaattatttcagatggaacaattttctatacttgccccatgcatcccgaagttcgccaggctaccccggggatttgtccactttgtggaatggcattagaaccagaagcaatttccattggtgaagcaacaaatccggaataccttgatatgaagcaccgattttgggtggcgttgatattgactttgcctgtagtaatcttggaaatggctgggcatggattccagcattttgtttcgacaggtatttcaaattggattcaattgttgttcgcaacacccgtggtgctatggtgcggttggccttttttcctgcgtggttggcagtcactcaaaacacgccgattaaatatgtttactttgatagcgatgggtattggtgtcgcatggatttatagtgtggtggcggtttttttccccggattattccccgctgcgtttcgaagtcaggaaggggtggtctctgtgtattttgaagcagccgctgtgatagccacacttgtactgctggggcaagtacttgaattaaaggctcgagagcaaacaggtagtgccattcgtgctttactgaaattagcaccagaaaatgcgcatcgcatcaaggaagacggtagtgaagaggaaatagcactcaatcaagtagaggtcggtgattcgctgcgtgtacggccaggtgaaaaaatacctgtggacggtgaaatacaagaaggacgtagttttatagatgaatctatggtaacgggtgaacctatgcctgttgctaaaggaattggagacaaggttattggcgctacaattaaccaaacaggtagcttcattatgaaagcattgcatgttggtgcagataccatgctggcacgtattgttcaaatggtgagtgacgctcaacgaagccgtgctccaattcagcgtgtggcggatactgtctcggcctggtttgttcccgcagtgattttggtagcggtactgtcttttattacatgggggctattaggtccccagccatctcttggttatggcttaattgctgctgtatcagttctcattattgcttgcccatgtgcgttgggtttggcaacaccaatgtctatcatggtaggtgtgggaaaaggcgcgcaaaatggagtattaatcaaaaacgctgaagcacttgaacgaatggaaaaggtaaatacgctcatcgtagataaaacgggcacacttacggaagggcacccgaaacttacccatattgaaaccagcgaagattgggatgagagacaagcattgctattagctgcttctctggaatatcacagtgaacatcccctggctagcgcgattgtgaaagcagcacaagaaatgcaaatagcttttatctcagttcaaaattttgaagcgccaaccgggaggggggtagtaggtagagtaaatagccatcatgtagctatcggtaatgcaaaattaatgcatgagtatggaagcgacgatacttctctttttgaaaaagctgataaatttcgggcaaaaggttcttctgttatgtttatggcagtcgacggtaaaacagtagcgtttttagttgtagaagatcctattaaatctactaccgcagaaaccattcatgcacttcagaaaaagggtattgagatttacatgctgactggtgatagcaagaaaaccgcagaagctgtggcagctactctgggcataaaaaatgtcatagcagaaataatgcctgaagataagggtcgtattgtcagcgaattaaaaggaaatggtttaattgtcgcgatggctggcgatggagtaaatgatgctcctgcactggcaaaagcagacgttggtattgctatgggtacagggactgatgttgctattgagagtgctggtgttaccttgctacatggagatttgagtggtattgccaaggccagatatttatcagaaagcacaatgaataacatacgtcaaaatctcttctttgcttttatttataatatgctgggtgttccgctagcagcaggtattttctacccactaacaggcctgcttttaaatccagtgattgctgcgggagctatggcactttcttccgtgtcagtcatcgttaatgccctaaggttgcgacgagttacattg

SEQ ID NO: 25021 - DNA, 885 bp, Legionella pneumophila
atgagtagttattgtggttatattgctttagttggcaggccaaatgttggcaaatcaaccttattgaatcgtattttacagcaaaaattaagtattacctcgagaaaaccacaaaccacgcgccatagtattttaggaattcgcacagaaggtgaatttcagtttgtttatgtagatactcctggtattcatcagggtaatgcgaaagcaattaatcgcatgatgaataaaactgcgattagtgtactacgtgacgtggatgtgattgcctttctagttgatggaacgcattggaaagacgaagatgagtatgtgttgaatttaatcaaacaagctaaagttccttgcatcctggtagttaacaaagttgacaagataactgataaaacacaacttttgccctggatagagcaaataagtcagcgatatcaatttgcagccattattcctttgtcggcgaaaactggtttgcaggtggatgagctggaaggcaaattaaagaattatctgccagagggacctcatttgtttcctgatgatcaattcaccgatcggtctacaaaatttttatgtgccgaattgctccgtgaaaaaattttccgcttttgtggacaagaattgccttattctgtaacagtagatattgaatcatttaaggatgagggcaatttaattcgtattcatgccttgattttagtagataaggataatcacaagcgcatgatcattggtgataaaggccaaaaattaaaagaaatggcaactaatgcccgtttggacatggaaaaaatgctagataaaaaggtttttttacagtgttggtgtaaagtaaagtcaggctggtctgatgatgagcgaatactgaagcaattgggatatgaccag

SEQ ID NO: 25022 - DNA, 507 bp, Legionella pneumophila
gtgaataacaagacaaattgggttatcatcggccgttttggccgaccccatggtattaaaggctttgtcacggtacattccttcacagaccctgctgataatatcttgcggtacaatgactggcacgtttttttaaataaacagtggcagccccttaagttattgacaatagaagtaagaagtaaagcgattattgctcaaattgaagggtacccgaagcgtgaattagtctctgcattaaccaatttagatattggtgtgcaagaatcacagcttgcagctttggcaccaggtgagtattactggtatcaactgattggcatgagtgtcataaactccaaaggcgatctttttggaaaagttgttgaaatcatgcctactggctcgaatgatgtacttgttgtggaaggtgaaaaaagacatttaattccctatcttccaggacaatttgtaatcaatgttgatgaaagccagcaagtaatcactgttgattgggatatgaatttt

SEQ ID NO: 25023 - DNA, 1758 bp, Legionella pneumophila
atgaaagctataatcgaatatcttttgaaacaggcattaattaatctgcaacaatcaggcgaaatgccaattgatttggagattgaaataaaagttgagaatgccaaagatccagctcatggtgattatgcgactaatttggctctggtattagctaaaccatgccgacaagcacctaaagtattagccgagcgattggttgcagtaatccccgtagatccgtctgtagagaaaattgagatagctggggcaggatttattaattttttcatgcgcagcacggcacgctcgctcatcatttctgaaattttgaataaaggcaaggagtttggccgaggtaatttaggacagagccaaaaagtattgattgaatttgtttctgccaatccaacagggcctttacatgtaggacatggaagaggggctgctttcggagcaactttgggtaatgttttaaaagccgctggttacgatgtgactttggaatattatgtcaatgatgcaggcaggcaaatgaatattctcgctgtgagtgtgtggctgcgctacctggaattggcaggtgagccaattgtttttccggcgaatggctataaaggtcaatatgtttatgagattgcacaagagatttggtcagagcagggtaatcaattcgtgcatccatggatttcggtagtagaaaatttacctgctgatgaacccgaaggtggagataaagagacttatatcgatgcgatcatcgcgcgagcgcaatccttactgggcaaggatgggtttgctaatttccatcaacatgctttaaaaacggtattggatgatataaaagatgatttgcaggcgtttggtgttcgttttgacagttggttttctgagcaatcgttatttgaagatggttctattgagaaaggtattcaggccttgaaagatagaggccacacttatgaaagagaaggtgctttatggtttagggcaactgattttggtgatgaaaaagatagagtattagtccgggctaatgggcaaacgacatatttcgcttctgatgtagcttatcactggaataaatatgatagaggttttgatcgagtaattgatatttttggtgctgatcatcatggttatgtcacgagaatcaaaacagctgttaaggcattaggacatgatgaaagtgcattggatgtcattttggtgcagtttgccattctgtatcgaggtggtgacagggtgcaaatgtctactcgcagtggttcatttgttactttgagagagctaagagaagaagtaggaaatgatgcggctcgttatttttatgtggcaagaaaacctgaacaacacatggattttgacctggatctggcaaagtccgaatccagtgacaatcctgtgtattatattcaatatgcacatgcccgtatctgtagtgtattgagacagttaaaagaaaggggtttgaagtgggataaggatatgggacttaaaaaccttgatttattggagcaacaacatgaggccacattaatttctctgattgcccgatatcccgaagtcattcaatctgccgccgcttcttgcgagccgcatcagcttgcttactatttaagagagctagccaatgggttacacagttattataatgcgatccagctattatgtgagcaagaacaattgcgatgtgcccgtttgtgtttgctggagtcggttcgacaggttttaaataatggtttggctatactaggcgtatcagctcctgagagtatg

SEQ ID NO: 25024 - DNA, 711 bp, Legionella pneumophila
ttgattaatgacttcaaactacacactaatcaagttaacatagagaccttacactttatttttaaagtatccatgcgaacatcaagcttcctcgatagattaataggtgaagtcgatagtgcgcttcgaaccctcgttttgccacaaaaacgtattacaacgcgccaatctcccgctgaaaatctggctgatactgtgctttccgctcaggaaaaaaaacatatttcaggattaatgagattaaatcatgccggagaagtatgtgctcaagcgctttatcaaggacaagctttaacagcacgatttactcacatcaaagagcaaatggctagtgccgcggctgaagaagttgatcatttggcctggtgcgaagaacgtttgtatgaattaggcagcaaacccagccttttaaatcccatctggtattgtggttcggttctattaggcgccctggctggattggctggcgataaagtcagcttgggatttgttgctgaaacagagcgccaggtaaccgctcatttacaaaggcatctgcattatctcccggaaaaggataaaaaaactatagccatattaaaaagaatgcaagaagatgaggaacatcatgcgcatacagcgatggaagctggagcagttgaacttccctatattattaagcaattgatgaatgctgtatcaaaattaatgactcagagcagttattatatt

SEQ ID NO: 25025 - DNA, 744 bp, Legionella pneumophila
atgagcagtgaaagattacagaaaatattaagtcaagccggacttggatctcgtcgtgaaatggagcggtggattgataatggttgggtgcaggttaatggcaaaccagctaaactgggagattccgctggccctagtgataaaattagcgtcaaaggaaagttgattcccaaccctttaaaaagcaaacaaaacatccgggttcttctttaccataaacctgtcggtgaagtatccagtcgacatgatccaaaatttgaaaaaacagtatttgataatttaccgcatcttagacaggggcgttgggtgcaagtggggcgcttggatttaaatacttccggcttgctcatttttactaataatggcgaattggctaaccaactcatgcatcccaagtatggtttggaaagagagtatgccgtacgagttcatggtcaagtcagccaggaatctttaaataacttattgaaaggggttatgttggatgatggtttggcaaaatttaccaaaattcaatttcgtggaggagaaggaacaaattcctggtaccatgtgacccttaatgaaggaagaaatagagaagtacgtcgattgtgggagtctcaaggtgttgaggttagtcgattaataagaatccgttatggcatgcttacaatgcccagatttttatccagagggcagttttatgaacttaccccaaaagaagtgactgaatttcttgattcattacccaacgaattgtct

SEQ ID NO: 25026 - DNA, 9651 bp, Legionella pneumophila
tttgatgacgacggtccgagcgtgacgatggcggtgagcgataataatgcgatcaccttgaacacccaggatgcggagacgattggtgtactgtccgacaccgacagcgcaagctttgcggccgcctttgcggtgactcctaattacggggccgatggtgcgggcacaacggtgaccacctacgccttgagtgtgtccgcccaaggggtggatttcggccttgataacaacggcaacaacatctacctgtacaacatcgcaggttctgtggtgggttcaacatcagccacgcaggcgggtattaccacaggcaacaccatcttttcattggatgtgaacagcagcagtggggtggtgactttaacgcaacaccaggaagtggaccacggtttgccgggagccagttccaattacgcggctcaggaagcgatattgaatacgggcctggtctttttgaacgccaccgcagtgacgacggatggggatggggacacagccaccgccagtgcgtctttggatttgggcggcaatgtgaagtttgatgacgacggtccgagtgtgacgatggcggtgagcgataataatgcgatcaccttgaacacccaggatgcggagacgattggtgtactttccgacaccgacagcgcaagctttgcggccgcctttgcggtgactcctaattacggggccgatggtgcgggcacgacggtgaccacctacgccttgagtgtgtccgcccaaggggtggattccggccttgataacaacggcaacaacatctacctgtacaacatcgcaggttctgtggtgggttcaacatcagccacgcaggcgggtattaccacaggcaacaccatcttttcattggatgtgaacagcagcagtggggtggtgactttaacgcaacaccaggaagtggaccacggtttgccgggagccagttccaattacgcggctcaggaagcgatattgaatacgggcctggtctttttgaacgccaccgcagtgacgacggatggggatggggacacggcgaccgccagtgcgtctttggatttgggcggcaatgtgaagtttgatgacgacggtccgagtgtgacgatggcggtgagcgataataatgcgatcaccttgaacacccaggatgcggagacgattggtgtactttccgacaccgacagcgcaagctttgcggccgcctttgcggtgactcctaattacggggccgatggtgcgggcacgacggtgaccacctacgccttgagtgtgtccgcccaaggggtggattccggccttgataacaacggcaacaacatctacctgtacaacatcgcaggttctgtggtgggttcaacatcagccacgcaggcgggtattaccacaggcaacaccatcttttcattgggcgtgaacagcagcagtggggtggtgactttaacgcaacaccaggaagtggaccacggtttgccgggagccagttccaattacgcggctcaggaagcgatattgaatacgggcctggtctttttgaacgccaccgcagtgacgacggatggggatggggacacagccaccgccagtgcgtctttggatttgggcggcaatgtgaagtttgatgacgacggtccgagcgtgacgatggcggtgagcgataataatgcgatcaccttgaacacccaggatgccgatacgattggggcagccagtgacagcgacagcgcaagctttgcggccgcctttgcggtgactcctaattacggggccgatggtgcgggcacgacggtgaccacctacgccttgagtgtgtccgcccaaggggtggattccggccttgataacaacggcaacaacatctacctgtacaacatcgcaggttctgtggtgggttcaacatcagccacgcaggcgggtattaccacaggcaacaccatcttttcattggatgtgaacagcagcagtggggtggtgactttaacgcaacaccaggaagtggaccacggtttgccgggagccagttccaattacgcggctcaggaagcgatattgaatacgggcctggtctttttgaacgccaccgcagtgacgacggatggggatggggacacagccaccgccagtgcgtctttggatttgggcggcaatgtgaagtttgatgacgacggtccgagcgtgacgatggcggtgagcgataataatgcgatcaccttgaacacccaggatgccgatacgattggggcagccagtgacagcgacagcgcaagctttgcggccgcctttgcggtgactcctaattacggggccgatggtgcgggcacaacggtgaccacctacgccttgagtgtgtccgcccaaggggtggattccggccttgataacaacggcaacaacatctacctgtacaacatcgcaggttctgtggtgggttcaacatcagccacgcaggcgggtattaccacaggcaacaccatcttttcattggatgtgaacagcagcagtggggtggtgactttaacgcaacaccaggaagtggaccacggtttgccgggagccagttccaattacgcggctcaggaagcgatattgaatacgggcctggtctttttgaacgccaccgcagtgacgacggatggggatggggacacggcgaccgccagtgcgtctttggatttgggcggcaatgtgaagtttgatgacgacggtccgagcgtgacgatggcggtgagcgataataatgcgatcaccttgaacacccaggatgccgatacgattggggcagccagtgacagcgacagcgcaagctttgcggccgcctttgcggtgactcctaattacggggccgatggtgcgggcacaacggtgaccacctacgccttgagtgtgtccgcccaaggggtggattccggccttgataacaacggcaacaacatctacctgtacaacatcgcaggttctgtggtgggttcaacatcagccacgcaggcgggtattaccacaggcaacaccatcttttcattgggtgtgaacagcagcagtggggtggtgactttaacgcaacaccaggaagtggatcacggtttgccgggagccagttccaattacgcggctcaggaagcgatattgaatacgggcctggtctttttgaacgccaccgcagtgacgacggatggggatggggacacggcgaccgccagtgcgtctttggatttgggcggcaatgtgaagtttgatgacgacggtccgagcgtgacgatggcggtgagcgataataatgcgatcaccttgaacacccaggatgccgatacgattggggcagccagtgacagcgacagcgcaagctttgcggccgcctttgcggtgactcctaattacggggccgatggtgcgggcacaacggtgaccacttacgccttgagtgtgtccgcccaaggggtggattccggccttgataacaacggcaacaatatctacctgtacaacatcgcaggttctgtggtgggttcaacatcagccacgcaggcgggtattaccacaggcaacaccatcttttcattggatgtgaacagcagcagtggggtggtgactttaacgcaacaccaggaagtggaccacggtttgccgggagccagttccaattacgcggctcaggaagcgatattgaatacaggcctggtctttttaaacgccaccgcagtgacgacggatggggatggggatacggcgaccgccagtgcgtctttggatttgggcggcaatgtgaagtttgatgacgacggtccgagtgtgacgatggcggtgagcgataataatgcgatcaccttgaacacccaggatgccgatacgattggggcagccagtgacagcgacagcgcaagctttgcggccgcctttgcggtgactcctaattacggggccgatggtgcgggcacaacggtgaccacttacgccttgagtgtgtccgcccaaggggtggattccggccttgataacaacggcaacaacatctacctgtacaacatcgcaggttctgtggtgggttcaacatcagccacgcaggcgggtattaccacaggcaacaccatcttttcattggatgtgaacagcagcagtggggtggtgactttaacgcaacaccaggaagtggaccacggtttgccgggagccagttccaattacgcggctcaggaagcgatattgaatacgggcctggtctttttaaacgccaccgcagtgacgacggatggggatggggacacagccaccgccagtgcgtctttggatttgggcggcaatgtgaagtttgatgacgacggtccgagtgtgacgatggcggtgagcgataataatgcgatcaccttgaacacccaggatgcggagacgattggtgtactttccgacaccgacagcgcaagctttgcggccgcctttgcggtgactcctaattacggggccgatggtgcgggcacgacggtgaccacctacgccttgagtgtgtccgcccaaggggtggattccggccttgataacaacggcaacaacatctacctgtacaacatcgcaggttctgtggtgggttcaacatcagccacgcaggcgggtattaccacaggcaacaccatcttttcattgggcgtgaacagcagcagtggggtggtgactttaacgcaacaccaggaagtggaccacggtttgccgggagccagttccaattacgcggctcaggaagcgatattgaatacaggcctggtctttttgaacgccaccgcagtgacgacggatggggatggggacacagccaccgccagtgcgtctttggatttgggcggcaatgtgaagtttgatgacgacggtccgagcgtgacgatggcggtgagcgataataatgcgatcaccttgaacacccaggatgccgatacgattggggcagccagtgacagcgacagcgcaagctttgcggccgcctttgcggtgactcctaattacggggccgatggtgcgggcacgacggtgaccacctacgccttgagtgtgtccgcccaaggggtggattccggccttgataacaacggcaacaacatctacctgtacaacatcgcaggttctgtggtgggttcaacatcagccacgcaggcagggattaccacaggcaacaccatcttttcattgggcgtgaacagcagcagtggggtggtgactttaacgcaacaccaggaagtggaccacggtttgccgggagccagttccaattacgcggctcaggaagcgatattgaatacgggcctggtctttttaaacgccaccgcagtgacgacggatggggatggggacacggcgactgccagtgcgtctttggatttgggcggcaatgtgaagtttgatgacgacggtccgagcattgcagtggttgcggcatcggatgcgctggtggtggatgaaagcttcctggccacggatgcgagtgcgaattttgtggacaatttcacctcctcttatggggccgatggggctggcaacatcacctatgccctgggcatcaacgccggcagcacggggttgaaagacacggcgaccaacgaagacattaaactggtgaacaatggaggggttatcgaagggcgcacggtgacttcgaacgcgctggtgtttaaggtgagtgtggacgcctcaggggtggtgaccctggaccaacaacgcgcgatagtgcatagccccaacaccggtcctgatcaagccaagactttgaatgcggcgaatttgattaccttgacggcgacgattacggacaaggacggggacagcagcagtgcgaccttaaacatagggcaggccttaagctttaaagacgatgcgccggtagcatcagacataaccagatcaggagccgcaagtgaggtagctgatacgaatcttatgctaatccttgatacttcaggaagtatggctggttctggtattcaaacattaatcaattcgactttggaattgcttgagcaatatgaggcacttggtaatgtaaaggtaaggattgtgactttcaacacaagcgcaactgctgttgggtctggttggatgaccgtagatgcagcaaaaaatgcaatcctaggacttactgctggtggcaatacaaattttgatgcggcgcttattacagctatgaacgcatttaacagtggtactgttggaggagctgatggaagaatagcaggagcacaaaatgtgtcatattttatctctgatggtaatccaacggttaaccaagactggcctagtattccaggtacattaacgcaaaatgggattcagccaagtgagcaagcagcatgggaagcttttctgcaagatactaatggtgcatctgctggaggagagcggattagatcttacgctttaggtatgggaacaggtatcgacgttaataatcttgagcctatagcatttaatggtgtgaatggagcaaatataccagcagttgttgttacagatattagtcagttagcagatgtattagtgaacacaattactgcaggtccaatcagtggtactataatttctgatcctaatcctggtgtttcctttgggacagatggtgggcatatacaatcgataactgtgaatggtatcacttatactgttagtactgaccttggttctgtatctacgagtggttctgctactcaaggctcaaatacttattcatacaataattcaacacatgtattaacagtaacaattagtacaggcgaatcatttactatagatatggatgatggtagttatacttttactccgcctgcaaatattactaatgcaataaaccgtataatcaactatgtattagtagataatgatggtgatacttcagcagctgcaataactattaatataaatcttcctggaactaatgatcctttggtagttcgtgatgatttgattcttactaaccaacctgctgtaagtggtagagatgttatttctataccgacatgggcattattggccaatgatacgggtggaaatggggtgtcttcagtcagcagtgtgacacaaccagttgctgaaggtactgtagttctcaacgctggttctgtagcttttaccgaagaatctaatagtgcagcggatggtacctacaatggaagtacatctgatccttttaggtacactaatacgacaggttctcaatcagcgaccgctaaggttgatctggatcgtgcacaagcaggggaaaatacgttagatggaacctacagaagcgagattttattaggtagagatacctcgaatgacacgattattggtaatgatggtaatgatatactgattggattaggtggggatgatactttaagtggtggtaatggtgatgatattcttgctggtggcgctggtaatgatacgttagatggtggtgcaggcaatgatacagctacttacattgacgccactgcaggtgtaactgtttccttaaataccggttctgcacaaaacactgttggtgcaggaacggatacacttactaatatagaaaatctaactggtttcaaatttaatgatactctaactggaaataatagtgccaatacaatcaaaggattggagggtaatgacacaataagtggattaggtggaaatgatactttagatggtggttccggagacgatgtcattattggtggattgggtgatgacatactcactggtggctcaggcgctgatcaattcgtgcttgtgaaaggacaaggtggtgccagtgcaggcgcagcgccgatcgatactattacagactttgaagtgaacattgataagattgttattaacggtaataacattacgggtgtcagtgtatccactccggtttctaacacttatactataacggttaattattctgatgctgctacagaacactttaagatgacattatctaatggcgctttattgaatgattctggaaaaactcatttgaacggagtggttataagcggcggcacagctaccattgatggcacaatcgttggtgccgttttgtatctggatttaaatgccaataatcaggaagatgaaggagaacgactaggtatcactgaccagtatggccatgtggaatgggtcgttgacctttctaaattcgatgtcaacggtgatggccagtatgttataggcgaggctcgtgctgttcaaaccggtggttttgatatagatacaggtcttagctatgaaataaatctttacgggccagtaggttcagcagttatatcgcccttgacaagcctcttgcaagcgcagctagaagccggcatggattatgagacagctaatgctgccttggttgctcgcttaggcttaccagagggaacacaaattattagtttcaatccgattactggcagtggtgaagtgctggctcaaaacgcaggtgtaatgacagctgccattcagtttgctgaaatagccgcaatacactattcaaccgatgaaggtcatgtttcattcgttgtctttgaggcaattagcaaggcattgcttgaacttcctgaaggggtagtcgctgattttggcgatgagggtttcttgcagtccatttcaaattatttgggattagatgctctggttacatctgatatgattgactatatggcaaccagccagaaagcgttagaggccagtattttgactcttgcgcccggagaagatgctctgacggccatcagcaagatacagcatgtgacccaaggtatatatgcccaggctattgaaatggcattgatagggtatttgccattagatgctcttaaaaacatgagtgctgttcttaaggcttatgctgatggagatattacggatgaacaactcaactcctttgaagacaagctttctgctgtgattgtgaattgggaagataacaatgttacagacacatctcatcaggctacattgcaaacagagcgtattgttgatgactcttcagtcaaatcagaggcgaatcatgaaatggcgcaagaagttaatgccgtgattaatgattttatggatgaacataatatttctttgtactattatgatcaacaggctcaaatgcctcaagaagtacaagaacaacaaccaacagaggatcaggcagaagagacggtcatgcatgacgacgttgttcaagatttgttgcttgatgatcatagccttaccatgttggctaataatccccaattaaacggtggtaatggcaatgatgttctacatggaactaccggaaacgattttataagaggcggtcaaggaaatgatacgatgacaggtggtggtggtgttgataccttcttctggttaagtggcgacgatgatggtggtgtggatactattaccgatttcaaagcaaatcctgttgatcaatcatcagatgccagcgtccttaacttaagtgatttgctatctgatgcggatctggaaaccaatagtttggataattatctgaatgtttctaccacagaagagggcgacacagccattaaagtagaccctaatggtaatggaaattttgacgctccagcgcaaacgattatattagaagacgtggatttaacagctgttttcgctaccaacaattcccatgatattgtgaatcaaatgatcgctaatggaaacttgatagtagaacag

SEQ ID NO: 25027 - DNA, 951 bp, Legionella pneumophila
atgaaaaatgctgttattaatggcactggaagttactctccagagagacaaatgactaatgctgaactggaaaccatgcttgatactagcgatgaatggattgttaccaggactggtattagtagccgtagtgttgctcaagaacatgaaacaacatcttatatggcttccagagcagcagagcaagcactagaggcatcaggccttgatgctgaagaaattgatttgatattagtagcaacatgtaccccagattatttttttcctagcgttgcctgtcacgtacaacatgctttaggaatcaaaagacctattccggcttttgacattggagctgcatgcagcggttttgtttatgcgatggatgtagcgaaacaatacattgctacaggggctgccaaacacgttcttgtcgtaggcagcgagagcatgtcaagagcggtagattggactgatcgttctatttgtgtcttattcggagatggcgcaggcgctgttgttttaagcgcaagtgatcgccaagggattatgggtagtgttttacattctgcctatgactctgataaattactagtccttcgtaattcaacttttgaacaagatcgtgcaacgattggaatgcgaggtaatgaggtattcaaaattgctgttaatattatgggtaatattgttgatgaagtattagaagcaagtcatttaaaaaaatctgatattgattggctgatacctcatcaagccaatatacgcatcatacaagccatagctaaaaaattatctcttcctatgtcacatgttattgttacaattggtaaccaaggtaacacatcggctgcttctattcccttagcacttgattattctattaaaaataatcagattaaaagggatgaaatattattaattgaatcctttggtggtggaatgacctggggcgctatggttattcgttac

SEQ ID NO: 25028 - DNA, 2016 bp, Legionella pneumophila
atgaataattataaacattgggatttacaacgagataaagacgccattctgtggcttggattaaatagaagggatgctgctgttaatagcattaatgaagaagtcctggatgagttaaacagcttgctgcatgaaatatcgcatgataaaaaagcaatgggattaattatttattcgctcaaggaaaaagggtttattgcgggtgctgatgttaacgctttttcacaatttgagagctcttcacaagcggttgattttttgcagaaaggacaaactgtatttgctcggttgcaagctttatcaattccaagtgtcgcaatgatcgatggtttttgcatgggcggtggttatgagttagctttagcctgcacctaccgaatcgcaacggatgacaaagacacacgtattggtttgcctgaagtaatgctgggtattcatccagggtggggcggtactgtgcgtttgcctcagttaataggtggttttaaagctttatcacaagtcatattaaccggtagtgcaatacctgctgcaaaagctaaaagcctcggtatgattgatgaggtagtacctgttcgtcagctaagaagggctgctgtttatttcataaagaataaaccaccacgacacagggcatcatttattgaaagtttaacgaatagctctctgctcagaaaagctatcgcttatttactgcgttataacgtagccaagcgagttcgaaaagaacattatcctgcaccatatgccgtgattgacctgtgggaaaaagaaggaggagtgggagagagggcttatcttaaagaagtggactctatagaaaaacttgtatcccaaaatgataccgccaagaatcttatcagagcatttttattgcgtgagcgattaaaagggttcgccaaagacagccatttcaaagcgacccatgttcatgtgattggagcaggggttatgggaggggatatcgctgcctggtgtgctttgcgaggtcttcaggtcacattacaggataagtcttatgaacaaattgcccctgcaatagggagggcacataaactttatagcaaaaaactgcgtaagcctcgattgatccaggccgcaatggatagattaattgcagatccccatgggcatggggtaaaacgagcagatgtcattattgaggctgttttcgagaatttggttgttaagcatgaaataatgaaaactgtggaaaaaaatgccaaaaaagatgcgatcatagcgacaaacacctctagtatcccacttgatgaaatcagcagtgtaatgagtaaaccagaacgcttggtaggcattcatttctttaatcctgtagctaaaatggatttggtagaaatagtcagcagctcatctactacaaaaaaagttcagcagagcgcttgcgcgttcgtcaatcaaattggcaaattgcctttgcctgtcaaatcaagccctggatttttaataaatagagtgctcatgccttacctgatggagtgcgtacagttattggatgaaggatatagtgcggagacaatagatgaggccgcattacagtttggtatgtttatgggccctgttgaactggctgatacagtaggaatggatgtttgtcttgctgtggctgaaaatctgaccagtcactttggtggtactattccacaaagattacgtgatttagtaaaagaaggtaagctaggcagaaaaactggagaaggtttttataaatataaaaatggaaaagtaattaagaaaaaggctccatcacatgtcgataaaaccattgcagacagattaattttgcgcatggtgaatgaatctgcagcttgtatacgtgagaaagtggttgaagattctgacttgttggatgctggaatgatctttgccacaggttttgctccattccgtggagggcctatgaattacgcaaatgattttggtaaagataaactggaaactttatttaaaacatttgaatctaaatacggcgaacgttttaaggtagataccagctta

SEQ ID NO: 25029 - DNA, 879 bp, Legionella pneumophila
gtgaaaaatcgtttacgtctggccttacaaaaaaaaggccgattatcagatgaatctttaaatctcctacaacgctgtggtttaaagtttcgtattaaaccaaacgcattattaactcatgttgataattttccaatcgatttactatttgttcgcgatgatgacatccctactctcgtattcgacagtttatgtgatggtggcatcgtgggagaaaatgtgctgctggaagcttcttttaacagaccagacaaagcctatagaaaaatattggcattaggcagttgtacttgtcgtttatcgatagcagtaccagaagcattcgactatcaaggagccggtagtttggatgggaagcgaattgcaaccagctatccaaatttactcaacaattatcttgctgaacgaaaaattagtgcggaaattctgacattatccggctcggttgaggtagcgccacgaatgggaatggctgatgtcatatgcgacttggtatccactggccaaacactcgaagataacaaactcaaagaagtcgatactgttcttaacagtcaggccgtctttattcaaactcagagacaattggatcctgatattcaagagttgtttgccatgcttgccagaagaatccaggctgtccagcaagctcaggaaagaaaatacatagtttttcatgcgcccaaatccgcccttgagcgaattgctcagaaattaccaggcgctgagtccccaaccattcttccattaccgggaaacaatgaaaaagttgcagtgcatgtagtctccagtgaaggtgtgttttggaatacgttagagacaattcaatatttaggtgccagctccatcctggtattacccattgaaaaaatgctggag

SEQ ID NO: 25030 - DNA, 1278 bp, Legionella pneumophila
atggtggttgataaaattcaagctatccgaggaatgaatgatgtactgcctgatagtacctcgatatggcgctttatagaacagacttttataaattgcctcgtacgatatggatacaaggaaatacgttttccaattgttgagaatacacagctatttaaacgtacaattggtgaaataacagatattgttgaaaaagaaatgtacacttttaacgatttgaatggtgatagcataaccctaaggccagaaggcacagccggctgtgttcgtgcctgtatagaacatggtttattacataatcaacaacaaaaattatggtacttaggccctatgtttcgtcatgaacgtcctcagaagggtagataccgtcaatttaaccaatttggggttgaggcgctaggaattactggcactggcattgagcttgagctgatctcaatttgccgcagattatggatcgacctgggtttttctcagtcagttcaattacaagttaattcattaggtgaaataaatgaacgtcagaaatatcgctctatcctggtagagtatctacgcgatcattttcagatacttgatgaagacagtaagaggcgattggataaaaaccctttgagagttcttgatagtaaaaaccctgatcttcaacagctcattcaaaatgcccctaagttaattgatgttcttggtgatgatagcagagaacactttcaatcgttctgcaacggattggaaacacttggtattccttattccatcaaccctgtattggtaagaggattagattattatggccaaacggtgtttgaatgggtaacagaccaattaggaagtcaagctacaatatgtgcaggaggtagatatgatatgttggtggagttccttggcggagcacccacacctgcagttgggtttgctttaggattggaaagaatatttcttttaatggaaactttaaacttgttgaatgaaagtaacaataaacaatcaatatttatcattgctactaatgaagaggccatattgaaagcgcttgtcatggcagagtcaattcgaaatgctcatccatctcttgatgtcattaccaatacggcaggcggtggttttaaaagccaatttaaaaaggccgataaaagcggggctcgcttggctttgattcttggggaagacgaaatagccaaggaatatgtaagcattaaagatttgagaactgaaatagaacaaatatcaataccgatgaccaaaataaatgaatttttgcaagattatctagct

SEQ ID NO: 25031 - DNA, 171 bp, Legionella pneumophila
tgtgaaaaagccggtattttaaccgaattacgtcgccgtgagttttatgaaaaaccaaccgcagagcgtaagcgcaagcaagctgctgcagtaaaacgtcatcttaaaaaaatatctcgtgatgttagttcaagacgaggtgttggtcaccgacgtaaaaaaagcactacc

SEQ ID NO: 25032 - DNA, 1374 bp, Legionella pneumophila
atgtttgataatttaaccgaacgcttaacccgaacctttaaaaatttgcgaggccaaggccgcctgacggaagacaatatccaacatgccttgcgtgaagtaagactgtctcttattgaagcagacgtggctttgcctgttatcaaagagtttattgagcaagtaaagcaaaagtctcttgggcaggaagtcttaaccagtttaaatcccgatcaggcattcattaaaatcgtgcatgatgaactcattcacgtcatgggcaatgagcgggttgaacttgattacaaaacccaaccgcctgctgtctttttaatggccggcttacaaggttctggtaaaacaacgagtacagcaaaactcgcccgttatttgaaagaaaccgaaaataaaaaagtcatgatggcaagcgttgacgtatacagaccagccgccatacaccaactgaaagtattagccgaacaaattgacgtcgccttctttgattcagaccctaatgagcaaccaataaaaatagctcaaaaggcattggaaagcgccagaaaacagtatgttgacgttctcattctcgatacagcagggcgcctgcacgttgatgaagacatgatgtctgaaatcaagtctttgcataaagcagtcaatccaatcgaaaccctttttgtcgttgacagcatgacaggacaagacgctgccaatactgcaaaagcatttcatgaagccctccctctgactggtgtgattttgaccaaaacggacggcgatgctcgaggaggagcggcgctatctgtcaaacaaatcacagggaaacctataaaatttatagggagtggtgaaaaaatagaagccttggaaccctttcaccctgaacggattgcatcaagaatattggggatgggagatattttaactctcattgaagaggtagagcgcaaagccgacaaacaagccagcgaaaaactggccaaaaaattaaaaaaagggaaagggtttgacttggaggatttcaaacaacaattattgcaaatgaacaatatggggggtatctccgggatgatgagcaaattacccggagtggggcaattgccaaagcaagccatgcagcaagtgaatgacaaggcgatggctcaaaccattgcaatcattaactctatgactcccaaagaacgccgtatacccaaaattattgtaggctcacgtaaaaaacgcatagctttaggctctggaactcaaattcaggatgtcaacagactattaaaacaatttgaacagatgcaaaagatgatgaaaaaatttaccaaaccaggcggaatgcagaaaatgatgagaggaattggtggcatggccggattgaaaggcatgtttccagatgatttaaaa

SEQ ID NO: 25033 - DNA, 954 bp, Legionella pneumophila
atgaatgaatttaccctgattgatcattattttaaatccatcccatgcaagagaaatgatgtcctttttgggataggggatgatgctgcttgcttgcaggttcccgatggaatgcatttgctagtcagcacggatactttagtttcaggcattcattttctaccgcaatgggatccctatgatattgcctgcaaggcagtaatggtcaatattagtgacatggctgccatgggcgcacagccatgttgggtgactcttgcattgaccttgcccgaattgaatcagagttggcttgattccttcgcgagagggataaaagactctcttggcttatataatgtggatctgatcggtggtgacacgaccaaaggcccgttatcaatcactttgaccatcatggggctcacacctcagggacaagcaatcagacgttgtggcgcacaagcgggtgacgcgattatggtttccggtgaattgggggctgcgggtctggctgtaaaattgctggatgagcataaaaaagtgaatgcaaaagataaagtagaattaatgaataaactattacatcctaaaccacgggtggatttatgccatttgcttagaaaatatgctacttcagcgattgatatctccgatgggttaggcgctgatttaaatcatatttgcgccgcaagtggtgttggggccaacttgtttgaagaagcaatacccaggcatcctttattgaatcaatattgtcctgaacaagcccttgacttggctctttcaggaggtgatgattacgagttatgttttacagtttcaatacaacagctggattcttttaatcgggatcttcaaaaagaaaatctgatctgttttcccatcggtgtgatagaggagaaaccaggattaagaatacaatcagctgatagtccaagtaaagaattgcaacccagaggctattcacatttt

SEQ ID NO: 25034 - DNA, 1125 bp, Legionella pneumophila
atgaataaatcaaatttggcaatgaacaaattaacccgctattctcaacaaataaagatggaagaaattggattagacggacaggagaaacttaagaattctcgagtattatgcattgggcttggcggtttgggttcgcctctcttactttaccttgctgcagcaggtgtcggagtgttagggattgtcgatgatgacatcattgagctaagtaatttgcataggcagattctttataatcatacccatattaataaaaaaaaggctgttactgcaaaaaagcaacttctggctattaatcccctgattcaagttgaatcttactccagtagattaacagaagaaaatgcggctgagctaattacgcagtatgacatcatcgcagatggaaccgataatttttatacgcgatatttgattcacagcatttgctttgaactggaaaaaccttatgtgtatgctagtgcctcaggtttccaagggtattgctctatattccatgggaaacaagatccctgcctccattgtatcttcccggtttctgtaagcgatatcaatattcccaattgcgagggagccggggtaattggtactttacccgggatgctaggtattattcaggcaacagaaataatcaaatggatactacaaattggcaatccattaaaaaagcgtttgcttactattaacctgttaacaatgacctttaagaacatcattatttcaagaaatccggattgtgaattctgcattcagaatcagtcaattagacaattaattaatcctgttaattgttcagctcaaattgagccatgccatcatagaataactcttgatgaattttatcaattatttacgaataataaaaacattcatctaattgatgttcgtagtacaaaggaacatcaaatacaaaatatagggggtattgtgcttcctttagatgagctgcctcaacgcttacatgaactaaaccctaatcggcttattattctgtactgccagtcgggaacgcgaagcaagatggcgttagatatacttctcaaggctggctttgcttctgttaaatatatagaaaatggtttaaagggagtaactgacaattacaataaagacatgccccaa

SEQ ID NO: 25035 - DNA, 657 bp, Legionella pneumophila
atggcgtcttttaataaagcattgtctttaggttgtcgtttcattgagtttgatgtgatgtgcagtcttgatggtgaaccttttatcattcacgatgacaatttgaaacgaaccacgaatggaaaaggagaggtgggactgatggaggcagattatctccgtggtcttgatgctggctcttggtattcgaagcagtataagggagaaaaaattccacactttactgacgtattaaagtggttgtctttttccgatgttcaggcgaacatagaaataaaaccttatcctggaacggttgagcaaactactgtatcagtgctaagtcatatccatcggcattggccccaaaataaagaattacctctcgtttcctgttttgaatgggatgctttggtattatgccgcagtattgctccagaaatgcctttagggctcttgctgcatgagtgggataaagattggttacagaaggcgaagcaattggaatgttattcaatacatttcaatagaaagatattaaccgctgatcgagtgaaggcagttaaggatcaaggctatgtagtatgcgcctatactgtaaaccgtaaacgtttggccaaaaagttatttgattggggtgttgatgctctctttagtgattatccagacttgttaaaa

SEQ ID NO: 25036 - DNA, 828 bp, Legionella pneumophila
atgaactcacttcaagatctaattgaacaagcctttgaaaaccgtcaaaatttatcgctcgacacagcctcctcagatttgatcaatgccattaatgaagttctcagtggtctggataatggccaattcagagtcgctgaaaaaataaatggtgaatggacagttcatcaatggcttaaaaaggcagttcttttatcctttaaacttttcccaaatcaaatcatagacgcgggtttttgcaagttttacgataaaataccgctaaaatatacggattgtagtaatgagcaatttcaacaatcaggggtaagagttgttcctcatgccatggtacgacgtggagcatatattgccaaaaatactgttttaatgccttcttatgtcaatataggtgcttatattgatgagggagtaatggttgatacctgggcaactgttggttcttgtgcccaaataggaaaaaatgtacatatatctggcggcgcaggtataggaggtgttttagaaccattacaagcgaacccaaccatcattgaggacaattgctttattggtgcccgctctgaaatagtggaaggggttatcgtagaaaaaaactccgtcatatcaatgggagtatttttaggccaaagcactaaaatctacaatcgaatcactggcgaagtaagctacggcagaattccggctggctcagtagttgttgcaggtaatttgccaagtcatgatggaagccacagtctatattgtgctgtcattgtgaaacaagtggatgaaaaaactcgcgcgaaggtaagcattaatgatttactaagagccaatcaagatgac

SEQ ID NO: 25037 - DNA, 1485 bp, Legionella pneumophila
atgtctaaattacaaatcatacagagtaaaggccaatatattaatggagaatggataaagggaaatggtctcattctggagtctacaaaccccgcctccggaactttgctttggcaagggaataatgctacagatgaagaaattgcaaacgcttgttacgttgcgcatcgcgcactgaaatcctgggctaataccagttttgaggaaagggctcgttacactaaggcttttgtggaacaagtagaaaaaaatcgtgagcaactggcacgacttatttcattagaaacaggaaagccattatgggaatctcaaactgaagtcagctcagtaattggcaaagtaaatttgtcaattcaggcttatcaagaaagaacctggccaaaacaaactgaaactgcagaagctaatgcctgcctccgttttaaaccgcatggtattgttgtagtattaggcgcgtttaatttccctgcccatttaagcaatggacacattgtccctgccctccttgcagggaacacggtattgtataaaccaagtgaacatactccagcagtagcggaattgatcatccaatgttggcacgatagcggcttacctcccggagttatcaattgtctacagggtaatgcaaattgtggaaataccctattgtctcaagatattcaaggcgtctattttaccgggagttatgcaacagggttgcgtatacaccaacaattctgtaatagacccgaagttattttagctttggaaatgggcggaaataaccctttagtcatcgatgaagtgaaagacattgatgcagctgtataccatacaatcctttcaactatgatcactgcaggacaacgttgcacatgtgcgagacgaattataattcctgactcccagacaggcgatctatttttagaacgctttgccaaggcttgtaaattaatgcgaattggatcctttgatagtcagccagagccttttattgggcctgttattagccatgttcaagcattaaaacatctacacgctcagaagcaactaatcgaaatggggggtgaaatcattctgccgatgtcgcttcttcttgagtacacgggacttgtttctcctggcattattgatatgactcgcgccaagaacccgccagatgaagagatttttgcgccatttgcacaaatttaccgttataatcactttgatgaggcaattcaattagcgaatcagacacgttatggtttgtcagcaggcttactcagcgataataaagaccattatcagcagttttatcaaaatattcgtgccggactaatcaattggaacagaccaaccacgggtgctgccagtagccttccatttggtggtgtcggatgcagtggaaatcatagaccaagcgcctattttgctgctgattattgtgcttatcctgtagcaagcatggagcaacctctgttaacaactccagtgcaacgattgccaggtctggtattggag

SEQ ID NO: 25038 - DNA, 1203 bp, Legionella pneumophila
atgatagttcaagattcagtttgttccgaattaatgcgggggtgtgaggaaattcttcctgtacctgagttggagaagaaattacaaaaaggtatcccattgaaaataaaggcaggttttgatccaacagcgccagatcttcatttgggacatactgtactgcttaataaattgaggcagtttcagcaatttggtcatgaggttatttttttgattggtgatttcacagccatgattggtgatccgactggaaaaaatgtaacccgaatgccattgagtcaggaaacggttctggaaaatgcaaagacctaccaacaccaggtatttaaaattcttgaccctgataagactactgtggctttcaattcacaatggcttaataaatttaatgcggttgatttgattcgactggctgcaacacatacagtggcaagaatgctggaacgagatgatttcaataaacgttatactacaggacagcctatcgcaattcacgaatttttgtacccgctgttacaaggttatgattcggtggcattaaaagctgacgttgaacttggcggtactgatcagaaatttaatttattgatgggtagagaattacagaagcattatggctttgagcctcaagttgtcatgatgacaccattgatagagggtttggatggtgtaaagaagatgtcgaaatcccttgataattacattgggatcaatgaaacacctgagcaaatgttcggaaaaattatgtcagtttctgatgagttaatgtggcgatatattgatttattaagctttaaaacaggcaaggaaatacaacaattaaaacaatctgtattagaagggaaaaatcccagagatgttaagattgattttgccaaagaaattgttgcgcgatttcatgatcaaactcaggccgaatttgctcataacaagtttattgaacgatttcaaaaaggaaatattcctgaagacttggaagaactgtcgttagttattgcagagcctatagctttagcacaattattaaagcaaattgatttgacagccagcacatcagagtctataagaatggtgaaacaaggggctgttaaagtggatggggataaaatttcagatccttccctaaaattacccattggcaagtcttatatcattcaagttggaaaacgtcgaattgccaaactgagtattcaacaagcagac

SEQ ID NO: 25039 - DNA, 2208 bp, Legionella pneumophila
atgaaacacgaccaccatcaaggacatacccattctggtaaaggacatgcttgtcatcacgaacataattctcccaagactcagcaagcctcttccaaaatggaggggcctattgtttatacgtgtcccatgcacccagaaattcgccaatctgcccctggtcattgtcctctttgtggtatggctttagaaccggaaacggtgacggtttcggaggttgtgagccctgaatatcttgatatgagacgtcgattttggattgcattgatgttaactatacctgttgtgatattggagatgggtggacatggtttgaagcattttatttctggtaatggttccagttggatccaattgcttcttgccacgccagtggtgttatggggaggttggccttttttcaagcgcggttggcagtctctaaaaacaggccaactcaatatgtttaccttgattgccatgggtattggtgtggcgtggatttacagtatggtggctgtcctttggccaggtgtatttccccatgcgtttagaagtcaagaaggagtagttgctgtttattttgaagcggcagcagtgattactacgcttgtcttgttggggcaagtgctggaactaaaagctcgagaacaaacgggtagtgccatccgtgccttgttaaaattggtccctgaaagtgcacaccgaattaaggaagatggcagtgaagaggaggtgtccctggataacgttgccgttggtgatttgttgcgtgttcggcctggtgaaaaaataccagtggatggtgaagtgcaagaaggacgaagctttgtcgatgaatccatggtgacaggtgagcccattccagttgctaaagaggccagcgctaaagttattggtgctacgattaatcagacgggtagctttgtcatgaaagcgctgcatgtgggcagtgataccatgcttgcacgcattgtgcagatggtgagtgatgcccaacgaagccgtgcgccgattcagcgactagccgataccgtctcaggatggtttgtgcccgctgtgattttggttgcggtgctgtcttttattgtgtgggcactgttgggtccgcaaccagcgcttagctatggtttaatcgctgctgtgtcagtactcatcatcgcttgcccttgtgcgttaggtttagcaacgcccatgtccattatggtcggtgttggaaaaggagcacaaagcggggtattgattaaaaatgccgaagcgttggaacgaatggagaaggtcaataccctggtggtcgataaaacgggcacgcttactgaaggtcaccctaaattgacacgcattgtgaccgatgatttcgtggaggataatgctttagcattagctgcggcacttgagcatcaaagtgaacatccgctggccaatgctattgtgcatgctgcaaaagaaaaaggattgtcccttggatcagtcgaagcgtttgaagcgcccactggaaaaggggttgtaggtcaggtagacggccatcatgttgctattggtaacgccagattaatgcaagagcatggaggcgataatgcccctctttttgaaaaggctgatgaacttcgtggtaaaggcgcctcagtcatgtttatggcggttgatggtaaaacagtagctctcttggtggttgaagaccctattaaatcgagtactccagagaccatcctcgaacttcagcaaagtggcattgaaattgtcatgctcaccggagatagcaaaagaacagctgaagcggtagcaggtacacttggcatcaaaaaggtagtagctgaaatcatgcctgaagacaagagccgcatcgtgagtgaattaaaagacaaaggtcttattgttgccatggcaggagatggggtgaatgatgccccagcgcttgccaaagctgatattggtattgccatgggaacaggcactgatgtggccatcgaaagtgctggtgttaccttgttgcatggagatttgcgtggtatcgccaaagcgcgacgtttgtcagaaagtaccatgagcaacattcgccaaaatcttttcttcgcctttatttataatgtactgggtgtgcccttggctgctggggttttgtaccctctaactggcttgctcttaagtcctatgattgcagcagcagcgatggcgctttcttcagtgtcagtgattatcaatgcgctgagactaaagagagtgacacta

SEQ ID NO: 25040 - DNA, 201 bp, Legionella pneumophila
atggccgatacagagggcggcgaaggggcgacctggagcaaatccttaaaagtcggtcgtagtccggattggagtctgcaactcgactccatgaagtcggaatcgctagtaatcgcgaatcagcatgtcgcggtgaatacgttcccgggccttgtacacaccgcccgtcacaccatgggagtgggttgcaccagaagtaga

SEQ ID NO: 25041 - DNA, 336 bp, Legionella pneumophila
atggatattaatcaaaatttaggcaatttaatgaaagaagcgcaaaaaatgcaacaacgtatgcaagaagcgcagcaacaattaagccagttggtcgtaagtggagaatcaggtggtggtatggttactattaagatgaatggacgtcatgatgtcactgaagttaaaatcaaacccactttaatggatgaagatattgaaatgctggaagatctaattgctgctgcagtcaatgatgcagtgcgtaaaattgaaaaagcatccaaagaaaaaatcagccaactgactgctggacttaatattccaactgatttaatgggtgataaagaaggagag

SEQ ID NO: 25042 - DNA, 882 bp, Legionella pneumophila
gtgattgataagtatacccaaagacatgagctatatctcgagcaattgctcaatgaaataataataccagctccccaaattcgctccgcactccattacgctttattttcaggcggcaaaagaataagacccattttggtttatttggctggcgatttaattgatgttgaccagggagttctggatattattgcggcagcgcttgagttaacacattgctattccctgattcatgatgatcttccagcgatggacaatgacgatctgcgccgcggtaagccgagttgtcataaagcatttgatgaggcaaccgctattttagtcggcgatggcatgcaagctttagcgattgaagtcttactgatgagattatcgccccttctccccgcagcacaagtcgtagccattactcaagtattggtaaatgccagtggaataagtggaatggttagtggccaaagtcttgatttatcagaactggccaaatcatcggtaactgaggagcaattaagagaaattcatcttttgaaaactggaaaactgatcctggcgtgttttgaaatggttttagcagcacaacatgaggtatctgagcaaatcaaatccgcactaagaacttatgggaaacatatagggcttgtatttcaaatgcaagatgattacctggatctgtacgctccaactcaaatattgggaaaaggtcgctcctcggatcaggcaaaccaaaaaaccacttttgcaaccttatttaacaagcaacaattggaagaagaaatcgctgttcattaccaaattgcaatggattctctgcggttatttggtagtaaagcggctgcattaattgaattaacaaaacaattacaaaatcgtagcaatttgtct

SEQ ID NO: 25043 - DNA, 468 bp, Legionella pneumophila
gtgaggcatagcccacgtaaacgttttggtcaaaatttcttacaagacaaatatattattaatgagattctacgcgctatcaatcctttggcggatgataatatgctggagattggccctggtttaggcgctttaactcagccattattgcaaaaactgaatcaattaacagccattgaaatcgatacggatttacaaagctatttaacctgcttgcctgcatctcaaggcaaactgaatttaattcctgctgatgcgttaaccgttgacttttgtcaattcggcccccatttaagagtagtgggtaatttaccttataatatttctactccattgctgatctatttattgaaatttataacttgtattgatgacatgcattttatgttacaaaaagaagttgtagaacgaatagcagcagcccacggcactaaagcctatgggcgactaagcgtgatggggatgctc

SEQ ID NO: 25044 - DNA, 966 bp, Legionella pneumophila
atgattaattgcaaaaaatccattatcaccctatgttttgtactgatgcttcctttcgcctcatgggcagaagcgccagtaatagatgatagtgaaaattttgcaatgattgacagacaagaggagtatgaagctcctcttgtcaatcccaagtacgataatcctcaaattgagaatgctgagttggatgggtctcaaaatgataactactcaaccgatacctctcaatcctatgatgaacccgcacttgtcaaagaagaccgaagtactatcagtgacaatgcaaagttaattgataaaattcagcagcttcaaaaggaaatacaagagttacgtggccagcttgaagtacaggcacacgatttgaaattattacagcagcagcaagtcgctttctacaaggatctggattctcgattatccaattcttcaacttcagcaaaaactgttcaaaatgataaaccagcaacagatatttcattgggatctaattcgccagagactttaaaagtggcttctcctcaaatcaaagcaggatcatctaatggtaaacctcagcctgttgtcgctgtttccagggctaatcctgctgatgaacagataagctacctggctgcatacgagttagttaaaaataaacgctatgatgaagcgattaagtctatgcagacttttgtgcaaaaatatcccagaggtggttacaccgcgaatgcagagtactggctaggtgaattatatcttgttaaaaaagactattctaaagcaatagaacatttcgagattgttttacagcaatatccttcatccagcaaggctgcagccagtttgttaaaatctggttatgcttatgccgagaaaggtgacaagcaagaagctaaaaagcgttttcaacaagttgttaaaacatatcctgatacaccaacagcgcaactggccagctctaaattggaagcaattaatgcttta

SEQ ID NO: 25045 - DNA, 534 bp, Legionella pneumophila
atgaaatcacttggcttggatttcctggttgtaccatcgaattgtaacgaagaagaaattaaaacaaggcataactccgtcgaactagttgagttagggattaccctggctaaaattaaagcgttggatgtaagccaacattatccagagcactatatcattgcagcagatcaattatgcgtcgctgataaaagagtatttaacaaaccactgaatcatcaaacagctgtaagccatttgagagagttaagcgggaagcaacatcaacaaattgcttgcctgtgcattgttaaagagagcaaaatactttggcaataccatgaaacggctacactgacactgcatcatctaagtgaaaaaacaattgaagcctatttacaagcggaaaaaccttatcagagctgtggtgcttatcaatatgaaggcctaggcaagtggttatttaaggaagtacaaggaagcgaggatactattcttggtttgccactaatgccattagttaatgcgcttgtaaaccttaaggtggtaggtatt

SEQ ID NO: 25046 - DNA, 1116 bp, Legionella pneumophila
atgagtagcaaaagtggaggtttagccggtgtagttgctggtcaatcagcaattgccacagttggactggcaggcaaaggattaaattatagaggctattcaataaatgatctggctgaatatgcaagttttgaggaagttgcttatctgcttcattatggtgaacttcctacccaaaaggaacttgatgtatacataaaaaagctggttaacctaagacatatacctgatgtgcttaaaacggttttgaagcttatacctaaaaatactcatccaatggatgtactgcgaacagcatgttcttttttaggcactatcgaacctgaagagaattttaagcaacaatatgaaatagctgatcgtttgctagctcttttcccaggaataatgtgttattggtatacatatcatttcaaaaataaggaaatctctggcttaagtgaagaagacacaacaggaggacactttctggcgttattacacggacgcaagcccagcaaaatagaaaccgatatgatgaatgtctctttgatcttgtatgctgaacacgaatttaacgcttctacctttgctgcaagagttacagcggcaacactggcagatttttactcagcgatcacaagtgctataggaacattgcgtggtcctttgcatggtggcgctaatgaagcagctatggggttaattgagcgctttaaaacccctgatgaagcagcgataggcataaaacaaatgcttgccagcaaagaactgatcatgggatttggacatcgagtttatacaacttgtgatccacgctcagatattattaagaaatggtcatttagattaggtgaagaaaaggggaacctacttttataccatatttcagaacgtattgaagaaatcatgtggcaagagaaaaaactatttcccaacctggatttttatagtgcatccgcttatcattactgcgatataccaactcatttgtttaccccaatttttgtgatgtcacgcatcacaggatggtctgcgcacgtatttgagcaaagagcaaataataaactaataagacctacttcagaatatataggcccagattccaggccatttcctgctattgaaacacgaggt

SEQ ID NO: 25047 - DNA, 234 bp, Legionella pneumophila
atgtctagagtatgtcaggtaactggcaagcgacccatggttggtcataaagtgtcgcacgctaataacaaaaccaaaagacgcttcctgcctaacattcagaatcataaattctgggttgaagaagaaaatcgatttgtcaccttgcggttaagtaccaaaggtatgagaattattgacaagttaggcataaaggcagttctggataaaatcagagctaaaggcgagaagata

SEQ ID NO: 25048 - DNA, 843 bp, Legionella pneumophila
atgaaattcgttgatgaagcacttattaaagttgaagccggaaaaggagggaatggttgcttaagcttcaggagagaaaaatttattcctcgtggtggccctgacgggggtgatgggggtgatggaggcagtatttattttgaggcgagcagcgatttaaataccttgattgattttcgttatactcgtcaatacaaagcagagaatggacaatcagggatgggtggaaattgtactgggaagaaaggagatgatttaaccatcaaagtgccagtcggtactatggtttatgatgctgatacaggtgaattgttagctgatatcagtcaaccaggtattcccgtgctgattgctcagggtgggtttcatggtttgggtaacactcgctataagagcagcgtgaatcgatcacctagacaaacaacacccggaagcccgggtgaatccagaaatttgcgtttggagctccgagttttggcagacgtaggtctgttagggcttcccaatgcaggaaagtctactttaataagagccgtctccagttcaaaagccaaagtggctgactatccatttacaaccttacatccaggtttaggggtggtccgtgtttcaccctataagagttttgtcatggcggatatcccaggtcttatagaaggcgcggctcaaggagcaggattggggcatcggtttttaaaacatctttcacgtacctgtgtcttgctgcatgttattgatattgcgcctttggatgggagtgatcctgtcgctgatgcgaaagcaattctcaatgagttgactcaatataatcccgatctgctcaacaaacccagatggttggtt

SEQ ID NO: 25049 - DNA, 1056 bp, Legionella pneumophila
atgatatctgattttgagaggccaaatgatacactactctgtattataaacaacatcactgatcttgatatgaaaactatgttagaacatttagtgaataataggtctttaataacattccgccctatagagtctgaattattattaaataagcagaaaaactatctttttgacttatcctatctaggtgtcatcgatttgtttggagagaaatcaatagattttctgcaagggcagttaacttgtgatttacgattggtatcggatgtttcaatggttcaaggggcccaatgtaaccttaaagggagaattctttccttattggatattatcaactggcaaggtgtaaaattagttctgccccaagatttaattgaagtaactcagaattcattaaacaaagttgcactgctttctcgtgttaaaatcacatcaaataacaactataaaattttaggcttttatttacagcatgataatgatcaaataccacagctactacctttgcccagcgaattgtatgctttatcttgtacggctcatggttgtgtttatcacttaggcaaaggattctatatctatttaatccattcagactattatgatagtttgtgcaagccttttattgaaaataatcaattacttggttcattaacctggcatacccttagattatttaacaatcaaattgatatttatcctaattctagggggctctttttaccacatagaattggcttacatcaaaccacgtacgtcagttttgataaagggtgttataaaggtcaggaaatcatcgcaagaactcactatagagccactcttaagcatgaattaaagaaatttgtgattcagtcagataatcaattatattctggtcaaaaattatttaaatcggatgaaaacacagaggttggagagttaattgattactccatgcttggtgaaaatcgatatttggttgctgcaagtatattaaaagagaacttttcatctgtctgtttggaaggcaataaatttccaatccaattagaaggaaaaattgagcttgaactt

SEQ ID NO: 25050 - DNA, 2187 bp, Legionella pneumophila
gtggcaaaaattacaaaagaaatagtattcggtaaccataaattaatcttggaaacaggtgaagtagcacgacaggctgatggtgccgtaatggcaagtatgaatggtacacaagtgctagtgactgtagtttggaaaaaggatggtggtgaaagtaatgattttttcccattaacagtgaattatcaagaaaagttctatgccataggtaaaatccctggtggctttaacaaacgtgaaggacggccatctgataatgaaacattaatttctcggttaatagatagaccgatccggccattattcccggataatttttttaacgaagtacagataattgctactgtactgtccttaaatcccgaggtatctcctgatattatcgctatgattggagcctccgcagcgctttcaatttctggcgtgccatttaatggccctataggtgccgctcgagtaggctataaagatggcgtttatctgctcaatccaagtagaaaagaacaagaagagtctaagcttgatttggttattgcgggaacaaaagatgccattttgatggtggaatcagaagcgcaggaattaagtgaagacatcatgcgtggtgctatgttatatggccatgaaatgatgaaaaatgtcataaaatcaatagaagaacttgctagagacgtgggtaagagtaaacctgagtggaaagcaccagaaattgatacagtactaaaagctagaatcaatgacgtagctaggaatgaagttgaagccgcttatcttattaaggacaagcaacaacggtatcagcgattagacgagttaagagagcaaactatttctgctttactggctgaaaatgatgagttaaatgcagatgttattgccaatatgtttggtgagctagaacgttctatagtacgtaatcgtattcttgacggcgagcctcgcatcgatggtcgtgatcacagaacagttaggcctatttctattcgtaccaaattcttggaaagaactcatggttcctgtttgtttaccagaggagaaactcaagctattgttgttgccactttgggtaatgaacgtgatgcacagatattagacggaattagtggcgaaagcagagatcgatttatgcttcattataatttccctccttattctgtcggcgaaacagggcaagtgggcagtcctaaacggcgtgaaattgggcatggccgtttagccaagcgtgctttaatggctgtactgcctgatgctaatgagtttccttatgtgctacgtattgtatctgagattacggaatccaatggctccagttctatggctactgtttgtggaacaagtctggcattgatggatgccggggtacctttaaaagcaccagtcgctggtgtggccatgggcttaatcaaggaaggtgatcgttatgctgtattaacagacatattgggtgatgaggatcatttaggtgatatggactttaaagtggccggtacggaaaaagggattactgctttgcagatggatatcaaaatttccgggattaccaatgaaattatggaacaggctttggagcaagcattggaaggtcgtacccatattcttggtgtcatgaataatgctcttgccgagcatagaaccgagttatctcagcacgctccaagaatcacaaccatgaaagtcgctgaagataaaatccgcacaattattggcaaaggtggggcaacgattaaagggcttattgaaagtaccggcgtatctatagatattgatgactcaggggttgtccaattattttctccggataagatggctttggaagaggcgcaaaaacaaattaaagctttaattgctgaaattgaagtgggtcagacttatcaagggaaagtaagcaagatagttgactttggagcttttatcaatttactgcctggtaaagatggcttactgcatatttcacaaatatgtgccgacagaacacaaaaggtagaagaggtattgcaggaaggtcaggaaattgaggtctttgttgctgggatagataagcaagggcgagtcaaactggagtggaaggataagccgcaagctgaagccaaagaggtcgaagacgccccggtatctgctacgtttcttacaatggaagagcaatctgaagaaattaattcaggcaacaaaatctctgaagaagaggaa

SEQ ID NO: 25051 - DNA, 2313 bp, Legionella pneumophila
atgcgtaggcaagaaatcaattatgaaaaagttgccaaggccgcagaaaaaataaaaaaaagaggcatagagccgtccgttaatgaaattcgtgacgaacttggtttagttgggaaccatccgcaattatcaattttgctggaggagtggtatcacaatcaaccagaatttaaaagaaaaagtcacacacctttgaccgagaatattaatttaaatactgatgaaattcgcgaaaaaaatgtagagcttgaaaaatcaatttcgcttttacgggcaacactcgaatccaccgcagatggtattatgatggttaatgggcatggagctgttgtcgattggaatcaaaagtttgtagaaatgtggcgaattccttcttatatgatggagtcgggaaaggaaagtatcagttttgaatacatacttgagcaacttattgatccgcaatctttgattgctgatgtgcaatatctttatcaaaatccagagtggcaaggtgaattacctgagcttcatttcaaagacggtcggatttatgagcgttttactcagcctcagcgtgtgggatcacaaatagtggggcgagtatatagtttccgtgatgttactcaaaaaaggatggctctcgatgagttgagaatacgtgaacgcgctattgaggccagtacacatggtgtggtgattattgacgtaacaaaaaatgagaataaagtcatttatgtcaaccgagctttcgaaagaatcacgggatatggggagcaacatgctttagggaaaggcttgcttactttgctgggttcaaatttggaggaggtaaaccataaacgtattgaattggcaattagggaaagcaaagaagaaacaattgaaatggaaagcataaaacgaaatggagaattctattggtgtgaaatcagcgttgctcctgttaaagattcttttggctatgtaaaacattatatttgcattttaaatgatgtgactcaacgacgtgatatggaagatcaactgttgctgcaagcaacttatgattccctgactaatttaccgaaccgtgtcttactgatggatagagtggagcaggccattctacaagcaagaaagaacaaggcaattttggcttttttatttttggatttagatcggtttaaactgactaatgatactttgggacacagtatgggggataaattattacaagctattgccaatcgattactcattgttacagaggattttgatactgttgccagattggggggcgatgagtttgtgatattacttacagacatagataatatgctggaagccgaaacaattgcacaaaatattttaaaaattatagaaaaacctattcaaatagatcaacatagtttgaaaattacaggtagtttgggaatcagcttttatccccgagatggtgatgattacgaatctttgatgaaaagtgctgatttgtctatgtatcatgcgaaagatactggaagaaacaactatcgtgtctacgaacctgaaatgaataggcgagtcattaatcatatgcaattagacaatgcgttaagggatgctttaaaaaatgatgaattatttctggtttatcaaccattgattgacttaaagcaatccagagtagtcggattcgaggctttaatgagatggcatagcaaaatattgggactggttagtccggcggattttatacccatggcagaagaaaatggcatgattttggaaatgggtgaatgggcaatgaagcaagcttgcatacaagtaaaagaatggcataaagctggctttaaaaacttaagtattgcggtgaatctttctggacggcagtttcgacaaaaaaacttgccggaggttgtatcgcgagtattaaaaagctctggtttgcaatcgagatttttggaactcgaattaactgaaagcttgttgatagaagatattgatcacgttgtagatactatgtatgcattgaaagacatgggaaccaagttagttattgatgattttggtacaggttactcaagcttgtcttatttaaaacaatttcccgtagataaactgaaaattgatcgttcgtttatcactgaaatggtaagcaatcagaatgacgcggctattgccaaagcgattattaacctggtccacagtttaaatcttcaggttcttgcggagggcgttgaaaatgaatttcaaagagactttataacatctcatggatgtgactatgctcaaggatatttttttaaggctcctgatactccagaaaatatattagaatttttaaaaagtttatctgaatcgaaaataaag

SEQ ID NO: 25052 - DNA, 357 bp, Legionella pneumophila
atgaataagcaaaacgcacgacatagacgtggattaaaagccaaagccttaatacgcaaaacaggccgctcaagattagttgtgtatcgaagtggtgtgcatatttattctcaaattgtcaagtcagatcagcttggtgataaggtgttggtagcttcatctactatagataaagaattgagatccagtttgactggaaaaagtaaagttgaacaagccagtttagttggtcaactattgggtaagcgtgctaaggctgcaggcattacacaggttgcatttgacagagcaggttataaatatcatggcagagttaaagcacttgctgaaggtgcacgcgaagccggattagatttt

SEQ ID NO: 25053 - DNA, 1449 bp, Legionella pneumophila
atggaacattactcactggctcaattatcaaaggctcttcataatcgagaattttcaagtgttgaattaacacaacactgtattaacaaaattcaaagcaataaagacttgaatgcattcatcagccttgatgaagaccaggctcttaaagaagcgcaatcggctgatttggtactaaaaagtggggagggaaagccactgactggtatccccatggctctcaaggatttgttttgtacaaagcgattaaatacaacttgtgcttcaaaaatgctggctaattttcaagccccatatgatgccactatcgtcacaaaatttaaacaaaatggcgcaattattattggaaaaaccaatatggatgagtttgccatgggatcctctaatgaaaacagttacttcggttcggtaaaaaacccgtgggatagagaaagagtgtcaggtggatcatcaggcggttctgcagcagcggttgctggaaatctggtaccttttgcaattggctctgacaccggtggatcaattcgtcagccagcagccttttgcgggattagcgggataaaacccacctatggattagtctctcgatacggaatggtcgcctttgcctcaagccttgatcaagcgggaccatttgcgaaatcagctgaagatctggccatgatacttcactgtatggcggggtttgatagtaaagattccacgtcagttgatagagttatacctgattattcagcagaaattaaaaacccagtagacaaaatacgcataggacttccttcttgcttttttcaacctcaagtcgaaaaaggtatccaggatgccatacatgatgctgtgaaattatttgagaatctaggggctgaaataattgaaatcgacttgaaacttcagccactttgggtgccatgttactatgttatagcttgcgcagaagcttcatcaaatctttcgcgttatgatggcataagatttggccaccgaagcaaatccgcatcaaccttaattgaattaatcactaactctcgaagtgaaggttttggtaacgaggtaaaacgtcgaattctaactggaactcatgtgctctcatccggtttttttgatgcctattatttgcatgcacaaaaagtgaggcgtttgattcgagatgaattaattacaactttaaattcagtagatgttatccttgggccaacaactcctaccaccgcttttaaattgggtgaaaaaatagatgatcccatacaaaattatttggcagatgtatttactgtagcagccaatcttgcaggcctaccagctgtttctataccaactggttttgaaaataaactaccaattggtttgcaattaatgagcaagcactttagtgaaaaccgcttgcttgcaatcgcacatcattatcagcaacacaccaactggcatttagccaatcctaacaagcaaagg

SEQ ID NO: 25054 - DNA, 812 bp, Legionella pneumophila
gttaacagagaatatatctccaggcttgaaccatggcaattgctcagatggccagacatcctttaaggccgcagactactgactatattgagcgaatttttactgattttcaggagttgcatggtgatcgcagttattcttcagcccctgcaattatcggaggcatggcgcgattaaacggggagcctgtcatggtgcttggtcaccaaaaaggtaaacgtaccaaggaaaaagtatacagaaactttggtatggcaagacctgaagaatacaggaaagcactgcgtttgatgagaatggctgaaaaattcaaaatgcctgtagtcacatttattgatacggctggagcttatcctggcataggtgctgaagaacgtaaccaatcagaagccattgcacgcaatctttttgctatgtctcgcattaaaacaccaattgtctgtattgttacaggagaagccggttcaggtggtgccttggcgattggggtcggtgataagattattatgctgcaattcagcatttattcagtcatttctcctgaggggtgcgcctcaatcctttggaaagacgcctctaaagcgagtgaagccgcgcgtgctatgggaattactgcagacagaatattcgaaaatgaattggttgatatggtagtccctgagcctttggggggcgcacaccgagacgttgatgagatggcaagtcgcttgaagagattattaacgagtgaactccaggctttgaaaaaggtgcctctggatcaattaattgagttaaggtatcaaaagtttatggcaatgggtgcttgtgac

SEQ ID NO: 25055 - DNA, 678 bp, Legionella pneumophila
atgaaacccatagcacatatcgcagataaagaaataatatctatccctgttaaagaatgcggcgaagagctcattgatcttaaaaaccaaaatattattgtttacgggccccctccagaaacccctttaaccgcaaatgactacaccaaaatacgtaaaaccgtatatcaaaaattatgtttggcacaaaatgacctgcccaatggctggcgttttagactatatgaaggattacgcagtctggctgttcaggaaattctgtttaaccaacaacgtgataacctacgtcaaagcaaagagtacgattcctatgaggatttatttaatgaaacctgtcgtctggtttctccagtagtccatttggatgggacagctaatataccaccacatagcaccggggccgcaatcgacattgagctcattgatagctatggcaatctgattaatcttggaatggctgcaaaggactggttaattgttgatcctgatttaagtgaaacctattcaaaacttatttctgaagaagctatgcaaaatcgtattctgatgctgaaaataatggctaagcatggttttgttaattaccccagagaatggtggcatttttcctatggagatcgcctatgggcctatatgacagaacattctactgccatctatggtgctatcataaataat

SEQ ID NO: 25056 - DNA, 1164 bp, Legionella pneumophila
atgtctccaatagaaaaagtcgctcctggtgtaattacacgtaaatcagtagatcaacctgttcagacaggattaaaagcaatcgatgcgatgatccccgttggaagaggtcagcgagagcttattattggtgaccgccaaactggtaaaactgccattgctattgatgcgattatcaatcaaaaaggtaccggcgttaaatgcgtatatgtagccattggtcaaaaggcttcatccgttgcatcgattgttagaaaattggaagagcatggcgctcttgagcatactattgttgtggtagcgggagcctctgattcagcagcactccaatatatagcaccttactcaggttgtaccatgggtgagtatttcatggagcgtggggaagatgcattgattgtttacgatgatttaactaaacaagcatgggcatataggcagatctccttgttattacgtcggccaccaggtcgcgaagcttatcctggtgatattttctatttgcattctcgcttgttggaaagagccgcaagaattaatgccgatgaagtagaaaaattaactaatggagaagtgaagggtaaaacaggatcactgactgcattgccgattatcgaaacacaagcgggagatgtgtcagccttcgtaccaacaaacgtaatctctattaccgatgggcaaatattccttgatgttgacttatttaactcaggtgttagaccagcaatcaattccggactgtccgtttcacgggttggtggtgctgcacaaacgaaaatcatgaaaaagcttggtggtggtactcggcttgctctggcacaattccgtgagttagaagcattctcccaatttgcatctgatcttgatgatgcaacacgtaagcagctggagcgtggacaacgcattacagagctgatgaaacaaaagcaatactccccacttacagtggctgaaatgggggtaagcttgtttgtggtagaaaagggatacttggacgatgtacctgtaaatgaaatcagctcgtttgaagcttccttgcacgattacatgcgcagtacccatgccgctttattacatgcaattaatgaagccggtgcttatgataatgaaatcgaagcaaaactgaaaaaagcagtagaagagttcaagaacacaggcagttgg

SEQ ID NO: 25057 - DNA, 963 bp, Legionella pneumophila
atgatctttacccaaagaacatataccgtctattccatgagcgcaaaaattatacgaatcgcaacgaggcagagcccgcttgcactatggcaggctaatcatgtacgggaaatgcttgtaaagcaatggccaaatctaagcattgaattattacccatgataacctctggcgatcggtttcttaaagataaattattatccgcaggagggaaagggttatttgttaaagagttagaagaagcattattggataaaagagcggacttggctgttcattcgactaaagacatgccagcacaacttccggatggcctcttgttgaccgccatttgcaaaagagataacccttttgacgctttaataagtccccaatttaaaagtcttgctgctctccccaaaaacgcgattattggtacatcaagccttagacgtcaatctcaactattggcttacaatcccaatttgcaaatcaaaacattaagaggaaacatccatacaagactcagcaaactggagtcaggagagtatcaagccattattcttgctgccgcaggcttggaaagaatgggcttggcacatcacatcacccaactcatacccgatgacattatgctgcctacttgtgctcagggcgctttatgtattgagtgccgaactgacgatttggaaatccaggagctggttcatggcttaaatgatccaatttctgctctttgtgtccatactgagcgacgcgtcaacgcaaaattaggaggcaattgccatataccctttgctgtttattgtaccattactgaggagaaactcctccttttgagagcaaaagtacttaatatggatggttctcaaatgattgatgatgagcaacaagggaaaattgcagaagctgaagtcattgcagacaggtgtaccgagtcattaatgactaaaggtgcaatgtccttattaagtacgataccatca

SEQ ID NO: 25058 - DNA, 1179 bp, Legionella pneumophila
atgtaccattcgaaaacttcaattttggctctatatcaactaatgtttcgagttttaatttttctttcttgcctagtaattttgacgccaaacactattgctgacactaacccctgtgaaaaacactcttgtatagctgtcattgatgccggaagtactggttccaggctacatatctactcctatgatacggatgacaccaatactccaattcatattgaggaaatttggaataaaaaaatcaaacctggattcgcaagcatacagcctaattccgtaacaattgatgcctacctgacaatgctattggctgatgcaccaattcataatatacctgtttacttttacgcaacagcaggtatgcgactactaccccaatcacaacaaaaaaaatactatgatgaattggagtactggtttagacaacaatcgcaatggcagttggccgaggcaaaaactatcactgggaacgacgaagcattgtttgactggcttgctgtaaattataaacttgatacattaaaatcagtccaaaataaatcagttggcgtcatggatatgggcggcgcttccgttcaaattgtctttccaatgcctaaaaatgcggagattagcaaacataaccaggtagagctcaatatctatggacagaatatcaatctgtatgttcacagtttcctggggttaggccaaacagaaatgtcacatcaattccttaactccccctcttgctttgcaaacgactatcctttgccggacggggagtcaggacagggcaatgctccatcgtgcaaggaagaagtaacctcattaatgaatagtgtccataaggtaaatcaacaaatacaacctttgcttgctttaaatcccgtgaatgaatggtacagtattggtggtatttccaatcttgccagcagccaattatttcattttgaaaacagcgaactcactaatcaaagtttgctgcaacaaggggacaaccaaatttgccatcagcaatgggatatacttaatggccagtatcctgacgatgagtacctctaccaatattgtcttttatcctcttattactacgcattaatggtggatggttatggcattaaccccaatcaaaccatccattatattccgccagaacaaaatctcgattggacaattggagtcgtgcttcaccgcgct

SEQ ID NO: 25059 - DNA, 1488 bp, Legionella pneumophila
atgctcttaaaagcagaatcgaagtatccttgtgatttaattttgtttggtacgctgggtgacttgtcttgtcgaaaattgttgcccgcattatatcaactagaactggctaatttacttcacgaaaaaacaagaattattgggtgtgcccgagaagagcttgatttttctgcttatgttgacttgattaaaaataaaattcagcaatttttatttgatgaaattgatgaagcagtctggttacgttttataaagaaactggcttattgcaagcttgatctgaatcaatcagatgattatcaaaaattaacggactatgttaacccttctgagcgagtggttatttcttacttggcaattcctccaagcctttattctcaaacttgccgcagtcttgctcgccttaatctaacacagaaaccatcgcgagttgttttggaaaaacctattggccatgatttgccttcttctgtagcaaccaacgaacaagtggcttgtttttttgctgaagatcagatttatcgaattgatcattacctgggtaaagaaaccgtcttgaatttattagtgcttcgctttgctaattccatattttcaaccaattgggataatcgcgttattgatcgagttgaaatttctgttgccgaagaaatcggtgttgaaggccgttgggaatattatgataagtcgggccaagtcagggacatgctgcaaaatcatttgttacaaatattatctttagttgcgatggaaccccccttaagcctttcagcagaaagcatcagaagcgaaaaattaaaagtactgaaatctttgcgttttattaacaagtccaatgttcatgatcatacagtacgagcccaatatgtggccaatactttagcaaatggtaaaaaaatacctggttatttggaagaggtgggtgctaatcaggcatctacaacagaaacttttgttgctatcaaagcctatgttgacaattggcgatggtctggtgttccattctatatgcttactggcaaaagattacccaaaaagcaaagcgaagtggttatttattttaaaccacagccttataatatctttcatcccttaaatgaagaattgtaccctaatcagttaattattcgcttacaacccgatgaaggggtggaggtgaggataatgaataaaattccgggtcttggtgagcgtatgatgttgcatgattccaagttggatttaaatttccatcatagttttaaaacgcaaaggattgctgatgcctatgagagattattgctagaggtcatgttaggtaatcagtatctttttgtaagccgagaagaaattgaacaggcttggcaatggattgacagtattgtatcggcatgggaagaagataatattccgctgtatacctatccagcttgtacatgggggccaaaggaagtcatacgcttatttaatgggcaagcacatgtttggggtgatcacaatgcagtttca

SEQ ID NO: 25060 - DNA, 1099 bp, Legionella pneumophila
atgctagaagtgaatcaaattaatttaagtttaatcgatcttaatgagcgcatagaatcgcttagggggtatctttgacttcgaaggtaaaagtgagcgcttggaagaagtaattcgcgaattggaatcatccaatgtgtgggacaatccggaacaggctcaggcattgggacgtgaaagaactcagctggaaactatagtccactcattaagccaattaagccaatcaattagtgatcagagggaactgtttgaattggctcgagaagaagatgatgagcaaaccatcaacgacattggtgaggaattaaaatcaattgagcaacaagtcgccagtttggaatttagaagaatgttttctggcaaaatggaccactccaatgcttatcttgatattcaagcaggttctggcggcactgaagcgcaagattgggctgaaatgttattacgaatgtatttacgttggggagaacatcacggatttaccaccgagttgatagaatgctctcctggtgaagtggcaggaattaaaagtgcgactattcattttacaggtgaatatgcgtttggttggttaaggactgaaacaggtgtccatcgtttagtgagaaagtcgccatttgactctggcaacaggagacacacttcgtttgcagctgttttcgtctctcctgaaattgacgatgatatcgaaattgaaattaatccagctgatttgcggattgatacttacagagcttccggggctggtgggcagcatgttaaccgtactgattctgccgtaagaattacacatatccctagtgggatagtcgttcagtgccagaatgatcgaagccagcataaaaataaagaccaggcaatgaagcaattgagggcaaagctttatgagttggaaatgcaaaagaaaaatgcggaacagcaagcattggaagctagcaaatctgacattggttggggatcacaaattcgttcttacgtattagaccaatctcgtataaaagatttgcgcaccggtgttgaaaccagtaatactcaggcagtattggatggttcattagatcaatttattgaagccagtttaaaggcaggagtaggg

SEQ ID NO: 25061 - DNA, 1521 bp, Legionella pneumophila
atgagaaaaaagcctctatcaactggtgcagaatggactttcgagttaatacaggcctatgatcgcgaaattgcacgcatcgccaaaagctttaatttggatacatatccaaaccaaattgaaatcattaccgctgaacaaatgatggatgcctattcttcggtgggtatgcctatcggttaccaccattggtcttttggaaaacattttgtcagtgttgagaaaagctacaaaagaggacaaatgggcctggcctatgagcttgtaattaattccaatccctgtatttcttatttaatggaagaaaataccatggctatgcaagccttggttatcgctcacgcatgctatggccacaattctttttttaagaacaattacttatttaaaatgtggacttctgcggatgctattattgactatctggtattcgccaagaaatacatcagcgattgtgaggaacgctacggaatagatgcggtagaaccagtgcttgatgcttgccatgcccttatgaattacggggttgatcggtacaaacatcccacacccttatctatccaggaagaaaaaattcgacagcaaaaccgtgaaatctacatgcaatcacaagttaatgagctatggagaacgatacctttcagtaagcaaatcgataaaaacggacaaaaaaaacgctttccagaagagcctcaggaaaatattctctattttatagaaaaaaatgcccctttattagagccttggcagagagaaatagtgcgtatagtaagaaaactggcccaatatttttatcctcagggacaaactaaagtgatgaatgaagggtgggcctgcttttggcattatactattttgcatgctttgtatgacgaaggtttagtgactgatgaatttatgctggaaatactgcaaagtcataccaatgtcatcatgcaaccagcctataatagcccttattacaatggtattaatccatacacccttggctaccatatgatgcaagacatcaaacgaatttgtgaaaacccaacagacgaagacaaaaagtggtttccctatctcgcgaatactgattggctcacaagccttgatacggcgatgcgcaactacaaagatgaaagttttatcgctcaatacctgtcaccaaaacttatacgagatttaaaactgttccatattgttgatgacgaccgaaactccgaattatacatcaatgccattcacgacgaatggggatatcagcaaatcagagaagcattatccagacaatacaatctgggttatctggaacctgatatccaagtctactccgttgatttgcaaggagatcgttctttgactttaaggtactcccaacaaaacagagtaccacttggaagctcaacaaatgaagtattaaagcacttgcattatttatggcaatttccagtcatattacaggcagttgatggggaaaataaaatcaccgaggaatttagttgcccacctcttaataaaaataaaacagcggaaactaat

SEQ ID NO: 25062 - DNA, 945 bp, Legionella pneumophila
atgcattggtttgctcaggcaccagctaatattgctttgatcaaatatatgggtaaaaaggatgaaaattccaatttacctgataattcttctctatcttacaccttgagtaatttattaagttccgtgaaattagagaagttgccgactaaaaaagacatttgggagccacttactattcctggagcaccagaatttaacctgtcagttgaagcgcaaaaacggtttattgatcatttagtacgattgaaagagtattttggatatgtcggtgggtttttaattcaatccagtaataatttccctcatagcagtggtttagcgagttctgcctccagctttgctgccttgacaaagtgtgcatcaattgcattaagtgaactcactcaaaaacctttgccttctattgatgagcaagcacaattgagtcgattaggttcaggctcatcatgccgttctttttatgcaccatgggcgttatggacgggcgataaagtctctgcaatcgatttgccttataaagatctattacaccaagtcatagtaattagcagtcaggaaaaagaaataccatcaagggtagcgcataagctggttaaaacaagtcctttttatgaaacgcgaagcgaaagggcagaggcaaatttgaagttgttactgaacgcttttgaaaacaaagattggacgagtatataccaaatttgctggcatgaatttcttgacatgcatcaattatttaaaacctgtgaaaaaccattttcttacattacagataatactttgcatatattgagcgttattgaaaaattttggaacgagaaaggtgatggccccgtagttactatggatgctggtcccaatgttcatttgctttatagatcagatcaaacagatctcgcacgacaatttaaatcggatcatttggtaggaaactatgatgtttta

SEQ ID NO: 25063 - DNA, 891 bp, Legionella pneumophila
atgtttagtttgaaaaaaacaactgcggctgtatttgctctgggaagcagtgctttgtttgcaggtacgatgggtccagtatgtacgccaggcaatgtgactgttccttgcgaaagaaccgcatgggatattggtattaccgcactttatctgcagccaacttatgatgctgattggggctataatggttttactgatgttggtggctggagaaattggcatgatgttgatttagagtgggattggggctttaaattagaaggttcttatcacttcaacacaggcaatgacatcaacgtcaattggtaccatttggatgccaacaccgatcattgggcgtttgttgatcaattgcacgcctacgatattacctgggatgcagtgaatgctgaactggggcaatttgttgattttagcgcgaacaaaaaaatgcgcttccatggcggcgttcagtatgcctacatcaaaacagacgttaatcgtcacttaaacggcttctttctagataacttcaattccaaattcaatggatttggtccccgtaccggccttgatatgaattatgtattcggtaatgggtttggtatttatgcaaaatcagctgtagcaatcctggtcggtacaagcaaattcgtggataactgtactgtctgtggtttttcttatggctccaaaaatgcaatagtgccagaagttgaaatgaagttaggagcagattatacctatgcaatggctcaaggtgatttgactctggatgtgggttacatgtggttcaattacttcaatgccttacataatactgctgccgtgaatgttggcttaggcacttctctggaaaccgacttctctgcatctggcccctacataggcttaaaatatgttggcaatgtc

SEQ ID NO: 25064 - DNA, 1635 bp, Legionella pneumophila
atgacaaaatatatttttattactggcggggttgtgtcttctttaggaaaaggcatagcagccgcatctcttgcagctattcttgaagctcgtggtcttcgcgttacgttgataaagcttgatccctacattaacgttgatcctggtactatgagtccctttcagcatggcgaggttttcgtaacgaatgacggggcggagaccgatttggatttgggacattatgagcgctttgttaaaacaacaatgaccaagcgtaataatttcacatcgggaaaaatttacgaaaatgtaattaagaaagaaagacgtggtgattatttaggagggacagttcaggttattcctcatattactaatgaaatcaaacgctgtatcaaactcggtgcggatgcattcgatgtggctatggttgaaataggaggaactgttggtgatattgaatcattaccctttcttgaagcaattaggcagatgcgtattgagttaggttcacaacgagcgatatttattcatcttactttggttccttatattgctacttctggggaaaccaaaaccaaaccaactcaacactcggtaaaggaattgcgttctattggtatccagccagatgtattgatttgccgttcagaaaaaccattatccatggcagacagggctaaaatcgcactattcactaatgttgaaaaagaagctgtgatttctcttgaggatgcgaatagtatttatcaaatacctatgattctacatgcgcagcatttagacgaaattgttgttaagaaactaagcctggaagctaagcaggctgatttgagcgagtggcaacgagtagttgatatgcaagcagttcaaacgatgacagtgaaaatcgctatggtaggtaaatatacggagctgaatgatgcctacaagtcgattaatgaagctttattgcatgctggaattcatactgaaacaaaagtagaaattatctattttgatgctgagatgatagaaaagcatggcgctttattgcttgaatccattgatgctattttggtacctggtggttttggtgagagaggagtcgaaggcaaaattaaggctatccaatatgctcgggagcataaagttccttttttagggatatgtttgggtatgcaaacagctgttattgaatttgcgagaaatgtagtcggtttgacaggagctaattcgaccgagttcaataaagaaacattgtatccagtgcttggtttaattagtgaatggatggatgccgatggcagcaagcagatcagggacgaaaatactgacttgggtggaaccatgcgtttgggcggacaatactgtcatcttgctgaaggcactctggcaagaaaagtttatggcaaaccacaaattatagagcgccatcgccatcgatatgaagtcaataacaagtatgtggatagtttggtaaaacatggcttaattatttcagggcgatcagcagataattcactggttgagatgatagaattagcggaccacccctggtttttagcttgtcagtttcatcctgaattcacatcaaatccaagagatagtcatcctctatttaaggagtttgtacttgcagctcgtattcaccatcaagagaaggacaaaaaa

SEQ ID NO: 25065 - DNA, 357 bp, Legionella pneumophila
atgccaagagtaaaacgtggtgtgacagcaaaagcgcgtcacaagaaaattttagaccaggccaaaggttattatggtgcccgtagccgtacctatcgagttgctaaacaggctgtaattaaagctggtcaatacgcataccgagacagaaggcagaaaaagcgacaattccgtgctttatggattactcgtatcaatgctcaagctcgtgaatgtgggttatcctacagccgcttgattgatggtttgaaaaaagcttccattgagctggacaggaaaatcctggctgatatggcagttcatgataaagttgcctttgctgctattgcagaacaagccaaagcagctttagctggt

SEQ ID NO: 25066 - DNA, 573 bp, Legionella pneumophila
atgaatactgtgctaaaaatattgatggctggggtcgatgaagtggggagaggaccacttgcgggtgccgttgtaaccgcagccgttattttaaaaaaaccaatagatgggcttaccgactcaaaaaaattaagcccaaagcaaagaaatttattagcaattagaataaaggaagaagcgttagcttttgcctatgggcgagcagaagttgaggaaatagatcaattaaatattcatcatgctactctattagctatgcgaagggcagttgaagctttacccattcagccagataatgtctttgtcgatggagcttttactcctcaattgaacataccatgcaaggctattgtccaaggagatagcttgatacctgaaattagtgcggcatccatcctcgccaaggtattgcgtgatgaagaaatggtagctcttgataaaatatatccaggatatggttttgcagaacataaaggttatgcaacccctgttcataaagaagcgctaatgcgtttgggtccttgtaaaatacatagaagaagttactcccctgttgcggatttgatttcaaag

SEQ ID NO: 25067 - DNA, 1386 bp, Legionella pneumophila
atgatccctgttatcgctttagttgggcgtcccaatgttggaaagtctactttgtttaatagaattactaaaacgcaggatgctcttgtcgcagattttcctggcttgacaagggatagacaatatggacacgctcaacatgaaaacaagtcctttattattgttgataccggaggcataggagttgatgacattgaagtagatactttgatgtcaagacagtctcaagttgctttaaacgaagcaaatgtgattcttttcttggtggatggccgttcaggactaacaggtatagatcagcaaattgcacaagcattaagaaaatttaataaaaaagtacatcttgttgtcaataaaacagatggaatgaatgaagatattgcttgtgccgattttcaatcattaggcattactgatatacatgctatatctgcatctcatggtggaggcatcagttcactactcgaagaaattctcgagccatttacaacagaaacgcatgaagcaactgatgataaagcgatcaaaattgcttttgcggggcgccctaacgttggaaaatcaactttgataaacaggatattaggggaagaaagagtagttgtttatgatatgcccggaacaactcgagatagtatttcaataccctttacaagagaagataagcaatatgtgcttattgatactgctggtgtacggcgtaagtctcgaattgatgaaaaaatagaaaagttttctgtcatcaaaactctgcaagctataaaagaagctcatgtctgtttgttacttcttgatgcaaatgaaggcattaccgatcaagatatgaatttgctcggttttattattgaatctggtaaagcactagttattgctgtgaataaatgggatggcctggaagaagatcataaagaaaaaataaagtcagaactgtcaagaaggttgcattttgcaaattttgcaaaaataagatttatttcagcattgcatgggagcggggtaggtggattatttaaagatattaatgaagcctatcattcagcaatacaatccttttctactccaaaactaaccagattattacaagatatcagcgcaaagcatacaccaccatgcatcaatggccgacgaataaaattacgctatgctcaccttggcggacacaatcctccagtcattgttattcatggaaatcaactcgatgccttgccagaaagttataaacgttatttaaacaatgagtttattaagcatttaggattagtaggtactcctttaaaaatcgagtttaaaggaggtcaaaatccatttgccaataaaaaaaataaattatcacaaaggcaagtgaacaagaagaaacgattaatgcgatgggcaaaaagcaagaaa

SEQ ID NO: 25068 - DNA, 1119 bp, Legionella pneumophila
cgtggtggattagccgaactaaagtcaagactgatgtttgttgttctaggcatattagtttaccgattaggtgctcatatacctgttccaggattagatcctgcaaaattagctaatttttttagtgaacagcaaaacactatatttggcttgtttaatatgttttctggtggagccctgtctcgtgtaacagtgtttgcgattggtattatgccttatatttctgcatcaattattattcaactgttttctgtagtttctcccaagctggagcaactaaagaaagagggtgaatcaggtcgtagaaaaataaatcaatataccagatatttaacattgctcttgtcaatatttcagtctatgggtatggcgagatggttggctagtcagcaaattgctatgcaaccagatttctcattctattttactgctgttgtaactttagttacaggcactatgtttttaatgtggttgggtgagcaaattacagaaaaaggtgttggtaatggaatttccttaattatcttttctggaattgtctctagcatgccaaatgctataggatctgtcctccagcaagttaaggaaggtcagatgcaagctcttacactagttataattgcagcagtagtaattgtagtaactggttttgttgtatttatggagcgtgctcaacgacgaattcgtgttaattatgcacagagaacgcaaggtaaaaaggtatatgcagcccaaacgagtcatttaccattaaaaataaatatgtcaggtgtgattccaccaatatttgcatctagcattattttattaccagcaactttagctcaatgtttttcacaaacctaaaggctgagatggttatctgatagtggaatggcactatcaccaggtcaacccttatatttgataatgtatgcaacagctattttggtctttgcattcttttatgctgccttaatagtttaacccctaaagatacagcagaatacctggaaaaaatcaggagccttatattccttggatttcggccaggagaggcaaaccacctaaatttatccgattcaatggaagactcggttggactttattggaaccctttaacttgggtttaagaatggt

SEQ ID NO: 25069 - DNA, 1599 bp, Legionella pneumophila
atgaatattaaatctaatttggcatatagctctgttatcctgaaaggtcatgttaaccggtatgcctttttaggattgcttatttctgttggcagtatcttgattgcaagttgtattgtttcctatcaattgactgggtctgtaagcttaggagggtttattcaggcacaaagatctaacccggcaatttggattctggatttaacaccttttatgtttgtttattgggggcaagcgttttgttatggattggttaacaaagcggagagtttactggttgataaaaccaaagaacttttgaatattagtgggaatctggaattaaaactcaaatatgatagcttgaccaatttgcctaacaaccgcttgttaaatgaaaaaatacggctcgctattgaacaattgggatcacaaggtgagttagcagttattgtgataaaaattaatgatcttaattataatttcagctcatttaataccaataatatcgtaaagcaatttgctgaaaaattaaaatcggttctgattgatccctacatgctaaaagcgtctcttggaattaatatggttgcaagattgcaaagtgatgaatttgccatattgatgccaagacttaaaaaggatttggaaattaatgagctgttaattcatcttcttaccttgctaaatagtaatctcatggtggatggaattaatatcaatctggccactaccgttggtgctgctatctatcctatccatggagaagaagacgatgttttactaaatcatgccattattgcagtttaccaggcacgaaaggaaaacaaatcctatgcaatttacagccctgaaatggaagaagaccttattaataatcggattgtgatgaatgaactgcaacgctccattgaaaacaaagacttgaaaatatattaccaaccgatagttgaattagctaatggccaaattgtaggtgccgagtcatcagctcgttttgaacatcctgaattaggtttattaagcgcggaaaaattcatgcctttaatcgagggaaccagtttaattcataatttgacaactcttatgcttaaggaagtcataaagcaattagccgcttggcatgatgctggacataaaatttttgtctcggcgaacctgtcagtgaatcgtgggctgcctgatttgatagagaaattattaaatgattatgagattgccccacaattcctgaaacttgaatttaccgaaaggacttgtttagctgagcagatggttaccagtgaagtttttgaacgattatcaaccatgggcatcaaattatgcatagatgatttttgcagcgagaactcttcctttatttatttgactgatttccctattgaaaacattaaagttgagaaatctttcgtactgaaaatagccaaagacgcaaaaaaagccaaaattgtagaggctatagtaaaactggcccaaacattagggtgggaacccctggcagatggcatcgctgatcaaaatgcattggaaaaattaagagacttaggctgcttgtatggccagggattatatttttctcgagcggtcaatgtggctgaatttacatcattgctaaagaaa

SEQ ID NO: 25070 - DNA, 2583 bp, Legionella pneumophila
atgaagaacgataatcgcatcataaaaaatacgattaaacagttcaaggagaagctgtgcaaggactttagccaaaaaactaatattacctccatcacacgcaagcttgctgtatttattgatactattttaattcaattatttattaaaaataagctacactttggagataatttttgtctcctggctcttggaagctacgggcgtagagagcttcaactccattcagatattgacttgttaatattgcacactgaaaaagtaagcaatatccaattacaacgcgcacaaaaatttatccaggattgttgggatgtggggctggaggtaagccatcaaattaccactgtttcttcatgtgccaatttggccagtcaggatttgagcgtaatttctaccattatggatatgttcttactgtgtgggcatggtgccttaatggaggaattaatataccaaacacataccttgcacatgtggcctagccatcaatacttctttgccaaacttcaggaacagcaaaatcgttatgcaaagtatggagaaaccgcctacaaccttgaacctaatattaaaaatggtccaggtggattaagagacctgcaaattttgctaagcatcagcaaacgccattttaaaattaaaaaattagccgagggaatcggttacggctttattactgataaagagtatgaagaattaaaatactgccagaactttctttggcgcgttcgatttgctttgcatatgttagcaggaaagcctgaggagcgcttgtcatttgattatcaggttaaattagctcaattttttggatatcaagatcagtctcatatcttggccatagagcaatttatgaaagactactttaaagtcatcaaacgcaatagagagctgaatgaaatgctcttgcaatggttcaatgaaaccatagtctatcatcaaaagcaaaaaattattcgtctggatgatgaatttcaactgtcaaaccgattcattgaagtacgcaataaccgtgtatttaaacaaaatccgcaatctatattaaaactattctattggcttgttaaacgccctgacatagaaggagtaagggcaagcacaatcagactaataagagaatcattatttttaatgggcaaacgctttagacaatcaaaagaaaccgctaatatatttatcaacatattcagaactggtaatgatccatacgatgcattacaaagaatgaatagatatggtgttctagcgcactatcttgattgttttgctacagtcactggacaaatgcagtatgatttattccatgcctatactgttgatcagcatacactgtttgtgatccgtaatatatctcgctttaaaaagaacgaatatgctaaacaatttcctttatgcgccaaaatcattactgctttagagaaacctgaaattttgtatctcggcgctttattccatgacattgccaaaggtcggggaggagatcattctgaattaggagcaattgaggcacaacaatttacacaacgccactatatggaggcagaagatagcaaattgattgtttggcttgttcgctaccatttactcatgtcacaaactgctcagcgtaaagatatttatgatcctaaaacaattgagcaattctgccaacttctgcctcatgcaaggtatttggattatctttatttactcacagtagcagatatttgcggtacaaatcctactctttggaatgcctggaaagattcattacttaaagaattatatcatgcagcaaaaacaagacttcataaacaacaagagttgcttgatgaagcagctctgatatccattcgtaaacaatacgctatggatatattaatttcagatgggatatccttcagagtcatacaggatttatggggtcaatttaagggaaaatattttcttcatgaatctcctgaggtaatagccagacacaccaaggccatactgaacagcaaacaatttccagtggtaataattatgccgcatcacagtcagggtggaactgaagtatttatctacatgccacataaagatgagagatttactatcaccacttcagtattgagcaatcatcacgttactatacaggaagcagcaattattacttgtgataatcaatttgatctggatacttatattattttagatgaaaacaatcaggcttttttgaatgaacaacgtgccagagacatccaaaaaagtctatgtgatcatctggccaatacaggacgcctcccagctgtttctcgcagaagattatccagagcattgactcattttaatgtcaaaacacaaattaactttattgatgacaatacgaatcatcaaacccaactatttctcgttaccaatgacagacctggacttttggcgactataagtcgcgtgtttcttacactaaacattcatttacataatgcaaaaattgctacagctggtgagcgggtagaagatatgttttatatctccaaccagacaggttattccctgaatcatgaggaaaaaacaattttaaaagaaaaattaattttggaaatttctaaaagcaagtat

SEQ ID NO: 25071 - DNA, 363 bp, Legionella pneumophila
atgactaatattattgaccaaattaatgccgaacaaatgcaaggcaaagaaattcctgatttcaacccaggcgatactgttctggtccaagtaaaagttattgaaggtaaccgtgagcgtttacaggcatttgaaggcgttgtgattgccaagcgtaaccgtggacttaactccgctttcactgtacgtaaaatttcccataacgtcggtgtagagcgcgttttccaaacctacagtcctattgttgatagtattacggtgaaaagacgtggtgacgttcgtcgtgccaaattatattacttaagaaatcttgccggtcgcgctgctcgtattaaagaaaaattatctgggaagaaaggcgat

SEQ ID NO: 25072 - DNA, 780 bp, Legionella pneumophila
atgaaactgaagaataaagtcgctattgttacaggagcagcaagcggaattggtaaagaaattgcgcttgtttatgctaaagaaggggcaaaggtagcaatcgctgatctgaatcttgatcaggcaagccatgtagcagaggaaatcaaatcatcaggcggacaagcaatggccgttgccatgaatgtaactgatgaagcacaagtcaatcagggcgtggataaagtagccgatcactttggaggggttgatgttttagtcagcaatgccggtattcaaatcatcgaatcagtggataaattagccttttcagactggaaaagaatgcttgccattcatttggatggtgcctttttaactactaaagcttgcttgaaatacatgtatgcctcaggcaatggcggcagtattatttatatgggctcggtccattccaaagaagcttctgtactcaaagcaccttatgttactgccaaacatggtctattgggtttatgcaaagtagttgccaaggaaggtggaactcataaggtaagagccaatgtcatttgcccggggtttgtccgtactcctctcgttgacaaacaaattccagagcaagcaaaagaattaggcatcagtgaagaagatgtcatcaagaaagtgatgctaaaagaaacagttgacggggaattcaccaccacagacgatgtagcacaaaccgctttattttttgcatcatttgaatcgaatgcgcttacaggacaatcattggtagtcagtcatggttggttcatggag

SEQ ID NO: 25073 - DNA, 408 bp, Legionella pneumophila
atgagtaaaaaatctatctgtttagccacgctcgccttgatatttacctttggtcagcctgtctttgccaactcaagcgaagctacacaaacaaagccttgtcattgccatgatcacaaaaaaatactcagtcagcttaatttaactcaagagcaaaaaaccaaaatcaaaacaatcaaaatacaagcccaaaaatcaatcaaagaaaattatagacaacttaaagcgatcaaagaacaaatcaatgcgctcattgcaaatgagaagcttgatgaagccaagctggatagtttaatcaaccaaagaaataaaataacagggactatgctaaaaaatcgtgtaatgatgaaaaatcaaatttacaatcagctaacgaacgaacaaaaatcacaatacaaaaagaatatg

SEQ ID NO: 25074 - DNA, 888 bp, Legionella pneumophila
atggataaagactactataaaatcatgggagtcagtcaggatgcttctgaaaaagacatcaaaatggcttaccgaaaattagcccgcaaatatcaccccgatattagtaaagaaccagatgctgaagaacgatttaaagaaatggcagaagcctatgaagtactgaaagaccctaaaaaaagatccgaatatgatcaatatctgaaatacaaggaattcaatccccaaagcgatggatttaccgggcgaagaactcaagagcaaccctttcaggaatttcattttgacagcgatttttttgaaaccttgtttggacattcgcgctatcaacagcaaccgatgactggtcaaaactatcatggcaaaatcactatcagtctggaggaagcttaccatggagctgttaaaaacttacaagttcctgttgaacaaggcacagagactaaaatacagaccctgaaagttaaaatccctgcaggggttaaatcaggacaacaaattcgcttggcaggacaaggaggcagtggaagtggagggggggctcgtggcgacctttatctaacagtcgaagtgatgaaacaccccatatttgatgtcatggagaatgatatttatctgacattacctgtcacaccgtgggaagctgctttaggagctacggttgtcataccaaccctggcaggaaaaatcgatttaaaaatccctccgggctcacaaggcgggcaaaaactcagaattaaaaatcgcggattaccaggttcaccccctggtaatcaatatgttctattaaaaattattaccccccctgctcaaactgaagaagcaaaagctttatataaaaaaatggcggaggtaatgccttacaaccctcgtaagactatgggagta

SEQ ID NO: 25075 - DNA, 1083 bp, Legionella pneumophila
atggcagaaactccaaaacccaaatcacagacaccaacaccgaagccgaaaccaaaaccaacggatgagcagactgttgagccagctcctcaacaaagtacgcttgggaaagtaggtagtgtaatcggaggacttgctaaaaaagggttaggcaaattagccgataatatcggcaagcaatttggctcaaatgctcctcagcctggtgctgaaaataagcctgcggaaggacaaaagaaggatgatgacaaaaaagatccgcaaatggaaatgattgaaaggtatatgaagctggtcgagcaatggcaaggcggtatcaacaagcctttttactgggtgggtggcaaaatatcagctggtgccagttttctggttgataaggcagtggaagggattaaaaataaactggctgaatcagagcaacccaaaccaaatcccaactcctcaacgcaacaatccaattccagttcgagttccagttctagtagtactacccccacacctacttcgtcaagcagcagcggcagccagtcttcatcaccgcctacaacaagcagtggcagcgacagccagtcttcatcaccgcctacaacaagcagtggcagcgacagtcagtcttcatcaccgcctacagacagtagcagcagtggcagcgatagccagtcttcatcaccgcctacagacagtagcagcagtggcagcgatagccagtcttcatcaccgcctacagacagtagcagcagtggcagcgacagccagtcttcatcaccgcctacagacagtagcagcagtggcagcgacagtcagtcctcatcaccgcctacagacagtagcagcagtggcagcgacagtcagtcctcatcaccgcctacagacagtagtaacagtagcagtagcagcagtagtgatacttcatcacaactgagcccgccaccagactcgaatactaatacaagtacgccagatcttggtagccaaacaaagtatgacgaaacatccagcagttctaacagcgggagtggtcaatcttctggctcaggctcatcttctgatgtcccaacacctagtcagtctatgcctgga

SEQ ID NO: 25076 - DNA, 1071 bp, Legionella pneumophila
atgcacgaacagtttctgcttgcagcacttgaacaagccaaactggggagaggcttttgtgcccccaatcccagcgttggggcggttgctgtgcaaaatggtaatattatagcacaggcatggcatagaggtgcaggtacaccgcatgcagaacaattattgttatcacaaattccaccccaaacgccaggggttacgctttatgtcacgctggagccttgtaatcattggggcaaaactcccccttgtgttgatgctattatcaatcatggtatagaggaggttgttttttcctattttgatccaaaccccattgttgccaaaagtaactcctcagaaaaattacgtgaacatggaatacaagtcaggcatattcctgtaaaggcaattgatgtgttctataaaagctatgcttattggactatgacccataaaccaagagtcactgttaaaatagcacaaacttttgatggtaaaattggaaagtctgagggagctcgagtggttttgtccaatgctttatgcgaacagttcactcatcaaatgcgtgctgccagtgatgtcatattaaccagtgccaagacagttcaaatggataatccaagaatgaacgccagattagatagtggattggtagcaaagccagttgccattgttgaccgcaatttaagtttgtctgatgacacaatcattttttcgacagcaaaacattgccacatttatcatcaaccacaagcaaatcaggcaaagacttatcctaatagcactcattatgcgatgcctttgcaaaatgggttgatggacctggaggcaataataactcatcttggtcaactgggatatcatgacgtatgggttgaggcgggcggagctattttttctgcgttacatagtaagggattggtgcatagaacctatttgtatttagttcccggcagtttagggcatcaagcgatttcagcttatcaacaacaggggatttttgaaaaagctcatacggtgagttggcaagctatgggtgacaatatgatagcatgtttggattggcaggaggatgagtgtttaccggat

SEQ ID NO: 25077 - DNA, 1216 bp, Legionella pneumophila
gtgtcaactactgcttggcaaaaatgtttaggtttgttgcaagatgaattttctgctcagcaatttaatacttggttgcgccctttacaagcttacatggacgagcagcgtttaatcttattagcgcctaatcgtttcgttgttgattgggttagaaaacattttttttctcgtattgaagagttgatcaaacagttctccggcgatgacatcaaagctatttctattgaagtaggtagtaagcctgttgaagctgttgatacgcctgctgaaacaattgttacttcatctagtacagcacctctaaaatccgctcctaaaaaagcagttgactataaaagcagtcacttaaataaaaaatttgtttttgacagctttgtcgaaggaaattcaaatcaactggcgagagctgcgtccatgcaggtagctgagcgccctggggatgcttataatcccttatttatttatgggggggtaggcttaggtaaaacacatctcatgcatgccattggtaatagtattttaaagaataatcctgaggctaaggtattgtatttgcattcagaacgttttgttgcagatatggttaaagcattgcaaacaaattctattaatgaatttaaacgtttttatcgttctttaaatgctttacttattgatgatattcagttttttgcggggaaagacaggtcacaagaggaattttttcatacttccaacgctttactggaaggggcaacagcaaatcattttgaccagtgatcgatatcataaggaaatagaagggatggaagagcgtttaaaatctcgatttggttggggattgactgtagcagtggagcctccagagttagaaacgcgcgtggcaatattaattagtaaagctgagcaatctaatattgaattgccttatgaagtagccttttttatagcccaacgtatacgttcgaatgtcagagaactcgaaggggccttgcgtcgagttatagccaatgctcactttactggtaagccgataactattgaatttgtacatgaagcattgcgtgatcttcttgctttacaagataagttagttactatagaaaatatccaaaaaacggtagctgaatattataaagtaaaggtcgctgatttactttcaaaacgcagcagccggtctattgcaagaccacggcaaatggcaatggctttgagtaaagagttgaccaatcat

SEQ ID NO: 25078 - DNA, 1665 bp, Legionella pneumophila
ttgatgaacaaggacaagaataaacgtgttatttctgcccctagaggtaccgaaattcaagctaaaaattggttaactgaggcggcattaaggatgatttgcaataatttggatcccaatgttgcagaggatcccgattctttgattgtttatggtggattgggcaaggcagccagaaactgggaatgttttgatgaaattgttcatgtattgaaattattaaataatgatcagactttactcattcagtccggaaaacctgtcggtgtatttactacccatgaagaggctcccagaatactaattgccaattctaatttggtaccgcgctgggctacttgggagcattttaacgaactggataagaaaggcctgatgatgtatggccagatgaccgccggcagctggatttatattggttctcaaggcattgtgcaaggaacttatgagacatttgttgcggcagctaaaaaacattatcagggtgatttgtccgggcgttggattttaacagcgggtttagggggaatggggggagctcaacccttggctggaactatggctggtgccagcgttcttgctgtagaatgtgacagacaaaggattgagaaacgtttacagacaaagtatctggatcggtacactgataatttaagtgaagcattagactggattaatgaatcctgtcgccgtaaaaagccagtttcagtagctgttttgggaaatgctgctgaaatatttcctcaactggttaagttgggagtgcagccttctctggttaccgatcaaaccagcgctcatgatccgctcaatggctatttgccattaggatggacattagaacaagctgttgaaatgagaaaaaaatcaccagaagaggttgttgatgcagccaagaaatcgatggctgttcaagtgcatgcaatgcttgaatttcataatagaggcattcctgtatttgattatggcaataacatcagacaaatggcatttgaagcgggagaaaaaaacgctttttcctttgagggatttgtacctgcttatatcaggccattattttgcgaaggaattggaccatttcgatgggttgcattgtcaggtgatccagaagatatttatgcaacggatgagcgagtaaagcagttaattcctgacgctcctcatttgcatcattggttagatatggccagggaaaaaatttcatttcagggattaccagcaaggatatgttgggtagggttaaaggatagagcacgccttgccctggctttcaatgaaatggttaaaaataaacaagttaaagcgcctattgtgattggccgtgaccatttggattctggttctgtggctagccccaatcgtgaaacagaaggtatgctggatggcagtgatgctgtttctgattggcctttgcttaatgcgctgttaaattgtgccagtggggctacttgggtaagtattcaccacggaggaggggttggtatgggcttttcgcaacatgctggcgttgtgattgttgctgatgggacagaaaaggcagctaaacgattagcccgtgtgttacacaatgatcctgcgacaggggtaatgaggcatgctgatgcaggttatcaaattgccaagcaatgtgccaaagagaactcgctttggctacccatggaatct

SEQ ID NO: 25079 - DNA, 1311 bp, Legionella pneumophila
atgtataacattctgttaatttttatagcattcctgctggtgcttctcaatgcattttttgtatcggccgaatttgggatggttaaactcagggctacgagaattcaagccatcaaagaaaattacgggctaagaggccgcattcttgagcaagtccatcaaaatctggatgcgtatttatcagcatgtcagttaggcattactcttgcttcgttaggattgggttggattggagagcctgcttttgcagagttattggggccattatttgttgctttgggtatttcatcggttcatattgttactatatcttctttttttattgcattttttcttatttcttttctacatattgtaatcggtgagctcatgcccaagtccattgccattcggcaatctgaattgatttcaatatggactgcagtcccgttgtattggttttactggataatgtatcctgccatttggttgttaaatacctgttccaatttttttctcaaactgtccggcatggatataaaaaatgaatacgaaggtttttattcaagtgaggaacttaaattaattttaagcggacagcatctgcaatcggaattaaaagaggatgaacgtgaaatcctggagcatactctcgatttggctgagttaaatgtcactgaggtaatgcgtcctgaagatgaaatgatcataatagatataaatgagccattcgaaacgattaaagataaaattttaaaatatcgttatagtcgttatcctgtctatgattccgggactaaggaaatgattggtgtcatccatgttaaggatttatttgccgatttgttgctccagaaaaatatcaatacattaaagccttatgtgcgaccagtacttaaagtcagtcataaattacctgctatggatttgctgcgtaaattcagagctggtatgcctcattttgctttggtatacaaacacaaatcgagtttacttggatttgtaactctggataatttgctccatatcctgattgggcggattaaagacgagtttcataaaacacatgaagattgggtaaaaaattcggacggaactataacgacaaaaggagattgctccctttattctctagaacgggctcttgattgcgatattactttatcgccagatgaagaagaactgaatacactatatggacttattatcacgcgccacggaaaattgcccaatgaaggcgaaataattcaatttgttgaatttgatgccttgattgaaaaggtacaggattcttttataaccaaaattaaagttttccccaagattaaaaac

SEQ ID NO: 25080 - DNA, 1635 bp, Legionella pneumophila
atgttatggggtttattgagtttattttcatcattatcttttgcagaaatcaaagttgaacttgagccttcgcaagtcacaatgggagaaacctttaaattatccattactcaagaagatcaacaggggggcggagttcccgatctgactgaattgcaaaaggattttgtgattttgggtacagaaaggcatgtaaactattccattattaatgggcaggcgcaatcacaaagtcaatggattgtactcttgagagcgctaaagccaggtatttttactattcctccaataaaagtaggtcttgaacaaagtctgccaatcactatcaatgtccagggtagtgccaatacacaagctttgccagatgaggctatacaaaagcaggacgttttcctgacagctgaagtgaatgagaaaaacccctatgttaaccaacaaattatttatacggtcaaattatacaatagcaaacgattgttagatgccgattatcaaggtccaaaagttgatgatgccttgctgattccgttaggggatgcgaaacgttaccatgctgttcataacaacattaattatgttgttgaagagcaaacttatgcgatatatccgcaaaaaagtggcactttgaaaatcatatcaccgatttttaatgctcttgtatatgactataacccccaacgcaccaaagcgacggataaagcgattaacttaactatcaagccaatccctaaaaagtatcaaggcaaattatggttgccagcaaaacaggttaagttatccgagcaatatgaaaacagtaatcagactctcagtcagggaagtacgttaacacgtacagtgacattggaaggaataggcattccagctcagttattgccaacacttacctttcaagaaacagatttctttagcgtttatccagagaaaggggcggaacgcaatcaggttaagcaaggtgagctaattggcagtgtcgaaatcaaggtcacttatttgttcaacaaagcaggcaaaacgacaatacccgaattgcgtcttacctggtttaatactgaaacaggtaaagaagaaatcgctgttttacctccaaggagcatagatatcatcccttctactgcggtcaaggcaaatactgcaaacactcaagtcacaggtaaagaaatgtctgccagcagtcaattagcgcctgattctgcatcagttgccaatgaatcaggaggttgggctgtgaagttggcaatattttttggtttggcctggttaatcactttaagcttatggatatggcaaaagcgaccgagagagtcatccagtaaaaaggagtataaaaaagctttggatgctttaaataaagcttgtagtcaatgtaatcccaaaaaagctcgtgatgctgttttaaaatgggcctctttgcaatggcctgatgctccaatgcttaatttaactgacttggcgcaattggtaagagacgcgcatttaaggaaacaattgcatctgctttcgcaagtcttgtaccgaagtcaggaaaaaacattatggcgcggggatgaattattgcgggctgtgcaagcggtaaaacgtaacgaatctgtgaaaaagcgaaaaaacagtaatttacctcctattaatccattt

SEQ ID NO: 25081 - DNA, 645 bp, Legionella pneumophila
atgtcctaccagatggtttatgatttacttaacgcaacaggagaaacactgtatatggtgttttttagtactctatttgcagtactccttggcttgcctttaggtatattgctgtactcatcatctcggataaaaccaaacattaaattgaataaaattttatctgctctgattaatattttccgttccatcccttttatcattttacttgttgcaattataccattcaccaggctaattgttggtaccagcatagggatcaatgcagcaatcgttccattaacagttggtgcgactcctttttttgcaaggctagttgataatgttctccaatcgttaccccttggtcttatagaaaccggttattcaatgggagctaacacacgccaaattattttacatatcatattacctgaggcacaatcaggattaattcattccattacagtaacagcaatcactctgattaattattcagccatggcaggagctgtgggtgccggaggattaggtacattagcgattaactatggttatcaacgctttaatgctggcattatgatagctactgtgattgtattaattattttggtccaactgatacaaatggttggagactacttggccaaacgttgtacacattat

SEQ ID NO: 25082 - DNA, 1191 bp, Legionella pneumophila
atgagtcaatttccacgcattaaacgcttacccccttatgtatttaatacaataaaccagcttaagatggaagcgcgggcgcgaggagaggacattatagactttggcatggggaatcctgatcaaccaactccacctcatattgttaataagcttatagaggttgctcaaaggcctgatacgcatcgatattcaatgtcgaaaggaattcctagattacgtcgagcgatggcaacttggtatcttcgacattatgatgttcatctggacagtgaaaaacaaatattagctacaataggatctaaagagggacttgcacatttggctttggcaatttcaggtccaggtgatacggtgcttgttcctgaccctgcttatcctatccatacctacggatttatcattgcgggtgctaatgtaaagcaaattcctttaatcgatgaagttcaatttttggctgcagtagaagatgctattaacagaacctggccaaaacccaaagccttggttttgaattttccggcaaatccaagtactcactgtgttgaatatgagttttttgaaaaggtggttgatcttgccaagcgtaataacatttggattattcatgatttggcctacgcagatatagtttttgatgggtataaagccccttcgattttacaagttcctggtgccatagacattgcaattgaaacttactcaatgtccaaatcttataatatgcctggttggcgtgttgggtttgcttgtggtaatgaagagttagtagctgccttaacacgtataaaatcctacttggattacggtacttttactcccattcaggttgctgcaattacagcattggaaggccctgatgattgtgtgttggaaataagaaatctttatgaaaaacgacgcaatcttttatgtgatggactgaatgacattggttgggaagtgagcaagcctaaagggaccatgtttgtttgggcgcctattcctctcaattaccgcgctatggggtctcttgagttcagtaaatatttattgaaagaagcacaagttgctgtttcacctggtataggttttggacagcaaggggatggttatgtccgattcggcttaattgaaaataaagacagaataagacaagccttgagaaatttaaaagctctgtttaaaagagatggtttactgaaggctatt

SEQ ID NO: 25083 - DNA, 582 bp, Legionella pneumophila
atgaaagaaattattttggcaaccagtaaccctggaaaaataaaagaattagaacaattactagcccccaccatatgcattccccaagccgacttgggtatatccgatgcggaagaaacaggattaagttttatagagaatgccattctcaaagcccgtcatgccagctcattagccaataaaccagctttagccgatgactcggggcttgtagtcccctctttaaatggagagccgggtatctattcagcacgctatgctggaataaaggcaaatgacgaagacaatattcaacaattgttaagtaaaatggctgatttatcccaagaacaaagacaagcctattttttttgcgcaatagcgctaatgcgacatgccaaagatccaacaccgctcattgccacaggcgtatttcatggccttattagcgtgaaaccttcaggaacaaatggctttgggtatgacccggtattttatctcaacgaatatcaatgcacagccgctgaattacctgctaaaattaaaaataggattagccatcgcgcaaaagctttaaaccaattacgcgcccttcttccagat

SEQ ID NO: 25084 - DNA, 861 bp, Legionella pneumophila
atgattgatattcgttcattactggaacaagctctgcaacaattcaaagtcaaaaaccaggaaaccaagttagaggcagaacttttactctgccatgtgttaaacaaaaaccgggcctatctttttgcccatccggatgctttggtttctcctgaacagatagaaacctatttgcagatgattaaacaacgtgctgaaggtctaccaatcgcctacattactggacagcgggaattttggtctctttcgttaaaagtaacacccaatgttctcattccaagacatgaaaccgagcgtctggtggagcttgcactggagctaatacctgacaaggagaatgtttctgtccttgatctgggaacaggaagtggtgctattgccttggcgcttgcaaaagaaagacccctttggcatattgacgcctgtgatttcagcaaagaggcattggagttagcccgttataacgctaaaacactcggcttaaacaatattaatttctgtcattcctactggtttaataatctccccctaaaacaataccacgctattgtatctaatccgccctacattgctgaaaatgatcctcatttaaaacatggcgatgtccgctttgaaccaacaagtgcattagtcagtagtcaagatggattagctgatctacaatatattattcagcacagttatgaatatcttttgcctgatggactgctcttggttgaacatggttttgaacaaaaaaatgagataagcgctatacttaatcaattaggatataaaaacatacactgttggcaagatcttcaaggacatgatagggtaagtggaggacaacgtccaagcaatcggaataacaaacctttg

SEQ ID NO: 25085 - DNA, 615 bp, Legionella pneumophila
ccatcaagagaaggacaaaaaatgagattatgtggttttgaagcaggcttggataagccattgtttttgattgccggcccttgtgttattgaaagtgaagaattggctttagagaccgcaggatatttaaaggaaatgtgcagtcagttgaatatccctttcatctataagtcttcttttgataaagcaaaccgttcatctatttccagttacagggggcctggctttgaaaaagggttatcgattctggaaaaggttaaatcacaaataggtgttcctgttttgactgatgttcatgaagacacgcccttatttgaagtctccagtgtggtagatgtattacaaacgccagccttcctatgcagacaaaccaattttatccaaaaagttgctgccatgaataagccggttaatattaaaaaaggacagtttcttgctccctgggaaatgaaacatgttattgcgaaggcaaaggcgcaaggtaatgagcaaattatggcttgtgagcgaggagtgagcttcggctacaataatttggtttctgatatgcgttccctcgttatcatgcgtgaaaccggctgtccagtggtttatgatgcaacacattcggttcag

SEQ ID NO: 25086 - DNA, 1275 bp, Legionella pneumophila
atgagtgattatgaagtattgttacgccatcttgatagagagatacgcgcaaggaaagaagctgaagaaataagtgaaaaaaaaatatccgagttataccgttttgcccaacgtctggaagagagtttaaaggctcaaaaagaaataagtaaaaaattaaaagagaagaccaaggcattaaagcagcaaatcgctaaaacagaagaagaacggcatgccaaaagtactttacaaaccatattggaaagcgcaattgaatattcaatcattgcaatcaatttgaaaggcgtcatcttggtttggaatgaaggggccagacgaaattacggctacgaggctcaagaattagtgaacaaagagagcattgagattttgcatacagtggaagatatccagtcaggtaaagtacgaaagttttttcaaacagtacgtcgggaaggaaaggcggaagaaatatttcaaagagtcagaaaagacgggtcccagttcactgcttccgttactatgactatccgctatgattcgcaaggaaaaaaagtagggtacgtcattatttcaaaagatattacagaaattaaagaatttgaagaaaagctgattaaaagtaaccagaatcttgaagagttttcatacattatttcccatgacctaaaagcgccgctaagggcaattattcaattggcaacgtggattgaagaggattgcggaaataagttggattctctttccagaaaaaatcttcaattgctcagagaacgtacccgtcgtatgagcgggatggtagatggcttattacaatatgcgcgggcaggcagggtcaatatggaggtagaatgggtagatactaaggagttaattcaagaaataatagatattcttaaccatgatgaacaatttactattatagtccatgaatccatgccccaactgccaacggccaaattacttctaagtcaggttttttctaatctgatagcaaatagcatgaaacatcatcattgtaaaacaggaacaattgaaattggtgttttggataaaggcacattttatgagttttttgtggcagatgatggtccaggtattgagccggtgtattttgagaaaatattcagaatatttcaaaccttaaaatccaaagatgaggcagaaactaccggcataggattaactatagtaaagaaaattgtagaatctcaaaatgggaaaattgaggtggactctgagttgggtaaaggcgcaagattttcatttacatggcctaaagtccctcatcaa

SEQ ID NO: 25087 - DNA, 1197 bp, Legionella pneumophila
atgattaaaaaagagcttccagatgagtttggccattttggcccatatggcggtatgtttgtagccgatacattagttcatgctttaaaacaattagagcatgcctataccaaatatcgtaacgatcaggattttctgtctgagttacacacagaattaaaagattatgtggggcggcccaatcctctataccatgccgtacacttaagcaaaaagataggcggtgcacaaatttatctcaagcgtgaagatttaaatcataccggtgctcataaaatcaataataccattggacaagccttactcgccaaacgtatggggaaaactcgagtgatcgcggaaacaggcgcgggtcaacatggcgttgcaactgctacagttgccgctaaatttgggtttcaatgcgttgtgtacatggggtcagaagacattaagcgtcaatccagtaatgtttatagaatgaaattgttaggtgctgaagtggtgcctgtcacttcaggatcaaagacgttgaaagatgctttaaatgaagcattgagagattgggtgagtcatgtcgacgacacgttttatattattggtactgttgcaggtccccatccttatcctcaaatggtaagagattttcaagcgattattggtgttgaagctcgagctcaacatatggaaaaaacaggccatttgccagatgctttggtagcttgtgtcggaggtggatccaatgcaataggcttgttttatccctttttgaatgatcagtctgtcatgatttatggggttgaagcaggagggaaaggcatagaaaccggtgagcattcggcatctctgattgctggaaaacctggtgtgttacacggtaatagaacctatttattgtgtgatgagtatggacaggtgaaagacactcactcagtatcagccggtctggattatcctggagttgggcctgaacatgcttatttaaaagatactggacgggtcatttataaagcaataaatgattccgaggccatggatgcgtttcgcctgttaactcatacggaaggaattattccagcattagaatctagccacgcggtagcctatgccatacaattggctaaaaccatgtcaaaagaacaaagcatcatagtcaatctatctggtcgtggtgataaagatatgcatacagtagctgctattgacggtataacaatt

SEQ ID NO: 25088 - DNA, 750 bp, Legionella pneumophila
atgaccaaatcacttaatggtcttcgcatattaaacaccagacccagggagcaagcacaagtgcttaataaaaaaattatcgagtctggcggaatacccatcgactgccccacgatggaaataatggcgtctgaaaccaattggataaataatttgcctgatttgacctcagtaaatcaggccatttttgtcagtacaaatgccgttcgttatttcatgatggaactggcttccaaaaacatcaattggccaaatagcatccgggtaactgctataggtaaaggcacctccagagtactcaatgaattcaatatccaggttagtgatgtccccgaattacctgacagcgagcatttactgactctcaattcgttgcaacaaataagaaatcagacgattctgcttgtgaaaggagaaggaggcaggcaactgattgaagaatatttaatgctgaagggagcgaaactatgtcttctgtcagtctataaacgagtcatgccagccatcgaccaagaatttattaattctctgtggcgcgatgacctggtggacattatactgttaacaagtgagcagtccatacataatctttttaaaatgtttagcatagaggggcaaatgtggttacaaaacaaaccttgcctggtcattagtgaccgacttgcaaaggtagcttctttatttggaattaaaaagattcttattagccatccagaaaggatgataggtgcgttatttgactataaggat

SEQ ID NO: 25089 - DNA, 2826 bp, Legionella pneumophila
atgtccgaaattcttgagccggtaaaggatataccgctaacaaatcaactggaattgactgctaatgtcccaggcatgcttaaaacaataaaacgaaatggcaaggtagtcatttatgatgatactaaaatcaaaattgctattaccaaagcctttattgccgacgaaggtggtacagccccaacttctgatcgaattcaccagcaaattgaagagctaaccagacaaatcacccaggtatttaaacgtcgtttacctagtggtggggctattcatattgaagagatccaggatcaagttgaactcgcccttatgcgcagcggacattataaagtagctcgctcctatgttttatatagagaagaacgcagaaaagcacgtgaatcagaatcgaaacaaaaacaaacaaaagacagtaagcatttattaataactatgcctaatggagaagtacaaccattagatatggacagggtcaatactatcgtcaaagaatcatgtcgtgacctcagcaacgtcaaagcagaacctgttattaaagatgctttgcgcaatctttataaccaagccaaatatgaagacgtccataaagctttgattatgtcagcgcgtgcgttggttgaaaaagaacctaattatacttatgtcagcgcgcgtttgttgctagacagcttacgttctgaagcactgactaaactcaatatcaaatcagaagctacatttgatgaaatggctcaaatctatccagtttatttcaaatcttacatagagcaaggtattgcccaaggtatgcttgaccccaagatggctgacttcgacctggacaagcttagccaagctcttcttcccgaacgagatatgaagttcacctatttaagtttacaaactttatatgatcgttattttattcatgagcgcggggtaagatatgagcttcctcaagcttttttcatgcgagtagccatgggtcttgctcttcgtgaacaacataaggaagagaaagccatagagttttatcagttgctttcttcgtttgattatatgtcttccactccaaccttatttaattccggaacagtaaggccgcagttatccagttgctatttaacaacagtacccgatcatttggatggtatttatagcgctataaaagacaatgccctcctctctaaatatgctggaggactaggcaatgactggactccagtacgagctatgggtgcccatatcaaagggactaatggtaaatctcaaggcgtagttcctttcctgaatgttgccgatgctactgctgtagcagtaaatcagggggggaaacgcaagggagctgtctgcgcgtacctggaatgctggcacagagatgtagaggaatttctggagttaagaaaaaataccggtgatgatcgccgccgtactcacgacatgaatactgccctttgggtacctgatttgtttatgaagcgtgttcgtgaagatggtaattggactttattttcacctgatgaagtacccgatttacatgatcaatatggtaaagcatttgaggctctctatgttgaatatgaagaaaaagctcgacaaggtattattaggaatacaaaaaccatttcagctgtcaaactatggcgtagaatgctttccatgctttttgaaactggtcatccatggctaacattcaaagatccctgcaatttacgatcacctcaacaacatgctggagtaatacacagttctaatttatgtacagagatcactctaaatacttctgaagaagaaattgctgtgtgcaatttaggcagtatcaatcttccagcgcatattaaaaacggtaaactggatgagcaaaaactcaagcgcacaatatcaacagctgtccgtatgttggataatgtcattgatattaattattattctgtacctcaagctcgtaactccaacttgcaacatcggccaattggtctaggtatcatgggctttcaggatgcgctatacgaattaaaaatggattatgcatccaaagaagccattgaatttgctgactcttccatggaactaatcagttactatgctatcgaagcctcttgtgacctggctaaagagcggggcagttactcaacctatgaggggtctctatggagcaaaggcatattacctatcgattcaattaacctcttgcaacaatcccgtaataaatatctggagcaagacaggtcacaaaaactggattgggaaccattacgagttaaagttcgaacacaaggcatgcgtaactcaaatgtaatggctattgcacctacagccacaatatccaacatctgcggtgtatcacaatctattgaaccaacttatcagaacctttacgtcaaatccaacttgtccggcgaatttaccgtggtgaatccttatttggtagccgatttaaaagctctgaatctttgggatgaggtcatggtcaatgatctaaaatattttaatggcagtgtacaacctatcagtcgaattccagatgagctgaaaagacgttatgccacttcttttgaaattgaccccatgtggttggttgaagccgcgtcacgccgtcaaaaatggatagatcaagcccagtccttgaacatctatatggcgcaaccttctggtaaaaaactggatcagctttatatgcatgcatggattcgtggattaaaaaccacttactacttacgtagtttaggtgcaagtaatgctgaaaaatccactgttaccgacggggcacttaacgcagtcaaattaatagataccgaaccaaaggcttgttctattactgatccagactgcgaggcttgccaa

SEQ ID NO: 25090 - DNA, 579 bp, Legionella pneumophila
atgtcagaccaatataaagttgctctaagaaataccataaaacaggtaagatccaagctttctgtaccctacagaacagcatcttccaatcaaatttgtactcgtatccgctcgctggaacaatacaggcaagcaaaacgaatagccttgtactttgccgttaatggagaagttgatttaacgtttctctggaaaagcgcgcccctccaggggaagtattgttattttccggtattaaataatgattccactctttcttttttaccagccacccccagcaccccttttaaaacgaataaatacgatatcccggaaccggacgttgatattgagttggccttgcctattgatgaattagacttgattatcatgcctctggttgcttttgatgcacactgtactcgtttgggtatgggctcaggctactatgatcgcaccttggctaataaatcaaaagcgcatctcttaggagtcgcctaccaatttcaaagggttgattacatagaaccacgcccttgggatgttcccctggatgccgtaataactcaaaaagctatttattggcgaaatcccttggcc

SEQ ID NO: 25091 - DNA, 405 bp, Legionella pneumophila
atgcttaaaaaacatccaggagaagtgtgctttcctggtggttttcaagaaataaatgatcaagatctatatagcactgcattgagagaacttaatgaagagctaggtgttacatcagacagaataactctgatcagaaaattaaacattgaaaagactttactgggtttagtcattcacccttggtacgccagtattgattctatatttccttacactatgaatccacaagaggttagtgaattaattcttgtgcctatgcctttagtaaaaaatcagaaaaattataaagaaattagaattgagaaagagggaaaacacattgtcacctgccaatttattgctaatgaagaattaatatggggtgccacagcaagaattatgaggcaattagcttctcaatat

SEQ ID NO: 25092 - DNA, 957 bp, Legionella pneumophila
aagggggtagccgagtctgaagaaaaaaaacagaggtcaatttctgatattgaagcaatttatcaacaaccatttaatgatttgctttatcaagcacataccattcataggacatatcacgatcctaattctttacaatttgcaaccttgttaagcattaaaacgggcgcatgcccagaagattgtggctattgctctcaaagtggtcactataaaacgcatgtagaaaaagaaaaattgatgtcagttgaagaggtattgcaatgtgccaaagaagcaaaggagggtggggcaaaacgtttttgtatgggagctgcatggcgttgtccacctgataaagcaattccgcagctaaaagaaatgatagaaggagtaaaatctttagggcttgaaacctgtatgactttaggcatgcttaccaaagaacaggcctctcatttaaaggaggctggattggattattataaccataatattgatacctcaccatcctattacgataaggtggtaaccactcgaaaattcagtgatcgattagatactttaaataacgttcgttcagcgggaattaatgtatgttgtggtggtattttaggattgggggaaaccagagaagatcgaatcgaatttttattaacattagctaatatggaaactcctccggaaagtgtgccaattaatcgtttaattccagtggagggaacacctttagcccaagctgagagagtagaagggattgaattggtaagaaccattgctacagcaagaattttaatgcctaaaagtgctattagattgacagctggtcgaaccgaaatgagcgacgagttacaagcactttgctattttgccggagctaattctgtgtttattggcgataaattattgacagaagataatccccagcgcttcaaagacaaaactctttttaacaaactgggtttgactgagatggta

SEQ ID NO: 25093 - DNA, 903 bp, Legionella pneumophila
atgcgccgatggttaggagtacaggcattttcttatgttgagctgcgctctattcagatcagtacggtctttgcgtttactatttttgtccaggaatggttgcgttatccgcgggccgggtggacgggctttgctgtcatgatgatttatgccggttttgataatggaacaaccatattcaggacttatcatcggtttttaggagtgcttttaggcttattcaccggatatctattatggtttgtaggtcatctggattatcgaacgttaattctgattatgcctttaatggtttttttcgcgtttttcctggtaggaagagcatacagtgttcccactgtatttacggtcaatgtgtcagtacttggttctggttactttagtacggaagatacgctcccagtcacctattttattatcgattatactctttgcacgttgatcgcctttactattattctaggctttgaatacttttggtttaggcattacggactgatgcagcgatttatcaaaagtactcaggctgaagtgattgatgatctttacaggctggttcgtttgctaaatcagggtaaaataaagaaaacagaatggttccaggcttgtatcaaattgactgacagtttgtttgaggtcaataagctcataacaaactcccagtttttaatcagttcagaacatgctgtaggggatgaatttaatcagtttgtggaattggctaatcgtattttcattggcttgaaagccttatatatggcttattatacgaaacattatcatacgtttgattattatcaactatttcaacaggttcaaaaagatttggtgcgcttaaaagattttgttgcaggggagcaaacaattgatcttagtgagggagtaaagcatgctacgtccggt

SEQ ID NO: 25094 - DNA, 1401 bp, Legionella pneumophila
atgataaacatcacaggaacctacactgatcaatatcaattggctatggctcaagtgtgttttttaaaagggcagcatgagcgcatagcgacattcgattatttttttcgtgctcttccttttaaaggaggctatgcgatttttgcgggtttggaggatttactggatgttctcgaacaacttcgctttgaacaacaagatatagagtttttacaacatcagaatatgcatcctgactttattcgctatttgcagcagtttaagttcaatggtacggtgtatacgtcgctcgagggagatgttgtatttcctacgcggccagtggttattatcgaagccaatttgattgaagcacaaatcatagaaacgttattattaaatattattaattttcagacacttattgcgacaaaagccagacgcatcaggcaggttgcgggagaacggattttaattgattttggactaaggagagcacagggtgctggagggtattttgcaagccgtgcagccatagtcggtggctttgattcgacaagcaatgtcagagcagggcgtgattattcaattcctgtatcgggtactatggctcattcctttatccaaagttacgatagcgagatacaagctttttctgattatgctgaagcttggccggagaattgcatcttgttagtagatacttataatacgttgcaaagtggtattcctaatgcaatcaaaatagctaaggaaatggagaagagaggacatagactcaaaggcattcgcctggatagtggcgatttggcatggttagccaagagggctcgccacatgttagacgaggccggtttaaactatgtggctattaccgcttccaatcaactcgatgaatatgtcatcaagaatttgttagagcaggatgcgcctattgatgcttttggtgtggggaccaatctcgcgattggtgccccggatgcggctcttgatggggtttataaattagcgtttataaatggtcaacctaggattaaattatcggatacccctgcaaagatcactattccttatcaaaagcaagtctacagggtgttcgaaagagatgggacatatcgaggtgcggatgttgtctgtctcaaaacggaaaaaaaaattgatatgatgcatcatccttttgaaattctaaaatcgctttcgataaagcactataaaaaagaagcattactgcataaagtgatggaaaacggcaaacggttactacctaaaaaatcacttggagaaatagccaggtttagccagcaatgttttgatcgattgcctttggaatacaagcgttttattaatcctcatatctataaagtgggtttaagtaccgagcttaaaatgaagagagatcaactgatagctgaacactcaaga

SEQ ID NO: 25095 - DNA, 417 bp, Legionella pneumophila
atggaaaaattaggtcagttcatcatcaatcattggcaactctggctcgcctttgttgtggttgtatttttaattttcattaatgaaatactctctcaaagaaagaaagccaaagaagtttcaccgcaatccctggttgatttaatgaacaatggaaatgccatcgtaatcgacatacgcgacaaagaatcattcaaaaatggccatatcattaattcaatgaacgtaaatcctgatgattttgaacaacaaaaaatgagcaagtacaaagataaacccattatcctggtctgcgcacgaggcttacaatctccaaccctagccatgaaaatccgcaatcaaggttaccaacccctggttttgagtggaggaattcaagcctggcaaaatgctgatcttcctttagtgaagggtaaa

SEQ ID NO: 25096 - DNA, 1086 bp, Legionella pneumophila
atgaagaaatctcttgagttaaaattacagcaaatgttggagcgatacgaggaagtaggccgcttactgtccgaagcatccattattgccgatcaaaaccaatttaagtctttatcaaaagaatatgcccaacttgaaccagtttcccaatgttatgagtcgtatttagaggcaaaaaataatttggattctttaaacgaattattggaaagtgatgataaagatttagcgactatggctgaagaagagattgacactgtcaagaaacaaattgaggaattggatgaacaattacaatggcatctcattcctaaagatcctgatgatgaacgcaatatttatcttgaagtcagagccggcacaggtggagacgaagcagctatatttgccggagatctctttcgaatgtacagccgttatgcagaaagccagggttggcaaattgaattaattagcgccagtcatggtgaacatggaggctacaaggaaataattgccaaaatcagtgggcaagcggtttattcacaactcaaatttgaatcaggagctcacagagtacagagagtacctgaaactgaatcgcaaggtcgtgtccatacttccgcatgcacggttgctatcatgccggaggtggatgaaattaatgacattcagataaatcccgatgacttacgcatcgatacttacagatcttccggagccggtggacagcatgttaacaaaacagattctgccattcgtatcacacacattcctacaggagtggttgtagagtgccaggatgagcgttcacagcacaaaaaccgtgccaaagcaatgtccttgttaaaaacaagattattagatgccgaagtaagcaaacaaaaacaagaacaagctcaaacacgtaagtcactggttggtacaggtgaccgctccgagcgcattagaacttataactttcctcaaggccggctcactgatcaccgtatcaatctgactatctaccagcttagtgacatcatggaagggaatttatccctggtcattgacccgttaaaacgcgaataccatgctgaactgctagccgatttaggtcgacatgat

SEQ ID NO: 25097 - DNA, 1779 bp, Legionella pneumophila
atgcgtacacactactgttcggccgtgaatgaattaagcttggataagcaaatcacagtttgtgggtgggtgcataatagacgagatcatggcggagttatttttttagacattcgtgatcgttccggattattgcaagtggtgtatgagcctgaaaataaggaaatttttgcaattgctgaaaaactaagatcagagtttgttgttcgtgttactggcatagtccgtaaaagaccagaaggaatgatcaatgataaaatggagactggcagggttgaagtaatcggtacacaacttgaaattcttaatcaatctccaactccaccgtttttgccagatgatcatcaaattatcaatgaagatttgcgctataaataccgctatattgatttgcggcgtgctgttatgcagaagaaactgactttaagacacaaattaaacagttgcatacgtaattacttgaatgagcagaattttttagacatagaaacgcctatgttaactaaggcaactcccgaaggcgcgcgggattatcttgtgccttcaagggtgcatccagggcagttctatgctttacctcaatcgccacaattatttaagcaattgttgatgatgtcagggtttgataaatattaccagattgtccgctgttttagagacgaagatttaagggctgacagacagccggaatttacgcagcttgatatagaaatggcatttattaatgaagaagatatattgcaactaattgaaggattgctcaagattgtatttaaggaaatccttaacattaccttacctgataaattgccaagaatgtcgtataaagaggctatgactcgctatggaagtgataaacctgatctgcgtaatccactggagttgattgatattgcagatttggtaaaagattgcgactttaatgtatttgcctctgctgcgaatgataattcaggaagagtggttgctttaaaactacctaatggatgtgatcttagtcgaaaggatctggataactatggacaattcgtaactatatatggggctaaaggacttgcatatattaaagtcaacgatttaagtgctggtatggcgggtttacagtcaccaattctaaagtttttatctgaaacggctgtgcactctattcttaatcgggttgaggcgcagactggcgacgtcatttttttcggtgctgataaagctcatgtagtaaacgaatctatgggagccttaaggaataaactgggtcatgatagaaatctgattaattctggatggcaattactgtgggttgtagattggcctatgtttgaattggatcctcagagcaataagttacagcctatgcatcatccctttacatcccctcaggaactatctgccgaggcacttcgctccaagccaacgcaaacattagccaaggcatatgatatagttattaatggttatgaaattggcggtggatctattcgtatccatcaacctgaactacaaaaaactgtatttgatttgatcggaattgatgagcaagaggcacatgagaaatttggatttttactcgatgccttacaatatggtgctccacctcatggtggaattgcgttgggaattgatagattagctatgctgctgacagactcaacttccataagggatgtgattgcgtttcccaaaactcaaaccgcatcatgtcctttaacaagtgcgccatcgcctgcgggcaatgcacaattaactgaactgggtataagacttgcgccaactattacgacaaag

SEQ ID NO: 25098 - DNA, 945 bp, Legionella pneumophila
atgtccacgatgatgatttttacagggaatgctaaccctgaattagcactaaaaatttcctcacatttgcaaatacctattggcaaagccaccgttggtaccttcagcgatggagagactatggttgaaattttagaaaatgtccgaggtaaagatgtttttgtcctccaatcaacttgtgcgcctgcaaataataatttaatggaattgctgattatggcggatgccctgagaagatcatctgctggtcgtattacagctgtagttccttattttggctacgcacgccaagataggcgagtgcgctccgcccgtgttcctatcacagctaaagtggtagcagacatgatggcttcagttggaatttgtcgggtccttactgttgatttgcacgcggatcaaatacagggtttcttttatatgccggttgataacgtatactcaactccggtattgctggaagatataaccaaacaaaaattaaacaatatcatgatcgtatcgccagatgtcggtggggttgtacgtgccagagcagttgctaaaagactgaatgacgctgagctgtcgattattgataaacgccgtagtgggccaaataaatcagaagtaatgcacattattggtgagcccgccaataaaaactgtattattgtagacgacatagtagatactgctggaacactttgtacggctgctcatgaattaaagaaaaacggagcaaaaagcgtcagagcctacattacacatcctgtgttgtcaggccccgcagttaacaatattaaacattcaggtcttgatgaggtggtagtaactgataccattcctttatcagccgaagcacaaaactgtgaaaaaatcagagtggtcagtcttgctgatatgttagctcaagcaatcaaacgagtaaatgttgaggagtcagtaagctccatgtttgctgaa

SEQ ID NO: 25099 - DNA, 336 bp, Legionella pneumophila
atgagacattatgaaattatgtttctagtacatccagatcaaagcgaacaagtacctggtatggttgagcgctatgaagggattattaccaaacataacggcaaaatacatcgtaaagaagatttaggtcgacgccagctggcatattcaataaataaggttcataaagcacattatatcttaatgaacgtagaatgtaatcttgacgcacttaatgaaatcaagaatgcattcaagtttaatgatgctattttaagacacttaatcactgttcaaaaacaagcgattactacagaatctgtcttaatgaagaaagaaaaagaaactaaagtcgct

SEQ ID NO: 25100 - DNA, 2853 bp, Legionella pneumophila
atgcataccatcaccattcgtggcgcaagaacccataatctcaagaacttggacctggagcttcctcgagataaattaatcgtaataaccggattgtctggttctgggaagtcgtctttagcctttgatactctctatgccgaaggccagcgccgttacgtggaatctttgtctgcttatgctcgacaatttttgtccatgatggaaaaacctgatgttgattcgatagaggggctctccccggcgatttctatagaacaaaaggctacctctcataatccccgatccacggtaggcaccattaccgaaatttatgactatttgcgcttgctttatgcccgagtcggagagccaaggtgtcctacccaccacaccagcttgcatgctcagaccattagtcaaatggttgatcaggtattggctttaccagaagacagtaaagtgatgattctggcgcctgttattcgtgaacggaagggagagcatgtccagtttttgcaacaattgcaagcgcaagggtacgtacgtgcacgtattgatggagagctttatgaactggattctccccctaaattaggattgcgtaccaagcacactattgaagtagttattgatcgctttaaagtacgccctgatttggctcaacgtttgagtgaatcttttgaaaatgcgctcaatctggcagatggtcttgtcatcgtttcttcaatggatggtcatttcaatgaacttttattttcttcaaggtttgcatgctctgaatgcggttacagtttaagtgaacttgagccaaggcttttttcatttaacaatcctgtcggtgcatgttcctcatgtgatgggcttggagtggatcagttttttgatccgtcaagagtagtccacgatgcaaccgccagtttggcagaaggggcaatcaggggatgggataggaaaaccacgtattatttcagcatgcttgagtcgcttgcgaggcactatggttttgataccagtacgcctttttgtgatttaagtgaagcaatgcaacaaatcgttttgtatggtagtggtcgtgaaataatcgagtttcagtatcataggccgcatggaggatacatggttaagcggcatagttttgagggaataattcctaacatgcaacgccgctatcgtgaatcagattctggtatgataagggaggaacttgccaaatacctatcctcacgcccttgccaatcttgccagggagcgagattgcgtgaagaagctcgacatgtatttattgataataaaaatctaccagaaatcaccagctattctattgagcaagcctatcagttttttaaagagctgaagttatcggggtataggggtgaaattgcagcaaaaatcaataaggaaattgttgagcggctggggtttctggtgaatgtcgggctagattatttgtctttggctcgaagcgcggagactctatctggcggagaagctcaacgtattcgcctggctagtcaaataggttcagggcttgtaggggtgatgtatattttggatgagccttcaatagggctgcaccaacgtgacaatgaccgattattgagtactttaatgcatttacgcaaccagggaaacactgtaatcgttgtcgaacatgatgaagatgctatccgaagcgctgattttgttcttgatatagggcctggggctggagtgcatggtggggaagtagttgccagcggttctcctgaagaggtaatgaacaatcccgcatctctcaccggccaatatttgtctgggaaaaaggaaatagaaattcccaaggatcgaattccggttaaccatgatcggatgattcatttaaaaggcgtgtcttgcaataatttacaaaatgttgatgtcagtattcctttaggtttgttgacttgtattacaggtgtttctggttcaggtaaatccagtttgattaatgatactttatatcctattgctgccaatgcactaaacagagccagcttaatgactataggtgaggttaaggacatttctggactgcatctttgtgacaaggttattgacatcgaccagagtccaattggcagaactccgcgttccaatccggcaacttatactggtttatttactcatatcagagatttattctcagggactccggaatcaagagcacgagggtatcaacctgggcgctttagtttcaatgtaaaaggtggccggtgcgaagcttgtcaaggtgatggtcttatcaaggttgaaatgcattttttacctgatatatacgtttcttgcgatgtatgccaaggcaaaagatacaatagggaaactttggaaattcactacaaaggcaaaaatattcatgaagtgttggacatgactgtcgaagatgcgtgcgctttttttgctgccattcctgttattgccagaaaatgcctaacattaatggatgtcggtttgtcttatataaagcttggacaaagtgcaactactctctctggaggagaagctcaaaggatcaagttggccagagaattatcaaaaagggataccggaaatacactatatattctcgatgagcccacaacaggattacactttcatgacacgaaacagttattaactgtgttgactcgcttgcgagagcaaggaaataccattgtcattattgaacataatttggatgtgataaaaacggctgattggatcgttgatcttggtcctgaaggaggcagtaaagggggaaagattattgcaacaggaacacccgaaatggttgctgaaaaccctcaatcttttacaggtcagtttttaagacaaattttatcaaaatcaaatgagcttctattacagaaatgcaaa

SEQ ID NO: 25101 - DNA, 1536 bp, Legionella pneumophila
atgcaaaaggccaatgcaaagattcaaaatataaatgaaataatgttttcagatcgcgtaatgttactaaataaaaatttattagtgagcattcctgcaaattttttatgcgcattaattatttatattgatttcaataaaacaacaacagatcaagaaatgctctcagtatggtttatggttggagtaacagtatttgttctccatggaggtttatttttatttaattattatcgttccttgccatccaaataccttttaaaatggttaataagcgtcactgcgatttatggggctctatggggaatagcaggttctgttcttattcctcaaaatgatctgttaaatcaaatgattgtcataattataattattggaatcgcatcaggtggattacatattcttcagcccagttttttagcaagtctattattttttacattaacccttattcctctatgtgtctggttttttcagcaaagtacacttaactattggttccttggaactgcattgctgatttacttttgttttttattaattatatcctggatgggatatggacttcttaataagaattttaaattacgttatgagaatttggatttaattaataaattgtatgcaattaacgctaatttggaggaaagtgagttacgtttccgttccgcatttaattctgctgctattggtatggctatagtttctttggaggggatgtggttaaaggttaatcaatcgctttgtcagattgtaggatactcagaagaagaattattggaaactaattttcaatcgatcactcatccagaggatttagagctcgatttgggttatgtgaggcaattattagagggggatataagattctatcatatggaaaaacgctatattcacaaaaatggtagtgtcatttggattttactcagtgcttctttaattcgagatctcgacaataaaccactctattttatctcgcaaattcaaaacattgatgctcaaaaacgagcagagcaagaacttcaacacatcgcatatcatgacactttaactggtttgggaaatagaaagctattagagttatcatttgaccaggcattagctcatgcgaaacgtcaccaaacgcaaattgctattatgtttatggatttggattattttaaaaatgtgaatgacaaattgggtcatgatattggggatcttttattagttgagattgggaaaagattacagacgattttaaggtctactgatctaattgtcaggcatggtggtgatgaattcattatcgcgcttactgaattatccaatgtaaatcaagttatagaaatagcaaataaaattctaattgctgtaagcaagcctatcacaatcaaacgttatggtatttcaattacaggcagtattggtataagtatctatccatatgacggcgatgattcagacacattaattagaaaagctgatgaagcattatatagggtgaaaatagggggaaaaaataattttcaattgttcaataccgtgttacataag

SEQ ID NO: 25102 - DNA, 738 bp, Legionella pneumophila
atgaatgaaagtcaacctaaattaaaatacaaacgcattctgcttaaatttagtggtgaggcgctgatggggaaatctcaatttgggattgatccttcagttcttgactcattagctcgagacatagcagaattaattcatatgggtgtggaagttggtttggttttaggtggaggtaatctgttcagagggaaagcactctctcaggcgggcgtaggacgagtgacaggagaccatatggggatgctggccactgttatgaatgctttggcactccgtgatgctttggagcgaattgatctgcctgctcgtattatgtcagctattccaatgcttggggtagttgacccataccatagaagaaaagctatcactcacttgcgcaatggtcaggtggtgatttttgcagctggaacaggaaatcccttttttacaacagatactgctgcttgtttgagggcaattgagataggcgcagatattgttttaaaagcaactaaggtggatggagtttattctgctgacccacttaaaaactctgatgcaaagcgttatgattatttgacttacaaagaagttttaaccaaaggtttggaagtgatggattccactgcaatttgtttgtgccaagatcagggaatgcctttacaggtgtttgatatggcggctcctaaagcattaaaacgaattgtaactggagaacgagtaggaactatagtcggagctaatcatgatcaa

SEQ ID NO: 25103 - DNA, 873 bp, Legionella pneumophila
atgagtgtattagttgataaacatacaaaagtgctatgtcagggctttactggaaagcaaggtacttatcatacagagcaagcactggcttatggaaccaagatggtggggggggttactccaggcaaaggtggtcaaatgcatttaggactgcctgtatttaataccatgcgtgaagccgtcgaggaaaccaaggcagatgccagtgtgatctatgttcctgcaccattttgtaaagattcaattattgaagcagcagaagcaggtattaaactgattgtttgtattacagagggtgtgcctgtattggatatgctgcaagtaaaagtgtatatagaaaacaatacacaggctcgattaattggtccaaattgtccaggaataattacaccaggtgaatgcaagataggtattatgcctggctatatccatttacccggaaaagttggaatcgtttcacgttctggaactttaacttacgaagcagtaaaacaaactactgataaagggtttggtcaaagtacctgcataggaataggtggcgatcctattccaggaaccagctttattgacgctttgtctttatttgaaaaagatcctaaaacagaagctatcatcatggtaggagaaattggtggttcagcagaggaagaggcagctgaattcattaagtctcatgtaaaaaaacctgtagtatcttacatcgctggagtcacagcacctgctggaaagcgtatgggccatgctggagcaattatctctggtgggaaggggaccgcagcagaaaaatacgctgcactggaagcggctggtgtgaaaacagttcgatctcctgctgacctgggagatgcaatagctgaggtaactggttgg

SEQ ID NO: 25104 - DNA, 441 bp, Legionella pneumophila
gtggaaaaacaatcaattcgtggtaaaagacgagctcgaaaatttgcattgcaagccctttatcaatggctgatgtctggtacagatcttcatgaaattgaagctcaattcagaacaattaataatatggataaagtagatggagaatatttctgccgcctgttatacggcattccaactcatgtggaagcattggaggcaagtttactgccgtatctagacagagaaatcaatgcattgaatccaatagagcttactgtattgagaattgggtcttttgaattgtttcattgccctgagataccttataaggtcattcttgatgaatcagtatccttgactaaagagtttggttcacaagagggatatcgttacgttaatggggtattgaataatttggcaaaacaggttcgttctgttgaagtcagtcttgataatgaa

SEQ ID NO: 25105 - DNA, 1419 bp, Legionella pneumophila
atgaaatcatggtcctctgaaaaaatatccgttcttgctttagtgctgctcattaccggagcaattgacagcattagaaatttgccaggcacagcactttttggatctactttgatttttttctttattttttcagcaattatctttttgatcccggttgctttagtcgctgctgaactttcctcaacctggtcagacgaggaaggtggcatttacagttgggtcaagcatgcctttggtgaaaacatcgcctttttcgccatttggctgcaatggataaatactctggtatggtatccgactattttgtcttttatagcaggcacaatctcttatttaattaatccagaacttgcacaaaacaaatactatcttatcagcgttattctgattattttctggtcattaactttgataggcttatcaggactgcgtgcttctgccacctttgctggcttctgtgcaatagttggaatgatagtgcctatgggatttatcatccttctggcttttatttggttaattcatggccaccctattgccattgatctgagcctctccaatttgctaccgcaatggaaaaacacacaatcctgggtttctctaacagcgattatgacttcttttctcgggatggagcttgctgcagttcacgtgcgtaatgtcaataacccgcagaagaattttcccaaagcgatgtttttttcggtcattctcatcctgttcaccatgattttaggctcactggccattgctttcattctgcctaaagacaaaatcagtttggtagatggggttatgagggcatttagtaatttcttgcaagtttatgatttgaattggctaatgcctgtattaatactcttgttattgctgggtaccttaggcagcatgatcaactggattatttctccagccaagggcctgctgatggcagccaaacatgattttctgcctgcttcgctatgtcatgtgaataaacatggcatgccagcaaaaattttgatactgcaagccattctggtgacagtattatgtagcggctttctcttattccctacagtgaatgctatttattggttgtttactgctcttagtacagagctgtatatgatgatgtatgtgatgatgtttattgcagcctggcatttgaagagtaaattctcagacatggaaagaccttttgctattccaggaggcaaacccggttattacctgacatgcctgttaggattaataggttgtactgtcactttatgggtaggttttattcctccaacggaaagcattaatatcggaggaacagcccattaccgtatggtcttttcattaggcatcgtcttaatgctgctacctgctgccttgatctatttgcgtaaacgccacattaccaaatccaaagcgcttaatgcacctgtt

SEQ ID NO: 25106 - DNA, 1788 bp, Legionella pneumophila
atgtctaaaacgtttataacagatgtcaccttgcgtgatgcccatcaatgcttaatcgctacaagaatgcgtactgaagatatgttgccaatctgtaataaaatggatgatgtaggattttgggctatggaagtctggggaggcgctacttttgatgcctgtttgcgatttttaaaggaagatccctggtcaagattgcgtcaacttcgccaaatgttaccgaatactcaactctctatgctgttaagaggtcaaaatttgttaggctataggaattatgcagatgatgtagtccgagcgtttgttaaattggccgtgaataatggagtggatgtatttcgtgtgtttgatgctttaaatgacgcgcgaaaccttaaagtagccatagacgcgattaaatcacataaaaaacatgcccagggagcaatttgttacacaaccagcccggttcatactttggacaattttttggagctagggaaaaaattggctgaaatgggatgtgatagtatcgccataaaagatatggcaggtttgctaaccccaacggtgactgtcgaattgtatgccggtttaaaacaagcgactggcttacctgtacatttgcatagtcattctacttccggtttggcaagtatatgccattatgaggccgttttagcgggttgtaatcacattgatacagcgatttcatctttttctggcggtgcatctcatccacctacggaagcattggttgccgcattgactgacactccgtatgacacggaattggatttaaatattttattggaaatagacgattattttaaagctgtccgcaagaagtattctcaatttgaaagtgaggcacagaatattgaccctcgtgttcaattgtatcaagtgccaggtggcatgatctcaaatctgtataatcagttaagggagcagaatgcattagacaagatggatgctgttcacaaggaaatcccccgcgttcgtaaggacttgggttatccgcctttggttacgccaacatctcaagtcgttggaactcaggcagttattaatgttctaacgggagaacggtataaaacaataaccaatgaagtgaaactctactgtcagggaaaatatggcactcctcctggcaaaattagttctgctttacggaaaaaagcgatcggacgaacagaagtgattgaagtcaggcctggcgatttgttacctaatgaattagatcaattgcaaaatgaaataagtgatttggcactaagtgatgaggatgttcttctttatgcgatgtttcccgaaattgggcgccaattcttagagcagcgtaaaaataatcaattaattcctgagccattattgactcaatcaagtgcaccagataattccgttatgtctgagtttgatattattcttcatggtgagagttatcatgtaaaagtagctggttatggaatgattgagcatggtcaacaatcctgttttttgtgggttgatggtgttcctgaagaagttgttgtgcaacattctgaacttcatgacaaaatagagcgttcatctgttaataacaagataggacctggagatattactgtagctatccccggttctattattgcaattcatgtttctgttggtgatgaagtcaaggccgggcaggctgtactggttattgaggcaatgaaaatggagacagaaataaaagcacctgcaaatggggtggttgcagaaatattatgtcaaaagggagacaaagtgactccagggcaagtattaatcagagtggaggtgagt

SEQ ID NO: 25107 - DNA, 2202 bp, Legionella pneumophila
atggtaagagtaaaagatacgactccgttgacgccagatggcagtattgacgtagagatgtggttacatcatcttggttcaaaaggatatttggataatctcgaactcgtaagagctgcctgtactttaagtcaattggctgggcaggatcatgctactgaaacagggcaaacttgtttacaacaagggttatcaatggctgatttacttgctgacctggaagtagatcaggaaactctggctgccgctattatttttgaaaatgttcattatgcggatttatctattgacgatgttgaagagcaattggggcacaatatcgctaaattggtcaaaggcatagaaaaaatgagtgccatgaacaatttccaggctttaaataaatacccgcaaaacaaaaatcaaattgacaatattcgcaaaatgcttcttgcgatggttgatgatgtgcgagttgttttaatcaagctggcagagtgtttatgtattttaagaacagcagggcatctgtctgaaacggtacgtaaacagctggcaaccgaagccatggaaatttacgcgcctttagctaaccgcttgggaataggggcaatcaagtgggaaatggaagatttggctttccggcatttgcatccagaagaatataaggcgattgccaagggattgaaggctaaacgattggaaagggacagctttgtcaatcgcattgtcgaacagcttgaacatcagattcgagcaacaggagctcgccactttgccgtttatggtcgctcaaaacatatccatagtatttataaaaagatgaagcgtaaaaatgtatcattagacgagatatatgatgcaacagcggttcgtattctggtagatactgaagcacaatgttacgaagtgttaggcatggttcatactttgtggaagcaaattccagcagagtttgatgattacatcatcaatccaaaatccaatggctatcagtctcttcataccgcagtagagggtccggaaggaagagtttttgaagtgcaaatcagaacttttcatatgcatgatttagcagaaatgggtgtggcagcccattggaaatataaagagggcgcggtatcacaaaaagagagccatgagcgcaaaatagaatggttaagagacgttttggcgtggcaccaggaaatggcagctaataaaggtgtcgcagaaaacgttacgactgagtttcttgaagacagagtgtatgtatttactcccgatggcgatgtgttggatttaccccatggggtgactcctttggattttgcttatcatgtgcatagtaatttgggacatcgttgccgaggtgccaaggttaatggtcatattgtcccattgacttatcaattgaaaacaggagatagggttgaagtactgactggaaaagaaatcaaaccatcaagggattggattaatcctcatctgaattatttaaagaccgcaagagccaaggctaaagtattgcattggtttaaaatgcaagattatgaagataatgtgagagatggtcgtgagttattggagaaggaattaaaatctttaggtattaaatcggataaactcaatgaagttattacggcattgaattataaaaaggcggatgatctttatgccagcttgggacgaggtgatattaaaataggtcaaattgttaatcgattggcacctccagatacttcagaacaaaatttacagaagtttgtaagacagcaacaaaaaccagaggtcacagggagtgatcttcgtattgagggagttgggaacttattgacatttatggcaagatgctgccaacctgttcccggtgatgaaatagtaggatacatcacgattggaaggggggtttccgttcatcgaaaagattgtcctaatattatacatgccagtgaaaagcaaaagcgacggtttattcaggtgaattggggtacagcaacacgggaaaattatgttgttgatgtgttgattaaagcctttgatcgctccgagttattgaaggatgttacttcgctgctttcaaatgaaaaagcccatgtttatgctttacagacccatagcaataaacatgaaaatatggcttatatcactttaactgttgagatcgatggtttaaacagtttgtcgcgcttattaactaaactggagcaaattcctaacgtgctggaagcaagaaggcaatta

SEQ ID NO: 25108 - DNA, 3882 bp, Legionella pneumophila
atgttaatttatcaaggtaaagaaatagttcgatttaaagaaaaaacggggggtaaaaataaaagcgacgtcgatggtttttataaagacaatgatggcgggaaattttttataaaaaaaccaggtgaccctcgtgaactattcacggaattatttgccggtttgttattaaaagaattcatgaagcgagggttgattgatgaaagttattttccatcattgatttgcgcggatgtcattcaatttgaagacaagtcctatgggctcatccaaccactggtttcatttgatgaattacataaagtgattggaacgagctctggtgatggcaaagatcgtaatacactaaaggaaaccctttttgggccaggttattatgctggtattacgaaacaaaataaatactttggcctttctatggcccttatgttttctttattgttgggagcccatagtgtacatagtggcaacatcgttgtactcaacggagaggaaaaagaaaaaagcaaacaatttggccgaatagattggggagacgcattccgttatttcgctcatcctaacaataatgacaatctcctttatgcttatgaaaacagaggttggtttaattataaatcactaactaaagattatttcctcaactataagaagatcaacgggctcttccctgcgatggctgaaaaagctcgacaattgcaatccaaactcaatcctgaattacttgttaaaatagtaaccagcgcactcaaaaatattccagctgatctgatagatgaaaaaaccaaaatccaacttgccgcatacatgtgtatggattcatttaaagaggcgacatttggcactgagggtaattgcaaagattttgccattgccatggccacattattagaaaatcgtttaggaaaaattgctgttcttaaagatatgtccccattgagcaatcctgaagagctatatcaaagtattttggaattaaaacccttgacgcttcttatgacctcttcaacctctttttcagaaaccataaatcaatgggcagacatcttaaaaactacagacatggaaaaattttcgtttgatagtaatccaatcaacctactggaattagtcaaacaatttaatctttacgttgatgaactagccatcacgtgtgaagccaataatgtctgggcaaaagaaagaatagacagcacccctaatctgtttgctctctacgataatagcggtggtgaagcgattcacggacatgcctttgttccttactacaaagaaagcattgtattgcgccgcctatttacagtagaccctaatactttcaacttatctcgttttgctgcttttgaaggaccatgccaactctattgcaaggaacataaagactctgcctgggttaaaatccaaaccttactgactttaggtaatggaattattaatacgctaaaaataatcaaacaggctcaagcattcggaatagatgaggcagttacagagaatttaaaagcattgaaagaacaattcattgcttttcaacttgcggaagctgatataaaggaatcattaaaagcaccttcttttgcagagcccttgcctaataaggaaagtgagtttttttatcccattgatgaaaaagcattagctaaaatgaatggatatcaacttgcaacgatttgtctggaagaactaaatagccctaaaccgtcgcctttaattgaaagaattctcagtaataaaaaattttggaaacgtattaactctgcttttgaaagtggtgtatttaaaggccgcacagatgatcccgccggtaaaatagctaaaatccgtgaatggcatcaattattacagatttctggtaaaaaaactgctggacaaattgatgagctgcaaaagatagtaatttctcttcaatcaaaaattaaaaggcaaacgattgaatttgaggagttagaagcgactttaatccaaataaaagaaaaatatcagttactggagaaaatggctgagcaaagcgaacatgagaaatcttccgcccaatccattattcgctctctgaatttagaactgagtcagcttaaattacaactgcaagagcaagaaaaattacagttccagttaaaagaactcaaagagaaaatacatgaacaaactactctatccaagcgattaggagaagagctgcaaacgcaaaagaaaaccaacacgcaccaggaagaaaccattcaaagaatcaccaaagaaaaatcattggccgattcttcccttgagtcgcttcgaaaagaactgcatgaattggcaaaaaaagaacgctctcttcataaaacgctcgaagaaaaacaattacaagtacaacagttagaagagcaattagcagagaaagaaaaggaaaatctagccctgaaaaaagctgacaaacaaagtcaacatgaaaaatccctggataaatccgctattgaatctctaacctcagagcttaatcagcttaaactagaactgcaaaaacaagaaacattacaattgcagttaaaatctttaagaaaacaaattcaagagcaaacattagttgtagagggcttaaaagaggagttacaaaaacaaaagaaaagcaacacacaccaggaagaaactattgaaagaattactaaagaaaaatcattagctgattctgctcttgaatcacttcgaaaagagatgtatgaattaactcgaaaaaacgaagaaaatcaacttaaattaacaaaacaagtccactctcttagcgaacaacttgaagagaaacaattacaaattagagaatttgagaagcaattacaagaaaaagaaaaacgagttgagcaaagtgagaaaggtaaagcttcagcaaaacgaactgtggcttcacttagagagcaagtaagcaatttaaaattgcaattacagcaacttggagaggtaattcaggaaaaagaaaaaggctcctctttgataagccagcaatccaaacaaattattgctcttcaagagattatagaagatcaaaaaagacaattggaagaattgaaaataaaaattcaggaacttgtatctgcaaatcaagagcttggaaaacaaaatcaaagtttgagcaaggaaaatttacataataagaatacagttgaagatcttaagaaaaaattgaatgaattaaatgttcaattggaacaattgcatcaatcttcaaatgaaaaagaacaaaccattagaaaattgagagaagaactcattaagaaagattcttcgctcaaacaaaatgaggaaatgcaattagcccaaaaacatctgcaagaggaaattgatcgtctacaaaaagaaattaaacaacaacaattaaatacaaatcaattagaatctataattgctcaaagtaaagaggctgaaaaacgctatcagcaagctttacaacagaaaaagggaatttactttgcgcgaatggaaagagtgtctcctatttatttgcaaatacagcaaattgaacaaaaggccaaagaattggaggaaagaagggaaacagaagcatcaacagcggcaaagacactcgcaacaaaacttcgtttagagataaaaaattatctcgacaataatgagtccgatgaaaaaagtgccttaaactcattcaaaataaatgccaaacggcatattgaaaactcgaaggaaacgctaaatcaacatcgtgaagaatggaagtacctgttagccaatgttactttaggggtattcttgcttggaatcggttatctcgccgctattttgattaacaaagcaactactggcaattatacctttttcagccaaactaacagcgggaaaaaattggacgcgttggaaaaagcgatttcctccactcactccgaaacattagtttatgga

SEQ ID NO: 25109 - DNA, 909 bp, Legionella pneumophila
atggacagcagtcatgtaacagagtctcagggcactttgcttttcaatgagcctttggctgagtatactacctggcgagttggtggccctgcagcgaggctttataaaccagcaaatatagatgatttggctttgtttttaagtcgattgccttttgatgagccattattatggttaggtttaggctctaattctctaattcgcgatggcggtttttccggtaccgtgattctcactcagggctgtttaaaagaaatgaccctattgagcgataactgtattcgggttgaggcaggggtatcctgtgccagtatggctcgtttttctgcgcgtaataatctgtcaggaggagagttttgggctggtatccccggtaccatgggtggtgctctgcgaatgaatgccggttgtcatggaggtgaaacctggcagtcggttattgaagtacaaacgataaatcgtcgaggtgaaatcagaacccgtaaaccggaagaatttgaagtggcttatcgacatgttgctggcttgggagatgaatggtttatttccgcaaagcttcagctatcaccaggtaataaagagacatccttgcaattaattaaggatttattggctcatagagccaagacccaaccaactaatgaatataattgtgggtcggtatttagaaaccctcctggagattttgcagcgcgacttattgaatcttgtggcctcaagggggtaagcattggtggggcagttgtttctgaaaaacatgccaattttattatcaatcatcaaggtactgccacggcagctaatattgaagccttgattcatttggtgcaaactaaagttcgagagcaaacatctatagagttgatacgcgaagtacatatcattggagacgctaatgtccaaacccgt

SEQ ID NO: 25110 - DNA, 3153 bp, Legionella pneumophila
atgaaaatagctcttttctttattgatagaccagtatttgcaacagtgatctccatcatcattgttatggtgggggtattgtcctatttcaacttaccagtagaacaatacccacaagtagttcctcctacgattcaggtatacgcctcttatcctggagccaatgcaaaaacagtagctgaaactgttgcaacaccgattgaacaggaagttaatggtgtggaaaacatgttgtatatggattcccaatccactgatgatggacaaatgcgtctgactattacttttaagcttggaacagatctggatcaggcgcaggtgctggtgcaaaacagggtggcagttgtggaacccaaattacctgaagaagtccgccgcttaggaatcactactaacaaaaattcacctgatttgatgttggtagtgaatatgtactcccctaatggtcaatatgatcaaacctacatcggaaattacgctatcttgcatatacgcgataaaatcagacgaattgaaggtgtaggcaatgtactcgtatttggggccagtgaatatgccatgcgtctttggctgaatcccgatttaatgaatacttttaatttaacggcaaatgatgttttagcagctgttcgtgctcaaaacgtgcaagtcgccagcggcaagcttaatttgcagccacagaaaaaacaatacggtttcgagtaccatattgaaaccaaaggacgcctggttaaaaaagaagaatttgagaatattattgtcaaatcaggtgaaagcgggcgtatcgttcgcctgaaagacattggtcgcgtcgagttaggtacgcaaaattacctgacgaaaggttatttagataaataccctgctgttgcattacctatttatcaacgcccaggaaccaatgcattagccactgcacaagaaatcattaaaaccatgaaaacaattgccaaggatttcccgccgggcattacctatgacatggcctataatcctactctatttgttcaacagtcgatcgatgcggtatttcataccatttatgaagcgattgctctggttgtactcgtcattttgatttttctacaaacatggagagcctctgccattccagtagtagctattcctgtatcattgataggaacttttgccgtgatgcaggctattggattttcgttgaattacttgaccttgtttggacttgttcttgctattggtattgtggttgatgatgccattgtcgttgtcgaaaatatggagcgtaatatccaggcaggcatgaatccccgcgatgccgccagaaaaaccatgacagaggtaggatcagcattggttgctatgggtttggtgttgattgccgtctttttacctaccgtttttctggaaggaatttccgggcgtttttatcaacaattcggtacaacgcttgctgtcgcaactgccatttctgtttttgtctcgttaaccctgactccaaccatggcggtattattgcttcgtgctcatcacggaactataaaacaagaagggttagcctggtggaaaaaaccaatatatggatttttgcatggatttaaccgactaatggaaggattttcccggcaatatgggaaattggttgctaccctcacacgtaaaacggctttaatgattattgcttatggtatttttatttccatcacactacttctatttgtctacgtaccacgcggctttatcccgagacaagaccaaggttattttatcgttgcagttcaattgccgcctggagcctctttgagccgtaccgatgctgtcatcaacaaagcagtcaacaaaatattggcgattcctggtattgcccataccgttagttttaccggcttttctggcgctacatttactaattcatcgaatgccggagcaatttttacccccctattgtcatttcaagaaaggcaacgtatggggataaattataacgatattcttaagcgtctaaggcaggaattaagtaccatcaaggaagccctcatcgtggttatccctcctcccccagttcgaggtattggaaatgcaggtggttttaaaatgatgcttcaagacaggggtggtcgaggtcttgatgtattaatggaagcggcagcaacaatggttaatgcagcgaatcaggaaaaagccaccacatcagtatttactttttttgaaaattcaacaccacgacttcacttgaaacttgacagagaaaaggtggaacggcttaacgtgccttacgccaatgtcgtggaagcactggaagtttaccttggctctgtttttattaacgaattcaattacctgggacgtacttttcgtgttattgcgcaagctgattcagaatatcggcatactgaagatgatattttacgaatcaaagtcaaaagcaacagtggagacatggttcctataggatcagttgcgcaaatagaaaatacggttgctccctcgcgtatgcctcgtttcaatctgtatcccgctattgatttgcagggtgatgttgctcccggatacagttctgatgaagcactggtgactatggaaaaactggctcagaacaatcttccagacgggattggttatgagtggacagaaatagcctatcaacagaaaatggtaggtaatactgctttgatggcttttactctgggtgttattttcattttccttgtccttgccgctcaatatgaaagctggtctttacctttagccgtcatattaattgtaccgatgtgtctcttttcttccatgctgggagttaaaattctcgggatggaaaataatattatgactcaaattggttttctggttttgattggacttgcatcgaaaaatgccatcctcattgtggaatttgcgagacaacttgaaaatcggggctataacctctggaaagccgccattcaggcagcaaaacttcgtctgcgcccgattttgatgacctcatttgcatttattctcggtgtttttcccttgattatctcaacaggcgcaggcgctgaaatgcgccgagcgctcggtgtcgctgtattcagcgggatgttgggagtgactttttttggtctggtctttacgcctttattttatgttttaattagtcgcttgagtagatataaaaggaaattaaaagaccttaac

SEQ ID NO: 25111 - DNA, 1152 bp, Legionella pneumophila
atgaactctcaaaataaacaaaatttagttaaaaccgtagcaattgtattttttggtattgtgtttgtttatttagtatatgaccattttacaagggcccaggtagcaaccccagcaccgccagatgtgatcgttcaaaagcccaaattaatgaaaatgggacagtatgttacccagacaggtaatacagtagcatttcaatcggtagatttggtggcacggattgaaggttatttggatgccataaaatttactgacggcgcttttgtcaaaaaaaatcaggaattatttattattgaacccgagccctatcttgagcaactgcgtgctgctgaagccaaggtagccgctcaaaaagcaaattatgcctatgccaaatcagagtatgccagacagcaacgcatgtataaacaaaatgccacgtctcttaacagtgttgaaaaatggaaagcaaaagttgaagaagcacaggcagaagtagataaatcggaagctgatgctacaaacgccgcaattacatatggttatacccacgtttcagctcctttcgatgggcggatgggaagacatttagtcgatgtgggtaatttggttgggcacggtgccgcaacggatttggctaccatagaacaaatcgaccctatttacgtttattttaatttaaatgaactggatttaatcaggattagaaatgcagcgcgcaagagaggatataaaccaatggaattggtcaaaatccctgttgaagtggctttgcaagatgaaaaaggatttcctcataaggggacattggattttgtaaatactggtttaaacgcttcaactggaaccatggagtttcgcgccttgttacctaacaagggatatcccctggtacctggtttatttgtgcaagtccgggtaccgatatctgaaccttctccaaaattaacaatacctgacacctctgttcaatacgatcaaattggcccctatgtccttgtggttgataaagacaattatgtgcttaccaaacgcgtgacacttggcgggctagaaaatggggtaagggctattactaaaggccttgatgctcaagacagtgtgattgtttccgggttgcaaaatgcgacgcccaatcatcgggttacgcctaaaactgagcaacctgag

SEQ ID NO: 25112 - DNA, 714 bp, Legionella pneumophila
atgtattcatcgaattatatttatcaacatgatgatcttgagttacacggatttttagcgcatgaagagggaattaaacaatctcggcctgccgtaatagtcgctcatgattggagtggaagaggtgagtttgcttgccttaaagcaaaacaacttgctgagatgggctatataggctttgctttggatatgtatgggcaaggacaaattggttctaacaatgatgaaaaaatggcattgatgcaacccttgtacagcgatcgctctttgcttaggggacggttgtatgccgcattggaagccattaaatcaatatcggtagtcgataacaatcgcatagccattatagggttttgctttggtggtttgtgtgcccttgatttagccaggagtggtgcggatattcgaggagcagtaagttttcatggcttgcttaataaacctgagaatctagcatccggaagaattaaagcaaaaattctggccttgcacggttatgatgatcctatggcgaaaccggaacaagtacatgctttttgtcaggaaatgacagaagctaatgtggattggcaaatgcatatgtatgggcaggtgaaacatgcttttactaatcctcaagcgcatgatgaacatttaggattaatttacgatgaggttgctgcgcgccgatcatggcaagcaatgagccagtttttacaagagatttttaatgtt

SEQ ID NO: 25113 - DNA, 1974 bp, Legionella pneumophila
atgaattatagacccgatatagatggattaagggccatcgcaattttattggtcttaatttatcatgggggcctctcgctttttccatcagggtttatcggtgttgatgtattttttgttatatcaggttttctcattactactattatccatgagtcactgaataagaatgatttttcattcttcgatttttataatcgaaggttatggcggttacagcctgttttcgttgctctgatcgtggtgacaaccctactaagtgtattgttttatttgcctgatgatttaattgaatttagtcgtagtgcgcgtaaagcatcgctgtttatttccaacctgttttttaataaaacaaccaccggatatttttcacccgatacccatcaacttcctttgctgcatacctggtctctttcaattgagtggcaatgttatctggttttgccactggcgatgtatggcttatatcggtttctaaataaagggcaggttatctatattgtgcatgggttggccattttattttttttgctggctttgtactactcacaggcggctcctgcccaaacctattatcaattttccagtcgtatttttgagtttttaatcggttcttgcatcgctttaagccctcgaattgagttctcaatcaataagtcaattttagttattttaggcttatccgcattattttttataatttataccgctacactggataatattcttcttggatatcctaattggcgtacactttttgtgtgtctggcaacgggtttgttgatagcattaggtacaaattttccttcacttgctattgtaaatgctctctcttttcgaccattagtgtttataggagttttatcttattctctttatatttggcattgggttgtcttttcaattttaaggtaccaaaatatcgaagagcggtctgaggttttatttatagtttatggcattgtttttgttttagcttatttatcctggcgatatatagaaaaaccgacgaaaaaattcagacatattccttttcgttatacggttgtgattttattgctgatccctgttttattttctcatttaagctctttagttattaaatctcattctggatatccacaacgatttaatcaggagctggttagggtttataaacaattaaagagttacgaaagcccatacagagcgttatgtatagataataccagggcagacaatgcgtggaaatgcaaaataggagcaaaagagcaaggtggcaggactggccttatgataggtgattctttttccaatcattattgggggtttatggatgtgttagggaaagctgccggtgtttcaatattggctcaaggaacctcttcttgtatttccttaccaggcatatatctttatgattggtggcatttcaaagataaaatatatcaggattgttatgagcaaacggaaaaatattatcgcatgattcaaaagaatcattacgattatgtaattataggtcaagtatgggaaaattatgtttcagcccatattatcaatcaacgtggcgatgattattctgcagaattaaccaaaaagcgtttggcagatgccttagacagagcacttggcgtgataatatcttctggagcaaaacctgtattaatcgaatcaaccgcggtaacgcatggaaatttacatcaatgcttttttaagcatattaaattaagacaaagttataactcagaagagtgccgctttactttaaccagttcagataatgagacttggctaaaccaattgtttgataacatgcgaagaaaataccctcaattgataataatcgatcctaaacaagttcaatgtcgcgataatgtttgctattccgatttgaacgggattccagtatatcgtgatgaagggcatattactgattacgcttcataccaactgggttatttatatttgcgggagtttgaaaatcctttgatt

SEQ ID NO: 25114 - DNA, 657 bp, Legionella pneumophila
gtggctgctgggctggagccacaggacagattaaaattcagggactccaaaaaatacaaggatagaatttctcaagcgcaaaaagcgacaggagagaaagaggcattaattgttgttaaagggtttttaatgcagcaaccagtggttgttagtgcctttgagtttaattttatgggcggctccatgggagcgacggttggagaaaaatttgtaagggcagtgaatgttgctgcaacagaaaagcgaccatacatttgttttactgccagcggcggtgctcgcatgcaggagggattattttctttaatgcaaatggctaaaacatcagcagctttagcaaaatttgctgaaaccgggttgccttttattgttgtgttaaccgatccaacgatgggtggagtatcagctagttttggcagtcttggtgatataattattgctgaacccaatgctttaattggttttgctgggccaagagtgattgagcaaactgttagacaaactttgccagaaggctttcaacgaagtgagtttttactggagcatggacatattgatatgatagttgaacgtaaacatcttcgagcaactatatccgaattggtttccaaattgactcataaaggagcggagagtttttttgcacgcgccatggag

SEQ ID NO: 25115 - DNA, 1161 bp, Legionella pneumophila
atgagccaacattttgatgtacttgtcattgggggcgggattgttggcttgacagcagctttagctatggcccaacgccattatactgttgctgttatcgatgcagggacattgatggtcaatacagacaagagtgatttgcgtgtttatgccatcaataaggcatcaaaaatgttattaagtgaattagaagtgtggcagcacctcaatgatgcccgggtcgctccttataataaaatgcatgtatgggatggtgtgagtggcgcatatattgattttgattctcgcagtattgctgagccaaatttaggggcaattattgaagaatcaatcttaaagcaagctttgttgcgtcgaatctcatcagaatccaaaataagtttatttcctcaaagtgtaatagatgaggtgtgccatttagagcggagtatcaagatctccggccaaaatactgcctgggaagggcagttattgatgatcgctgacggagctaactcccctatgcgtcataagcttaaggtggatgtaaccagctggtcttatgagcagcaagcgttggtcgcaacggtaagtagtgagaaatcacatcagaatactgcttttcaagtgtttcatcctgatggccctttggcttttttgccattatctaatctcaatcaatgttctatcgtttggtcaactcatgccgataatgcgatgcgattgaaattacttgatgataatgaatttagccgggaattgactaaggcatttggaggtcagctagggcaaataaaggtagtaagcagtcgccatcaatttcctttacagatgagacatgtcaagcaatatgcagggcatcgctggttattgcttggtgatgcagcccacactattcatccattagccggtcttgggttaaatgttggcctggctgatgtgaaaagctggttaacctgtcttgaaatgggtaaagatgaattgatatccaaaaaagtattaggggcataccaaagggaacgcaagcattctgtttggcaaattattttgcttatggagggatttaaaagattatttggaacctccgcatctcctgttacctcattacgcagtctcggattgagggcatgcaatgaatttatcccgattaaacgattatttatgcgccaggctagcggttta

SEQ ID NO: 25116 - DNA, 300 bp, Legionella pneumophila
gtggctaaaaaatcaatgctgatgcgagagtcaaagcgtgcgaagctggtagaaaagtacagacaacgccgaaacgagttaaaacaattgattaaatcatctgatgatttccaggtaataatggaaagtcaggcaaaactagcaaaattaccagttaattcaaatcctgttcgctatgttactcgatgcaagcaatgtggaagaccacacgcagtttatcgcaagtttaatctttgcagaatttgtttaagacaacagcttatggtgggcaatatccctggcggtagaaaatcaagctgg

SEQ ID NO: 25117 - DNA, 1179 bp, Legionella pneumophila
atgggctccaaattgcattctatgatcttatgggggccacctggggtcggtaagactactatagcaagattaactgcacaggcttttgattgtgaatggatagcattatcagctgtattttcaggagttaaggatattcgagctgcggttgagaaagcgcaggaatatttaattcatgataagcagactatcttatttattgatgaaattcatagattcaataaagctcagcaagatgccttattgccttatacagaatcaggcttaattactttcattggggcaactacagaaaatccgtcttttgaggttaattcagcgttattatcacgggcacaagtttatgttttaaaaccgttatcggagcaggagttaaaactcttatttcttagggctcaccaaagagctttatcttctctgcaatttaccgaggaagccgttgattttttaatttcttgtgctgatggggatgccaggagattactcaatttacttgagcaaacaaaaacagcctgcctaacaattaaaacagcagttgttgatgtagaacttttgcataatgtgatagtacaaaatagtcgacgttttgataaaggtggagaagcgttttacgatcagatttctgctttacataaatcggtacgaggctctaatcctgatgcggcattatattggctatgtcgaatgctggatggtggtgtggatccatattatttagccagacgtattattagaatgtcatgggaagacattgggttagcagatccgaaagcgattcaaatcgctaatgatgctgctgcaacttatgagaggcttggctcacccgagggcgagcttgctttggcgcaagctgtaatttatttgtctgttgctgccaagagcaatgcgggatatgtcgcatttaatcaagctatggaatttataaaaagagacaagtccagagaagtacccattcacttgagaaacgctcctactcaattaatgaaaaaactaggttatggacatgaatatcgatatgctcatgatgaaccacacggctatgcggctggtgaatgttatttacctgaaggaatgccagaagtaaattggtataatccggtacaaagaggtttagaaactaaaattgcagaaaagctcgcttttctgcgccaattagataaagatgtaaaaaagaaaatt

SEQ ID NO: 25118 - DNA, 924 bp, Legionella pneumophila
atggcaaagcatcaatctgttttattacatgaatcaatcaaaggtttggctataaaagctgacggtatctattttgatggaacttttggccgaggaggccacagccgcgagattttaaatcatttaagcgataaaggaagattgtttgcaatagataaggaccttgatgcggtgcaatatgccaaggattattttggtttggataaacgatttcaaatttttcacggttcattcgcgcaaatcaaggaatttgcgtcacaagcgggggtaattggggccgttgatggaattttgcttgatctgggagtgtcttcacctcagttggacaatccagaaagaggttttagttttatgctgcaaggccctctcgatatgcgaatggatttaactcaatcaattaatgctgcgaattttgttaatgaagcagaggtcaacgagctggctcatgtattcagggcttatggtgaggaacgatttgcaggcaggattgcaaaagctattgttgatgcaagaaaactaaaaccaataacaaccactttggagttagcggaaattgttaaagaagcaaaccccaaatgggaaaaacacaaacatcctgcaacccgggtatttcaagcgattcgaatacatgtcaatcaggaattaaccgatttgagtaattgtctagagcaatgtctggacgtgttggggccaggaggacgcttggccgttatcagtttccactctttggaagaccgaatagtcaaacaatttatgagagataaagagcaaggtaacaggccacctgttgaagttccaatcaaatacgaagaactaaagaccaattttaaaaaagtaggtaaagcagtgaaaccacagagtagcgaaataaaggaaaatgttagatctcgaagtgcagtacttaggataggggagaaattagca

SEQ ID NO: 25119 - DNA, 1194 bp, Legionella pneumophila
gtgatcaattcaaaattaattggtggtatattactcatagtaggcacttcgattggtggtgggatgttagcgctacctgtttctacagccgaggtgggatttgctaactcattatttttcctgtttttttgctggttggtgatgaccgctggagctttattaattcttgaggtaaatctacgactcccggcaggaagcaatatgatttcaatggcgaaatcaaccttgggtttgccaggtcaggtaattgcctggataacctaccttcttcttctttataccctcctggcggcttatatttcaggtggaagtgatgtatttagcagtctgctgcataaggcccacattgatttaccgaattggataacgtctgtaatatttactgccatgttcagccttattgtatatagtggtatacgctctgtagactacgttaatcgtggacttatgtttggcaaactgggcgtctatattttattggttattattatcagtccccatgtatccacagcaggattaacaggcggctcagcgaaagcctttactggcactctcatgatcttggtcacctcttttggatttgcatccatcgtgcccagcttacgtgattattttaacgatgatatacgtagcttacgtcgagttattttgtttggttctcttatcccattattctgctacatagtctgggatgcagtgattatgggcgttatctcacgcgagggagaaaatggtttattgtccctaatgaactcggatcatgcaaccagcggcctcactgaagcacttagtcaatcggtaagcagccagtggatcagtggattttttggttttttcacttcgatctgtatggttactgcatttctgggagtttcattaggattatttgattttcttgctgatggattaaagcttaaaaaatctggtaatcaaggcaagtatacactggctctcacttttatccctccattggcagtggtgttgtttaacccaggtatctacctgcatgcattaagttatgccggggtttgttgtgtcattttattgctgttattacctgctatcatggcatggaaaggaagacaaacctgtagccaatctccatcagaaactcatttgattcctggaggaaatccagctttaagccttatagggtttatcgccattggtttgcttatcattgcgatcatgtat

SEQ ID NO: 25120 - DNA, 1251 bp, Legionella pneumophila
atggattattcaatttacctactttttgctgctcttattctttgttttcttatgacctggggggtcggtgccaatgatttggctaatgtcatgagtaccactatgggctcaaaggcagttaccgtccgtcaagccatgcttatcgccatcattttcgaatttgcaggcgcttttttagggggtgaaggtgtcactgaaaccatgcgtgatgggattatcaataccagtcaactctctaatgaaccattaatcctcatcgaaggcatgctgtgcgttttgtttgcctgcacaatatggatgaatcttgcgagttatctgggggtccctgtttcgataaccaacgcattagtaggctcgatggttggttttggcactatagtcttgggtcctgacgcaatacattggaaccaggtagcgcgaatcgctattggatggatttcatctccgttgatttcagggattacggcctacgctttgttcattagtatacagcaaaccatatttgtaaaaagtaacccgttgactaaagctaagctatatattcctatttatctttttttgattggttttatattatcttttatcactgtatttaaaggacttaaccattttgatattcacttgaatttaaagcaagatttggcggtgactctggccaccagtataataattacaattctgggtatgatctttattaagcgtattcctgaataccataaaataagacgcagggaacgatttattcaggtagagaagtattttgctgtgctcatggcaatgacggcatgcgctatggctttcgctcatggctccaacgatgttgccctggctgttggaccattaagtattgtgcacagcctggtcatgcattccaatcaaatatttgacgcagataactacccttcctggattattttattaggttgcgtcggagtagtaactggtttccttatgtatggaagaaaagtcattgaaaccgtaggaagttctatcactgctttaacgcccagccgtgcatttgctgcaacactttctgcagcaactaccgtagttgttgcaaccagcaccggaatccctgtttcggcgactcaaactctggttggtgccgttttaggtgtaggtttggcaagaggtatcggcgctttgaatctcattgtaatccgtaatatctttatgtcatgggtactgacattacccgcagcctccatgctaacgatcttatcctataaacttttacatgctttgttggga

SEQ ID NO: 25121 - DNA, 1569 bp, Legionella pneumophila
atgcgacgtcaatggtatatcggatttggagttatccttttatgtctctttgccctgtttgccatgctgcaggatattgtctggttttttgcttttttgatacctattgtaatcctgtggatttatgatgtattgcaaacaaaacacaccattttacgcaattttccagttctaggtcacgttagatattttttggaatttcttcgccctgagattcaacaatatttcatcgctacggatgaaagcgagcttccttttaacagggaaacccgctccatgatttatcaacgcgcaaaaaatgtcagagacaccattcctttcggaacggagcgagacattctaagcgtcggttatacttgggcactccattctctatcgccgaaacactctagcgaagtggaaccaagaatcgatgtgggtggacctgattgtaaaaaaccttacaatgcctcccgattgaacgtatcagccatgagctttggctctttatcggctaatgccataatggcattaaacaagggagcaaaacttggaggcttttaccacaatacaggggaaggggggttaagtccttaccatttgcaaggcggtgacattgtttttcaaattggcacagcttattttggatgccgtgatgacaaaggcgactttgacgaaaatgaatttatcaaagaagcatcccgtgatgaagtcaaaatgatagaaattaaattatcacaaggcgcgaagccatctcatggtggaattttacctgcagccaaattaactgaagaaatcgcaaaagtaagaaaagtgcccatgggcaaagatgttttatcgccaattgcccataccgcttttgataatcccgttggtttacttcattttgtaaaacgattacgcgatctttcaggtggaaaacccataggctttaaactctgccttgggcgccgacatgaatttatggctatttgcaaagccatgctgaaaacaaatattttacctgattttattacaatagatggtgccgaaggagggacaggagcagcaccggttgaatacaccaattttataggaactcctttggaagccggtctggtttttgttcataatgcccttattggcaccggtgtacgtgataaaattcgcgtaatttgcagtggaaaagtaaccaacgggtttgatttgctcactaatattgctcttggggccgatatctgcaattcagcaagagccatgatgatggcaatagggtgcatacaatcaaaacaatgcaatgccaatacctgcccgacaggagttgccactcaaaagaaacgtcttcagtatggtcttgttgttgatcaaaaaaaatttcttgttgctaatttccataataatacgataaaaagctttttggaaatggttggcgccttgggattaaacaatcccagtgatttaaaaccatcccatattatgagacgaatcggggtggatgaagtcaaatcttttgatcaaatctatacttacgttaagccaggccaatttttacaaggcgatattcctgaagattatagaatccactgggagcatgccaatccagacaagttt

SEQ ID NO: 25122 - DNA, 1359 bp, Legionella pneumophila
atgaaattaacttttttaggagcaactgagacggttactggttctaaatatcttttgaccattggttctaaaaaaatcctgattgattgcggtctttttcaaggctacaaagaattacgattacgtaactgggctcccttgccaattgatccccatgatattgatgcggtgattatcactcatgcgcatattgaccattcaggctatcttcccttgctcgtcaaaaacggattccaaggcaaaatttatacaacaccgggtaccaaagcactgtgttccattttgttacccgacagtggtcatctgcaggaagaagaagcccgcttggccaataaatatggtttttcaaaacataagcctgctctccctctttatactgaaaaagaagctcagacggcattaaattattttgaaacgatcgattttgatactccgcatcaattgtttcacgatttcagttttgagtatcatcgtgctggtcacattgtgggtgcggccatggtcaaaataaaaacccaaaagggttccattgtgtttactggagacattggccgtccttatgatcccgttatgaaagcccctgccttcattcaagaaacggattatctggtgatggagtccacctatggtgaccgattgcatgatgccacagatcctttgcctcaaatggctcaggtgattaatcaaaccgttaaacgagggggctcggtcattattcctgcttttgcagtaggacgtgctcaaagtcttctttattttatttacgaattgaaacgacaaggggctatacccaaaaacattccggtttttttagatagccctatggccattgacgcgactcatttgctctgcacctataaagaagaccatcatttaacggcagagcaatgtcagggattatgccgtatcgctacttatgtgaatacacctgaggaatccaaggagattgaccgccatcacatgccgcaaatcatcatagcggctagtggcatggcgcaaggaggtcgcattctccatcatttgaaagtgtttgcgcccgatcccaaaagcactttgttatttactggctttcaggcgggtggcactcgtggtgctcgaattgtgaatggggagagacaagtcaaaattcatgggagtcttattccgatacgagcccaggtggtagttatgagcagtacgtcggctcatgcggattatcaagaactgttaggatggcttaagcactttgctaggccgcctaaaaaagtctttattactcatggtgaaccccactctgctcaatcattaaaagaaaagattgaaaagcaattcggtttttcttgcacgattccttcttatctgcaaacggaggatttgttg

SEQ ID NO: 25123 - DNA, 2019 bp, Legionella pneumophila
atgaatgatcaaggaattaaggaatcgatagaaacgcttaaagagcaaataagaaaatacgattatcactattatgttttagatgaacctttggttcccgacgcggaatatgatcgatgtttcaaggcattgcaacagtatgaagagcaatatccgcaatttttatcgccagattctcctacacagagagtgagcggtactccttcagatgcttttatgccggtagcccataagcaacccatgttgtctttgtccaatgtgtttactaccgatgaattaaaagcattcattaagcgagcaattgagaaactggatgaaccaaatcaacaactggtatttgcttgcgaaccaaagcttgatgggttggctgttaacatgacttatgagggcgggatcttgactcatgccgcaactcgtggcgatggtgctgtaggagaaaacatcacagcaaatattaagactattgcttcagttccattaaggctaagggttagtaaccctccaaaattgatcgaagtgcggggtgaagtctatatccccaaagccgattttgaagcttacaacgcaagggctagagagctcggtgaaaaaacttttgctaatccgcgaaatgctgctgcaggcagtttaaggcaattaaatcctgaaatttctgccagtcgtccacttgctatttattgttatggtataggggcttgtgaggattataagttacctaacagtcatttggagcaattgaatttattaaaagagtttggatttagagtgtctccagaaacgaggagggcggttggagtagaaggctgtttagattattaccagtatatgttagcgaaacggaatcaattgccatttgaaatcgatggggttgtttataagattgacagtatctccttgcaacagcaattaggttatgtttctcgtgccccaagatttgcttgtgcccataaatttcccgctacagaagaaatgactcgtctgatagccgtggatttccaggtaggtagaacgggcgctgtgacaccggttgcacgtttggagccagttagtgttggtggtgttactgtgagtaatgcgactttgcataattttgatgaaattacccgaaaagacattcgtattggtgatacagttattattcgccgtgccggtgacgtgatccctgaagtggtttctgtgattttggaaaagcgtcccgctaatgccagaatgattgagcttcctaaaaattgccctgtttgtggttctgaagtcgtaagggaagccgatgaagcaattgctcgttgtgtcggcggtttatattgtaaagcacaattaaaaaggatgatgtggcattttgcttctcgaaaagcaatgtatattgaaggacttggcagtgttttaattgaccagttagttgatgagggtattgtccatcatttggcggatctttatgaactcgatttgcagactttagctaacctgccaaggatgggggagaaatctgcaaaaaacctattatccgctttggaaaaaagtaaaaaaacgactttcaatcgctttctttatgctttggggatcagagaaatcggtgaagccggcgcaagggttttagcggagcactactgcgatgtagagagcttgaaagcggcaacgattgaggaattaatgactctgaatgacataggtccagtagcggcttctcatatagtccatttctttgcccaagcgcataatcttgaagtgattgaccgtcttctcgagttgggtattcattggccaaagcccgaaaaaatacaggttaatcagcaaaatccattttttggtaaaacagtagttttaactggaactctgagtaccatggggagggaagaggcaaaggcaaaattattagccttgggagcaaaagtaagtggaagtgtgtcttccaaaacggattatgtagtagcaggaagtgaagccggttcaaagctgattaaagcgacagaactgggagtagcgattatagaggaagacgagtttttaaaatgggttaattca

SEQ ID NO: 25124 - DNA, 972 bp, Legionella pneumophila
atgcctgatattactttagttgaagctgttactcaggctttggcgtatgagttagctcatgatgaaaatgtagtagtctttggcgaagatgttggtaaaaatggtggagtatttcgagctactgtaggtttacaagacagattcggagaaaatagagtttttgatactccattagcagaatcgatgatagcaggcctggctgttggaatgtccattcaaggcttaaaacctgttgctgaatttcaattcatgggttttatttatccagccatgaatcagatcatatctcatgcagcgcgtatgcgtaacagaaccagaggtcgcttacattgccctttggtttatcgtgctccgtttggtggtggaatcagagcaccggagcatcattctgaaagtacagaagcattatttgctcatattccgggtttgcaagtggttattccctcttctccaaaacgtgcttatggtctgttgttggccgctatacgtaaccctgatcccgttatctttcttgaaccaaaacgaatttatcgcttggtcaaacaacctgttccagatgatggacaagccttaccgttaggtaaatgttttaccctgcaacagggagatgatctgacattaattagctggggagccagtatgcatgaaaccttacaggcagccaaacaattaactgatgaaggtatttcctgtgatgttattgatgtagcaacaatcaagcctctggatatagaaactattttaagttctgtagaaaaaacaggacgttgcgtcatagtgcatgaaggagcaaaaacttgtggagtgggtgctgaaatatcggctcaaattatggaacattgtatggcagatttactagctcctgtgcaaagagttacgggatatgatacggttatgccttatttccaacttgaaaaacagtacatacctagcattgcacgtattaaaaacactgttatgagtataatggag

SEQ ID NO: 25125 - DNA, 780 bp, Legionella pneumophila
atggttgtggtaaagaaaagagaagaaacgcaaaaagatgaacgtgcacgtgcaattgaaaataatccctgcagtatctgtcgttcattaggattacctttttgtcgtggtcatggcggcggttctgggggtggcggatcggatagcgcttctgacgacaaagtggatgataatgatcatcaattgctcgcaccaaagaatcctgccaatgttacaaacatagaacaactactattgcatagcggcctatggcatttgccagaggatgaagattttgtttttgaatttaaagacccccttgctttagtcaatatgactctgaacatggagcttggtttattggtgttgcaaggcaagcgcgagcttggcaatgaagagcagaatgctctggatgagttgtatgagatgattgcgaaggaatttaacctttttaaaaattcaataaaagacccacaggttcctctggaaacaattacgcttgccagagagggtaatagtttgacgataaagatacccagccctaaatattatgatttgtttgtgcaacaattgatggataaaaatttgttacccagcaatacactggctttgcaacatcaaaaccaatcagtaaaatatccggaaaaatcgaaagcgacaatggaaaaagatttgggtaggggaagaatattaaatcatccccttgcaaaatcccattttgattatttagcccgaagggcccttaaaattaaccctggatgtgggattattaaatttttttcccccaaggccaaaggggat

SEQ ID NO: 25126 - DNA, 210 bp, Legionella pneumophila
atggaagtatgggcattagaagcatatggtgcagcatacactttacaagaaatgttaaccgtaaaatcagatgacgtcggaggtcgaacaaagatctataaaaatatagtcgatggagatcatcgtatggacccaggaatgcctgaatccttcaatgtattattgaaggaaattagagcactgggaattgatatcgagttggagcatgac

SEQ ID NO: 25127 - DNA, 1014 bp, Legionella pneumophila
atgttggtacttataaacaccatacaagaacaagcttcagaagcaatcaaacaagccacggatatagttgctcttgaacaaattcgtgttgattttttgggcaagaaaggcaagctcaccgaattgctaaaaggacttgctaatttgtctgcagaggaaaaacccaaggtaggtcaattggtcaatcaagcaaagcagggaattagtgctttgattgaaacaaaaatgatcgagttgaaagaaaagcaattattagccaagctggcagcagagcaaatcgacgttactcttcccggtcgcaatcattccacaggttccctacatcctgttactcaggtaaagcatagaattaatgattattttagtcgtttaggatttgatattgttgaaggtcctgaaattgaaacagaattttataattttgaagcattaaatatccctggccatcatcctgcacgtgcgatgcacgatacgttttattttggagacggacgcttgttgaggacacacacctctcctgtacaaatcaggacaatggagcagcgtaagccaccttttcgtttaattgctcctggccgagtttatcgttgtgattcggatgtaacccatacccctatgtttcatcaagtggagggattactcattgataagcaagccactttggccgggttaaagggtttgttgcaagatttcttcgcttatttttttggtcgggaattggcattaagattcagaccttcctatttcccttttaccgaaccttccgcagaagtggatatagaatgtactcaatgtaatggtaagggttgccgctcttgcaagtttacaggctggcttgaggtattgggttgtggtatggtccaccctaacgttttaatcgcagtgaacattgatccgaatgagtatcatggatgggcttttggcatgggtatggacagattggcaatgctttattatggcatagatgatttgcgtatgttatttgaaaatgatttaacttttttacggcagttt

SEQ ID NO: 25128 - DNA, 480 bp, Legionella pneumophila
atggatatcagaaaaatcagaaaacttattgaactcctggaagaaactggtatttcagagattgaaatcaaagaaggagaagagtcgttaagactaagtcggcatagtaatatagtagcagaaacagctccacaaattcattatgtggctccttctgctgtgaagcaaacggcctctgctccttcctccaatacttctaccaccgagtctcatgttattgaaaataaacaagttacttcagcctcctcaggtcataaaattcgttcaccaatggttggaacaatgtacacagcgccatctccagaaagcccaccttttgtaacagtgggacaatctgttaaagcaggagatactctatgcattattgaagcaatgaaaatgttcaatgaaattgaagccgatcgtgctgggaaaattgttgaaatcttggtaaaaaacggggatcctgttgaatatgaccaggccttgtttattatagaa

SEQ ID NO: 25129 - DNA, 919 bp, Legionella pneumophila
caaaaatataagacatctcagggtgtgacagctattaaagatggaataaaatcatcaggtcaagatcatgagcgattgccaaaaccgaagtggcttcgtatagtcaatcatacaactccagcctatagccaagttaaagagcaagtgcaaaaacatcgtttggcaacagtttgtgaagaagcgaaatgccccaacatctcagaatgttggtctcatggaactgcaactattatgttaatgggagcagtatgtacccgggcttgccgattttgttctgtggatacaggaaatccgcatggttggcttgatgccagaagaacctgagaataccgcagaaactgtggccttaatgaatctggattatgtggttttaacctcagttaaccgtgatgatttacctgatgggggggcgaatcattatgccaaaaccattagagcaatcaaaaaacgatctccccgaaccaaagtcgaagcgctaacccccgattttcaaggaagtgaaagagatgttgctgtattgttagatagtggcgttgatgtgtttgcgcaaaatgtagaaacggttgagcgcctgacacacccggtaagagataatcgagcgggttatcagcaaaccttgaatgtactggcttttgctaagaaatatcgaccggatgttctgaccaaaaccagtttgatgttgggtttgggtgaaaccgatgaggaaattatacagactatggatgaccttcgaactcatcacgtggatattttgactttgggacaatatttgcaaccaactaaaaatcatttacctatagcacgttacgtaactcctgaaactttttctgaattaaggcaaattggtctaaaaaagggcttttttgaagtggcttcaggcccattagttcgatcaagctatagggctgaccgagtgttc

SEQ ID NO: 25130 - DNA, 435 bp, Legionella pneumophila
atggaaatcaaatttttactttggggcgcacaccgctatccatttattctggttgatagagtgatagattacaaagtcatggaatatttgattgcaattaagaatgtgactattaatgagaacttctttaccggacattttccaggaaatcctattatgcctggagtattaatgcttgaggctttagctcaggcttgtgccattttagccagtttatctcgtcaacccaaagaaggacatgagtttttgcattattttgccggtattgacaatgctcggttcaagcaagtagtgactcctggggaccaattgcgattagaggtgagattggccggacaaaaaagagatttttggcgtatgcacggagaagcttatattggtgataaattggcttgttccgcagacttattaagcgcagcaaaggaaattaaaaag

SEQ ID NO: 25131 - DNA, 762 bp, Legionella pneumophila
gtgagtttggataagcattttaatgatctattggacaagctcctgtcaaaccaggatattacatctatttcgaatgctcagttgatgcattgcattgatttgacactactagaggcggatgcttctcttgaagcattgcatcaattacagagccaagcctgtcaaaataatgttgcagctatttgcgtgctacccaaacatcttcatgtatttaagcctaactccaaaattaaattagcaactgttatcaattttcctcttgggaatgatgatttgctggtttccctggcagagatagataatgccattcaactgggtgctaatgaaatagattatgtactaccctatcagtattacttaagaggaaataagcaaaaagcgttaaatcattgtgatgtcattattcaaacctgcaagaaacatcaacttaccttaaaaataattttagaaactggcctttttccagatatggaaagcatttatcagcttagctcagaaatcattgctcttggtggacggtttctcaaaacttcgactggaaaaacccctcagggtgcaactctggcagcagtatttgctatagtcagtgctgttatggattcaacttatgcatcctcttgtggaataaaggtttcaggagggattaaaacgcctcttcaggctcaacaatatgctcaactggctgaattacttatgggcaaagcgattcataaggattggtttcgtattggagccagtactctgcttgagaaattattgtca

SEQ ID NO: 25132 - DNA, 492 bp, Legionella pneumophila
atgatggttgcccatacagcgcagcaacttgacttgcgcgaaaaactacttactaatggagtacatagcctctctgatattgaattgttagccgttttcatcagttcgggtaacaataaaaaatcttgtttgcaactagcctatgagctcaccaaacacttgggaaatttacgtaatatcctcaatgctgatctgcaaagctttaaatcaatccatggattaggagaggttcgttatgcacaacttcaggctgcgaaagaaatatgtcatcgaagtgattttattcatctgcaaaaagaaatccggttatctaacacacaacaaacttatgcttttttaaaaaaacgactgcgagactacaaaaatgaaacttttgccgcactctttctggataaccaacaccgaattattgcttatgaagaattattctcaggaaccatcaacacggcaacagtctatcccagaccgattgtagaacgtgtattgcaatta

SEQ ID NO: 25133 - DNA, 597 bp, Legionella pneumophila
tctgcctttttccttaaatatcacatggattggatgatgcctgtggtagctgtgatgttggttctcggagggcttggtggtgtgagtaattggattattgcccctaccaaaggtttattagttgccgcagaagaagggaatttaccagaggtatttcaacggactaatggaaaaggtgctccggccatgatgctatacacccaggcaaccatagtcacagtattatcggcgctattcttatttatgcccagtgtcaatggatcctattggctcttaacagcattggcggctcaattatacatgctgatgtatttgatcatgtttgtcgcagcaattaaattgcgcataagccaaccttaccatcccagaccttttaaaattccaggaggtatggcaggaatgttgtttgttgcaggcataggcatcattggagtggttaccactttagcggttagctttattcctccagaggggattaatgtcggcagtgcaacacgctatgaattgaccttgattattggcttgctgctcatgtgtgctcctccttttatagccagttggttgcaagccaaagaggcggatttggaacctgctgta

SEQ ID NO: 25134 - DNA, 1212 bp, Legionella pneumophila
atgtcagcactgtttacttccaataagcgagtcgtttctggaatgcgggtcagtggaagattgcatttaggtcattatcatggtgttttaaaaaattggataaaattacaacatcaatacgattgtttcttttttgcagcagattggcatggcctaacaacacaatatgaagaccccaattttattgaaaaacacctctgggatatgattattgattggctagcttgtggagttaatccaggcttgtgtaagatatttattcaatcctgggttccagagcatgctgaattacatttacttttgtccatgatcactcctttaggttggttggagcgagttcctacttataaagatcagcaggagaaattaaaagaaaaagatttatcaacctatggttttttgggatatccattactacaaagtgctgatgtacttttataccacgcggattatgttccagtgggtgaagaccaagtggctcatattgagttaacacgagaaatagcccgaagatttaactatctttatggtagagaggctaattttgaggagctggctgctgcagcaatcaaaaagatgggtaaaaagaatgggaaaatttataccgaattacgcagacaatttcaggagcatggcatccacgaatcgattaagacagcacaagcgcttttagaagatcagcctaatttgtcgattggagataaagagcgattgttgggatatttggaaggaagtggcaaaattatattaaacgaaccacagcctttgcttacggaaactgcaaaaatgcctggtcttgatgggcagaaaatgtccaaatcttaccataatacgatcatgctaagagatgagccagctttagttgaaaagaaaattctgactatgcccacggatccggcgcgtgttaaacgtacagatccaggagagcctgaaaaatgtcctgtttggcaattccataaagtgtattctaatgaggaagtaaaagattgggtgcaaaaaggttgccgaacagcaggaattggttgcgttgactgtaagagaccagtgattggtgctatccatcaagaacttaaaccaatacaggaagcgatttcagattatgaagctgatttaggttcggtaaaacgtattgtagcggaaggaagcgaagcggccagagaagaaggaaacaagactttaaatacggtcagagaagtcatggggcttgattat

SEQ ID NO: 25135 - DNA, 186 bp, Legionella pneumophila
ccgaagttaaagtcacatcgtggagcagctaaacgcttccgaaagacagcgagtggagcgattaaacgtcgcggcgcttacagaaatcatatcctcactaaaaaatctactaagcaaaagcgtcatttgcgtgtagaagcaggtactttgaagccatgcgatgcgcgtttggctgaacgtatgttg

SEQ ID NO: 25136 - DNA, 1095 bp, Legionella pneumophila
gtggatgattatatgctcggtaaggataatacgccccaacccaaagagctaaaagaaattcagcccaaggttaaaatggcacaaagctggacaactccagttggaaaggctcataaaacaaatgagtatttaaatatcaaaccagctattcgtggcgatataatttatactgcagatgcaagtggactggttcaggcagttaacaggaaagatggtcagataaagtggtctaccgcattaaaaaataatatagttagtggaccaactgtagctgctggttatgttgctgtaggaactaatgcctccacattggtactacttaatcaatcggacggaaaagagatatggcagaataaagtatctgctgaagtattagctcctcctgctatctcacatcaaaaggtcattgcaaaaaccattgatggtaaagtgtatgcgattgatgcggtaaacggcaagcaactgtgggttgcagatcatggcgctcccagcctggtgttaaaagccagctcgtcccctatcattgtcgacaatctggttcttgtcggattttccgatggcaaattagatgctttggaattacagaccggacgattgatctggcaaagaagcattgcttatggaacaggagctagtgatgtcgaacgtttagttgatattgattctgaccctataataagcaataacgtcgcctatttggcaacttatcagggatatgttggagcactatcactgtctgatggccaattcatatggagaaagccagcatctgtttataaaaatatgcttttaagtcataataatctgtattttacggacagcaatgatgtcttgtggtctttgaatagtagcacaggacaggtcaactggaagcaaacctccctaaaggcaagaggtcttactgcacctgcattagttggaggaaatttagctgttggtgataaaacaggatatttacatatcctatcaactcaaacaggtgagttacttggacgttctcagctttctggtggagtaacagtatcaccgagtgtttctggtaaaaatatgtatgtattaaccaataatggaatgctcaatcaactttcagtgagc

SEQ ID NO: 25137 - DNA, 603 bp, Legionella pneumophila
atgagtgttttagttgggcgtaaagcacctgattttactgtggctgcagtaatgggcaatggggaaattgttgataaattcaatttacacgaacatttgaaaggcaaatacggattagttttcttttatcccctggattttacctttgtatgcccttccgagttaattgctcttgatcaccgtattgaagaattcaaaagacgtaatgttgaggtggttgctgtatctattgattcacattttacccataatgcgtataggaatacgcctgtgaaaaatggcggaatagggcctgtgagatttactttggcagctgacatgactcacagtatttgccaatcctatggcgtagagcatccagttgctggcgtggctttccgaggcgcttttgttattgatacgaatggcatggtccgttcacaaatcgtcaatgacttgccgataggtagaaatattgatgagattcttcgtatcatagatgcagttcaattctttgaagaaaatggtgaggtgtgtcctgctggctggcaaaaaggacaagctggcatgaaagcatctcctaaaggtgttgcagaatatttgtctgagcattccgagtccttg

SEQ ID NO: 25138 - DNA, 1872 bp, Legionella pneumophila
atgaatctcgaacaattatatgatgtcatagtcgttggcggagggcatgctggtacagaagcagcgcttgcagcagcacgcttgggtgtaaaaaccttgttattgacccataacatagacttgcttggacaaatgtcctgcaatccagccatagggggcattggtaaaggtcacctggttaaagaaattgatgcccttgacggggccatggctaaagccgccgatcaggcggggatccaatttcgaattcttaatgcctcaaaaggacctgccgttcgagccacacgcgcacaagctgatcgtgttttgtatagaaaagccattcgcacacaattgcaatcacaggctaacttaaccatatttcaacaagcagttgatgatttgaaaattgaaggcggattagtcactggtgttgtaacccaaatggggctcacgctcaaggcacgcgctgttgtattaacagtaggaacttttctgggtggcaagattcatgtcggtatgaaccaatacgcaggaggcagggcaggagatcctccatccattgcgttatctaaaagcttgcgggatttggatttaccggtagggcgtttgaaaacaggaactcctcctcgaattgacagacgcaccattgattttagccagatggtggaacaaccaggtgataccccggttccagtattttcctatttgggagcggcaagcgaccatcctcaacaagtaccatgccatattacccatactacagaagccactcatgacataataagaaataatttggataaatcgccaatgtatgcgggagtcattgaaggagttggccctcgttattgcccctcgatagaagacaaaattgttcgctttgctgataaaacatctcaccagatttttgtggaaccggaaggtctgacaacggaagaaatataccctaatggaatttctaccagcctccccttcgaggtacaagtgcaatttgtgcgcaccattaaaggttttgaaaacgcccacatcaccaggccaggttacgccatcgagtatgattattttgatccacgcggattaacctcatttttgcaaaccaaagccattcctaatttgttttttgccgggcaaatcaatgggacaaccggatatgaggaagcagcagcacaaggaattatagcgggcatgaatgcggcattgcaaatcaaagatcaagagttatggtgtccgcgcagagatgaggcctacataggtgtacttatcgatgatttgattacgtgcggaacgcaagagccctatagaatgtttacttcaagagcagagtatcgtttgctattacgtgaggataatgccgatttaagactaactgagaaaggtcgacagcttggcttggtaggtgatgaacgatgggacagcttttccaaaaagcgtgaagcaattgagtccactcaagctttgttatacaacagctgggtgagggttcatcataatgatttgtttaaagagactttgtttaatccaatgcaacacgattgccgtgccgttgaatttttaaaacgaccggagataaattatcagcatcttttaatgatggatgatttgaatttgcctgaattgccacaagaaataacagagcaaattgaaattcagaataaatatgccgggtacatagacaggcaacaacaagaaattgagaaattacgcaagcatgaaaacaccctgctcccagagactttggattataatgacgtcgttggtttatcgagtgaggtcattcaaaaactaaaccggattaaaccaacttccttggctcaagccgggcggatttctggcgtaacacctgccgcgctgtctcttttacttgttcatctgaaaaagagtcggcttccagta

SEQ ID NO: 25139 - DNA, 2793 bp, Legionella pneumophila
atggcagaatataaagatactttaaaccttccaaacacttcatttccaatgaaagcaagtttgtcagtgcgagaacctgaaatgttggcggattggcaagcaaagggaatttatcagaaaattcgtaaagctcgtgttggaagtaagcgatttattttgcatgatggtccgccctatgccaacgggcatctccactgtgggcatgcgctcaataaaattctcaaagatattattattaaatcaaaaacctttagtggttttgatgccccctttgtccccggttgggattgtcatggcttgcctatagaattgaatgtagaaaaaaaagtaggtaaagcagggagcaagattagtccaagagaatttcgtgccaaatgtcgagaatacgcagcaagccaaattgatatacaaagagatgagtttcaacgattgggagtcttgggagactggtataacccttatgtgactatggattatcattatgaagccaatatagtaagagctttaggtttaatgattaaaaatggccatttacaacaaggctttaaacccgttcattggtgtatagattgcggatccgcgttggctgaagcagaggtggattatgaggataaaacttctccatccattgatgtggcgttctcagcagtaaatccatccgagttccttaattgctttggaactcagccagcggtgaaaccattaattctgcctatttggactacaacgccatggacattgccagctaacgaagcggtttgtttgcatcctgaaattgattatgcattgattgatgcaggtaattcttattatatcgtggctactgatttggttgagtcggttatggcacgttatggaatcagccattacaaaacatcgggctccgctaaggggcgagtctttgagcattttaaactgcagcacccattttataagcgtcaggttcccgtagttcttgctgagcatgtgacaacagaatctggtacgggttgtgtacatactgcacctgctcatggccctgatgactatttggtaggccagtcctatcagttgccgttaataaatcctgttatggccaatggatgttttgctgagaatgtggagttatttgcaggcatttctgtattgaaagcgaatgagactattctgacagttttgtcggaacggaatgttttgttagctagtgaatctatcaggcacagttatccgcattgttggcgtcataaatcgccaatgatatttctggctacgccccagtggtttgtctcaatggataaatccaatttgcggcaagcaataattaacgagatagataaggttaactgggttcctgactggggtaaggcgcgcatcagtaatatggttgaaaataggcctgactggtgtatatcaaggcagagatcttggggaacacccatgccattgtttgtgcataaaaccaccagagaattacatcctgatactttggagttaatagagaaggttgctgtgatgattgagaaatcaggcatagacgcctggtttgatctggatagctctgagttgcttggcgatgatgccaaacactatgataaaatcacagacaccatggatgtttggctagattccggaatatcacattatagcgttttaaaacataataatgatttagattttccggctgatgtctattttgaaggatccgaccagcatagaggttggtttaattcctcattaacaactgcagttgcaatgtatggagttgctgcttacaaaaccgtattaactcatgggtatactgttgatgctgagggaaaaaaactatcaaagtctaaaggaaattatgttgctctagataaattagtgaatcagcatggtgcggatattttaagattatgggtagcgtcaactgattatcgtcatgaagtaagtatttctgaggaaatcattaagcgtaacgcggatgcttatcgaagaattcgtaatacagcgcgatttttattagctaatttatttgactttaatccagccagtgattgcattgatgccaaggagttattagagctggacaggtgggctctaaagcgttgccaacttttacaagaagaaataattactgcctatgaaaattaccacttccatttgatttaccagaaaatacacaacttctgcgcagtggatatgggtagtttttatttggatttgataaaggacaggcaatacaccacagcaaaagacagtatagcgagacgatcttgccaaacagcgatgtatcatatggtcaaagcattcactatctggttagcgcctatcttatcttttacagctgaggaaatatggcaaacaatacctgggaataatagcgaatctatttttattgagcattggtatgatgcctggccaactattgacgcagtgaacatggaggattgggaacagctgcatatcgttcgtgatgaagtaaacaaggctttagaagaaaccaggcaaagaggtgaaattggttctgcattggcggctgaggtaactgtttatgctgatgccaaggcattaccaaaattaacgcgtttaggcgaagagttacgctttttattcattacatcagaagccaaagcttgcccaattagtcaatcccccaaaggattagctgttactgattgtggggtatcaatacaggttacagccagcgttcacgaaaagtgtgctcgatgttggcatagacgggaagatgttggtcaaaatcaagagcatcctgaactgtgcttgcgctgtgtaggaaacatcagcggatatcatgaagagaggctttacata

SEQ ID NO: 25140 - DNA, 2598 bp, Legionella pneumophila
gaacaaaggagccaagcgacagatcctgctgaatcatttatagtccaggctcctgccgggtcaggaaaaacagagattcttacccaacgctttttacgtttgctaagcactgtgcagtctcctgaacaaattatcgccttgacttttacccgcaaagcagcaagtgaaatgagagaacgaatcgttcaggcattacatatggccgcgtcaaatcaaccggctgtcagcgctcatcaacaaagcactttaaattttgcaaaacaggctttacagcgaaataatcaatatcagtgggatttacttgagcaaccaaatcgcttaaaaatcataaccattgattcattgtgccaaagcattaacagggcaattcctttattggaaaaacaggtggcttatccagacatttccgagacacccgattctcattatattagtgctgcacgttgttgtatccagtatgctattgctacgccagagtaccaggaagcaattaaaaccttgcttcttcatgttgataataaacaggaacgattaattcaattattccaggcacttcttagccaaagagatcaatggttgccgacattatttctggcacgtgaacaagaaaagtcaacttttgagcaagctttacgccttattgaacagcatgaactctctcgtctaagaaatagcctgccatcggacttggctcaagaactagtgcttttgtcgcgtgaattagccgttatagaaaacaaacctgattcaccacgatttatattaagagaatggtatgagtttcaaaaatgcgatcagcaaattgcaggtgctttaagcaaattactcttaactagtgacaatcaattgcgtaaatcgtttgatcatcatgtgggattagttaaaaaaaattgtgcaccaaatgaatttaccagaataaaaacagccagttcagatttgtttgctaaacttcaagattgtcctgatttcctggacgcgctccttaaggtcaatcaattaccaactcctgaatacgacaaagagcaatgggacgttttgcaagcactctttttgttactgccattattggttggacatttacaagtttcatttggtgaacataacgaagttgattttactgccatctctcaacaagccttggcagctttgggtgatttggataatccgactgatttggcactctatctggatcattcaattcatcatcttctaatagatgagtttcaagatacctccattacacaatttgaattacttaccaagttagtccaaggatggttacctggagagggaaaaaccttattccttgtaggcgatcctatgcaatccatctaccgtttcagacaggctgaagttggattgttttttcaggcgaaagagcatggcataggaccagttcgcctcaaatcattggaactaagatgtaatttccgttcgacagaaacaatagttaattgggtaaatgatcatttcagtaaaatattttctcaacaagttgatatcgaatcaggagcagtatctttccatccttctgttcatgtcatcgagaagaatgaatcaagcactattcaggccgtgcaatttaaaaatcgtgaacaggaagcaaggcatttaattgaaataattaatagtgaattaaaccgcaaccctgaacaaactatcgcagttttagtgaggacaagaacgcaactccctgaaatcattagcctacttcgccaaaataatatcccttatcagggaacagacatcgatttactagccaatttagtgcatttacgtgacgtctggtcacttgctcatgccctgcttttcccaggaaatcgattgtcctggttatcgatactccacagcccttatgttggattgggattatctgacatccactgcatagcccaatataattcaagaaaatcaatttatcacaatttgctccatttagataaaattcaggatataagtgaagaaggcaggattagagccaatttttttattcaaatcatgaaccaggctttgttatgtcgatcacatagtcgtctatctgattggatagcggataccttaaaaaatcttcatgtagaaaagatccttgataaagctcagttaaatgatctggagcaattatggatgttattagaccaatatgaaaaagaaggtcgaattcctgatatgaacgaatttttaaatgaattcaataaattgtatgcccaacaaaccaccccttcccggttacaaatcatgactattcataaatccaaaggactggaattcgatacggttattctacctggccttgggtcacaagcaaatcgtggtgaatctcccatgttgcgctggcttaagctgcctacccaagaccatggcaacttgttactggtatcacccataaaaagtgcaaaccaggataattgccctttgtacgattatctggatcaattggatgaagaaaaatccgcctatgaggcgcaaagattactttatgttgctgttacccgggcaaaatcaagattatatttgcttgatcattcggcaaaatcctataaatcttcctttcgaaacttattaaaataccaggaattcattgcagatcctgacgaagcc

SEQ ID NO: 25141 - DNA, 1050 bp, Legionella pneumophila
atgcaccatctaaaattagctgagagacttggtattcaatttcctatcattcaagcacctatggccggaggagctactactcctgagttggttgcagcggtttctaacagtggtggtttgggctctctgggcgcagggtatatgagacctgacgagataagacaggccattataaaaattcgtcaattaacaagcaaaccttttgctgttaatctttttatacccgaagcacatcatgcaacaccagaacaaattcaaaacgcttgtgatgatatcaatttgtgctgcactgaactaaacattgaaatcagtcccgtgagtaagccctactccctgccttttgttgaccaaatgcaaatcctgatagaggaaaaaatccctgtctttagctatgcattcggtacattagaaccgatgtggatcaaacaattgaagaaaaatggaacctttctgataggaacggcaaccactatacacgaagcaagaatacttgaagcaagtgggattgatgccattgttgcacaaggaagtgaagcaggagggcatcgaggtacttttatcggcaatgctgaggaagatttgattcaactatctgagctgataccccaattagtagaaacaatacgaataccagcgatagccgccgggggaatcatgaatggtaaaggcatagtttctgcaataaatgcaggtgcctctggcgtgcaaatggggaccgcctttttaagttgttttgaagctggcatcacttataaatacaaacaaaccctattatcgcagcaacaagacaatactgtactaacacgtgctttttcgggaaagcttgctcgtggaattcgaaataaattcattatttgcatggataatcggaaaataaatatcctcgactaccccattcaaaatgcattaacccagatgatgagacaaaaagccagagaaaaggataatattgattttatgtcgttatgggctggacaatcggctcatttatgccgctctatgtcggcaagtgacttaataagtactttagttattgaggcagaaattagg

SEQ ID NO: 25142 - DNA, 156 bp, Legionella pneumophila
atgattaccggaataaatcacattactttagcaattaaaaacctcaataagtcttttgctttttatgctaagatccttgtgctcaaacaaatgttaccaactactattctacgcctcaaaagtttaatacctgaactcgtcaatgcaggtaaagca

SEQ ID NO: 25143 - DNA, 750 bp, Legionella pneumophila
gtggcattacatcttggagtcatcaccctgttgcctgaaataatacaaggcatccattatggggtaaccggccgagctattgaacaaggcttggttaaaattgattgctggaatcctagagattggtcatcaagaccttataagcaagtggatgacaagccctatggtggtggaccaggaatggtcatgatgtatgagccattgcatgctgcaataaagcatgcgcgcagtgaaatgaaggaaaactgcaaaacaatttacttaagccctcaaggcaaggtagttagacagaacgatttaaaacaaatagcagcccaaaaacaatccttgctatttgttgcagggagatatgaaggaattgatgagcgaatcattagtcaccacgtagatgaagaatggtcgctaggggattttgtattaagtggcggtgaattggccgcaatggtatttattgatgcgataattcgcttgatacctggaagccttgggcatttgggttcagcagaacaagattcatttatgaatggattactggactgcccacattatactcggccagcaactataaatggactggatgtacctgatgttttattaggaggaaaccataaagaaatagaacgctggcgtaggaaacaatccctgggtaaaacctggctcaaacgcccggatttacttgagaaagtacaattaagtgaaacagacaagcaattgcttgctgagtttaaatgcgaacacggcgattcctgc

SEQ ID NO: 25144 - DNA, 639 bp, Legionella pneumophila
tatacgaatcctatctcagtacccttatatccttctcctgttccttatgcggatgttgtgacaacgacaactcataaaactttaagaggacctcgcggtggtttaatcctttgtaaggaaaacgaagaaattgagaaaaaattaaattcttctgtatttcctggtatgcaaggtgggcccttaatgcatgtaattgcagccaaggcagttgcttttgcagaagctctgttacccgaattcaaaacttatcagcaacaggttttagctaatgccagaacgatgtgcagtgtgttacaaagcagaggctatgatattgtttctggcggaactgataatcatcttttgctagtggatttgataaataaaggaattacaggtaaagaagctgacgctgctgtaggcagagctaacataacagtcaataaaaattcggttcccaatgatcctcgctcgccttttgtaacgagtggtttacgtttgggtacgcctgctgcaaccacaagaggctttaaagaaagagagattactttgttatctaactgggtagcggatgtccttgataatgttcatgatgaaactaatatttcaagagtgaaaacccaggtgttgctactctgtcgtgaatttccggtttatgcc

SEQ ID NO: 25145 - DNA, 1407 bp, Legionella pneumophila
atgacaaaaaatgtagtgcttgatgcaatcaaagaacatgacgccaaatttgtggatttaagatttacagatatccgtggaaaagagcaacacattaccatacctgtttcagcagttgatgatgattttcttgagaatggaaaaatgatcgatggctcatcttttaaaggttggcagaaaattcatcaatcagatttggctttagtgccagatttaacttcaattaagccggatccattttttcaggacaacactttatttatacgatgtaatgtagttgatccacagactatgatgggttatgacagatgcccacgttcaatcgcacaacgcgcagaaaattatttacaatctacagggattgcagatggtgtaaattttggccctgagcctgagttttttctcttcgacaatgtgcaatgggaaactactatcagcggttcattttataaaatagattcagacgaggcacattggaactccggtaaggaaatggaaggcggaaatattggccatagacctccgttgaaaggcggttatttccctgttcctccagtcgattcatctcatgatattcgttcagcaatttgtatcacattggaatctttaggaatggttgtggaagcacatcatcatgaagtagctacagctaaccagtgtgaagtagctacccgttttaatacactcaccaaaaaggcagacgaactacaaattctgaaatacgtgatacataatgttgcccataactatgggaaaaccgctacttttatgccaaaacctttggtaggagataatggaagcgggatgcactgtcatcaatcactttataaagatgggtataatctgttttccggtgatcagtattcggggctttctgaaacagctttatattacataggtggaataatcaagcatgccagagctttaaacgcttttaccaatccgtcaaccaatagctataagagattagttcccgggtttgaagcgcctgtattactggcttactcagcaagaaatcgctccgccgctatccgtatcccacacgttagcaatccaaaggcacgacgtatagaagtacgtttccctgatccaacagctaatccttatcttgctttctcagcaatgatgatggcaggcatagatggcattcagaaaaaaatctaccctgggcagccaatggataaagatctttatgatttaccgcctgaagagcttgttgatgtacccactgtttgctcttcattagagatggctatggaccatttgcgggcagatcatgaatttttgttacagggagatgtgttcagcagagactttattaataattatattcaaatgaaagaagaggaaattactaaaatcaggagcttgactcatccttatgaatttgagttatattatagtctc

SEQ ID NO: 25146 - DNA, 450 bp, Legionella pneumophila
atgactaaagcattcgatagcgccttgcgtctgttaaccaggcgcgagtatagcgctatggagttatgtgataaactgaagcagaaaggatttagcaccaatgatgttcaaaatgctttgtatgaatgccaacgtcttgggtatcaaagcgatgtgcgttttgtagaaaattatatcagagtacgaattcatcaaggctatggccctttaaagatcaggcaggaattaaaaaacaagggaatagatccagatctcattcaaagtgtgctgcatcaagaaaaagacaattgggtcaattatgctttgcgggcatgggagaaaaaatttaagagacaggatgatttctcttatagtgaaatacaaaaacagcaacggtttttgctgtatcgagggtttgatagggatgttatttcaaaggtatttaaagaggttaaatcttcttacttaatt

SEQ ID NO: 25147 - DNA, 591 bp, Legionella pneumophila
atgaaacggatttacaggcattttattgctccaatattggcagtctttgtattgtcgtcttatgtctacgcagaaccacaaaccttgaccttagataatcagcatacttatgtgttatggaagatcaagcatttaggcttctcaactcaagctggaaaatggtatgcaagcggtcaacttgttcttgataaggataacccgcagcagagtaaagtgaatgttactatcaaggtcgatgatatcgtcacaggtatacccgagttggataaacatttgaaaggtaaattattttttgataccaagcagtttccaacagcaacttttgttagtaacagagtggaagtaatgggaaagaataaagcaaaagtatatggaatgcttactttgcatggcgtcacaaaacccatcatattgaacgtgatattaaataaagcaggaattaatttattaaatgacagagaaacagctgggtttagtgctaccacttcattaaagcgttctgattatggaataaaagctttaataccagaagtaggagatgatgttgaaatagaaatagaagcagaagcctatcttgataagaaatatgga

SEQ ID NO: 25148 - DNA, 924 bp, Legionella pneumophila
atgaaaaataaaatagttttgttggctccagtctctttatcctttcttttctcattctctacttatgctgcggattacgaatttaatggtttgtcattaagtgcttctctaggcattctgtcaggtaaagctcatgaatatgtttaccatccagagacagacactaagttaagccagctggattggcgcataaaaaatgctccgataataaaaggggaattaaattatgatgtcctggattggcttagcatgaatggtcaaggctggacaactttggtaaaaaataaagctgctatggatgattatgattggctcaatccttatcaagatacctggactcactggtctcatcatgaagatacgcatctcaattatgcaaatgagttagatatgagcttaagggcttggttgatgcaaaaacaaaattacaagttaggcctggctactggttatcaatggaattcctttgactggaaagctaccggaggttgttaccaatataacggagggctctatgccggttgttttccaggagatcaacctggaataggataccaacaaaaatttagaactccttatgttggtttggcagggaggtattttattaataattttgagtttagtggtgttttaaaatttagtgattgggtttcagctcgagatcatgatgagcattatgcccgtaacttaacattcaatgagcggggaaatagctccagatattatgcggcaacgattcattctggctactttttgaaacctaatacgaaaatttttgttgaggcttcttacaatcattatcctaatgggagagcggatactgaaatcattgacaatgacacgggtgagcgcagttattttggtgattcagcagggctatccaataaacactatactgtcgctcttggtttacagtatcttttt

SEQ ID NO: 25149 - DNA, 1461 bp, Legionella pneumophila
gtgaagactaatattccaaccctatcaaaacccattaaagacagtggttacagacgaggtttaaaagatcgtcatgtccaactgattgcactaggtggaattatcggctctggatattttttaggaaccggtgaagtaattaatcttgttggcccctctgtgtttattgcctatttacttggtgggttaattatttacctaaccatgttatgtatgggtgaattagcagtcgccattccaatttccggctcttttgttacttacacttctgattttatatccccaactgtcgcttgcggtgtcgggtggtcatattggattacctgggtcgcctatatccccgcagaatgtgttgcgggagggatcataatggaattgtttactggggtgagcggttacatatgggtggtttgcttcggattaattattacctatattaaccttgctaaagtcgatacgtttggtgaaattgaattctggctcgccttaattaaaattatctcattactcgcctttgttttcctggcaatactaattttctttggactcattcatggatcagaaccacccggtataataggatttaagtacctgttaggcgatggaggtctgttacctaatggggcaatgtcgttgttgacagccatggttcttttgctggttaattatcaaggatctgaaatcataggacttgcagcgggagaatctgaaaaccctgcccgaatgatccctcacgccatccgtaatgttactttcagaatcctgtttctctacatcattccagtattttgcctggttttaatttttccctggcaaaaggctgggttatctaactcagtcttcgctgatgcgcttaatttctacggcctgaaatgggcaggagcagtaacgagttttgtcactctgtctgcaaccttatcctgcgctaattccggattttatggtgctgtgcgttctttaaatgctttggcacgtgatggtatggctccacatgttttagccaaatttaatcaaaactctgttcctcagaacgccgttattgccacactgattggagtttggattcttttgggtgtgggttacttttttggtcaaacgaaactctatatcgctttattattagtatccggttttactggaacgctggcttggctttctttatgcattgctcaaatcagctttagaaaccgtttgtataaagccggttactccattaaagatctccgttatgtaacaccttattcaccctataccggaattcttgctgtcattttgatggttggctccttatttttcttactgctaaataaagatcccatctataaattatcatttattattggtgtggtgagtttcattatacccgtcattatctataaggtctttgatttatccaaggttaggaaaaaagctttgcatgtgaaaagtcgggtgaaatttcaggatttatttccgccacag

SEQ ID NO: 25150 - DNA, 2097 bp, Legionella pneumophila
atgcaagaaaaaattatcaacttagggaaagggcttaaaaaggttaatgaaggcattaaaaaacatatttcccgagcagaagagttcctctacttggcgaaccaatgggaaaaagagaatattaagattaatgatttattgaatggagtgcagtttacagttaatgataaaaaaatgtcgggtcaagaaattaaagaagaactatctaatctaatagaaagatataataattttctaaaaaaaaacttaaaaggggaaagaagcgaaacattagaactaaaggagattcagcaacaacttactaatttatacaatgctgttaatgatatttatacttatttatccataaataaaacagagttttttctcgaagcaatcaagtcttgctataaaaaagatcagaggatgggtagtacaatccagtttgtgctgaagatcgcggatcatctttctaaggagagactgcaatttaatttgaatttaaattcgcaatttgcagaagcctccgagagttttcaggaggtaactaccaaattttacagagaggttgctactcctagaatagaatctgcacaaaaattgttggaattgatgaataatttcgtagaccaatatatatcacaaggagcaagtccagaagatgcaataaaaaaacttaagccatttgagaaatattttactattgaaatctcgcattatgaagagtttgggcatttagtatataaaacaaactttaattgtaatccagcgctatttgatgttaaccccattgaatttttaaatgaattatttgtgcaattttataaagacaccactttatcatctcgctctaaaacagctttaaaacaagtgcttgataaatttgagattacttatgaggtgccaaagacatggtatggttatattggctgggatatccctatagtaactgataaaaattcagtattagttacttatgacaaacaagcttattacagatatcatcaagaaagcggccagagagaaatggagttttttgagacaattgagcgctgtttggataagtcgaaagacattattattgcgactaaaaaggaaaatttaaaagaccaaaaagagttttctaaattgatagataaggctattaaggagttagaagaaacaaaaaagaaaagaatttttcaaaaggagccgcatgaattggtaacaagtattatcaataaatcaataaagttgctgcaagacttgaaaaataatatgccattaagacgagaagatttggtcatggtaatcttaagtactgaaaatgctttaaatgcagcaaaatcaaaattaaagccacaagaaatcaatttatccgaaccggaaaaatgcattaaaaattttaaaaagatattagcaataaaacagaaagaagagctttgtttttataaatcagatgaagaacaatctattttctccaaacacataaattctgagcttagagaacttgtcgaatcttaccaggttcaaaagagaagtgaaaaagagttggttattgagccagaaaaaatgaattcaccacagagaatagaaccaaaagaagaagataaaaagattgatttaaataagaaaatgaatttataccgtgttcaaaaaattatgaaaaattttgtatttgagtattgcgggtataagggagggaaaaaagtaaaagagggaggagcaacaatagaagaacttaaaaataaactcaaagattttagagattattttcaaatagagatagtgatgaatgataaaagtggttcagaagaactcaatatcatattcaactatcaaaacatcaagaataaaaatccacatgatttatttaatgagctctttaaaaaatttaccgaagacataggatattctggtatgggttcacgatcaatcgaggctcttaaaagagcattagctaaaaataatatcacttataccaatggatattatggaaaaacagcgactttaacaagcctattatggagtaaagagccacctgttattactgatgaaaaaaatatatttaaattatccgatgaaaagcatttaagtgagaataaggaagatattcgcggaaaaggaattacgaatatc

SEQ ID NO: 25151 - DNA, 747 bp, Legionella pneumophila
atgccaagactgatgcttagtgatgagctatggtcaaagctgaagggaatcatgctacagcacaagatttatgacaagccaaatctgcgaatgatcgttgagggaatgttatatcacatgcgtgttggttgcccttggcgagacctaccagcagcatttggatgctggaattcaatttatcaacaatttaatcgttggtcattcaaagataaattaatgcaaatttttaaagcacttgtgcacgctcccgatcttgaatgggaattcatcgacgggagtattgttcgtgctcaccaacacagcacaggcgcgtgtagtacagaaagcgaagccattggtaagtccagaggaggtaacacaacaaaaattcatatggctgttgatgcctttgggttacctattgaatttcaactaaccgggggcaaggtacatgatgcaaaagccgcgccagagctaattgaacaattgcccaaatctgattatgttattgctgacaaaggatatgatagtgaagacattcgggaacaaatcagggaaaagggttctataccaaacatcccacggaaaagtaactccaaaaccggtaataaggatattgattggtatttgtacaaatatcggcatctggtggaaaacatgtttgcatgtcttaaacattttcgcgccattgccacgcgatatgacaaattgaaacgaaattatgcctccatgattgcaatcgcttgctcttgtatgtggctgcctatg

SEQ ID NO: 25152 - DNA, 741 bp, Legionella pneumophila
atggttcgcctcagaatttatttatgttctttgctactggttattcccttttatagagcctatgctcttaatttgaccatagggaccttatcttataatcctccgtttgaaactcaagtcaacgattcttccaagaaaaatgagttttatggttttgaaattgaactcatggatgagatttgcgagcgcatcaatgcaaaatgccaatacaagccattgttatttgaacaaattttagctgaaattaattctggtgcaatcaatttaggcattggtagcattaatattacgcctgaaagaagcgaacgatttttattcagccttccctacaaagccagctatcaccagtttcttataccatctaactcgaatataaaaaaaattgacgatctcaaaggaaagactataggaattcatttaggttcacctactgccgattatttaaaagcctactttaacaataatattcaatttaaatattacgaaacatttatggatttacttaatgggctgacagatccgcaagttagcgcaatagtgactaatagcgatcaagcgcaatactgggcatcgagtacaccggactgcaagttattgggcgacagttttccttttggagtaggatttggagttgtcgcgagattagatcaagcagaactgattgaaaaaatcaatcaggcattaattgagattgaaaatgatgggacttaccttaaaatatataacctcttctttcaacct

SEQ ID NO: 25153 - DNA, 468 bp, Legionella pneumophila
atgaagataaaaaatatcccttattatgtcgctacccgtgtcgtgaaacgaatacagtcatggttgggattgaatactctgggtgcacgagcaatagtgacgaatgcagagggacacgtgttattggtaaaacatacctaccaacctcattggtatttaccgggaggcggagtaaaaaaaggagaatcaaccaaggctgcagtaatccgtgaactgcacgaagaagttggtcttgttgttgcagaacaagacgtgattttattcggcatttatcaccacaaatatcttggagttaatgattatccagtaatttatattgttaaaaactttacaagtcatgtaactcactcgggggaaattgagcagataggatggttttcccttgatgcattaccggaaatggtgagcccgggaaccaaacgcagactcggtgaatattttgataacaatccaatatcagaaaagtgg

SEQ ID NO: 25154 - DNA, 1209 bp, Legionella pneumophila
atgttcagccagagtcagcaaaaaattgtttgtgtgctttatgatgatcctaaggggggatttcctccaaactatgcaagagaatccattccagaattgaaacaatatcctgatggtcaaagtttacctaatcctgattcgattgattttattccaggtgaaatgctaggttctgtgagtggtgaattgggactaagacaatttcttgaaagcaatgggcatcaattggtagtaacctctgataaggatggctctgattcagtatttgccagggagctaaaagaagccactgtcgtcatttcccaacctttttggcccgcttatttaactcgtgatcgtattgaaagtgcacctaagcttaagctcgctatcaccgcaggtatcggctcggatcatgtcgatttgcaagcggccatggaacataatatcaccgtttgtgaggtcacttattgtaacagcatcagtgttgctgagcataccgtgatgatgattttagccttggtgcgggattttattccacaatacaatacggtaattgatggcgggtggaatattgcggattgcgtcagtcgctcttatgatttggaaggcatgcaagtgggatgtgttgctgcaggccgaattggattagctgttttaagacgcttaaaaccgtttgctgtaaaactgcattataccgacaggcatagactaccagtacagttggagcaggaactgaatttgacttatcacccctctgttgaatccatggtgaaagtttgtgatgtggtatcgattcattgcccattgcatccggaaacagaatacctttttgatgagcgattaataaaacagatgaaacgaggctcttatttaattaataccgcccgtggaagaatatgcgatcagcatgctgtagcggatgctctggaatctgggcatttggctggttatgccggagacgtttggttcccacaacccccagccaaaaaccatccttggcgatcgatgccaaatcacgccatgacaccacatacatcaggaactaccctgtctgcgcaagcgcgatatgcggcgggagtcagagaaatattagagtgttggttagggaacaaaccaattagggaggaatatctgatcgtgtctcaaggccatttagccggggttggttctcattcttatagtgcgggtaatactacttcgggaactgagcaagcagcagaattggtt

SEQ ID NO: 25155 - DNA, 372 bp, Legionella pneumophila
atgactcattatctgatgaaacgcaccctcctggtgataattcccgcccttctggtgggttgttcctataatgccaagttaacccctgaaggagaaaaagtaaccattctccagtcagatcagctctcaaaaggctgtacttttttaggggaagtcagagcctacgatcgcaatggcatgagccaatcctatcaatcacacgagcatttgatcaaggatgaacgaaatatcctaagaaatgaagcggcgttattaggtgctaatacggttttggtgagtcaacatcagcaaacttatgaaggcaatcccaaaaatgatttcgtggcagaccattggatggtaggtcgagcctatcgatgtaagataaaacaa

SEQ ID NO: 25156 - DNA, 864 bp, Legionella pneumophila
atgattcatagtatgacggctttttctcgaatacaaaagcagtttgatgtaggtgatttttgttgggaaatcaggtctgttaaccatcgctatctcgatgtctcttttcgtttgccggagtcctttcgatttcttgaagcagaattaagaactttgcttcgggataagatacatcggggtaaactggagtgccatctaaagtacaaggatacaagttgtgataatcggtctatgcttataaatataggtacgattaatgcattacttgatttaagcagtaaattatctgcttctcatcatctggctaatgatatgactgtcagtcaagtgctttcatggccaggcgttgtggaggctaatctgctggatatggaggaattgtctcaaattgctttggagttatttcagaaaagtatcgataaattgtgtgaagtcagagctggggaaggcaggtcattaaaggcatatgttgaagaccgattgcaggctttgcgccaagaagtaatgaaatccaaaagcattgtggtttcaatgagtgccaagactaaagataaattacttacgcgtttgcatgaattgcaaatggacgttccagaggcgcgtgtagagcaagaaattgccttgctactagccaaacttgatgtgagtgaagagttggacaggttagagactcatatagcggaagtaagccgcactttgaatgcagaaaaggtgacgggtagaagactggattttttaatgcaagaattaaatagagaggcgaataccctaagctcaaaatcggattcagcagagttaactttatgtgctgttgaaatgaaagtattgattgagcagatgcgtgaacaaattcagaattttgag

SEQ ID NO: 25157 - DNA, 225 bp, Legionella pneumophila
atgtcagcttattttcgtagaaaaaaaatgtgccgctttagtgctgaaggtggtaatgaaatagattataaagacatcaatctattaaaaaattatattactgaaactggtaaaattgtaccaagccgtattactggtactcaaactcgtttccaaagacaattagccaaggcaattaaacacgccagatttattggtttattgccttattgcgacagccataga

SEQ ID NO: 25158 - DNA, 2404 bp, Legionella pneumophila
gtggcgattgcttttgcacaagtttctattcactctcgttcaaaaggtcatagtgctgtagctgcggctgcttatcgttcgggtgctcggctttatgatgatcgcattggtcgcgcttacgatttttcaaagcgagatgatgttgctttttctgaaattcttttgcctgatggtactactgactcatttctggagcgtgattatttatggaatgaagtagagcgggctgaaaatcgatcgaactctcaattatgtaaggactttgttttagcattgccgcgtgaattgaatttagaacagcagattgaattggcaaaacggtttgctcgaacgcattttgtggagaaaggtttaccagctgatatcgctattcatgatcatggggatggcaatccacatgcgcacattctgattccaacacgaagattggagaataaccgattttccaaatacaaagctcgcgatttaaatccagtttttgccaaggggtttttggtggagcaagattactggggtgaacaatggcgggagatgcagaacgaattttttattgagaacaatctcgatttacaggtggatgcaaaccacctgattgcagaacgtcatcgcggtaagcatcacaatgctaatgcacactacctgcttgaagaaaaccaattgattcaacaggcgcgaatggagctcactcgagataatatcgatttggtgattgaccatttatctacgcaatacagtgtttttactcgcagggatgttgaacgtttattatttaaaacgtttcaagcatcggatagcccacaagaatatttacagtttgttgaaagagtactgggtcatcaggatctagtagcattgggagataataataaaggggagccaagctttactacacgcacacatttaatgcaggaagcccagttgttacatgatattgaagcgatgatggtttctaaaaaccatgtagtccatcaacccatagatagtcttgcccaacaatatcgattaagtgaagaacaatacgaagcctttcgttatattactcaaagccctgatatttcggtagtgattggacggccgggaacaggtaaaagctatttgctaaagccattaaatgagtattatatccaagcagggatggaggttattggtgctgcattatctggtaaggttgctaaagccttgcaagcggaaacaggcattacttcttctacgattaaatcgctatcctatcgattagccaatgatatgatgcagttaagtgataaacatgtcctgattattgatgaagcagggatggttgatttttccagtatggggtacctgattaaagaagcacacaaggcaggtagtaaagtggtgctgattggtgatccggatcaattaaaacctattcaaaaaggtgaaatattcagaggtattgctgctcgcacgggttatattgagcttgaaaacatcaaacgacaacaagatttgggggataggcaagcgagcctcaatttagccaaaggggatatagacaaagccattcagcattatcaagataagggagcgataacaattactgataccaagctgcaagccatagagcaagtagttgcggactggaaacaagatcttgagtcaacgaatatggcggactctatcatgttgtcttataccagaaaagcagttaatcacctcaatgacttggctcgtgaagcgttaatagttgagaataaaattggtgaagagaacatcgtctatcaagggttagagcggagcctcaagatatcaacaggtgagcgattattgcttagggaaaacaacaaagtcctgggggttcgtaatggagatacagctacggttaaagaaataaatgtacagcaaatgaagattcaattggatagtggtgagttactgattattccaaaagaatataaggcattagattatgcatatgcactgaccgttcataaatcccaaggcatgactgcaaaaaaagtgcgcgttctaattgatagcaaatactgggatagaaatctaagttttgttgctatgacacgtcacaaagaacaacttaatatctatgcggacaaagaaaatcatccaacagagcaggctttaaaacaaactttatcccgcagcagtactaaagataacgtaattgattggccattggatttcgctatccgagcagggtttgattctgattcattgattagtagagcgttgaatcatattgtcggagtggggcataagataaagcaggcttataactttattgttaattatgaagcctctcttttgaaagcaaggcatcaggaacggtttcaggatatcggacaagcaatagctgatgctaaacaggaagcacttaaagttgatactaaagagtttgagagcaatgattgcaaaacatctgagc

SEQ ID NO: 25159 - DNA, 885 bp, Legionella pneumophila
atgaaacaaaaatttaaacgagccatcttgtatgcccgtcaacacagagcgaatcaggaagtcaatgaaagcttgcatcgactggttgactttttaagcacgcaagacatagaaatctttcaggactcagatactgcggccagttttgaattaaaagcccctgttttacctagagaaaaaatgggggcaaaacacgacttgattattgtcgtgggtggtgatggcagtttactttctgcctcacgtatggctataaaagttaatacaccggtcatagggattaacagggggaggctaggttttttaacggatattttaccccaagacattgagtcccatttaggccctgtgcttaatggacaatataatgaagaagaacgcttcttattacatactaaaatatatgataaggaaaacagttattttgaaggcgatgcactcaatgatgtcgtattaggcagaggaagtgaaacgcatttgatagaatttgatgtttacatcaatcagcagctggttagccattaccgttcagatggaatgattttatccactccaactggctcaacagcctatgccttgtctgcaggaggaccgataatgcatcctcaactcaatgccatcgtcctggtacccatgttttcacacagcctaagttcccgaccactcgttatcgatggggaagcagaaattgaattgtatatcagcaaatcaaatgaaaccgatttgcgtatcagttgtgatggtcacgaatcccgtgtcgttaaaccgggacagaaagtagcagtcaaaaaaaacggtaatcgattgcgtttgttacaccctcttgattatcattattatgatacattacgaagcaaacttggttgggaatcaaagcatcaggga

SEQ ID NO: 25160 - DNA, 447 bp, Legionella pneumophila
atgatccatattgcgctttatcaaccagaaattccaccgaacacgggcaatattattcgactctgcgccaatactggagctcaactgcatttgattcatccattaggctttactttggaagataaacaaatgcgacgagccggtcttgactatcatcaatgggcctcaatattgcattatgagaattggcaaacattcttgcagtctcattcacaacgacgattattttgctgtagcgcaaaaggaaaagtgaagtatagtgacgtcgattataaggcagatgacatcttattatttggacccgaatcttgcggcttacctcaacaaatactgaaccaatactcaacaatacggattcccatgagagaaaataatcgtagtctcaacttatcaaatgctgtagcaatcatattgtacgaagcatggaggcaaatggattttaacatg

SEQ ID NO: 25161 - DNA, 885 bp, Legionella pneumophila
atggcggatgtgacggttaaacaattagctcaagtcgttggtatcccggttgagcgcttattgaaccagttacaggaagcagggttatcttttactgatgatcaacagactgtgaatgaagaacaaaagaggatcttgcttaatcatttaaaaggtagctctaatcgtgatattagtgctgcgcctgaaagaataactttaagacgtaaaagcatgtctcaagtcactgttgggcatgatatgcatagtggcaaaacagttaatattgaggttagaaagaaaaaaactttcatcaagagaagtgcaattcccgaacaagcagaggtagaagagcccgtagttccgcctgttgttgaagaacccgtccatgaagaaatcactgtggttagtgaagtgtctgcagaaactcccgaattgaaagagaccgaggagcatccggttattgaacctgtagcagagctcgatgaaacagtaaaagaagaagaaaaaatcaattcagaggaaaacacagcagagagtcaggatgagttaacccatgcaaacactgatgtaatagagaatcttgtggatgttgtcgaggagaccatccctgtttccaagaaggaagaagttaaaccagagaaagtaagtaaaaagaaacatctggagcaaactgattctgatatttctgaatttaaaaagggtaagaaaaagcctaaatatcatacttttgaacatgatgaagaggaacaagaacttcatcgtcgtggtggtcgaagtaaatttaaaaagaaaaaaggaactgaaaaatcggataaatacagagaagctgaagaaacattaacgcatggttttgcgttacctactgctccaatagtcagagaagtattgataccagagacaatt

SEQ ID NO: 25162 - DNA, 1530 bp, Legionella pneumophila
atgattccagctgctgaagttgttgatttatcaaggttacaatttgcattaactgcactatatcattttctatttgtaccccttacgctggggttatcggttatgttagctatcatggagacagtttatgtaatgactggccgtgatctctggaagaaaatggtcaaatactggggtgttttgtttgggattaattttgttttgggagttgcaaccggtctgactatggaattccagtttggtactaactgggcttactattcacattatgtgggagatgtatttggtgctccactggcgatcgaagggctaatggccttttttctggaagctacctttgtgggtttatttttctttggctggaatagattgtcaaaattgcagcatctgacctcaacatggttattagctttaggcactaatctttcagcattgtggattttaattgctaatggttggatgcaacatcctgtaggcgcctattttgattaccaaacgatgagaatggaggttagcagtttctacgaaatgctgtttaatcctgttgctcaggccaagtttgtgcataccatcagtgcgggatatgtaacaggagccatgtttgtcttatccataagcgcctattttcttttgcgggggcgaaataaagcgtttgccaaacgctcaatgacggtcgcagtttcttttggtttggcttcggcattgtctgttgtggtactgggcgatgagagcggttatgttgccaatgaaaaccaaaaaatgaagttggctactatggaggcgatgtggcataccgagaaagctcccgccaatttgactgtttttggaataccagatgagaagactctaacgacaaaatatgcaatagatattccttatgcccttggtattattgccacgcgttcgtttaatacccctttacaaggtattattgaattaattgaggaaggaaaattaaaaatcaaagatgggatgattgcatacgatgcattgaaagttcttcagaaagatccaaagaacgaacaagccaaggctgtttttacaaaacatagcgaaaatcttggttatgctttattgcttaagaagtatactgagaatgtgacggatgctactgaggagcaaataaatcaagcggcgaacgatctcaaacctaaagtcctgccaatgttcttctcatttagaattatggttgcttgtgggatatattttatacttcttttcgcaaccggtttttatttgtctgtaagacatcgattggaaaaaacatcttggtaccacagggttgcattttactctttgcctttaccttggatagctgctgaattagggtggatagtagcagaatatggccgtcaaccctgggttgttgagggtattctgcctacttttatgggggcctcctctttaacatcaggacaagtaatgacttcaatcgcaggttttgtattgttttatactgttcttgcaattgttgagatttacttgatggtcaaatacatacgtcttggcccagatggtatgaatcatcat

SEQ ID NO: 25163 - DNA, 1344 bp, Legionella pneumophila
atgacatttgaattgctttggactgacaaatgttttcttactttactggcggtggttttatttaccgttctgctgagtcttagaaaacaacacatcaaattgtcatttgcaatcattttacaaaggccgttagcaatcagtgctggaattgtgttgttgctgtttttagccatcggtgttttggattctattcatattaaattcatcaatgataaaacagaaaaaactcagtctctattggatagagttcttgcacctatagggaatacctatgagaaaacttattcagctcccttggctttaaatcaatttatgagtgaaacaaagttggttaatggagttacaactcaggtttatcctcgcttaaaatatccaccagcttctattaagaatgaaaaggacaaatccctcatcatcaaatctgtgcttatgaaaggtataacatacagtgctttagtcattttgggtggatgcttattactcgctttaataaagcttagtcttggatataaaaatactttcattttaaattctactcaaatcagcgctatagcgactgtagctgtacttacttttgcggtcgtcattggttacggattatcaagatcctttcatgtcttgggcacagggcaaatcggacaagatattttttatttcagtttgaaaagtgtgcgaacgggtctaatcattggttttttaacaaccctcttcatgttgccattggctttatttctggggattgcagcaggatattttggtgggcttgtggatgatattatccagtatgtttatactactttaagctccattccaggtgttttgctgattacggcttccgtattgtcattgcaaacttatattgcaaaccacccggagcaatttactactttggccaagagtgccgatgcgcgtttattagctctttgcttgatactgggtgtaaccagttggacaagcctgtgccgacttttgcgagcagaaacattaaaattgcgggaaatagattatgtcctggccgcacgtgccttaggcagtagttggtttactatcgtacgcaaacatttggtgcccaatgtcatgcatattgttatcatcaccctggtattggatttcagttttttagtcttggcagaagctgtattgacctatgtaggggtaggtgtttcacccatgactattagttggggaaatatgattaatggcgcgcgccttgaattagcacgtgaccctgttgtatggtggcctatgtttgcagcctttctgttaatgtttttattggttttggcaatgaacttgtttgcagacgcagtacgggatgcttttgacccacatcaatctcattta

SEQ ID NO: 25164 - DNA, 456 bp, Legionella pneumophila
atgtttcgtggaattaatgccatcaccatagacactaaagggcgcttagctattccgacgcgttacagaagtgccttgggtgcagaggataaaattcctctcgtggtgactattgataccgaagaaacctgcttactcctttacacagcagcacaatggcaaatcatcgaagataatttgcaaaaactgccaagttttaatgctgcagcaagacgaattcaacgtctgttaatcgggcacgccactgatgtagaggttgatgcgaatggacgagtacttttacccacagttttaagaaattatgcaaagctggaaaaagatgtcgtgatgataggccagggaaataaatttgaggtttggaataaagaattatgggaatccaagcgtgagcaatggctggcagaagaagcgtccatgacggatgggttacccgaggaaatgaaaacgttttcttta

SEQ ID NO: 25165 - DNA, 1281 bp, Legionella pneumophila
ttggtagcagggctgggtaagacgggactctctatagcaagatacctgaagagaaataataaatcgtttgttgtttttgatacacgtaaagaggcgcctggattagctgaattccaaaatgaatttcctgatgtgccaatttacctgcaacagactcctgatgaagtaatcagccaggtgacggatgttatcactagccccggtttggcactggatacgcctgttttagagagagcgcgtcaagcgggcgcatcaatttatggagacatagaatgcctggccagagagattagcgcccctgtcattgccataacgggaactaatggtaaatccactgtaacgactttggtgggagaaatggctaaggcggccgggtttcgcgtagctgtagccggaaatatcggcactcctgtcttagatatgttggatgatgaacatcactacgatttgtgggtattggagttatccagttttcaattggatttaacttattctttgtcgccagtggttgcgacgattcttaatgtaacgcctgatcatttggacaggcatcacactatggaagcctatacgcaagcaaaacaaaggatttatcgtggtgccaaggctgttttatttaatcgtgaagacgtctacactgttcctcaccaatcctgtcaagcagatataaaatgcatctcttttggcaaagacgcgccttcaatgggaaattgggggctgattgaacaagagaatactacttatttggcgaaaggaatggagcgtcttttgccagtggaatcgattttaataaaaggggtgcataattggatgaatgcgcttgctgcttgtgctttagccgaagcagcgggaatttctatgcaacacattcttaatgttttaaaaaccttccctggactgccacatcgatgccagtgggtaagagaagtagatggagtaggttggattaatgattcgaaaggaacaaatattggtgctacaatctctgctattaatggaataggaggttctatgcaagggaaaattgttcttattgcgggtggacagggaaaaggggcggatttccaagaattagcccagccagtttcagaatttgttcgttccattgttttgattggtgaagatgctgacaagattgaatcggctttagccaaagtagttcctgtcgtgcgtgcttcttctctggagggcgctgtgactattgccaagacatgtgcgaaacctggtgatgtcgttttattatctccagcttgtgccagtttggatatgttccgtgatttt

SEQ ID NO: 25166 - DNA, 3459 bp, Legionella pneumophila
atgaatacaaaaacgctactttaccaacccacaaaaaataaacaaatatgggggcaactctatggtagcagtctggcacttgctttagctgaatattgccaacaaacacccgggatcaaattacttattacgcaagacaacctatgcgccagtcagttgcaggatgaactacaattttttctaaacccgaaccaaaatacccaggagttattattttttcccgactgggaaaccttgccttatgatcaattctctcctcatcaagatattatttcagaaagactctacaccttaagcagagttcaacaaattaccaatggaatcatcatttcttcagccagcactttaatgcacaggctttctccgccagagtttttaaatcaatacgctttaatgcttaaagaggggcaaaagcttgatctgaactcgttcaggaatcagttgcaacaagctggataccattgtgttaataaagtgcttgaacatggtgaatacgcactacgtggatctattattgacgtatatccgatgggtagtggtttacctttccgtatcgagctatttgatgatgaaattgaaagtctcagagaatttgatccggaaacacaacgcacaatagaaaaaatcaatcaaatccatttgttacctgctcgtgaatttccattaaatgaacaaagccaattacacttccgacgagctttcagagagtcttttcctggaaatcccagccattgcccaatatacgaagcaattagtaacaatcaatttccatctggcatagaatattatctgcccttgttttttgataaaaccgttaccttttttgattatctgccagccaatgccaaaatttgtttaattgaagaaatccaggagaatgctgagagattctggcgagaattaaatgaacgctatgaacaaaggcgtcatgatgtcagccgccctattttacccccagataattgctttattaatcccaccgagttattaactaaagcaaaccattatgaacaagtacgcctgtatcacaaaccttccgaaaaaaaaggagccttaaatttcaacattgccaaagctccacaactacccattgacaggaaaaatattgagccactccgccaattaagtgagtattgttctgatccaactcgacgctatcttattgttgttgaaagcgcagggcgtcgcgaagtgttactggatctgcttaaatcaagccatatcattccaaaaacacagaactcatggttagacttcatttacgatgaatcccccatcaatataactactggcccattgatttatggctgtgaattaaccgacaaacaaattgtgatcatcgttgagtcgcaattatttggtgagcaaagcacacctcaacgccgaagcactcaaaaatcagttgaccctgacttaatcatacgagatatggccgaacttcgattgggcgctcctgttgtacatcttcaatttggagtaggtcgctatcaaggtttgcaatacattgactccaatggtacccccagtgagttccttgtccttgcttacgcaggggatgacaaaatctatgtgccagtcacttctctgcatatgataagccggtatactggtgtggacagtgaacacgcccctttgcataaactgggttctgaacaatggcaaaaggaaaaaaagaaagcggccgagaagattcatgatgttgcaattgaattattggatctctatgctaaaagagaagcccagccagggcaccaatacgatttcaatcaatccgaatatataaaattcgccagtggcttcccctttacagaaacaccagatcaacttcaagctattgaacaaattattaaggacatgcaatcaccaagaccgatggatcgcctaatctgtggtgatgtaggatttggcaaaacagaagtcgccatgcgtgctgcattcgtagctgtacaaaatggaaaacaagtctgtatccttgctccaactaccttgcttgcaggacaacattttgagtcatttcgcgatagatttgcagattttcctgttaatattgaattattatcccgctttcgcagtaataaagagtccgaagcagtccttgccgcattgcaatcaggtaaagtagatattgtaattggaacccataaattattccaaaataatatttctttcaaaaacctgggattactgattattgatgaagaacatcgatttggagtgaaacaaaaggaacatattaaatcgcttcgaactcatgttgatattttatccatgactgctactccaattcccagaacattgaacatggcaatggcaggaatcagagatatttcacttattgcaacaccgcctgccaagcgtttggcaattaaaacattttggcaagaaaaaaatgatctcaccatacgagaagcgatattgcgtgaaatattaaggggagggcaggtattttacctgcataacaatgtacaaactatagaaagagtttgccaggatctggaagctttagtgcccgaggcaaaaattcaaagcgcacatgggcaaatgcgagaaaggcaattagagcgcatcatgtctgatttttatcatcaccgatttaatgtcctggtttgcacaaccatcattgaaacagggatcgatattccaaccgccaatacgattattatcgatcgtgccgataaatttggattagcccagctgcatcaattacgtggtcgtgttggacgctctcatcatcaagcctacgcttacttattaactcccaatgaaaaactgttaacgccagatgcagtgaaacgtctcgaagccattgtgtctttagaagatttgggagcaggattcaccttggcaacacacgatctggaaattcgtggagcaggtgaactccttggtgaagaacaaagtggtaatatgcatgccataggatttaatttatttatggaaatgcttgaccgtgccgttaacgatttaaaggcaggcaaaactcctgaattgtcagcacccatgcatcaaggacctgaaattgacttgagaattagcgcgattatccccgaagattacataggtgatatacacaatagactcatcatgtataaaagaattgctaatgcaaaaactacccaacaacttagagaactacaaatagaactgatagaccggtttggtttactcccgcaaccagtcaaacatctgtttttgattactgaattaaagttaaaagcggaacagctcggcattcaaaaaatcagtgccagtgctcaacaaggtaaattggattttagtgaaaaaccatcgattgaccctggaaccctgattagcttaatacaagtacatgccaaacgctatcaaatggaaggaccgcaacgtctgcgctttactttagacagcacgtcagcagaggaacgaatatttgaaatcagttctttattaaataaactgtctcctcattcccaaacgattgac

SEQ ID NO: 25167 - DNA, 714 bp, Legionella pneumophila
atgttagtcacgaaggaagtggaatatgaggatggtgatactgtatgcaaaggttttattgcctatcattccagtgcctcaaaaccattaccttgtgtcatggttgctcatgattggggggggcgtggagagggagcttgtaacaaagcgagacagcttgctggcatggggtatattggattcgctatagacatgtatggaaatgccaagctaggtaaggataaggcagagaaaagagctttaatgactcctttcagagaaaatagagggaagttaatcactcgtataaatgcggccttcaacaaagtggtgcagttgcctgaagtggatagtgagaaagtggctgctattggttattgtttcggtggtttgtgcgtattggacttgatacgttccggggcaccgcttaaaggagttgtcagttttcatggggtattattacctttagagggtgagagtaataagtcattaaatgcgaaagtattgatattacatggttatgatgatcccttagtaccaattgagcaagttaaccagttcgctattgaaatgacagaaaggaaagtggactggcaggtccatgtttatggccaaacagctcattcgtttactgaccctggtgcgaatgatgatgaaatgggactgcattacaataaattagcggatcaacgttcctggcaaagcactcaattgtttttgcaagagttatttgca

SEQ ID NO: 25168 - DNA, 1404 bp, Legionella pneumophila
atgaataatgaatttcttgaaaatgtcacctatgaagagctgactttaggacgcagagccagcttaaatcgtacattaactcaggatgatattaatttatttgccgctatgtctggagacataaatccctctcatgtcgatcctcaatttgctaaaagcgatgtatttcatggcgtagtcggacatggcatgtggtctggagctttaatttctaccctgctgggcactgtccttcccgggcctggaactatctatcttgaacaagacattcaatttataactcccgttcgcattggagataatctgacaattaccatcgttgttcgtgacaaacatcctggcaaatcgattgttcatttcgactgtatgggggtaaatcaaaaaggagaaacagtaattaaaggccttgccaaagtcattgccccgactaaaaaaatgaaggtaccccgaactgttctgcctctggtgcaaatccatcacaatgatcactttaataaaatcattgaagcctgcagtaacttgccctcaatcaaaacagcagttgttcatcccgtcactgccaatgtcctggaagcagtttatgactcagtcaaggccggtttaattactccagtattaataggtcctatggcaaaaatcaaatgtgctgcaagtgaggctaaaatcgatttatccaattgggaaatgattgatacagaacacagtgatgctgctgcttttaaagcagttgaattagcggcatccgggaaagtcgattctatcatgaaaggcgccctgcatactgatgagttaatgtctgcggtggtacctgccacttctggactaagaaccaaataccgcatcagtcacgcctatgttatggacgttccaacttaccataaacctttaatcattaccgacgcagccattaatatagccccaaacgcagcggataaggcagatatatgtcaaaatgcaatcaatctctggcgtattttatatggagaagaaataaaacccaaggtcgctatccttgcagctgttgagatagtaaatcccaaaatgcaggcaaccgttgatgccgctgtcctgtgtaaaatggctgaccgaggtcagataattaatggcatactggatggccccctcgcctttgataatgccatcaataagcaagccagtaaggaaaaaaacattatctctcctgtagctggtgatgccgacattttgctggtaccagacattgaatcgggaaatatgctagccaaacaactcacctttctcggacatgctgatgcagcaggaatagttctcggagcaagagtccctatcattctagccagcagagctgattcattacgaacacgtttattgtcctgtgcggtagcaactaagatagcagcggctcgtaaagcaggcaaaataaaa

SEQ ID NO: 25169 - DNA, 654 bp, Legionella pneumophila
atgcgattaatgcttttaggtggaccgggagccggcaaaggaacccaagcttcacttttaattaaccgttataaaattcctcaaatttctaccggtgacatgctgcgtgctgccatagcaaaaggtacgcccttaggattaagtgcccaaaaaatcatggaatcaggtgggttggtgtccgatgatattattatcgggttagtgaaggaaagactaaaaaaccctgattgtgatagaggattcctgtttgatggttttccaagaacattggtccaggccgaagctttaaaagatgcagaaatccatttggatcatgtgatagaaatagccgtcgatgacgaagaaataattgaacgcatcagcgggcgacgcattcaccagccttctggtagggtttatcacgttgtgaatcaaccgccgaaaaatccgggtgtagatgacatcacaggtgagcctctgattcaacgtgatgatgataaagaagaaaccatacgtaagcgcttacaggtttaccatagccaaacagcgccattggtgcaatattataaggaatgggctgaatctggctctaaagaagctccaaaatttcacactattagtggtacaggtacagtagagcaaatatttgacaacatcgtaacgatactcgaaact

SEQ ID NO: 25170 - DNA, 1392 bp, Legionella pneumophila
atgaatcattcaaaaaaggttctgaacgttttttctttagttatgatcaacgtcattgctgtagatagtttgaggaccttgcctatcagcgcaaaacttggattttctctggtcttttattatatttttgcagcccttaccttttttattccagtagcattggttgctgcagagctcgctaccgcctatcctaataccggcggaatttatgtctgggtcagggaagcattcgggagacgggcaggatttatcactatttggctgcaatggatctataacgtagtttggtatccaactatgttagcttttatcgccgccacgttatcctatttaatcgctcctcatttggggaataacaaattttatttattaggcacagcacttaccttgttttgggtgtttacttttttgaattgctttggcatgaaactatccagcattgtaagtattatcggcgcctccataggcacactacttcctatgatagtgattattgtcctgggcgcagtttggatatttcaagatagacctgtagcagtcaattaccccacaacatggttacctgattttagttctttaggaaatctgtctttattttcagcggttttatttggccttataggaatggaaatgtctgctgttcatgctgaagaagtaaaaaacccgcaaagagattatccaaaagcacttttttattcggctcttttaattatatccaccttatcattaggttctttggcaattgttattgtagtaccaaacgatagtttaagtgttgtgtcaggccttgttgatgcctacgccatattttttaattcctataatatgccgtggatgacatcagtgattgccgtgttaattattttaggaggcctcagtggcgtttcagcctggataataggtccaaccaaaggattactagtgtctgcacgcgatggttccttacctgcactgttttcccgtgtcaataaatacggctcgccggtagccatactgctcactcaaggcgttatatttactgtattaagtacagtctttattttactcgattcaattaatgctgcgtactgggtattaagcgatttaagtgctcaaatggcattgttggtatatatcatgatgttcgctgcagcaattaaattgcgatacagcaagcccgaacagccgcgtggctatactattcctggtggaaatctggtaatgtctcttatctctggaattgggatcatctgctgcatagctgctatgattgtcggatttatccccccttcacaaatccctataaagaatgtttttctctttgaatgttttctgatcggcggccttattctatttgttttcattccctggttatttgctaaaaaacacgacgagcaattatgtagtgaagaa

SEQ ID NO: 25171 - DNA, 1932 bp, Legionella pneumophila
atggctaaaataataggtatagacctgggtactacgaactcttgtgttgctgtcatggaaggtgacaaaccgaaggtaattgaaaatagtgaaggtcacagaacaactccttctatcgtagcatttactgatgataatgaaatattggtaggccaatcagccaagcgtcaatccgtgactaacccagagaaaacgctgtttgcgattaaacgattaattgggcgtcgatttgatgatcctatcgtgcaaaaagatattaagatggttccctacaaaattatgaaagcggacaatggggatgcttgggttagagtcaaagatcaagataaggcaccaccacaaatttctgctgaagtgttaagaaaaatgaaaaaaacagcagaagattatttgggtgaagaagtaaaagaagcagtgattactgtacctgcctatttcaacgattcgcaacgccaggcaaccaaagatgctggtcgtattgctggcctggaagtaaaacgaatcattaatgagcctaccgctgctgcactggcttatggtatggataaaaaacgcggtgactctgttattgcggtatatgatttagggggaggaacttttgatatttcaattattgaaattgccgaagtggatggtgaacatcaatttgaagtacttgcaaccaatggtgataccttcctcggtggagaagattttgatttggctttaattgagtatttggcttctgagttcaagaaagacactggtattgatttgcataatgatcctcttgctctgcaacgcttgaaagaggctgccgagaaagcaaaaattgaattgtcatctgcacaacaaactgatgtcaatttgccttacattacagcagatgcttctgggccaaaacatttaaatatcaaattgactcgcgcaaaactggaatctttagtggagaaactggttgagagaactattgagccatgtaaaacagctttaaaagatgcagggcttactgtctcacaaatcaacgaagttattctggtcggtgggcaaactcgtatgcctctggtacaaaaaactgtggaagaattctttggcaaagaacctcgtaaggatgtaaaccctgatgaggctgtggcagtaggtgctgcaattcaggcagcagtattgtccggtgaagtgaaagacattcttttactcgatgtcactcctttgtctctcggtatagaaaccatgggtggtgtaatgaccaaactcattgaaaaaaacacaactattcctacaaaggctacacaagtgttttcaacagccgatgataatcagacagcagtgactgtgcatgtattgcagggtgaaagagaacaggcttcagcaaacaagtcactgggacggtttgatttgcgtgacatccctcctgctcctcgtggtgttcctcaaattgaagtaacttttgatattgatgccaatggtatcttgaatgtttctgccaaagacaaggcaactggcaaggcacaatccattgtcatcaaagcttccagtggtttaagtgaagaagaggttgctgctatggtgaaagatgcccaatcgcatgctgaagaagataagaaattcaaggaaatggcagaactgcgcaatcaggcagatagtttgattcatagctgtgaaaaatctatgaaagatttggctgatgagttgtctgaggatgagaaaagaggcatcgaaacagcaatttctgagctgaaagaggcggtgcaaggaactgacaaggctcgtattgaagacaagctgaaagtattgacagacgcttccgcaaaaatggctgaacgtatttatgctaaaaaatcgtctgaaggtcaggcagctcaggggcaaacacaatctcaggaatctacaaaacctgcggaagagggagttgttgatgctgagtttgaagaagttaaagaagaggataaaaag

SEQ ID NO: 25172 - DNA, 792 bp, Legionella pneumophila
atgggtgtgttaaatgttacctcggactcattttatgatggtggcaagtatctgtctgttgatagcgcctgtgatcaggccttaaaattaattgcatgtggagctgatctcattgatattggtggggaatcaaccaaacctggtgctcccccagtccctttagatgttgaactatcaagagttcttcccgtaatcaaacaacttcgtgtcctcgcagatgtgtgtatttctattgatactaataagccagaggtgatggaagcggcaatcgatgctggtgcgaatgttataaatgatgtttatgctttaagaagggatggtgctctgaatgttgctgcgcagttagatgttcctgtttgtttaatgcacatgaaaggagagccgcgaactatgcaagaaaatccttcttacccagaaggaataatgaaggaattacagcatttttttaaagagcgcatcgataaatgccagaaagctgggctgaataagaataaattaattcttgaccctggctttggttttggaaagcgcgttaaagataacctaaaattaatttatcatctgaacgaattgcgttcttttggattgccaattcttttgggcgtttcacgcaaaagcacaattggtgctgtattgaataatgaagttgagcaacgtttgattggaagtattacgctaggaatatatgctgctcttaaaggcactgcaattatcaggacacatgatgtggatgaaacgaatcaagcattaactatgattaatgcaatttatcaagctgctaaagaaatcggt

SEQ ID NO: 25173 - DNA, 630 bp, Legionella pneumophila
atgaatcataccaaatcatcttttataaaattagctctggagtgtcaagtacttaaatttggtgaatttactttaaaatcaggacgaataagtccctatttctttaacgctggtttattttatcacggtgattccttacgtaagttaggtcaattttatgcaaaaacccttttagaacaagaagtttcttttgagcacttgtttggaccagcgtacaaaggtatcccactcgctaccgcaactgcagtggccttggctgagttaggcagggacattacagtgacttttaatcgtaaagaagtaaaaactcatggagaaggcggacaattaattggttcgccgctaacaggaaggacagtgatcattgacgatgtgattacagcgggcacagcattcagagaatcacaaaccctgattaaagagaatggagggattcttcgtggtgtcattatcgctctggacagatgcgaacgaggattaactgagaaatcaaccctgtcagaaatcagggagcaaggaattgaagtctattcaattatcaatttgtttgatctaatagaatttctgaaaaatgacaatcaatacgaacaggtacaaaaactggagtcctatcaagagcgttatggcgca

SEQ ID NO: 25174 - DNA, 1614 bp, Legionella pneumophila
atgcccatgaattacgaatttggaggttcggtacccgccgtgatgctttatggaagtgagacactcaatcataaaattttaggcgttacaagtgggtgtcatagcaggggacatcgttttcatcatcctcaggaaataagaataaattcagctgcaagctatgaagatcagatgaaaaatgcttttgtaattgccgattttgctactaggcgacaagccattatccatcaggtacaagaattagcagcacctctaggtgcttcagtgattatgcctgaagaattggttgatgaagtcacctcaatagtcgaatggcctcaagcgctcattgcaaattttgaacaggagtttttagaggttcctgctgaagcccttattgcttccatgcaatctcatcagaagtgttttgcactaaaaaatatgcatggtgagctgctaccttattttattacggtatcaaatatcgccagttccaatccaaaacaagtagttttaggaaatgagaaggtaatgagggcaagattaagtgatgctgcctttttctttaaacaagataagaaacagccgctaagcgcgcatataccttctacggagcaggttatttttcaagtaaagctgggaagcatgtatgataaggtacaacgaataaaggcaatgatggatcatttaagccagtctctcaatttaccctctcacctggctgagcgagctacattattaagcaagtgtgatttgatgacaggtatggtaggcgagtttcctgaattgcaagggattatgggatattattatgctcttaatgatggcgaagaagctattgttgctaccgctttaaatgagcaatacatgcctagattttctggtgataatttaccatccactgatttgggcaaggcactttccctggcggatcgtatggatactctggtgggtatttttgcgattggccaaaagccaactggagtaaaagatccttttaaattaagacgccacgctttgtctgtagtccgtttactcatttcaatatcagcaccgcttaatttatcaactttgattaaagaagccttggctaattatggtgatcgactccctcaagacaagaatttagtggctgaattaaaaccatttattcttgagagacttcaatcttattatcaaaatcaaggtatcagcgctgatttggttcatgctgtccgtgctcgtcaggatgattggttatatgatttagataagcgtctattcgctttaaagtcatttatcactatgccagaggcgacatcattatcagctgcttgtaagcgtgttggcaatatcttagctcaggcagcatatgcggataaaaaagtagatattaaggaagagcttatagaggaaggcgctgaaaaagcattatttgatcatcttaataaaattactaaaacagtagaaactttatacattgccggagattatcaagcattacttaagcttctggccagtcttaaagagccagtagacgctttttttgatcatgtgatggttatggttgaagaggagtcattgaaacagaacaggcttgcgcacctgcagcgattacaagagttattgcagggtgtagctgacatttcaatgttg

SEQ ID NO: 25175 - DNA, 1518 bp, Legionella pneumophila
atgtcagaacagtttatattgcagcctggtcagttatcgctactttctattaaacaaattttagatgaggaactatcttgcgttcttgctgagaattcctttgaattaattagagcctctcaccaaacggttaaaaaagtaattgatgaaaagaaaactgtatacggaatcaatacaggttttggttctctggcaaaccagaccatttcttcagattgtttgaaagagttgcagcgtaatattgtgctttctcatgcttgtggaacgggtaaattattgccggatgacgtggttgccttgattttgcttttgaaaattaataatttgtctcaagggtattccggagttaggctggaattaattaatgccttgattgctttgtttaatcataaagtatatccatgcattccctctaaaggttcggtaggtgcgtccggagatttagtcccgcttgcacatttgtctttacctttgttaggagaaggcgaagtaagacatcaaggtcaggtgatcagtgctgaggaaggactaaaactggccggattgaaaccgcttgaattggaagctaaagaaggattagcactgcttaatggcttacaggtatctaccgctttagctttgtcagctctgtttattagtgagacattgtttgaaactgcgattatttccggcagtttatcagtagatgctgccagtgggagtgatgtcccctttgatgacagaatacaccaaattcgaggacatcaagctcaaatttctgctgccagtatgtacagaaatttattggcaggtagtcaaattcgagagtcacacaggcattgtaatcgtgttcaggacccttattctttaagatgtcagccacaaatcatgggtgcaattcttcatcagatgcagtttgttggacaaactctccaagtagaggccaatgcaatttccgataatcctctcgtttttgcagagcagggggatattttgtctgggggaaattttcatggtgaaatcatcgcaatggctgctgacaatttggcattggcattatccgagataggaggtagtgcagaacgccgaattgctttattaattgataaaaattttagtggattacccgcgttcctggttagagaaagcggcttaaattcaggttttatgattgcacatgtaactgccgcttcttgtgccagcgataacaaagcgcttgctcatccacactccgttgatagtttgcctacctcggcaaatcaggaagatcatgtttctatggcaactagtgcagcacgtcgactgcatgaaatgatcgataatacttcaacaattcttgctattgagttattggcagcttgtcaagggctggagtttcataaacctctaaagacatcaccgcaattggataaaatttatcaaagcgtaagaagcgtggttaaagagtatgataaagatcgctattttgcacctgatatagaaaaaattaaaaagaagattttggataaagaattctcattgctcacactcacgaacgaa

SEQ ID NO: 25176 - DNA, 420 bp, Legionella pneumophila
atgtatacaaatattttatttgccacagatttgttaaatgagcatagccaccttacagaaaaggctgctaatattgctaaacagtttaatgcaaaattgtatctattacatgtgattgagttgccaacaagtatattaatagctcaaggattgggttttacggagctagctaacccatcaaaagaggatgcccagactgtattatcattaattggagaaagtttacaaatacctcaggaacaacaatttgtagaaatcgggtccgtaaaagaacatatattaaacaaagcaaaagatctgaattgccaattaattataataggctcacactctgctacaggattaccgtctattctaggaagtacagcgcatgctgtagtaaatcattcggtttgtgatgtattaacactcaaagcagat

SEQ ID NO: 25177 - DNA, 2997 bp, Legionella pneumophila
atgtttgggagttattattttgctttgtactttgctcttaattttttcttaatgatcgttttttataatgcaaaggttatttttattcaagtttgtaaatatgtgaggttccttatgaaattgcttcggtttcatgaattaaaatcattgccaagcatggacgagaaagcattagaattgttgataaaggttttaggcaacaaaggcattagaaaactaataaaatctgccgacggcaagcctatttcacgtgaaataatgattcatgagtttggaatagattgtcaaattctatttattaccaccgaggcgtctcttaagccaatcatcgttcccactgaaaacaagatttcaggaggtggcaaatcttattgtgagcaatttaaagtttatgctttggatgatggaaaaacttatttcctaaaatccgttaagatcaatgctgagagtttgacagagtttaccaatgagacagacaccttaagcaaattgggtcgcttggtaggcactttttttaatgaacaaactcaggtgcattatattctcacaacttttataaaagggattgatttatcccggtataaaaacgcgcttcctcttaatattaatctaaaacatttttgggaagttctcggtattatgatttctgtatgccatcaggtgaaacaattccatgaattaggcttaattcaccgcgatcttaaacctggaaatattatgctggatgcggatatgcagtgtcatttagttgatttcggcagcagttcttctgataaagaacctaaaccggtatcatggggaaccgcaagctatttagcaccagaacttaatgcacaagaggattttattgctttctctcaggctagcgatctttttgctttggcttattctctagatgaactttttaatccattcaggcaggttaaatttgcgaaagtggatataggaattaaaaataagcatcttgtgcttttgcacgctgaaatcgaggcatgtattactgggctcatgtcaaatgaaacatcagtacgaacactttatttttctcgcatcctgcaattacaaagagtccctgagagtttcaaatcgagaccagaagcatttacctatatgattatgctgctcactcaatggaaaagctgttatgaagcaccggaaatgaacaaagagttagatgaaatcattgcagaaataaaagtggcttatgaaaaccatgaacaagatgtcgtaaagattataacattgcttgagcagttatctaaagcggacgggctgcttaattctcataaagccttgctctctgttttgattaaatcgcttgctaatgtccagcaacaagagctcggacaagacgacatcttgccgcgtcgttttgaatcagacgttgtgagccgcctgataaaaactccaacagctaaaatgatggcagcgattaaacaagtttcagatgctatcgtaaaaatcctggaacaatatgaacattcccctgccgaatcttttgagcatgcggttttacaagattttctcgaacaaatggttcaatcggatattctttttggtgcccccaaagagaaaattgagatttccgatattataaaaatactcaaggcaaacaggccggaagatttcgtacaaattcagcatatttcttttaaatttgcccaagttgctttacgcgatcttgccttgcatgacctgccaaaacatgagccaaaaggcgcttttttagaaatattgaaaaaatatcaagcaaaatatgcgcctgaagagacatcactttttgagctctatcatcacatggcaggtgttagagatcacaacccatcgaaagtaaaaaaaggggagggataccgctttagagctttcatttgtgatgagcttttttatggagatgaaatttttactacgggggataatcgtggccgcgaaggcaagcctaaccaaagattacaaactaatcaagttggtttaatgaagttcgaacattcagcccacaccaaaggactactgacgttaaatggtcaatcctggtatgctgattgtaagacccagctaccaaactacgattcaattcattatctctcagccctgaaaacggactgtccttatattacggggccttccgggatgacttcattatttatgaatatgatgtttcttctgctcaatcctaaggatcaagatgtcatcctctcttacagccttggggtaatgacttatgtagttggtgctggctaccacagcattaaagaaattcttattccgatggtcaagtgcgtaggtattgtgcctgattatccacagcataaaggaacagagtgtcttacagccccgcctttatataaccattactttaaggcaatagaggagtttgataaagagtttgctgaggttcatgaaaaaatttggcaggaataccttgcatatttccgtatgacttatatgcccgtttgtatgcgtagtcattgcctgccacatcaagtcccctcaatggaggatataagctcagaagtaaaagaaatgcttgaaattgtgtctaagtctgtgaaaaattgcttagaagaacataaagttaagcgtactggcgatatggggttgtttctttcaacaccatgtgggcaaacaaaggcgcttgaggtcttaagtcatgtctgtcaacaacaggtagggctaaccgcaattttcaggcagatccaggcgtattttaaaggaacttttgagacagaagaaggaataattataaatagagaaatgcaacttaaatttattgctcatttctttgatgtattgaaggaaagcccaacactgctttcacaattcaatttgaccttaaggatagaaaatacgattggtgtgcatcagtgcgaattgggaagctctaagcaaaaagagctcttcctggagattaagaagacgtccatcgcagcaaatgaagagcagatggttgcaaatcatgaacccaggaaagaaaaccgcaacgtcatcattttgccatat

SEQ ID NO: 25178 - DNA, 372 bp, Legionella pneumophila
ttggttgcttgtcgtttaatagaaaaagcctataccaaaggacatactatttttgttttttgcgacaatcagcaacaagcagaataccttgatgaattattatggactttcaaagacgacagttttattcctcataatttgcaaggtgaaggaccggagcctcctcctcccgtacaaattggctatcaaaaagaacccagaggctttacagatatcctgttgaatttatccaccaatattccaattttttatacccgatttaaaagagtcattgaattggtgagtaatgtagaacatgagaaagaagtgagtcgattgcactataaagaatataggcataaaggctgtgagctgcacacacactccattgaa

SEQ ID NO: 25179 - DNA, 2404 bp, Legionella pneumophila; identical to SEQ ID NO: 25158

SEQ ID NO: 25180 - DNA, 1080 bp, Legionella pneumophila
atgactgctaaaactcctcttcacactacgcacttagcatgtggtgccaaaatggtggatttccatggttgggatatgcctcttcattatggatctcagttaaacgaacatcatgctgtcagaaacgatgctggcatgtttgatgtctcacatatgaccatcgttgatattttaggcgccggtggccgtcaatttctgcgcaaactgctaaccaacgatgtcgatcaaattactcataatggaaaagccctatacagctgtatgtgtaatgaacacggcggaattatagatgacctgattgtatatcaacgcgcttccgataattaccgagtggtacttaattcggcaaccaggcaaaatgatgtggcctggattcgcgcaaaaagtgaaggatttgctgttggcttacaagaaaggcgcgaattatcaatgctcgctgtacaaggtccaaatgccatagcgaaaacattgagtattcttgcacccgcccatgtagatgccgtttcgactcttacctctttcgaatgcgttgatgtggatcactggttttttgctcgcaccggctatacgggggaagatggccttgaaatcattgtccctaatgaatttgttacccaactctggaatgatctcctgcatgctggagtaacgccatgtggattaggggccagagataccctgagattagaggcaggaatgcttctttacggccaggatatggatgaaacaacaaccccactggaatctggtttggcctggacagtaaagtgggagccggaagatagaggatttatcggaatgggcgctttggtttctcaaaagcaacaaggaattaaacgtaaaatggttggtttaaccttgttggacaaaggcattatgcgtcatggccaaaaggttattattgaaggctgccctgatggaattatcacaagcggcagctattctcctaccctgcagcaatctatagctttggcacgagttcccatggaaacaggggaacaagtacttgttgatatacgcggaaagttaatccctgcaaaagtagggaagcctcgctttatcaaacaaggaaaacctgtt

SEQ ID NO: 25181 - DNA, 1038 bp, Legionella pneumophila
  misc_feature (6)..(44): n=g, a, t or c
ttggannnnnnnnnnnnnnnnnnnnnnnnnnnnnnnnnnnnnnntttatatagagtaagggttcttgctctctccaatgaacagataaatagtttcgattacaagtctttaattactcatagaatcaagcaagccagtctggtgagacgatgtcttgatttaccaaatgaacagactaatgcttatcgattgttcaacagtgaagcggatggactctctggtttaacgattgattgctttaatgactattgtgttatagcaagttctgcctattgggtagaattgaataaatcgattattgttcatgtattacaagagttactcccgcataatcatatcatttggcttcctcaaaacaagccattatctcaagatggctggaaagaaattcatacagagaaaagtcagggtagcactcaggttttggaagaaggtgttctgtatcatgttgaatttgcgcaaacccaaaaaactggattgtttcttgaccaaagagaaaatcacaaaaggatagcaaaactatccaggggaaaaagagtcctggatctttatacttttacgggagggtttgctttgcacgcagctaaagcgggagctcttcatgttacggctgtagatagctcggtgcaggcaatagagcaggctaaaaataatgctgttttaaatcacttaaataccattgaatttattaaggcagatgccagagaatatctgaaaatggctggcgaatatgatgtggtcattcttgacccgccaaaactggttccttcacaaaaacatttacagcaagctaaaaattattaccgatttttacatagagaagcatttaaatatatgaaaccaggatctttattgatgacttgcaactgttcttcagcgctgtcatcccaggatttttgttccctggtaagcgctcaggctgttgcgatgggaaagcaggcgcgtattttaggcgtatacggaccagcaagctgccatcctaccttggcagcttttccagagggaaattatttaacagctattttattggcattggta

SEQ ID NO: 25182 - DNA, 2277 bp, Legionella pneumophila
atgagtaaacacttggtgatcgtcgagtcgcccgcgaaagctaaaacaatacagaaatatttaggaaatgactatgacgtgttagcgtcttatggtcatgtgcgtgatctgcctgcccgtaaagggtcagtaaaccctgaaaaacatttttccatgacttatgttcctattgaaaaaaatgcgagacacattgatacgatagcaaaaactcttaaaaaatcagactctctactgctggcaactgaccctgatagagagggagaagctatctcgtggcatatttttgaattaatgaaagaacgaaacctattaaaggacaaatcagttcatcgaatcttttttaatgaaattacaaaagcagcaatccaggatgcaattaatcatcctcgctccatatccatggatttggtgaatgctcaacaagcccgacgcgctcttgattatctggttggctttaacctgtcccctttgctatggaaaaagattcggcgaggattatcggccgggcgagtacaaagccctgcccttaggttaattgttgagagagaagaggaaattgaacgtttcatcgctcaggaatactggaaaataatcgcaaaatgcgctcatgccagcaccgaatttgaagcacgactgacccattataacgaagagaaacttcaacagttttcagtcactcaacaagaacaagcccatgaaataaaaaagcaactgatagcacaagcacaaggctttttaaccgttgctcaaattgataaaaaacagcgtaaacgtaagccatctcccccctttattacctctaccttgcaacaggaagccgccagaaaattaggtttcaccgcacgaaaaaccatgatggtcgctcagcaattatatgaaggtattgatataggcacaggaacggtgggtttaatcacttacatgcgtactgattcagtcaacctggcaaaggaagcgattgacgaaatacgcgactatatcacacaacgttataagggggataattgcccgaattctcccagaatttacaaaactaaatccaaaaacgcacaggaagcacatgaagccattagaccaacttccatcaaaagaactccagaaatggtgcaaggttccctgacaagcgatcaattgaaactctatagcttaatctggaaacgcacagtggcctcccagatggctgatgccatcctggatacggtgagcgtggattttagctgtggtaaagggaataccttcagagccaatggttcaacaatagccttccctggcttcctttctgtctatgaagaaggacgagatgattctaaagacgaagacaatgaagataaaattttacctgctttcaatgtaggtgaaaaaataaaagtatcggatattgaaaccaatcagcattttaccgagccacctccaagatattctgaagcaactttggttaaagctcttgaagaatacgatataggcagaccatctacttatgcctctatcattcatactttgcaacagcgtgaatacgtggtagttgaaaaaaaacgttttttgcccactgacgtgggtagaattgtcaatcgatttctaaccaactattttactcgctatgtcgactatcagtttaccgctggccttgaagacaccctggatgccatcgcgcgtggagaaaaggattggatccctgttctggaagagttctggcaacctttcgtccagcaaattcagaatatagatgaacaagtgcaaagaaaggatgttactacggaattattagatgaaaaatgtcctaaatgtcaaaagccattgtccattaggctcggcaagagagggcgctttattggctgcacaggatatccagattgcgattacactcaggatataagcaatccagaaggagaaaaatcagaacctgaagtcgtggaaggcagaagctgccctctgtgtcatggagccttgcatattaaaaccggtcgctatggaaaatttattgggtgcagcaattatcctgaatgcaagcatatggaacctttagaaaaaccctccgatactggcgtcacatgccctaaatgcagccaggcaaaaattctgcagcggaaatcaagaaaagggaaaatcttttattcctgtggaaattacccaaaatgcgattacgctctgtggaatgaaccgcttgatttgccttgccctaaatgtgcatggccaatcttaaccttaaaagaaagtaaaaaatttggtcgtcaaattctttgtcctcgcgagggttgtgattactctgccaaggaagac

SEQ ID NO: 25183 - DNA, 219 bp, Legionella pneumophila
atggcaaaagaagatcacattgaaatggctggtactgttatagatacgctacccaacaccatgtttcgcgttgagttggaaaatggacatattgttacggctcacatttcaggtcggatgaggaaaaattatatcagaattctgactggggataaggttaaggtagagctgactccttacgatctttcaaaaggtcgtatcatttttcgcgataaaggc

SEQ ID NO: 25184 - DNA, 2448 bp, Legionella pneumophila
atgcgaagggaaaatacgaaatcaaatatagattttaaatctatatttgattccctgccggatttataccttttattggacagggattttaatatcgtcggagtcagtgatgcctacttacaggcaacaatggtgagtcgcaaacaaattttgggaaaaaatgtcttcgatgcttttcctgataatccaaacgatccaaaggcaacaggtgctaagaacctatatgcatcgctactaagggttctaaaaaacaaatcagcagatacaatggctatacaaaaatatgatattcagagacctgcagatcgaggagggggatttgaagaacgttattggagccctattaatactccggttttaggggctgatcaggaagtggaatatattattcatcgtgtggaggatgttacggaatttgtccacttaaaaaaaactggttcagcgcagctgaagctgatggaagaactgcgtaccaaggctggggaaatggagattgaaatctatcagcgtgcccaggaaattcaggaagcaaacaagcagttggaagaggctaataaaaatctggctagacttgatcaaatcaaaacccaatttttcgctaatgtcagtcatgaacttcgtaccccattaatgctgatactagatcctctggaaatgttgcttgctgaaaaaaagcttccctcatttgttcagaatacattaaggcgcatacaaaataatgctcaaattttactaaaacatgtcaatgatttgctgaatatatcaaagctggatgctggcaaaatgattcttcattatgccaatattgatttggtaaaattaattcaacagacaattgcattgtttgaggctcagattcccgaacgcaagcttgttttttcaatggatttgcctgatgaattgcaagcacaaatagatcccgacaaaatccagcatgttttaatcaatattttgtcaaatgccataaaattcacaccacaaaatgcgaaagtaaggattagattagtgcaaatcaatcctgaaacatgcaggcttcagatagaagataatggaccgggtattccttctgatctttgtgaaactatattcgagcgtttttttcagattgaggaatctacaactcgtacggtagggggaactgggttgggtttatcgattgcaaaagatttcgttgagttacatgggggttcaattttggcagggaatgctagaaatggcggtgccatttttaccattgagttaccactaaaagcgcctcaaaatgcaaaggtttattcttcctatagccagctattattgggggaaaaagaaataagcgcgagtcttgctgaattcagaaataaagtaaaaccaattaaggagggggctgaagagtattttgaacaggattattacgatagaccgctgatcctggtagtagaagacaatcaggagatgaatcattttatttgtaaaatattgaacactttttatcgtactgaaagtgcttttgatggtcgggaggggttgcaaaaatcgcttgctttacatccagatctcattgttagtgatattatgatgcctcatatgagcggtgtcgaaatggtgcatgctattagagaacaccccctgctattgaaaactccaattattattttaactgccaaagcagacgatgaattaactgcacgtatgttggaagaaggggctcaggattatgtgataaaaccattctcggccaaggaatttaaagccagagttgctaatttgattttggtgaagaaagctgaagatgagctggatcaatttgtctatcacgcatcacatgatttaaaagcgcctctgcctgctatggagcatttgatctcatggattgaagaagatctgggtgaaatgctttctgaacaatctaaaaaatatttactgctcttgcgtcaacgtgcttcacgaatgtcaaagttgctcgatggattgcttaaatacgctcaatcaggatatgtttttgataaggttcgtacaattcacactgatagattgattactgatatcataaagaaattgaatcctccgcagactgtcacgtttcaactcgaagatacactaccagtattgaatacttgcgagcttcctttgagagaggtttttacagcgcttctcgataacagtatcaggcatcatcaccgtaaagatggacatatcatcattggtacaaaagaaaaggatcggttttatgagttttttgtagcggatgatggccctggaatagaaaaaaaatatcaagacagaatttttcaattatttcagaccttacaacccagggacaaacttgaaacaagtggtgtaggtctgagcattgctaagaaaatagtcgagtttcaaggaggtaaaatttctgtggaatcagaaaaaaacaaaggcagcgtctttcgttttttatggccaaaagataaggagattggcgatgcgtgc

SEQ ID NO: 25185 - DNA, 3360 bp, Legionella pneumophila
atgatgacaaactcatggaaagataaattgcaaaagcaattaactcagcaatttggctccccaaaagggaaacagctcattgataaatacaccgaaacaatgtcaatgagttatagtgaacaacatactcccgaagaggcaatccaggacattttacagatagaaaaactctccaaagaaaatcccctggttatcgatttttatgaaaacactcactcacaatatcctttgcacattaaactttatcggtatgaaaccccaatccccctatccgacatcttgcctatgcttgaaaacatgggactgcgcacttataccgaacgtccttataaaatcaaaacacgggacgggcaattattctggattagtgattttaacgtaacctattctcaaaccgattcaatcaacattactcaggtcaaagatatttttgcagaggcactgattagtatcaatcttggtatttgtgaaaacgatggttttaataaattggtattatgcgcggggctctcctggcaagaaataactattttgcgagcctatgcaaaatacctccatcagattggtattcgttacagtcaatcttacattgaaaaaaccatcgaaatgcatgcggccattgcccgtgagctgattcacttcttttatttgaaatttggccttaaaaggaaatctgctattcacaaggacatattggcactagaacagaaaattcaaataaacattgatgcgattagcagcctggatgaggatcgcatcatgcgttatttttggtctttgatgaaagcaactcttcgtactaattactttcaaaaaaatcacgcgggattatctaaagattacctttccttcaaattaaaatcctcggaaattcctgacctacctccaggtcaaccgctttatgaaatttttgtgtactcaacacgttttgaaggaatccatttacgtagtaccaaagtagcccgcggcggtattcgctggtccgatcggccagaagattttcgaaccgagattttaggacttatgaaagcgcagaaggtaaaaaacgcagtcattgttccctctggcgccaagggaggttttgtcttgaaaaaaccgcttcatgcagccagccgcgagcaaatccaacaggaagtcatctcttgttataaatcgttcatcaatggtttactggatctcaccgataatttaatcaatgataaaacaatccctccacagaatgttatatgttacgacgaccctgacccttatctggttgttgctgctgacaagggaacagctactttttccgatattgccaatagtattgccaaggaacatggattttggctaggtgatgcttttgcttctggaggttctgccgggtacgatcataaaaaaatgggtattacagcacgtggtgcgtgggaatctgtcaaaagacattttcgtgaacttgatatcaatattcagcaacaagactttacggtagtaggtattggtgatatgagtggtgatgtatttggcaatggcatgctttattcaaaacatatacggctgttagctgcttttgatcatcgtcatatttttctcgacccgaatcccgaccctgtaaaatcctatgaagaaagacttcgcctgtttaatttacctacttcatcctgggaagattacaacttacaacttatttctaaaggcggaggcgtttacaaacgctcaagcaaatcgatccccattagcccgcaagtaaaaaaagctctcgctatagatgcaaatgcccttacgcccaatgagcttattcgagcgctgttaaaagcaccagtggatttactgtttaacggcggtattggaacctatgtcaaagcaaccacggagtcacatgccgatgttggcgacaagactaatgaattctgccgtattaatggcgcagaattacactgcaaggtagtgggagaaggaggaaatctgggttttactcaacttggacgcgtcgagtttgcattaaagggcggtcttattaacactgatgcgattgataattccgccggcgttaactgctctgaccatgaagtcaatatcaaaattcttttagataaagagattagagaaaagaaactcacagaaaaaaaacgcaatcaattgctaagcagaatgacagacgaagtcgccgatcttgttttgcaagacaactacaatcaagccttgattttaagtatatcggcagctcattcttctcattatagtggcttatatcaagattacatgaaagaattggaaaagtgggttaaccttgacagaagcgttgaattccttcctgacgataaaaaactcctcgaacgcaaaagcactggcgcagggctgacaagaccagagcttgctgttttaatggcacacaccaaaattcatattgctaacgaattattaaaatcgcatttacccgatgactcatacttcacaacttttttggaaacaggttttcccatctcgctacgaaagccctatgcgaaagccttgccaaaacaccctttgtctcgtgaaatcatagcgacgcaactgagcaataagctggttaacaacatgggaattaccttcatgtaccgcatgctgatggaaaccggtatgtcgattgctgatattgcctgcgcttacactatttcagcctgtattttccaaacggatgtcttacaaaatctgattgattcatttcaagataaaatatccttatccacccaatatgaattattgcatcacattcgccaattgctcaacttggcgacacgctggtttttgcataataatcgactgaccggaggcattgaaaaaaatattaaaaattatggcaagtcagtcaaaaaacttgaactgttgattcccaagctcatgggtggtgtcactaaagaataccttgagaaactcattagccaattcgtcagtattggtattgaaaaggatatggctcaaaaaattgctataactcgggctctttatacttcattaaatatcattgaagtagccacgcaaaatgaatttgatttatcgcttactgcagaaacttactttaaagttggtagtcaatttaatctcgtttggtttcgcgaccaaatagccaatgactcacgtgaagggcattggaataccatggctcgcctgtctttgcgtgatgagttagataatctgcaaagacgtttgactattgccattttaacaactaacaccaaagaacgtacttctgaaaaattgataaactattggctggaacaaaatcaccccattcaaaaacgctgggaaaagttattagaaatgttattgggtagcgaaaacatagattacaccatattttttatcgccttgcgtgagctttcctctttaattcaagtattg

SEQ ID NO: 25186 - DNA, 432 bp, Legionella pneumophila
atgaagacatttagtgcaaaaggcaatgaagtcaagcgtgactggtttgttgtcgatgccagtgaaaaagttttgggtcgcttagctacagagattgctcgtcgtttacgtggcaagcataaagctgagtatactccccatgttgatacaggcgattacattatagtcactaatgcagaaaaggttattgtgactggtcgcaagtttaaaaacaaaatgtatcatcatcatacagggtttcctggagggatcaaatcggcatcctttgaaaaattacaggataaaaatccaacaaaaattattgagcttgctgtaaaaggcatgttgcccaaaaacccgttaggtagagagatgtatcgcaagttgaaagtatatgctggcagcgaacatccacatactgcgcagcaaccgaagcaacttgagattgaggaa

SEQ ID NO: 25187 - DNA, 2340 bp, Legionella pneumophila
atgcaaaatcttactgaaacccttgatttttcttctttgaatcgtggagaaattgaaaaattactgcgcgattataatttaaatctttctgtagatgaggcgttgactatacagaatgaattcctcaaaagacccccgactatttcagagtgtgtactttggtctattcaaggatcagaacattgttcttataaaagcagccgtattcatttaaagcaattcaatacctcaggccctcacgtgatactgggcgccaaggaggatgcaggtatagtatctgtagcccaagataaaaatggttatagatatggcgttattgtcagtcatgaatcacataatcacccatctcaaattgttccctatgaaggcgcagctaccggagttggtggtaatgtccgtgatgtctgttgtatgggtggggaagttatagcagtagcagacagtttgcgtttcggagatatcaaacgtgcacgtactcactggatacaggaaggggtggtttcaggtattgccgggtatggcaatcctttgggaataccgaatatagctggtgatgtgtactatgatccggcctacaatgaaaattgtttggttactgtagtcactctggggatagtaagagaggatcatattatacattcttatgctccgcccgaagctgagaactatgtttttattttagtaggtaagccaactgataatagtgggtttggcggcgcgagctttgcctcaacagtattggaagaagattcacaagaaaagaataagggagctgttcaagagcccaatgcttttttacagagacatctccttaaagctaattattcattatttcaattactaagagaaaagaatttaattgacaaggtaggctttaaagatttaggagcaggtggcgtggcctgcgcaagtatcgagttggctgaagccggcggttcttatggcgccgaaattgatctggacaaggtacccacaggaatgccaggattaatgccttcagtcattctatgctctgaaactcaggagcgttttatgtgggttgttccccctgatttagtagatactatcctgaaacactataatgaaaccttcgcgttaccacaggtttctgaaggggcatgcgctgcagttatcggcaaaattcgtaccgatggattatacgtggtgaattacaaagggcgagaacttgtgagagctaaagtccctgatgtcacgaaaggcattgtttataacaggccacatgcctcttcgcagaagcaaaacacagaaccagtttttctcccaccagatgattataatcaaattttgttgcagttattggcccatgagaatatagcgagcaaggaacctatttttgaaatgtatgacaagcaagtgcagggtcgcaccctcatacaagcaggatgggctgatgctggagtattacaaccatttaatgaatcgaagtatcctgaggaaattcgtaaaacaggtattgccttgtctttagatcaaaatccccgctataacaaaattgatgcctattggggagctgttaacgcggttgtcgaatcggtacggaacatcactgcagttggagctactccagtcgcaataacagattgcttgtgttttggtaatccggaaaagccagaacaaatgcgcgaatttgttgattctgtgcgaggaattagtgatgcctgtgccgctgttcatctgaaagatcatccccaatcaactttgcctgtcattgccgggaatgtctcattgtataatgaatcagtgaaaggggctattcctcccagccccatgattagttgcctgggaacgcttccagatattgattttgctattacctttgattttaagaaaagtgatagcctattgatattgattggagagcgtaaagacgaatgtggtggtagcgtttattatcaactccataatgaattgggttctaatgttccaaaaccggatttaagcttgtttaatagagaaatccatgctgtttcatcggcaattcagcatgggttggttaacgctgctcatgatgtctcagagggaggggttgctgttgctcttgctgagatgagttttaagaactccctgggagttgctgtacagattaatggagagttatctgcggacaaacttttatttggagagacaggcggttttattcttgaaatcgataaacaacataaagccgcttttgacaaactggttactcaatatcaagtcccttacatggttatcggacatactacagagcagccagttttacagatgaattcggttatcaacttgcctgtcgaagaagcgaggcaggcttgggaaaatggcttaagagagaggctatta

SEQ ID NO: 25188 - DNA, 846 bp, Legionella pneumophila
atgctcagttatcaacatggctatcatgccggaaattttgctgatgtcatcaagcacatcaccctaactcgactattggcttatctaacccacaaagataaacccttattctatcttgaaacccattcaggtcgagggatatatgatttaaaagacaagcagtctttaaaaacagaagaatataaggaaggaattaatccagtatggctcgatagagagaatctcccctctctttttcttgaatatattagtgtaatcaagcaaataaatcttaattcaacattgagttattatcctggttccccctatttcgcaatcaatcaactgcgctctcaagaccgattatacttatgtgaattacacccaacagaatataatttcttattaaaacttcctcattttaataaaaaagtttatgttaaccacacggatggagtttcaaaattaaatgcccttttgccgccaccggaaaaacgtgggttaatttttattgatccctcatatgaaagaaaagaagaatacaaagaaattccatacgctataaaaaatgcttactcaaaattttctaccggcttatattgtgtttggtatcctgttgtcaataaagcatggactgaacaattcttgaggaaaatgagagaaattagttccaaatcggtaaggattgagcttcatttgaatccactcattaatgaaggaatgactggttgtggtctttggataattaatcctccctatactttcccttcagaaatcaagttagttttagagacattaacaacttattttaaccctggctcatcttcttatatgattgaatcaggttcaaaattatgtcacgagtta

SEQ ID NO: 25189 - DNA, 960 bp, Legionella pneumophila
atgaataaaattcgttgtgcagttattggtgtgggttatcttggcaggtttcatgcccaaaaatatcaactaattcctaatgcagagttagttgcagtttgtgatgtaaactctacagtctgcgaagtggtatccagtgagttaaatgttccggcatacatcaattaccatgacctgtttggcaaagtagacgctgtcagtatcgcagcgactaccaacaagcattttgaaattgcaaaattctgtatacaacatgggatacatgttctgattgaaaaaccgattactgaaacagtgtcccaggctgaggaactgattcgacttgcaaaacaacatcaggtgaagttacaagtaggccatttagaacgcttcaattctgctcgccttgccctggatgaatatctggaattaccattatttatagaatcgcagagactcgcaccttttaacccccgtggaactgatgtaaacgtgatacttgatttgatgattcacgacatagatattattcaaaatatagttcagagccctattaaatccataacggctcaaggagcaccggtattaacaaaagcaattgatatagctaatgcacgcataagctttgctaaccactgcgtagcaaatgtaacagccagcagaatcagtttcaaaacggaacgaaaaacaagaatctttcaggagaattcttatatttcaattgattaccaaaacaaacagcttgccgtatttaaaaaaggcacgggagaaatgttccctggaatacctgatatcaccagagatcaaagggagtttgaaaaaggagatgcgttactggaggaaatcagagctttcttaaattgcatagaaaatgatagcgtgccgcttgttacaggtgaagaaggaagggatgctttgaaaacagctgaacaaatcaccgctttaattaataataaccttgtagaacgctatgccgaatgc

SEQ ID NO: 25190 - DNA, 684 bp, Legionella pneumophila
atgagcaaaactgagagactctttcatctgttgcaaattttgcggcgttatcgttatccccttagtggacaatttcttgccaatgagctgggtgtcagtacccgtaccatctatcgggacattgcggctttacaggctcaaggtgctgatattgagggtgaaccaggattgggttatgtgttaaaaccaggctttatgttaccgcctttgatgtttaatgaagaggaaattgaggctcttgttttaggctccagatgggtagctaaaaaaacggatactcacttgcaacaggctgctcataatgccttggctaaaatcgcttctgtacttcctgccgatttgcgacagcaattggagctatccagtttattaatagggcctggtgaagtgatttcaggagaagatgaatctctcgcattagtcagaaaggcaatacgaaaagaactgaagttgtttattcaataccatgacttaaaaggaaatgtttcaacgcgtacgatttggccaattggacttgggtattttgatcaagtaagagttttgattgcctggtgtgaattaaaaaaggattttcgtcattttagagctgatagaattgtagatgttgaaaacttgggggtctgttatgcaaagcgacgctcggtgttacttcatgattggcgaaagcaaaataatatcccaggc

SEQ ID NO: 25191 - DNA, 987 bp, Legionella pneumophila
atacatacttctaatgtctttcatattaaagaacaagaattattagccgccaaactcacttcaatggcacgaatggagcaggttttttttgctaattctggagcagaagctaatgaagcagccattaaacttactcgtctgtttggtcataaaaagggaattgaaacgccttctattattgtaatggaaaaagcatttcatggtcgcactatggccaccttaactgcatcaggcagtcgtaaagttcaagctggttttgaacccttggtccctgggtttattcgtgctcccttcaatgatcttgatgccattcatactattgcggccaacagagaggatgtggttgcagttatggtagaaccgattcagggcgaggggggaatttatcccgcagaggaaggttatctgcgtgcattggctaacctttgcgagcagaatgactggatgttaattttggatgaaatacaaacaggaaatggcagaacaggtaagctttattcttgtatgcattacgacatacaacctgacattcttactacggcaaaaggacttggaaacggtatgccaattggggcttgtttaatgagcaagcgagctaaagatttatttaaacctggaaatcatggctcgacttttggtggcaaccctttagcttgtgcaacggctttgactgttctggaggtcattgaacgagataagctatgtgagcgcgtcactaaaaacagtgctttgttaatggataaattaattagcaacctgggagagcatccccatgtaaaagctatacgtggtaaaggttatatgataggaatagagttggacagacctgcaaatgacatgcgcgtcctgggtttggaaaaccaagttttgttcaatattacagctgaaacagtagtaagattattacctccacttattatcagtgaagatgaaattgatgaattggtcaatcgaataactcgtactattaaccagttcaccaatcag

SEQ ID NO: 25192 - DNA, 957 bp, Legionella pneumophila
atggggatactaattgatggtatttggcacgatgaaaacaatataaacacagacaaagaaggacgttttgttcgtgctgaatcaggtttccgtcagcacattactgcgaatggagagagtgggtttaaagcagagcctgatcgatatcatttatacctgtcctatgcttgtccctgggcatgccgaacgttaatcatgagaaaactgaaaggattggaaaaaattatttctgtttctttttcagatccagtcatgggtaaaaatggctggagttacggcgaatcaggtaatgaaacagccgatcacatcaatcatatccattatctcaaagagttgtatttggttgccagaaaagattataccggtagagtaacagttcctgttttatgggacaaaaaaaagaaaacgatagtcaataatgaatcatcagaaatcatgcgcatgttgaatagcgaatttaatgcctttagttctacagatcatgactattatccaaaacaatggcgccaaaaaattgatgagattaatcagcttgtctatgaaaatattaacaacggtgtttacaaatgcggcttcgctaaatcccaaaaagcttatgaagaagcatttgatgcgttatttaataccttaaatcaaatagaaaacctattggcaacacagcgatatttgctaggagagcaactaacagaagccgactggcgtttatttacaacattaattcggttcgatgccgtgtatcatggtcacttcaaatgcaacttgcagcggattgccgactatccgcatttatccaattatttacgagagctttatcattttcctggtatcaaagaaaccgtaaattttaatcatatcaaacaacattattatcgaagtcatttaagcattaatcctacgggaattgttcccaagggcccaaaattaaatttggatgaaccacataaccgctatgaattc

SEQ ID NO: 25193 - DNA, 1911 bp, Legionella pneumophila
atgaatataaaaacatatctaagaaaaaataatttaaccttacgatttgttggatggttctttttaataaactcattcatattttggcttgttggcttggggtatttaaagtccattttattaaatgcctccctgtttaaaaattatatcgctgattattcaagcctatcaggaaaaattctcattctggttttctcagttttaaattattttacttatatgatgtttttagcttttgtccctgcaataccaatcataataatggcattttttttaccttataaacgaataatttggattatcagtgttgttgcggctgccacaagtcttatttttttatttgttgatagtcaagttttttcaatgtttaagtttcatcttaataaaacaatattatcgtttatttttaattcagattggagtgtcattttcactttttccagatatgaactgattttgtctttttttatgattgtctttatactctttctggagtctattgttgcctggttggtatggaaaaaaatagttttaaaagaacgtttgaaaattggtaaaactatttcattattttggcttggtggggcattaataagttattttatattgctcttatcgatagctcaaaataataatttatttgctcagcaaatacctaatttgcccctttataatcaactcattgcttatactatccctgataaaaacgcggatgatatattacgccgctacagtgagcaccattttacacagcctcttttccccaattatccattgcattatcccttacatcccatgcaatgtaagatgcctgaaaaaccttataacattatccttataatggtagattcacttcgctatgattccctaagggcaaaatatatgccgaatacggcacaatttgcaaaaagaagttggcaattttctcagcatatgagtgctggaaatgccacacaaccaggattgttttctttattttattcgattcccagtaattactcgacggcagtcctggagcaaaaaaaatcaccagttttaattgatttattattacaacatggttttcagacaaaaattatttggtctggctctatggctccactgccattagatcagactatttataaaaaaattgccaatctcaataccaatggagcgccaatagacgataccggagacaaggacagatattccaccaaggaagctatccaatttttaacagatcctaaaacaaataacccattctttcttcacattttttacaatgcgccacatgactattgtagatatcaaagttttccgcagttatacaaacccgcaatagaagaatgtgtacgaattggaatgacaaatcatgttgatccagtaccttactacaatcgttatttgaatgcagtcacatttattgaccaggaaatttcgaaagtattaggggttatcgaaaaaaaaggttatttaaaaaacagcatcattataattacctctgatcatggccaagaatttaatgataatcgtcaaaattattggggacataccagtaattttacccctattcaactacacgttcccttgattattcattggccaggggagttagctcgtcgttttaattatctcaccagcagctatgatattgtacctacaatattacagcgtttatttgcttgcaaaaatcctgtttctgactacagcatcgggtataacttgctaattgagggcaatcgagcctcatttctattggtaggaagttatattaatatgggaatttttgaagcagatcgagccacagcattagaaacctccggaagaattacaattactggtatgaaggcagagcctcttgacgatgcggtacccagagtggatgttattacccaggcattggatttgatgcgcaagtattatgggaaa

SEQ ID NO: 25194 - DNA, 1071 bp, Legionella pneumophila
atgtattggagattcgctaaatcaatgtctattactaaccgcttattactgatatttattggttcaaccgtactgatattgtctattatcacagggttaatctatcctccaatgaaagaattactccatcatactcatttgaataatgagcattataattatttattaacacgaatttgtattaaaaatttctttgttggactctggttttctactttgataatcattcttgccagttatttgctcgcaaaaaaaagcatgaggccaattaaaatattcactaaagaacttgcatcgattaatgcttcatcactagagaaacgattaccttacacagggaatcccaaagaactggaagaattagcttcgacttgtaatgacatgctctttcgaatagaaagtgcatttagccatataaagcagttttcagccagtatagctcatgaattacgaaatcccattcattacctcagaactgccaccgaaattaccctgactaaaccacaaacgattgaaacctatcaacatgtattacaaacgcatctcgaagaatatcaaagtttaacccaacttatagataatctgatctttttaactcgctgtgagcacggccaacttcaattaaatttaagaacattatctgcaaaccacttaatcagttcaattattgagtattattattcaatagctcaagaaaagggcatagaaattcaagtttttggtgaggctcagattgaagtagatgagcatttatttaagcgcgttatttcaaatttaatagacaacagtctgacctataccaacaaaggcggaagaatactaatcatcatagaaaaaagaacagacgacagcattcaaatccgtataaaagacaatggaattggtatatcaaaagaacacttacctcttttatatcacggattttatcgagtagattatagtactaacaaagaaaacgcaggccttggtttaggtttggccattgctaaatcaatcatggaacaccataaaggccagcttgcggtagatagcaagataggtttaggcaccactgttatattaaccctacca

SEQ ID NO: 25195 - DNA, 627 bp, Legionella pneumophila
atgagaatattggcagtaatcccggcaagggctggctcaaagaggctgcccggtaaaaataccagattacttgccggaaagccattaattgcacatactattgttgctgccttgcagtcgtcttgttgtgaagaaatcgttgtttcaaccgatagtaaacaaatagcagacgtcgccgttcaatatggggcttcagtaccctggctaagatcggaagatttagccacggatacttcggatgtgattcatactgttattgacctcctgtttaagtttcagcaaatggatgttttttttgacagtgtattgctgttacaaccaacttctccatttaggaagccagaaaccataagacatgctgttgaaatacataaagtaacggggaaaagtgtcgtttcagttagtcccatctctttaaagccttcttggtgtagaagcattgatagccaaggcaatttggttaagccagaactttttcaggatctggaaatttattgcaacgagaatccaatttataaattaaatgggtcaatttatattgcaacagctaaacaaattattgaaaataagagtttttatagcgaaccaaccaaacctttattgttaaatagtatgactctagagatc

SEQ ID NO: 25196 - DNA, 573 bp, Legionella pneumophila
atgaacagttttacagaattagctaatgcagtacgcatgttaagcatcgatgcagtaaaccaagctcaatcaggccaccctggcatgcccttgggtatggctgatattgccaccgttttatggaaaaaatttctaaaattcaaccccaaaaacccgcactggtttaacagagaccgttttgtattatctaatggccatggttccatgcttctctattctttactgcatttgaccggatacaacttggatattagcgagcttaaaaacttccgccaattgcactcaaaaacaccagggcatccggaacatgggcacactcctggtgtcgaaacaacaacagggccattaggtcagggtttagccaattcagtcgggatggccttagcggagcgtgtgctggctagtacctttaaccacgatcactttaacctggttgatcattatacatatacttttgccggtgatggttgcctgatggaaggcatttctcatgaggcgtgttctttagctggcactctaaatttgggaaagctcattgtattttatgacgacaatgggatatctattgatgta

SEQ ID NO: 25197 - DNA, 1233 bp, Legionella pneumophila
atggataccaagggtattttattagctccttttttctttatttcatttatgttttttattccgatcagtcccacgataaagtctatttgtttcatttgcagtttaattgccgtattgattactccacaatacagaaaacatattgtttatgcttataatactttgtggggacgcgctgcattttgtttgtttctctttgtcgttattgcaagtttatggagtcctgcgccttattcaatgcaatggatggttattggtaaatattgtaagttaatttatcttcccattttagctactggttttattaatcccaaagtaagaaactggagtatcaatagctatttggctgctatttttattacttgtgttatttccatcttaaaagctaaaaatattattgcgtcagaagatccgggcgaggttttctacaatcatattattactggttttatggtggcattggcagcctatttagcaggattgctggcttttcaaagttcgggctggttgcgacttatttatatcttcatgatattactaaccagttaccaagtgctttttataaatactggaagaacgggttatttggtctactttattttgatgttattgcttttgatacaaaaattaaacttcaaacaggctttagcagggattgttctcttcagcggcatcattgctttggcatatcatcatagccctgtaatgcaaaccagaatttatgatttaattcaggatatcaagctattaaaacaacataataaaaatacatcgataggctatagaatgcagtttcatcactatgccaagcaattgatgttgaaacatccttttattggaataggcacaggtggatttaaatatagttattcacaagatgtacctgttccaagttggggtaaagagttgacagatccacacagtcagtattggatgactttggctgagcaaggtttaattggtctggtacttttgataatatttttagcgagtttgtttattacatcatttcaattgactagctccagacctattcttttaggtgttttattttctttttgtataggctccatttccgacacgattttatgctattcgactgcaggttatttgttggtagtgatgagtgcattatgttttggtgagttaattgagaagcgtagagtcaaggacgcaaaagaagaccatcctgctcttttatcagcccatgctccagcagcaataagtcagacc

SEQ ID NO: 25198 - DNA, 561 bp, Legionella pneumophila
gtgagtacgttaaccagtttgcctaatatattaaccttaatgcggatttcgatcattccagtatttattatggtattttattttcctttcaaatgggctcatcctaccgctgcggttctttttgctattgcaagcattactgattggttagacggttatttggcgcgcaaacttgaaatgatgtctcattttggagcttttcttgatcccgtcgccgataaattattggtatcgacaagcttgttattgttagttggagcgaaagatatagattatatcactatacctgcaatcgtaatcgttggacgagaaatcgtgatttcagctttgcgcgagtggatggctgaagttggacgtcgtgctagtgttgccgttgggtatatagggaaagttaaaacttctttgcaaatgatcgctttggtattattgctggcatttaatccccttgtttcttggtgggggagcttagggtttgttcttctttatgtgtctgctattttgacgatttggtccatggtgatttatttggctattgcttggccagagttaatgaaaaaaagt

SEQ ID NO: 25199 - DNA, 1182 bp, Legionella pneumophila
atggaacataatgatgtcgtgatagtcgcagcaaaaagaacaccaatgggagctatgctaggcaatttatctgcactttcctccccagagttaggggcagtagcgcatatggcagcgttgtctcaatcaggtattgctccggcagaaatcgatgaagtgatcagtggttgtgtattacaagctggtattggtcaagctcctgccagacaggcagcaataaaagcaggcatacctaattcgacaggagccacgaccattaataaaatgtgtggttcgggcatgaaggctgtgatgcttgcgcatgatttaattaaggcaggtacagctaatgtaattttggctagcggtatggaaagtatgagcaatgccccctatttattatccaaagcacgagcaggatatagactgggtcatggtgaactgaaagatcatatgttccttgatggattagaagatgcctatgataaaggacaattaatggggtgtttcgctgaaacaactgcaaaacactttaatttcagcagagaacaacaagacgaatatgccttacgctcaatgaccaaagcgctaaaagcaatagagaatggtgcctttcgagaagaaatcgctcctgtcaccttaactacccgcaaaggagatatcacggttgacgtcgatgaagggcctgagacagccaaacttgccaaaatacctcagttaaaaccagcctttcaagcagatggtacagtcacagcagccaattcaagttctatttcagatggcgcggccagtttaattttaatgagtgcctcaaacgcagaaaaacgtggcattaagcccttggcaaaaatcatagcacacgccagccattcccaagccccacaatggttcacaaccgctcctgttgatgcaatccgtaaggtaatgaacaaagcgtcatggaaacaagatgatgtggatctttttgagattaatgaagcgtttgcagtagtagcgatggcagcaattactcagcttgaattgaatccggaacaagtcaatatacatggcggggcatgcgctttagggcatcccattggtgcttcaggagctcgcattctggttactttaatgcatgcgctaaaacaccagggtaaaaaacgcggaatagcttctttatgtataggcggtggtgaagcaacagctatggcaattgagctaatt

SEQ ID NO: 25200 - DNA, 183 bp, Legionella pneumophila
atgggaaaaaaaattaaaataaccttggttaaaagcacgataggtagaaaaccaaagcatgttgctatagccaaacagctgggtttaggtaaaacaaattcaagtgtggttcatagtgatactcctgcaattcgtggacttgtaaatgaaattaattacctgttgttggttgaggagagtgca

SEQ ID NO: 25201 - DNA, 990 bp, Legionella pneumophila
atgacaatacgagtcgcgattaatggctatggccgcattggccgttgcattttaagatcgatttttgaatacaacaggcaaaatgagtttgaagtcgttgccattaacgatttatctggcatcgatgtgaccgctcacctgactcgctacgattcaactcacggtccttttcgctcggatgtgagcatagaaggaaacatgctgattgttgatgggcatggcattcaagtgattgctgagcgcgatccggccaaactgccatggaaacaattggacattgatatcgtctttgaatgcaccggtttctttaccagcagagatgcggcaatgggtcatatcaatgccggcgccaaaaaagtattaatatctgccccggccaaaggcgttgatacgacagtggtctatggagttaatcactccgtcatcaaagcgtctgatgtcattgtgtctaacgcttcctgtacaacaaactgcctggcgccagtagttaaagtgttaaatgatgccataggaattgaatcaggattagtcaacactgtccatgcttatacaaaagatcaaatgcttttggatggaagccataaagatttacggcgcgcccgctctgcaacgcagtccatcattccaaccaaaaccggcgctgccgcagccgttggattggttttacctgaactggcagggaaattggacggatttgcgatgcgagtaccggtattaaacgtatccgttgttgatttaactttccaggcaaaacgcgcaacttctgtggaagaaatcaatgacatcatgcgcaaggctaaaaaccgaattttacaaattaatgaggaccctttagtttcttgtgacttcaatcacaatcccgcttccgctattttcgacacaacggaaaccaaagtgataggcaatttggttaaagtagtagcctggtatgacaatgaatggggtttctctaaccgcatgattgataccgcacaccaaatgatgaactgc

SEQ ID NO: 25202 - DNA, 831 bp, Legionella pneumophila
gtggcgctttttatatttctaatactagttggttatttaatgggctccattaattcagctatcatagtgtgccgtacgttcgggctccccgacccaagagaagagggttcaaaaaacccaggggctactaatgtactccgtcttggagggaagcagtacggtattatggtcatggtattcgatgctttaaaaggtatacttcctgtcatcctggccaaatttttaagtgccgaacctgtaaccgttgcctttactgctttagcagccgttgttggtcatatgtaccctgttttctttcatttcagagggggaaaaggtgttgctacaacaataggagccttgttagcatttcattttataattggtgtcatggttgccgcgacctggttactggtagcaaatttctggcgctattcctctttagcatcaatagcttctatctctttagctcctttttactccttaatattggtgggtaatcttaatattttccccccattattcatgatcaccattctggttctctacaaacacagagataattttaatcgtttgatagatggaaaagagcctaaaatcaagttcaaacacagtgtgatagaggaaataatggaggcttctccagctacttctgcagagcaagagtttcctggcaaagaagtcattgatacgaatattgatgaaacagaaaagacagaacaagctgaggctgtaaaaaaaccaaaagtcaaaaaagcaacaacaaaagcaaaaaagacaaccagcaaggaagaaacaactaaaaaaccgaaatcaaccaaacctaaaacgaaaacagtcaaagaaaaggaa

SEQ ID NO: 25203 - DNA, 597 bp, Legionella pneumophila
atgagctacgatcttattgaagatgctccttttgtttcaatcagtgaagcagcaactgcactggatgcttctatcgacaccataaggcgttgggaaaagaaaggattaataaaggcacacaggagtgatacagggcatcggctgtttcaaataactgaactccaaaggttaaaagccaaattgtttggtgctggtgatgatcattgttataagatattaacagcccctagcaggacacaattcaaggtagttgaactatttgctggtgctggtggtttggcgcttggtttccataatgctggtttagattgttcaatgttggttgaaattgataagaacccagtcgaaacgttaaggcataattgcccatcatggaatgttattcatgatgatattgcaaatgttgacttccaaggaattactgctgatgtagttgcaggaggatttccctgccaggcattcagctatcctaataaatatttccggttatctcctggagctgaagtacgcttacgtcatgcctatgttataaagtgccaggaagttatccgtaatgaccaaggcgaaataacagaattgcattgcacttatgatgaa

SEQ ID NO: 25204 - DNA, 2115 bp, Legionella pneumophila
atgggatatcattttttaacagaaggaaatgggattattgcatgttatgacatgtacccaactcagtttcattctattaaggacatgattaattatttgcctgtcttaaagcagatggggtttaatgccttatggattaatcccatgcaaatgcccggtgacattagcggcttttttaaaacggataaaaataatggtgtaaaaacaggaaatgaggtcactagaagcttatatgccatgagtcacccgttattatttaatcctcaattcagtttgggctcccctgaagaccccatggggacaacccaacgattaaactcagaagctttacagttattcactcaaaatgcaaggaacctcggaatagttccaatgtttgatctggttttaaatcatgtcgccattgattctcccttgtgtcaggataagcctcattggttcaaaggagttcatgaagacttcaaagatgttcgcggcttcaattacgatgatgaaagcataagaaaagaaataataaccgaattttggcaaccttatatcaaacgttacatgatcgagtacggttttgatggtgttcgagtcgatgctgtaggttatgtacatcctgcagtaagaagtgaaatatatgcctatattcactctcttgctgctgaatatggtaaaccaaagccggttatccttgatgaagctttatttagtaaacgaccacttgcggatgaagtaaattatttgaaattacccggcataggcccaactcacatcactacagaagcttataatgttgaatttgatcttgccagcgctgatctgccttatgaaataacattggaagagcagttaaaggcgagtgtagtcttccaacaaaaagatggaacatggcgtgaaaacacgaaggggggctgcattaatttttgtgggaatcatgactatcgctcattggcgatgactattttatttcaaatggccaaaaaaagactggaatctgacgctttttataatgacttaatgtcttcctatcaagacttgtactttaagtttaacgccgagcaagaaaaaccacatgaactcaaggagcctttgaaaacaaccttactttactcttatgttgatcaaatcaaaaaggagttggaagataataaagatgaaacaacacaagaatttaaaactctggtattagaaaaactggctttatccgctcttacagccagtggcggatggtttttattatctggtgatgaaacatgcgatatcactgcaaaaacagtatttcagagaaaaggtgctgttgataaatcttattacccacaacgtgaacatcgtatttttagtgaaaaaccagttattgctcacaaaattttagaaaaaatggcagaagagaatttcttcatagaaaactcggaaaataagtggatgcaggaactttacagaagtttatcaagttttcctgaaatgcaaaaacgtcttttagtatctcatattgataatattaaacaccaaataaatgccggcatagatcatgtacaagaaaaattttccaggctacttgccagtgaaaatttaaatataggtttcacatctcaagattttttagagaatccaagaacccacgaaaatggatggcttggattacagaataattttctatttatcaaacaattaaatacattattaaaaagactacctgcatcactacccggattctccagtgagttggttcgactccctgaaaaaccgcatctcattattatcgtaagaaaaaatggtaatgaattaaatgctccaattgatgttgttgttgttaaccttgaacaggaaaaacgacaaacattaactaaagaagattttcaattaattgccaaaaactattgtaatcaatatttttctaaaaatagaccgagtgtttgcgatagtttacgcgaaaaattatattcccatgttttaaaatctgctgtaaataatcgagtccatacagacaccagtattaaactgaatggaatccatttatttgagtttaaagaaacttcgttaaacactttttttacaattgaaaaagaaaaaaactattctcatggaaatgaagacaatactgctttgactggaaatacaatctcgcat

SEQ ID NO: 25205 - DNA, 1905 bp, Legionella pneumophila
atggagtctgtattttcaggggaaagtaaatttcttctgcatcatgtatcgattcatatgaatatttcaacatacgagttcgttaataatacaattactgaggagtcacgagtcatggcgttatcagaaatcattatcaatgatatagttcaatctcaaactaatgcagtcattagcgaatcaaattaccatattcttcgccaatatctcctggagagaaagcctttatcaagagtactcaatccaattaattctctgctttctgagcattgcaatcaagataagcaagcaataataaatcacttaactcaactggcttgtgagtctcaaagaaatcatgacttacaagaagcaagaagtgatgaacaagagggaatcaatgaaaattctttgatgattaattacaggagcgagctgcttactttggaaaatacattgaaggaactggatacaaaatgctatcaacaacaacgtcaatataatcaggtgagcaggcaatttaatgaacttaaagtcaatatgacccacattaatcaaagcattgatagagttcgttatgaacgtcaattgcttgaccagcagctaaaccacccttactctgatggtaatgtttatactaatcctcctactcacacaggtatttatcctgatctttcaccacctcaggatcggcatactcgtgatagactgttgcaagaagaaaacagattaattgaggagcgtcaaaagctaatgcatctcattaattcaaaagaaaccgaaaaaaataaagaagagcaaaatttaaataggcttcataaggagaaaaaagaagctgaaggacgttatagtgaagtaaaacatcaaatcgatgttgttttgccaaatagtgaacaacagcgtcaaatcagaaatcaagaacgtctcgctcgagaaaatgccagagcaagctatgatccacatttattgcaactttctcataagaatcttgaagcactgaaatctcagattgaaactcagattcgggagctggatgagagacgaaatcagttaatgggcgaagcgacagacataagttataaaatctatttaactcaattggagcaggttcttcaagaatcggaaaaagggcctcaaattacgttcaatgagaataatgcattaaagatgattttagccatgatgaaaaacatggaggaaatggcggaaaaagagaaagacatttctagctcaatcgataaagagcgacataatctccattcattgcaaaaaagccttgtaggatacaccaggcaactggaacggtatctgacgtcagatccccatttggttaagcaaaacaaggctcttaccgaagaaaatacacagttaaagcaatatagtgaatcagcagacaattggagaacgaaagcattctatgcgtctcttttcagtgttgggggtagtttaataagtaccggaatattgaatacattcatcattagtcctgtattttttgcgattcccggtgctcttgctgcgcttggtgtggtttcccttgttattgcggtagtctcttattgccagaaatactttagtgatatgcaaatggaacaaaacaatcaaaagattgagaaaaatgaattaatactaatgaagcaatggaaaaaggctaatgaattaagtttatctacaattccaagcctgaacgctaaaatagaacaatcagagaaagagctgtatgcgcttgagcaaaaattacaggatcagcagcacgcaatgagcctgctgttgaataaagcgcaaaatgttaccagcaattatggaggaagcagcaatttctttggtaacacgactggtaatgtgttctatttaccttctgcccctctgcatgaggactctccactgtatccagagattgaaggtgaaagagtaaattacggctac

SEQ ID NO: 25206 - DNA, 570 bp, Legionella pneumophila
atgctccataatactaaaataaacaaactcgctgtcttttgtggatctaacactggttattctgaagtctataaacaatcagctgaaaacatggccgatgtcctaagcagtaatggtattaccctggtttatggtggctcaaaaagcggtttgatgggaataatagccaatcgcatgttaaaaaatggctctaatgtcattggtgttataccaaaatctctggttgacacagaaaaagcacatgatgggttgacggaattacatgttgttaattctatgtatgaaagaaaaatattgatgtgtaaattgtcggacgggttcattctgctgccaggtgggtcaggttctctggatgagttttttgaaatgtttaccctggtacaattaggataccataaaaaaccttgctgtgtactcaatgcctctggttactatgattaccttttgcaatttttagactatgctgttaatcaaggttttttacgctcaaaggatcgaaacgcgctcattgtcaatcaatatccagatacgctcattgagaatttatttgaagtaatcaataatcgcaaa

SEQ ID NO: 25207 - DNA, 1869 bp, Legionella pneumophila
gtgcctatgaccatgaatgaccaagatcagcaaagctcacaaattacgaaagtcattagcctgggtaaagagcaaggttatttgacttacagtcaaattaatgacttattacctaatattgtggatacggagcattttgatgtaatcattagcatgctggaaggcatgaacatcaaagtttttgagcttccacccagtgaagatgaacttgcgctcttattaaatactgaagaagtcccagatattgaagaagcagccatggtactcgcctctgtggataaagaaacaggtagaacaactgacccggttcgtatgtatatgcgcgaaatgggtacagtagaactgctgactcgtgaaggtgaaatccgcattgccaaacgcattgaagaaggaatttaccaggtcctaaaatccctggcgcattatccggaaacagtgcaactggttcttgaagactatgatcgtttccttgccgaagaaattcgccttaatgaaatcattagtggttttgcggatgttgatgaagaaatagcacctgccactaacattggctccatgctggatgaagagcaacaggaagaaatacttcttgatgtggatgaggaagatgaagacggcgaaggtggtatatctgatgtggatgatggacccaatcctgagcaagcgaagatttactttgatgaactgcgtgaagcctttgaaaaggcaatgaaagccctcaaagaacatggccgtacgaataaaaaaacggtcgagttgctcgattccatgtcggaatcttttctgaaactcaaattgacttccagacaagttgataaattaactcgtcattttcgccaattgcgaaatcatatccgtgaatttgagagaagcattatgcgtctttgcatcgaaaaagcacgcatccccagaaaattgtttatagataccttcccaggccaggaaacagatctaggctggttagaaaccattatcagcaaacatgccaaaaaacttgatcttcagcgtatagaagaaaatcgggaagaaatactgcgcttacaatccaagttggcctcttttgaaatcgaatatggtttaaccattagtgaaatcaaagacattaaccgcaagatgtctattggcgaagccaaagcaagacgtgctaaaaaagaaatggtcgaggctaacttgcgtctcgtgatttctatcgccaaaaaatacaccaaccgcggcttgcagtttcttgatttgatccaggaaggcaacatcggcctgatgaaagcagtcgataaattcgaataccgccgtggctataagttttctacctatgcgacctggtggattagacaagcgattacacgatccatagccgatcaggcgcggactattcgtattccggttcatatgattgaaaccatcaataagctcaatcgtatttctcggcaaattttgcaagaaactggccgggaagcgacaccggaagaattggcggaaaaaatggagctaagtgaagataaaattcgcaaagttctaaagatagccaaagaacctatttccatggaaacccctgtcggtgatgatgacgactctcatctgggtgattttattgaagacaacaacattgaatcgccaatcgatatggctacagcggaaggtttaagagaagccactttagaaatactggaaaccttgaccccacgagaagccaaggttctgcgtatgcgttttggtatcgaaatgaatacagaccatactctggaagaagttggtaaacaatttgacgtaacccgcgaacgtattcgccaaatcgaagcaaaagcactacgcaaattgcgccacccttcacgttcagaaaagctaagaagcttccttgaaggagacgaaggt

SEQ ID NO: 25208 - DNA, 741 bp, Legionella pneumophila
atggaactctcttggaccactttttcattagaactcattaattttcttattctcatttggattttgaaacgctttctttatgcgcccatacaaaaaaccatattagaacgaaaaaaaagagtgcaagaacaattagagactgcggaaagactgcacaggcaagcaacgcaattgcaaacaacctatgaacatcgtcttaccgattggcaacaagagaaagcgaccctacaaaacgagtggcatgaggcaatggaacaatggaaatcagaagaaagactccggtttgaaaaacaattgcatcaagaaaaagaacagattttttcccatgaaatgcaaaaagccgcagccatcattgaaaacaatgccaaggaagcgtttctattggctgggaaatttgctgaaaaattgttaatgccttttgcggatgcccatcttgaagagaaaatcatcaaaaaaaccattgaggagctccatcatattccgacagaacaatggcaatggctccatactgtgcctgaagaagaaaccgtttcaatacaaacggcctaccccatcaaagaacatcagaaacaggatctcttgcaagttattgaacaattgtcacctaaaaaaattacagtctcttttacggaaaatccaaagcttctcgcgggattaaccctgcaaatgggccccatgtgcttgcaagccaatcttcgtgatgaattaaaattctttatagagacaaaaaatgaattggtc

SEQ ID NO: 25209 - DNA, 297 bp, Legionella pneumophila
atgaacgtaataaatatattaaaagcgctttctaatgaaaagcgactacagataatcagatggctaaaagagccagataaacatttcagttcgtcgcactgtgatgtgagcaaagatggtgtttgtgttggcttaatagaaaaaaaatcaggcttatctcaatccacggtatctcaatatttatcacaattacagcaagctggtttgatattcactgagcgtagaggacagtggacctattgtaaggcgaatgcaagcctaattaatgaatttataaatgaattgaaagttatgatt

SEQ ID NO: 25210 - DNA, 1308 bp, Legionella pneumophila
atgagagctcgtggtgcccaagcaactgatatagtcattctgatcgtggcagctgatgatggagttaagccccagacaattgaagcgatacagcatgccaaggccgctaaggtaccaattattgttgcaattaataaaatggataaaccggacgctgatcctgagcgagttatgaatgaactatccgttcaggaagttattcctgaggcatggggtggagataccatgtttgttaatatttcggccaaatcgggtatgggtatagatgatttgctggatgcaattttattgcaatcagaagtattagagttaaaagcagtgactgatggcgctgcaaaaggagttgtcattgaatcacgtctggataaagggcgaggtcccgttgcaacggttttagttcaaagcggaaccttgcataaaggcgatattttacttgctggctttcagtatgggcgtgtgcgtgctttggttagcgataatggagatttggttgatagcgctggcccatccattccagtcgaagtacttgggttatcggctattcctcatgcaggagatgaagcggtcgttgtccccgatgagaaaaaggccagagaagttgctttgtttaggcagggtagattccgtgatgtgaaattggccagacgtcaaaaaaccacaatagaaggtattatggaaaatatgacggctaccgaatccaaagtcttgaacattgtcttgaaagcggacgttcaaggatcactggaagcaatttctgatgcattgacaaaattatcaacagatgaagtcaaggttgatgtgatatctagtggtgtaggtggaataacagagtctgatgtccatttggctatcgcttccaatgccattttaatcggatttaatgtaagagcggatggcacagcaaagcgtcttgctgaacaagaatctgtatcgattcattactatagtgttatttatgatatagtcgaccagatcaagggtgctttgacaggcatgcttgcgccacaatttaaagaagaaattgttggtattgctgaagttcgagacgtattcaagtcgccgaaaattggtgctattgctggatgcatggtcattgaaggcgttgtcaaacgtaataatccaatacgtgtattgcgttcaaatgtagtgatttatgaaggtactttagagtcattaaggcgatttaaagatgacgtattagaagtaagacaaggctttgaatgcggtatcggcgtaaaaaactacaacgatgtgaagcctggggatttaatcgaggtttttgagacagtcgaaattaagcgtgactta

SEQ ID NO: 25211 - DNA, 1191 bp, Legionella pneumophila
atggtatttaaatcaaggttagttggcattattttattgtgcttttcaagtattactggatggtgtctttctcagtcccctgaagaagatagaatcattgtttcaaactgcctgtatgagcaattaaaagacaaagccaggttaattgcgcaatcggatcactttagcttcattgccattccaattgatgaaaatattaccaatactctacaaaaaatgagaccagtttgtggaaattaccttaatgctgagccatatatccaacaaacctccaatcgttttctcgattcgaaaaaattattggataaactgaccagctaccactccatctcaaccgcaaacccatacccgattaatcatgaagcacaagtccatagtttgttcgaacaaattgacccggcaaaaatatggcaaaccaatcagcatttaaccagttatatcaaccgctctgccaaatccagaacgggagtagaggctgcacaatggtttaaacagcaatttgataccttagctcaagattatggaagaaaagatgtagagagctacttcgtcaaaaccggaaataaatttatacaaccctcagtcgtcactgtaattggaaaagataaaccgggagaggccattgttataggggcacatattgacacactggacggcaatatgcctggtgccgatgatgactctagtggaatatccgttgaacttgaaatggcaagagtggtattttcatcgaactttgagctcaatagaccaatttattttatagcttatgctgctgaagaaagaggacttatcggctctggatatgtggtacaagattttttacagaaaaaaattccggtgaaagcagtaatgcagttagaccaggcaggatacagggctaacgccaaggaccaaacgatttggctgttaaaagattatgtagataagggtttaactgaatttacagcagaattattaactcgctatgtcaaaactcctgttggctatactaagtgcggttatgcatgcagcgatcatgtgaattggaccaatgaaggctttaaaaccacctatccgtctgcaactactttagacgatgataatccttatgttcatacctccaatgatactttggatattctgaatctggaacatatggttaatttcactaaattaggcctggcctttattgtagagcttggtttaaat

SEQ ID NO: 25212 - DNA, 762 bp, Legionella pneumophila
atgacttcctattataaccgctctgcaacaaaagatacgggtgttgatacggccaattggttaaaatccaaatttgaacagatggccgttgagtatggacgaactgatacctcgaccttttttgtaaaaacagggtggtataaacaaccttccctggttaccgtgattggcaaagacatcaaagcccccgctattgttattggtgctcatatggatactcttgatggccgtatgcctggggctggtgatgatggaagtggatcatcgagcattatggaagccgcacgggttattttgtcttctaaaacaacatttaagcgccccatttattttatttggtatgctgctgaagaaagaggtttggtcggttcacaacacgtagtccaacactttcaggaacaatcaattccagtgaaggctgtggtacaatttgacatgaccggttatcgaaatgatgccaatgatccaactatgtgggtatttactgattacacagatagagatttaagtaattatttggccaaattaattgatcattatattcatgtgccagtagattattcacgatgtggttatggttgcagtgatcatgcttcctggaatgaagaagatattcctgctgcattcccatgtgaaaccagtttcgctgatcacaacccatacatccatacttcttctgataaaatggatttattgaacctggaacatatgaccaatttctccaaactcgcggtagctttcgctattgaactcgcttccgag

SEQ ID NO: 25213 - DNA, 750 bp, Legionella pneumophila
atgttaaacattaaagaactcaatgttgctgtcaatggacagtctattttaaaaggtattaatcttgaggttaaaccaggagaggttcatgcgattatgggacctaatggttcaggaaaaagtactctctccaaggtattggctgggcatccttcttatgaagtaactcgtggtgatatatcctatttgggacaagatttattgcctatgtccccggaagagagagcgcgggccggtatttttatgtcttttcaatatccggtagaaattcctggtgtaaccaatatcaattttcttaaagcctcagtgaatgcggttcgcaaaggacaaggaaaaaacacccttgatgccatagagtttttaagttttattcgggaaaaatgtcagctgctggatatggatgaaagctttttataccgaagtattaatgagggattttcaggtggggaaaagaaacgtaatgaaatattgcaaatggccgctttggagcccaagctagctattcttgatgaaaccgactccggcctggatatcgatgcattacgaattatttctcaaggagttaatgcgatgcgctctcccgagcgttctattattttagttacccattatcagcgcttactggattatattgagcctgattttattcatgtcttggcaaatggtcgtattattacgtcaggggataaatctttggcgctggaactggagaagaagggttatagctggcttgaagaagtggagcagtta

SEQ ID NO: 25214 - DNA, 671 bp, Legionella pneumophila
  misc_feature (88)..(88): n=g, a, t or c
ggacagggtcaaaatattttacatgatgtcaattttgtattgaagcaggaacgtctgttgctctggttgggcattcaggaagtggtanaacgaccatagccagtttattaccccgcttttatgaattgagtcaaggtatgattactttagatggcatgcccattcaacagcttagtctggaaagtttacgcaagcagatgtccttggtcagtcaaaacgtgacactttttaatgatactttggctaacaacatagcctatggtcgttttgatgcgagccgagagcaaattattactgcggctaaactggcctatgctgatgagtttattaagcaattacctgatggctatgataccagggtcggagaaaatggggtgttgttgtcaggcggacaaaggcaaagaatagcgatagccagggcaattttgaaagatgctccaattttaatactcgatgaggcgacttcagctctggatagtgagtctgagcattatattcaggcggctttggagcaagtgatgaaaggtagaactactttaatcattgcgcaccgattgtcgactattaagcatgctcacaagattatcgtattgcaacatggtcgtattgttgagcaaggtagtcatcaagaattacttgatatggatggtcattacgctcagttgtataaa

SEQ ID NO: 25215 - DNA, 201 bp, Legionella pneumophila; identical to SEQ ID NO: 25040

SEQ ID NO: 25216 - DNA, 1146 bp, Legionella pneumophila
atggccgatgaagaacaatcacaagaaaaaacggaacagccttcttccaagcgattaaaagaatcacgaaaaaaggggcaggttgcacgttccaaagattttaatgcaacggtcattttattatttaccggacttggtttctttatttttgggaaacaattatcactgcaaattgccagtataatgcaacaggcgtttgatttcgatcgtgacattcttgttaccgggaataattctttagaaaatttgtttcaattaacaaaatcagggctttggtctgttgttccactattgcttgttatttttattttgtctttgctagcaccattgcttatggggggatgggtttttagtggacagtctatacagccaaaattttctcgattaaatgtacttaaagggcttaagcgcatgatttctctcaaaggatttgttgagatgcttaaggcttttttaaaatttgtcctggtggctagcgcatctattctagtgcttagatcgcaagtacccttgttgcttgagttggggaaagcaccattagaaatagcaatcactagtggggtaatgatccttttaaaatcttttgtgctgatttctgcaagtctgatattaattgcggcaatagatgttccattccaattatatgaacatagtaaatcgattaagatgactaaacaggaattaaaagatgaatacaaagagacggaaggcaaacctgaggtaaaaagcgctatacgtcgcgcacagcaggagactgcaagacgacggatgatgagtgaagtacctaaagccgacgtcatattgactaatcctacgcactatgcagttgctcttagttaccaaaagaaaggaaaaaaggctccagtggtgattgccaagggtaaaaacctggttgcttttcagatatccaaggttgctaaagagcataagatccctattatttcagttcctgcactagctcgcgctatttatttttcaacaaaactgaatgcagaaattcccagagggttatatgttgctgtggctcaggtgctggcctatatttttcagctacgtgacaggcaacgttatgattataagcctgaaattttacaaaatgtccctattccacctgaactggctcgcgaagcagaggaggagattgaa

SEQ ID NO: 25217 - DNA, 2127 bp, Legionella pneumophila
atgaataaaacttggcatcaaaccgccactggaaaccgctccattttaagtaatttgcgattaagcagaactctacttaatatcatctttattattgccctttctctgcttttaatcatcaatattatttcttataaccaggtcaaaaatttaatcttcgccagtaactgggtttctcatactcatgaagtcatccaaaccatagatacatgcctttatgatatagtagaaattgaatctcgccagagattttacttgattcgaggttcaagctctcagcttatggctgatatagatgatatgaaatcaacattacaactgaatttagacaaacttgagcaattaaccagggacaaccccgaacaaaacaaacgaatccatcgttttattgatttggttaaacaaagattaaatttgttaaaccaacttgtacagttaaagggaagcggcaaactcgatacacaagaaggttatgatttacttaaccaaagtcaagacatgtcacatcaagttaaaagtcttggacaagaaatcaaatccgttgaattggtgttgctatcagaaaggaatactggtgtggttcgctgggcagttaccagtagttttattttaatatccggaggtattgcaagcatcctgtttttaacgctcgcttttattctggcaaatattgaattgtcaacacgcagaaaaactgaactacagaatcaaaatacgcaaatacggctgaagaaaattatagaaagtgccagtgatatgatagcagcttttggcaaagaccagcgatttattacttttaatgaagcttatcagcgtgagtttaaacgtctttttgataaatccataagcatcaatatgtctctggaagaagctttcaataatgctcctgaaaacaaaaaaaaattagtgcaatcctggaaagaatctctacaaagagatgaagaaaccaaaaatatcgaagtgaatacagaacaggaaaagactatttatgaaatgacctccaaactcatccaaaacggcgacaatgaaattaaaggtgtggtacacagcgttcgcaacattaccaaacgggtgcaagaacatactgaactacaagagtcgtatgaaaaactggctaatggaatgaaagaactgcaagagaaaaatgaacaaattactctgctggttgagatgagtgacatcatgctggcttgcggctcccaggaagagctaagtgaggtaatggcgaaatactcccaacgactactgcaattttcaagcggctacctgtttatcatgcatccttccaaaaattatttggaaaaagcagccagttggggtaatcctcacccgcacgatctgacttttaccccagagcaatgttgggctatccggcttggtcgaattcattatgcaggttcatctcgtatcgaattgatgtgtagtcatatgatgtttgacgagcaacccgagttgtctctgctttgtgtacccctaatggcccaaaatgacatttacggcttgttataccttgaagttggcctaaagtttgatgaaaaccagcaattactaataaccgcattcgcagagcttaccgccttggctttggcaaatgtccgccttagagaaaatttacgctatcaatctatccgtgatccactcactggattatacaatcgccgttatctggaagattttctatttaaacaattacatcaggctgaacgaacaaaagcctcatttgccattttaatgctggatttggatcattttaaaaagatcaacgatacctttggtcatgacgcaggagatcttgtattaaaagagctggggcaaattttaaacaatgatattcgcctcggtgatattgcagcccgatatgggggagaagaatttgtcctgctgctctatgatattaatgctcaagccgctaaaatgaaagccgaaaatttgcgttcggccatttccaatttacaggttaaatacggagcacaacctgttgggcagataacggcctcaatcggaatatccgtctatcctgacgatgccaaatcacctgctgaagtgattgaagcagctgataaggctttataccaagccaaaaacaaaggcaggaataaggtaattttattctcggaaatatcaccc

SEQ ID NO: 25218 - DNA, 795 bp, Legionella pneumophila
gtgcttcgtcgttttgcagtgataggtcatccaattgcacatagtttgtctcctgtcattcatcaaatgtttgcccaacaaacccaaattgaattgatttatgaaaaaatcttgggtgatgatgtcaagtttgaacaacaaatctctgatttttttatccagtatggcaacgggcttaatgtcactttaccttataaaaagcgcgcttatgaattagcaaaaatacgcacgcaaagatgcaccctggctggagcagcaaacaccctatggatggaggaaaatcaattacatgctgataataccgatggtattgggttgatacgtgatttatcccgatttcttgagttaaaggataaaaaaattctgattctgggggctggcggagctgcaagagggattatttttcctttattggaagcgaaaccgttacaattaattgttgctaatcggactttggaaaaagcagaagaattacagcgtcaatttcctcaaatcaatgtcacaagttttgctgaattaacagaattctttgatttaatcatcaatgccacttctacgagtttgtccggtcaggtcattgtattacctgaagaggtgttatcccataaaccattttgttatgatttggcttataatcaaaaaacaagcaccgcctttgttcaatatgctcgtaatggagggtgcgaagcagttgatggattaggtatgttagtagagcaagctgcggaagcattctttacatggaacaaagttatgccttctacccaaaaaatattagaacacctgcgatctttt

SEQ ID NO: 25219 - DNA, 543 bp, Legionella pneumophila
tcgcgactctataggatccccataccagctgtatttaatttacttggtccactgattaacccggctcaggtaaaacgacaagtagttggtgtgttttcaacgaattggctcaaaacaatagccactgttctggctaacttaggtagtgaaagatcattagtaataagctctcaagatggactggatgagattagtattgcagcgaaaagtgaagtagttgaataccgagatggaaattttaagcaatggttcatttctcctgaagattatggtctaaagcattcttctttagatgcaatcatagtcgactcaccagagcaaagcctgcatttgattcaatccgtactttcaggtgattctggcccagctcgagatatagtccttctcaattctgccgcagccatttattgtgccaaagatggcatatcgtttgatgcggccatagaggaagcaagaattgccattgatagtggtaaggcaaatctttgttttaacaaactccgattattgacccaaactttaaataaagaatcaaatcatgaa

SEQ ID NO: 25220 - DNA, 1575 bp, Legionella pneumophila
atgaatgatttgaaaaaaagcccattattaatattagattttggttctcaatacacccaattaattgcaagacgcgttcgagaaatgggggtttattgtgaaatttatccttatcatattaatcatgaacaatttaagaaattaaatccctgcggtgtgattttatcagggggtccttcgacagtaacgcatgatgccaatcccagggctcctcaatggctatttgatagtggtttgcccttgctgggtatttgctacgggatgcaaaccatggctgtacaactcggtggccaagtgcattcatcggcgttaagagagtttgggtatgccgagttgcgcttgcatggccatagtcaattattaaataatatcgaagatcgcatcctggcggatggcagcgcactattggatgtatggatgagccacggagataaagttaccgagttaccgccaggatttaaaattatatgtgaaacacgcaatgcgccaattgcaggtatggctgatgagagtcgtcaaatgtatggtttgcaatttcatccagaagttactcataccttgcaaggtttaagaattttacaacgttttgtcgtagatatttgtaaagcatcaacagactggactccagagcatattattgatgaagccattaataaaatcagagaacaggtaggaactgaaaaagttttactgggcctatccggaggcgttgactcttctgttgtagccgcattgctgcatagagccattggagagcaactggtttgtgttttcgttgatacgggtttactcagacttaatgaggcggagcaagtgctgagcatgttcggtcggcatatgggaatacgcattattgcagtcaatgccgaagataaatttttaactgctttgaagggagtaacttgcccagaggaaaagagaaaaattattgggcgtacatttattgaagtctttgatgaggaagcacagaaactgactgagataaagtggctggctcagggcacaatctatcccgatgtcatcgagtctgcagcaacaagtactaatgatgcggctgtggtcataaagtctcatcataatgtcggtggcttaccagatacattaaatcttaaactgctggaacctattcgtgagctctttaaagatgaagtacgtcaagtaggtctggaattgggactcccacatgatatggtctatcggcatccctttcctggacctggattgggtgtaagaattttagcggaagtaaaaaaagaatatgcggatatattacgtaaagccgatgctatttttattgaagaactgcataacgcgcagctttatcataaaatcagccaggcatttgctgtttttttaccagtaaagagcgtaggtgtgatgggggatggacgccgatacgattacgtaatttgtttaagagctgttgagacagttgattttatgacagcacattggtctcaattgccctgggattttttaggaaaagtatccaatcgaattattaatgaagtagagggagtatcacgtgtcacttacgatatttctggcaagccacctgctaccattgaatgggaa

SEQ ID NO: 25221 - DNA, 837 bp, Legionella pneumophila
atgatcgatcttcattgtcatagttctttttcagacggtgcactgactccagaagaactaataaaaagagcgagtactttacaagttgaatgcctatctcttactgatcatgatactgttgcaggatatgacgctttatatgacgctgcagtccatacaaacattaaaatagttaaagggatagaactcagtactcgttggaagaagtatgacattcatatacttggttaccaaattaatcacacagcagaattaaaagagttaattgctcatcaaaataaaagtcgaatagagcgtgctgagaaaattggagaatccttgcattcggttggtattgacaatgcttatgaaaaagccagtcttttggcaggccacaaacgggtgggtcgaccccattttgcccaagtactgattaatgaagggaaggcaaaagatatgaagtcggcttttaaaaattacctcgggagaggcaagtgcgcctatatacctaccttatggattagcatgcacgatgcggtcaaaggtatatctcattctggtggacaggctgtaattgctcatccacttaaatatggattgacgcgttcaaaattgcgtgacttaatcacggagtttaaagaggctggaggtgttggcatggaagtcgtttctggagaaatgacaactgtacaaattcaagaaatggccgggatgtgtgagcgatttcatttgctcgcttcatcaggatcagattaccatagtgacgctcaatcttgtataaatctggggcgccagagacaattaccaataatatgcacgcctatttggcaagaatggaacatgaaacaggggacttta

SEQ ID NO: 25222 - DNA, 456 bp, Legionella pneumophila
atgaaagcgaaagctattttagttagtggaaagcaaaacactgtattaagaggtcatccctggattttccccaaagccatagctcaatattctggcaagctaattacaggtgaattggctgagataattggctctgaaggtgagagtttaggattcggagcctataatgagcactctttatatagagtaagggttcttgctctctccgatgaacagataaatagttgcgattaccagtctttaattactcatagaatcaagcacgccagtctggagagacgatgtcttgatttaccaaatgagcagactaatgcttatcgattgttcaacagagaagcggatggactctctggtttaacgagtgattgctttaatgactatagcgttatagaacgttctgactattgggtaaaattgaataaatccgatattgttcatgtattacaagagccactc

SEQ ID NO: 25223 - DNA, 873 bp, Legionella pneumophila
atgcaagaaattgatgtccttatcattggcgctggtgctgcaggcctaatgtgtgctattgaagcaagcaagcgtaaaagaaaagtactcgtgctggatcatgccaataaagccgggaaaaagatactcatgtcaggaggtggtcgttgtaattttaccaattactacattgaacccaacaagtatttttcccacaacccccattttttcaaatcagccttatcccgttacactcaatgggattttattgaactggttaacaaacacaaaattcccttccacgaaaaaacattaggacaattattttgcgataataaatccaaagacatcgttgatatgttgcttaaagaatgtgagcaatatggagtggcgatttatttaaataccgtaatagaaaaaatacaaaaaaccaacgactattctttcaagataggcacgacaaaaggaaagtttcattgtcattctttggtcattgctaccggaggactttctattcccacaatgggtgccagtccctttgcctataaagttgcagagcaattcgctattagagtatggccaaccagagccggtctggtgccctttactttagatgttctcgaaaaagacagattatccatcctgtcgggaataggtattgatagcctggtcaataatgaaagaaatcaatttcgtgagcatatcttgtttacccaccggggactgagtggtcctgctatcttgcaactctcatcctactggaatcctggtgaaagtatatgcattaatttgctgcccgaacataacctcctggaaagcttgaaaacagcccgagcggaagctccgcataaacagttaaactccgtattatcgatgtacttgcccaaacgagtt

SEQ ID NO: 25224 - DNA, 258 bp, Legionella pneumophila
atggtcgttatacgtttatcacgagctggcgctaaaaagcgtcctttttatcacatggttgttactgacagccgcaaacgtcgcgatggaaactacattgagcgtattggttattttaaccctgtagcacgtggacaagaagtaaagcttcacattgatatggataaaatgacccactggcaaaaagttggggcccagttatctgatcgagtcagtgccttgttaaaagaacatagcaaaaaatcagagacagctgct

SEQ ID NO: 25225 - DNA, 420 bp, Legionella pneumophila
atgtctctgattagcctgatagcagccatagatgaaacaggaggattgggtattaacaaccaattactctgctatttgccagccgacttacagcactttaaatcgattaccatgggtaagcccattatcatgggcagaaaaacttatgaatcgataggcaaacctcttccaggcagactaaatattgtgattagtcaatcgattcagtcaatacctggtgttgttgttgtcgattctttgggccgggccataaaagagaccgctgacgcatcagaggtaatgatcattggaggagccaagatttattctcaagccatatcaatggctaatcgcttatatattactcgaatacaccatcaatttacggctgatgtattttttccaaaaatcaatgagttggcatggtgggcctcgagctcg

SEQ ID NO: 25226 - DNA, 1176 bp, Legionella pneumophila
atgttatctgtactgtcttatcgattaagtttactgccaaaattatcaaaaacttgctatttacttcttcttttttctttcttggaatgtgtagcaggagggattgcatactatctatcattatatttaggaacatcaacacccttaacaaaattacaaattggtcaggttggttctatcgttggatttggagcattagctggtgcgttatgttctacttacataacagataaactcaataataaaaatattataattgccagttttctctttctaggtttaggctttttttgtttacctcaaagcatgagttttctgcttatatcaggttgtgtcttcataattggttttgcaacaagtatttttcttaccacgaacaataccctcttattacaaaatgcccctcaagatcaaaatagccttcgctttatacaaagtatgaaaatagtcagtgaaaaccttggtaatagcttttctatattattaattatgttttttgcagcgcaatattacggtcaaatttttgaagtaattggtctatttttcttcctttttgcactgaataccatgaaatatttaaatgtaaagcaaaattcattagaagactcctcttatgaagaaaaagaaacaaatcaacaagggaataataaacgactttatgtaactattagtgctgtatttatagttggaattatctatgcccagcaacgaattgcatacccactttttttacatgaagctttttcaagttttactatcaccgcaatacttttctggttagatcctattattgtttctttatttcaggtcaaaataacaaaaatagtatccccattgaaaatatctcatcaattagcaataggagggttattattaggtacaggcttatttgcattattgatagtcgatagtattggaggtgcaatcatggcgtgtttgacgtttattttaggagaaatgttatttatgcctacttcctttgtacgatgctatgagtcagctggaaataagcgtaaaggcatggttgctggtgcatggagaagtgcttattcctctggtctgattgttggccctgttttatcaggtttcctcatggagtattatagttataatgcctgttggatattagccggaatacttggttttttcctatttattttatttagcgtcaaaaaa

SEQ ID NO: 25227 - DNA, 1365 bp, Legionella pneumophila
ttgaacagtgatagacgctttgcaataggtattttctattttgcagacgttgaggccaatgccttattttctaatacttttgttttgcttgtaaataatgatattgttatcagccttgttagaaatcattctaaaggatatttgatgcatcaggaacatccaggccaaaccgataccccaaaaatagatccttggttaatatttgtcatattaatgttgatggctttgatgcaaacaacaaccgatcaatacattccttctcttccagcgattaccacagcattgaacagcactgaggcgtctattcagttaaccatttctatgtttatgttgggtttaagcctatctcatatcttttatggccccttgtcagataaaataggacgcaaacctccgttaatgttcggtgttgggctaagtatattaggtagtttggtttgttttgttgcgcccaatgtcagtgtgttaatcttgggtcgatttcttcaggggtttggaattgggtgttgcaattcagtggggcgatctttagtgagagatttattcaccgatcgtttgctggctaaaattggttcttatgtcggtgttgtcagtatttttattatggcagcctcacccactttaggaggatttattcaggagatggctgggtggaaagccaattttatgttcttatttgtttttggaatccttgtttggcttttagcattttgtattcttcctgaaacgaataaacacttaaatcctgaagctacaaaaatcaaagtgatggcgaagaattatttcaccttattacgtagcaagatctttgtgggatatacaatgtgtgcttgctttgcttttgcgggaatggtttcttatcttacgattgcgccatttttatttcaaaataccatgggattgagtcccttggaatttggacgtttaactttttttattgcgggcgccatctgttttagcgggattgtcaacagtcagttggtcatgcgtaaaggaatatcctttatggtttgtaccggtgttctttttatgattgtcggtggtttaagcctgttattaattacgatactgggttggtcacaaatctattttattatgatttcaatgacattatttagtgctggcgccggatttacatttattaatgcctttgccggtgcgtttcatccttttccgcaaatggctggaacggttggggctttatatgccagcatgcaggatttaagtgcagcattgaccagtggttttattgcgggaattaaggggtatggtcaatattctttagctataatattactgattttaggtttaagttctttagtggcatggtattatcttggattgcaagatgacgctatttcaaat

SEQ ID NO: 25228 - DNA, 930 bp, Legionella pneumophila
atgtttatatctcaactaaaagataagctcgcatcctacgataggtataaagaacatcgtattaatggactaaaagcagtatttgttttggaactgatgattatattttactttttttcttccattgacaatccgtatttctattatttttatgccccaatcacatgttttactgtggaggcggcgggaacaaccctaaaagagaagtacatgcttttactctatacccttttaggaagcatactctctatattcttattcggcataatttctgtatacaacgtgctttttatttttttcgtttttttctataccttggctctttatttcctcgtgcttcaccattttaaaaaaatgcttgttattgttccattgatgctaagtttggcgtcctattccctgatttatggtgtggaggcagatagcaatttttatattgctattaataatgctttatataccttggcagccatggcggtaatcttcgctggattatttatttttcccaaaaagtattattttgatatttgggagcgtgcctttctcgaagtcattaccggcctggaatctctatctgcaaaaatttgtaagggagaagtcaaaactatcgccattttttcgggcattattgtgatggagcgttattccaaaatgctgccaagaaatattaagtgctacagtatattaaagataaccattttatcttttgagttaatcttgaccatgtcttacttgctgtcttttcaaaagcaactgcgtaaggaatacgttattgttttacatcattatcttgaacgtctttgtcaatcctgtaaagcgaggcaaccactgatactctcagaccaggagctgcctgcatttaaagaaacgcatgagttggaaattttgtatcaattaattttaagctggaattacttatgcgccgatggt

SEQ ID NO: 25229 - DNA, 642 bp, Legionella pneumophila
atggacttcaatcaagttaaggttataaatcatcctctcattcagcacaaactcaccataatgagaaaaaaagaaaccagcacagtaaaatttcggacactcatgcacgaagtcagtatgctattagcctatgaagtcactcgggatttggaaatagagtacgaagaaatagaaactcctttggccactatgcaatcacctgttttgaaaggaaaaaaacttgtttttgtctcgatattacgcgcgggtaatggtctactggacggcatgttacaattagttcctactgcccgaattggtcatataggtctctatcgagatcccaaaacgctggaagcagtcgaatactacttcaagctacctgaacacacacaagacagagatgttattgttgttgaccccatgctggcgacaggaaattcagccattgccgcggttaaagaggtcaaggcattacatcccaagtcaattaaatttctttgtctactggcctctcctgaaggaatttccaattttcatggagaacatcctgatgtcccaatattcaccgcagccatagatgagcagctgaatgatcatggatacattgttcctggtttaggagacgcaggagacaggctatatggcacaaaactggctcat

SEQ ID NO: 25230 - DNA, 351 bp, Legionella pneumophila
gtgtctttcaaacctgccgtagaattagtcaaattgcagcaaaataacagagaagtcgcggttattgatggccaaaaaatactgattatctggcatgataatcaagtacatgccatccagtcacagtgcccgcatttaaaattgccactgaccaagggaaaaattacagaatcctgttctatcatttgcccttttcataaaagcgaatttgatttgaaaaccggcgaagcgaaatgctggtccccctggcctcctgttgttggcaatcttttgggtaaagtgtcctcccggaagcatttaaaaatatacccaacccagatagaaaatgggcaagttttggttgatgtaggc

SEQ ID NO: 25231 - DNA, 392 bp, Legionella pneumophila
ggaccctattttaagcccctgagggaatggcatccagttcatttcaagatcttaatgttattttattagacacccgcaatgattatgaatacgaactgggtactttcaagaatgcaattaatcctgacatagaaaatttcagggaatttcccgactacgttcagcgcaatttaattgataaaaaggacaagaaaatagccatgttttgtactggcggaattcgttgcgaaaaaacgacagcctatatgaaagagctgggctttgagcatgtttaccaacttcatgatggcattctaaattacctggagtctattcctgaaagcgaatcactttgggaaggcaaatgttttgtttttgatgaccgcgttgcagtggatcaaaaattagatcgt

SEQ ID NO: 25232 - DNA, 366 bp, Legionella pneumophila
atgctttcagcggttatcccgtccgaacttagctacccggccatgccactggcgtgacaaccggtgcaccagaggttcgtccactccggtcctctcgtactaggagcagctcctctcaattttcctacgcccacggcagatagggaccgaactgtctcacgacgttctaaacccagctcgcgtaccactttaaatggcgaacagccatacccttgggacctgcttcagccccaggatgtgatgagccgacatcgaggtgccaaacaccgccgtcgatatgaactcttgggcggtatcagcctgttatccccggagtaccttttatccgttgagcgatggcccttccattcagaaccaccggatcac

SEQ ID NO: 25233 - DNA, 813 bp, Legionella pneumophila
atgaaacgttatgtttttatgctttccgatggtacaggaattacggctgagacattaggtaatagtctgattactcaatttgagaatattcaatttgaaaaaataacaataccctacatagattcaactcacagagcagaaagtgttgtactaagaattaatcaatgtttttcagagcaaggaaccaagcccttagtattcatgactttagttgatccagaaattagacaagccattaaaaaggcgcatgcctgtgtttttgatttgtttagtatttttattggaccattggaaaatgagcttgaagagaaatcatcttatacagtaggcaggactcatggggttgcgaatgtgaaatcctattcccatcgaattgaagcaatcgattttgccctttcacatgacgatggaataaaaacgcgtggttacgataaagcagatattattcttataggagtttcacgttgtggcaaaactcccagttgcttatatatggcactgcaatatggcattttagctgccaattatccttttacagaagaagatttggtgggttttcgcttaccagaggtattaagaccttataaacaaaaattatttggactaacaattgacgcacaacgtttgcagcaaattcgctctgaacgtagaccaaatagcaaatatgcctctgcagagcagtgcagattagaggtaacagaagtagaagccatgtaccaacgagaaaatattccttatatcaattcaacaaaatattccatagaagaaatatcgacaaaggttcttgctattgccggtttacaaaggaaaata

SEQ ID NO: 25234 - DNA, 282 bp, Legionella pneumophila
atgcgcgcatctcaatggtttttggtcactcaaaaagaaactcccaacgatgcagaaatagcatcccatcaattaatgctaagatcaggaatgattcgtaagcttggctcaggactttatacctggatgccacttggccttagagtgcttcgtaaagttgaaaatatagttcgggaagaaatgaacaaaactcatgccatggaactgcttatgccatcagtacaacctgctgaattatggcaagagacgggacgttgggaaacctttggtggtcaattatta

SEQ ID NO: 25235 - DNA, 1068 bp, Legionella pneumophila
atgaaaattattataaaagtcggaacacaaagtattttatcggtcgacggaagtccaatctattccgtactcaataatcttgtaaatcaaattatttatttaaagaacctggggcatcaggtcattttagtaagctctggggctgtgggctctggtcgaaaaatagctaagaactctctgggaaaaacatatggcgatacagtgggagagaagcaactcttggcttcaataggccaacccgaactgatgaatctctattctagcttgtttaaaaatgaaaacattttagtatctcagttattacttaccaaacaagacttccatactagacagcattatttaaatattgcccgtttattaacagaattgctaaagcatcaaaatattatccctattgttaatgaaaatgattcggtagccattgaagaattaatgtttaccgataatgatgaattagcaggacttattgcagctcaaattaatgctgattatctaatactcttaaccaatgtcgatggtgtgtttacatctcatcccaatgatcctgaatcaaaactcattaatacaattgaccccaattcaggttggcccaatgtctctgctgtaaaatcaaaattaggccgaggtggtatggtatccaaactggatactgccagaaaaatggctggtttaggtatcaatacagtgatcgcaaatgtaaatgtagaatccattgttccaaaaattctaaatagggaagcagttggaaccataattcttgctagtaaaagaaaatccagtataaagagatggattgcttttagtcatagaacttccttaccatctatagtaattaatgataatttaattaccttattacgaaatggtaatcgtgtaatgagcattttaccaatagggatagaagattttcgtggagaatgcaaaaaaggggatttaattgatatccttaattccaacaatgaaaagataggagttggaatcgccaggtatgatttcttaagattaaaggactatcttagacttcaaaataagcctgcatttatacattacgatcaattgcatattcta

SEQ ID NO: 25236 - DNA, 1428 bp, Legionella pneumophila
atgagcaataaaaaacattctctcactatatttagcttgactatgattaccgttggctctgtagacagtatccgtaacttgccagctactgcattatttgggagtcaattgattttttattttatcctgggtgccttgttcttccttatcccaaccgcattggtctcggcagagttagcttctgggtgggccaggcagggtggcgtttatatctgggttaaggaagcttttgggaaaaaatcagggtttttagccatttggttgcaatggatagaaaatgtgatttggtatcccacgattctatcgtttgttgcgggaacaataggttatcttattaacccctctttaactaccaatccttattttctttgggcagtcattgtcagttgcttttggggagcaaccattgtgaatttgcgcggtatgaaatcatcggccatgttcagtaatatttgttctttggcaggattattattacccatgtctttgatcattggtttgggtgctgtttggatagctcaaggtaaccccttgcaaatcagttttgacatgcccagtattgttccccatttatcggataagggcatgtgggtttcattaaccgccatcatattgtcgttttgcgggatagagattgctacggttcatgctaatgatgtgaaggatccccagcatgctttccccaaagccctggtttattctgtagggatcattctgagtactttgattttaggttcattagcgattgcggtagtactcccacaaaaggatatcaatctggttgccggaattatgcaagccttttctgcctttttccttaaatatcacatggattggatgatgcctgtggtagctgtgatgttggttctcggagggcttggtggtgtgagtaattggattattgcccctaccaaaggtttattagttgccgcagaagaagggaatttaccagaggtatttcaacggactaatggaaaaggtgctccggccatgatgctatacacccaggcaaccatagtcacagtattatcggcgctattcttatttatgcccagtgtcaatggatcctattggctcttaacagcattggcggctcaattatacatgctgatgtatttgatcatgtttgtcgcagcaattaaattgcgcataagccaaccttaccatcccagaccttttaaaattccaggaggtatggcaggaatgttgtttgttgcaggcataggcatcattggagtggttaccactttagcggttagctttattcctccagaggggattaatgtcggcagtgcaacacgctatgaattgaccttgattattggcttgctgctcatgtgtgctcctccttttatagccagttggttgcaagccaaagaggcggatttggaacctgctagggatcctctagaggcatgccagcaggca

SEQ ID NO: 25237 - DNA, 1293 bp, Legionella pneumophila
atgggtaagaatgttgttgttttgggtacacaatggggagatgaaggcaaaggcaaaattgttgatttgctgacacaagatgctcaagtggttgtccgttatcaagggggccataatgcaggccatacattaaaaatcaatggagtaaaaacagtacttcgtttaattccatccgggatgcttcgccctaacgtaacctgctatattgcaaatggtgtggttttatcacctcaggcattacttagtgaaattaaggagcttgagggtaatggcatcaatgtgagggagcgattacgcattagcctggcttgccccctgattctcccttaccacattgctttggataaggctcgtgagacacatatgggcaagtctgcaattggaacaacaggtcgtggtataggtcctgcttatgaggataaagtggctcggcgcgctttaagagtaggtgatttatttcatagagaccgatttgccaataaattaacagaattattggattatcataattttgtattaacacaatatttcaaacaaccagctgttgatttggaatccctattgggtgagtcattacaatgggctgaagaattaagaccaatggtttgcgatgtttctgcatgtttgcatgaacatagaaaacaaggtgaaaatattttattcgaaggggcgcaaggtgtttatttagatattgatcatggaacatacccctacgtaacttcttcaaatacctgtgtgggatctgtaattaatggtgcgggatttggtcctcgctatattgattacgtgttaggcattacaaaagcttacacaactcgagttggcggtggcccattccccactgaattacttgatgacgttggaaaacgcattgcggaacgaggacaggaattcggcgcagtaactggtagacccagacgttgtgggtggtttgacgctgttttattaaaacgctcgattgagttaaatagtatttcaggactctgtgttaccaaattggatgttctcgatggcttagaggtattacggattgctgtggcttataaagacagggatggcaatatattatctcgacctcctctggcagctgatgatttcaacgatttgttaccagtctatgaggagcttcctggttggcaggaatctactgctgatgtgactgtgatgagtgacttacccgccaatgcaagggcttatctaaagcgaattgaagagatattagggattcctattgatatgctatcaacaggacctgaaagggattcaacaattactttacgaggtccttttctt

SEQ ID NO: 25238 - DNA, 1230 bp, Legionella pneumophila
atgaaagtctacttggtaggcggtgcagttcgtgatcgattattaggaattcctgtccaggaacaggattgggtagtcgtcggagcaacgccggaagaattattaaaaagaaaatataggcaagttgggcgggatttccccgtttttttgcatcctgaaacgaaagaggaatatgcattagcaagaacagagcgtaaatcagctccaggatattatggattcatttgtgattttagtgaatcagtgacgttggaagaggatttggcacgacgagatttaacgattaatgccatggctatggatgaacagggaaatttaattgatccatatcagggacagcgagatctcgaagagaaattattacgtcatgtgtcctccgcttttgtagaagatcctgttcgggttttacgtgttgcccgttttgccagtcggtttcatcatcttggatttagaatagccaatgagactcgtttattaatgtattccatggttaaacaaggtgaattagctcatttgatccccgagcgtgtttggcaggaatggcaaaaaagtcttgaagaaaaaaatcctgaacaattcattctttctttacgttcctgtgatgcattaagagtgattttgccagaaattaactcattatttggtgtgcctaatccacatcaataccatcaagaaatagatacgggcattcattcattaatgacattacgggcatcatctgagcttagcgaagaaccattagtacgatttgctgctttggttcatgatttaggcaaagcctcgacaccaattcaggcatggcctaaacaccatgggcatgaggaggagggtaccaagctgattcgagcattatgtgctcgcttgcgcattcctaatgattatcgcgacttggccgttacagtggcgcgagctcatttgaatattcataggctatgcgaattgcgtcctaacacaatcgtcaagcttttggagcaggtagatgcctttagacgacctcaattatttcataaaatattgattgcttgtcaagcagatgccgagagttgtggcaaaacagtggtctatcgccaaactcaattatggaatgaaatattatctgaatgtgttaaagtgacgccacaaacttttatcgtacaaggttatgaaggtaaagcgattaaggaggccatgcatcaaagtcgtgtggcttgtgtagagcgaattatgacttcttggaaatcaaatgaaaaa

SEQ ID NO: 25239 - DNA, 675 bp, Legionella pneumophila
atgactaccaattcagtaaatggttccaattcagcaggtggtttaggcttgaatcaaattgattcaggtaaaagacaaaacttggggcaacaggattttttgcgtttgatggtagcacaagttcaaaatcaagatcctctgcaaccacaggcaaatggggagtttttatctcaactggctcagtttagcaccaatgatggaatcacaaaaatgcaagaatcactccaacaattagcttcatctctacaatctaatcaagcgcttcaagcatccgctttggttggccgcaaggtgttagtaaacagcaataccctgagcctgggtacagaaggagatgtaaaagctgccattgatatggcacctggtgtttctaatcttcgtgccgcaatctacacggaatctggcgagttgataaaaactattcccttgggacaaccagaacccgggtttttccaatttagttgggatggtactgaccaaagtaatcaacgtttagcatcaggaagatatacaataaaggttactggtacttatggcggacaagaagtggcattgaaaactatgacgtcagccaatgtcgatagtgttagtcttgggcaaaatggcgaggatctaaagcttaatgtagcgggcgtaggatcagtctatttaagtcaggtaaggcaaatatcagta

SEQ ID NO: 25240 - DNA, 1920 bp, Legionella pneumophila
atacccttgggtatggctgatattgccaccgttttatggaaaaaatttctaaaattcaaccccaaaaacccgcactggtttaacagagaccgttttgtattatctaatggccatggttccatgcttctctattctttactgcatttgaccggatacaacttggatattagcgagcttaaaaacttccgccaattgcactcaaaaacaccagggcatccggaacatgggcacactcctggtgtcgaaacaacaacagggccattaggtcagggtttagccaattcagtcgggatggccttagcggagcgtgtgctggctagtacctttaaccacgatcactttaacctggttgatcattatacatatacttttgccggtgatggttgcctgatggaaggcatttctcatgaggcgtgttctttagctggcactcttggtttgggaaagctcattgtattttatgacgacaatgggatatctattgatggtaaggtagaatcctggtttacggacgatactacgtctcgctttaaagcctacaactggcaagtcataggccccatcgatggccacgacgcagatcaaattgagcaagccatatcagcagcacgcgagaacacgactcaaccttcattaattatctgtaaaaccgtcataggactgggctcctctgtagccggtagcgaaaaagcgcacggctctccattgagtgcccaagacataaataatgtccgtgaattttttaattggaaacatgctccctttgaaattccagattcgatatacaagcaatgggatcatagagagcaaggagaaaaagaagagcaacaatggctgcagctcctgcatgaataccggcaacaacatccatcggaacacgatgagtttttgcgtcgtgccaatggcgacctgcccgatgattggcaagaaatatcggctggattcctaaaacaatgcctgaacaatgagaaagccatagcaacgcgtaaggcgtcgcagcaatgcatagagtttttcgcgccaatattaccggaaatgtttggcggctcagcggatttgactggttccaataataccgactggtcaggcagcaaagccatcacggcccataatttttccggaaattacctttattatggagtgagggaatttgccatggcagccatcatgaatggacttgctgtgcatgggggattcattccctacggcggaacattccttgttttcgcagattatgcaagaaatgccatccgtttaagcgctttaatgaaacaaagagtgatatacgtattgactcatgattctatcggtttaggggaagatggcccgacacaccaacctatagaacatatcgctatgttaagaatgacccctggcatgacggtctggcgccctgctgatttgatggaaaccgctgttgcatggcaacaatcgttagaacatcataatggcccgtctgccttattactctcaagacaaaatctgcccgctttagcccatggcaccgatgcggctgacttgattaagaaaggcggatatattattgccgattgtgaagggaaacctgatgctatcctgatagccactggttcagaagttcaactggctataaccgcagcagaaaaggcaaaagcaagaggtctccaggtcagggtggtatccatgccctgtgctgagcgattccttgcccagagtgatgattacaaaaaccaggtattacctggtcaggttcgcacacgtattgcgatagaagcagctagcagtgcctattggcaccaatttgttggctttgacggcgctgtcattgggctggattgttttggggtatcagctcctgctacagatgcttttaattaccttggaattacagtagaaaaaattatcaatactctagatacattaaccaaacaaacaatggtg

SEQ ID NO: 25241 - DNA, 828 bp, Legionella pneumophila
atggaccttggctttccaacttttatatatggaaccgcctggaaagaaaagcgtacaagcgaactggtcgagcttgcattaactaccggatttcagggtatagatactgcaaaccaaagaaaacactattatgaagaaggtgttggatatgccttgcaacaatactataaaaaatcaggtatcttgcgtgatgatatttttttacaatccaagttcacctatactcatggccaggatcatcgcaaaccttacgatgatacagcaagtctgactattcaagtccagcaatcttttgcaagcagccttgaacatttaaatactgattatttaaattcctatattttgcatggcccttattatcaatatcatttttctgatgaagataaagaagtctggaacaaaatggaatctctgcataaagatgggaaagtaaaacacctgggcatatcgaatgtgagttatgaacagctagtcgaactcatttcatttgcttcggtaaaacccaagtttgttcaaaatagatgctttgccaggctattatgggataaacaaattcgtaactattgccaggctcatggaattatttatcaggggttttctctgttaacggctaatcaatatgagttaaggcatccgaaacttgagaatctcagcaaaaagcacgagaaatcgattgagcaaatcatttttagattttcacaacagataggaatgttgcctttaactggcacgacaaatttggatcatatgaaagaagatcttgccatccatcaattcaggctgactgatgatgaaatcaatttcattgaaaacattgcctttatccca

SEQ ID NO: 25242 - DNA, 633 bp, Legionella pneumophila
gtgtattttatcatgttaaaacgattagatagtgatttacaaacgttaaatgattttttaaaaactaaaactccggaagcctggttaaaccatgcagctgccaatatacctcttttattgctcgatcatgctcattgtgaacgtaaagcagctggaacagcaattaatttcataagcaaatatccagaaaaagcagaattagtagcaattatggcaccattggcaagagaagaattactgcactttgaaaaagtcattgatatcatgaagcaaaagggaattgtttattctcccttgcagccatcagactatgcatccaatttgcataagcatgtcacaaataaagatggaattgagagactatgcgatcaattaattataggtgctatcattgaggcccgatcgtgcgagcgttttagctcaataattccatatattgaagatcaggacttagccaggttttataaaacattggttaaatcagaatgcaggcattttgaagagtatttgcatttggccaagttctatggcggttctgttgatgatcgtatttcggagtttttaactatagaaaatgcatttatcttatcagacgatgtggtatttcgctttcatagtggcttgcctccggct

SEQ ID NO: 25243 - DNA, 1407 bp, Legionella pneumophila
ttgaataactcagagcaatttttatctccgcgcatggggcgtgtagagcaaattcattttgttggcattggtggtgctggtatgtgtggtattgccgaagtattgcataaccagggctaccgtattactggttcggatctcggagaaagtggcacggtacaacgcttaaggtcattaggtattcaagtctatatcggtcacaggctggaaaacattaaaggcgctgatgttgtagtaaggtcttcggccgttgattttaataatcctgaaattgtggctgctcgtgagttaatgattccagttattcctagagcagctatgcttgctgagctaatgcgatttaggcatggtatagcaattgccggcactcatggcaaaacgacaacaacgagcttggtcagtagtttgcttgctgaaggtggtttggatcccagttttgttattggcggaaagctgaatagttgtggtgcgaatgctcagcttggaaagtcagcttattttgttgtagaggctgatgagagcgacgcctcgtttttgtttttgaagcctatgatggcggtagtgactaatattgatgctgatcacatggatacttatgaaggtgattttgaaaaattaagaacaacatttttggaatttttgcatcatttgcctttttatggattagcagtagtttgtttggaagatgaagaaatttgccgtatcctcccggctattcaaagaccaaccttaacttatgggtttaaagaagaggctcattatcgggcaattaattggactcaaaagggcatgctgagtgagtttgtggtcgttcgacctgcaccacataaacaactgactatacaatttcagtatccaggccgtcacaatgtattaaatgcattagcttctatagcaattgccactgagttgggagttgatgacgattccattgttcgtggcttacaaaaattccaaggggtgggacgccgctttcaaatgcttggtgaaaaacagttcgaaaaaggcgcggcgattattgtggatgattatggacatcatccacaggaaattttatccacaattgatgcttttagacgtgtttggcccgagagacgtttggttcatgtctttcaaccccatcgttataccagaacacagtccttgcatagacaatttgtcgatgttttaagtttatcggatgagctgttattgatggatatctatgcagcgggagaaacagctattccaggcgttaccagtgaaaatctggccaatgaaatacgatccagggataaacgagtgaccatagtgagcgagcaatcgttgaaagccaccttagatgaatttattaaagatggtgacgttattttgatgcagggagctggaagtatcggccaaatagcagtgaacctgatgaaaaacatg

SEQ ID NO: 25244 - DNA, 1386 bp, Legionella pneumophila
atgcggcgcctttttgcggaaggcgctttttctcaagcgtttgtcccggtattggctgaatatcaaaaaacgcgttctgctgaagacgttcgtactttcatcgctcggatttcaggctatttgagttctatattaaccctggtcactgtagtgggaattgtagcatcgcctgttattatttttttattcgcgccaggtttccatcatgacagcgtccgggctgaattggcaactcagatgcttcgtatcacttttccctatttaatgcttatttccttaacagcaatggcaggggcaatattaaatacctatggttatttcggggttccagcctttactcccgttttgcttaatatcagtatgatacttgctgcggtgtatttgtgccctgatttgccacaacccgttgttggtttggcatggggtgtgttgattgccggtatcgtgcaattgctttttcaattaccatttttgtatcaacgacatttgcttatcaggccgagagttgttcgggatgatccaggagtcaataaagtactcaagttaatgatcccagctttatttggcgtttcaattgcgcaacttaacttgatgatagatagtatttttgcttcttttctaaaggtagggagtgtctcttggttatactatacagacagattaactgattttcctttgggtgtctttggggtcgcgattgcgacagttatcttgccccacctgtcccgaaaacacacagaacaaaatattaatcaatattctcgcgctttggattgggggctgcgttcgattttattaataggaattccagccggtttgggattgtccttttttgccttgcctctgattgccagttgttttgcttatggtaaatttactgcctatgatttattacaaactcaaaaaagcttgattactcttgccatgggagttcccgcctttatggtagtaaaagtgttggcttctggtttttatgctcgtcaggacatcagtacccctgtaaaagtgggtgccatagccatggtagttaatactcttttatgtttcatatttgtctggcacttggctcatgctggcttgacattggcttcagcattagctggttatgtgaattgtgttattttgctgtttctcttgattaaaaggggattgttcaaaccatctcccggatggctgaaatacagtatgcagttgttgatagccaattttgccattggggtttatttatattttatgagtggaacagcgacttactggcttggtttctctcctttgatgcgtttgagcttgttattagctcatgtgttcgtcaccgtagtcatctatttattagttttaggtataatagggcttaggcctagccactttcgtggccagataaaggat

SEQ ID NO: 25245 - DNA, 915 bp, Legionella pneumophila
atgagtaaaattgctgtagtgataaatcctatagcaggcggcggtcgcggaaaaaaagtttggaaagtcctaaaacccgggttacatgccctattcgaacaaactgtttacagaatatctaacagggttaatgatcttgaagcaatcacagacggacttcttgctgaaaaccctgacagcctgttaataatcggtggagatggcactttaaatcatgttttgaatggcttaattgagaaagataaattaaaaaatccgcaaacaaaaatcgctttttttaacgcaggttgtggcggtgattttacaagacaatttccccaacagaaaatgaccgaattcctggatagattaagtcataaccaatttatcaagtgtgatattgggaaaattactcttgccaatcaattgtcgaggtattttattaatattgccagctgtggtctgtcaggacatgtggttttgcgtgtctctaaaagcaagtggttaaaaaaactgggcggtactctgaattacttgttgcatgctttaaccgggttgatgacctatcgtaaaaccaaagtaagggttcagatagacgatgctctaccatttgatagctccatcctgctcatggccgtctgcagtggccagtattttggcggaggtatgcatgtagcgccaatggcaaaagtgaacgatggcttgtttgatgtggtttcttttaatgaattttcaaaactaaatgcacttttaaaattatataaaatttattcaggagggcatttgttggataataatgtccattatgttcagactaaaaaaattaaaatagagccgttggaagaaagtaaaatagaaattgaggcagatggtgaaattattggttgcttaccggcacagtttgagttaattaaagaaactcttcctcttattatt

SEQ ID NO: 25246 - DNA, 642 bp, Legionella pneumophila
atttcactgagtctcgggtggagacagtgtggccatcgttacgccattcgtgcaggtcggaacttacccgacaaggaatttcgctaccttaggaccgttatagttacggccgccgtttaccggggcttcgatcaagagcttctccgaagataaccccatcaattaaccttccggcaccgggcaggcgtcacaccctatacgtcttcttacgaatttgcagagtgctgtgtttttaataaacagtcgcagccacctggtctctgcggccctctccagctctgaaagtaaatcccatcaccagaaagggcgtaccttctcccgaagttacggtaccattttgcctagttccttcacccgagttctctcaagcgccttagtattctctacctgtccacctgtgtcggtttgcggtacggttctctataagttatggctagcagcttttcctggaagccgggcatcaatgacttctctgtaccaaaaggtcagaaccacttcgcacctcagagttatggaaaaccggatttgccaagtcttcccccctacatgcaagtaccaggacaaccaacgcctggctcacctagccttcttcgtccccacttcaccacttataaaaagtccaggaatattaacctggttccc

SEQ ID NO: 25247 - DNA, 429 bp, Legionella pneumophila
atggctgaaatgaagcaatattatggcaccggccgtagaaaaagttcaattgcacgtgtatttttacgtcctgggaaaggtgatattaaagtaaacgacagaactttgcaggaatatttctgtcgagaaacatcatgcatgattgtaatgcaacctttggaaacagtagatcttcttaataagtttgatgtctacattactgtaactggtggtggtatatctggccaagcaggagctgttcgtttgggaatagccagagcattggttgcttatgatgaagatggtttggccgaaggcgctgagccaagtcccgattcgttccgtcgcaagctaagagcgcgtgggttattaactcgcgattcaagacgtgtggaacgaaagaaagtggggctgcacaaagcacgccgagctactcagtactccaagcgc

SEQ ID NO: 25248 - DNA, 1449 bp, Legionella pneumophila
atgaattatggattaactcataccccctcattaaccacgagcgaatgtctggtgttaggcgttttttcagatttggcgctaccagattttgcaaatgcaattgataatgaacagcaaggcctgattaaaaaactttgccagagagtccctgaaccaggaaatactgtatggcaaactgatgttgaaggacatagcctattaatcattcagtgtggcaaaaaggaagagtttagtgctaattcactccaaaaacgtgtaggagaaattaccgaagcattaattaaacagcgtttctcttctgccaccgtgtgcttgcctcggttaactcaggaatctgctgaatggcagatagagcaaatgattgttcaaatcgataatttacgatatcaacttcttgattttaaaacgaaaaatgcaaaaagtcataaattggagtcggtaatattccatctgcctggagctactgaaaaaagccttgaaatggccaaagccattgttaccggagttgaattttgccgtgatttagcgaatatgccggccaatatttgtactccgacttaccttggtgagcaagccattttattatccaaacaattcgaccaaataagctgtcaagtgatggggccagaagaaataaaagaaatgggtatgggcgcattattagccgttgcccaaggaagtgaccaacccccaagattgatagatgttcattatcacggtaacaaaaactcagcaccggtcattcttgtcgggaaaggcattacttttgactcaggaggcttatctataaagccggccaacgccatggatgaaatgaaatacgatatgtctggcgctgccagtgtgctgggagttataaaagcctgtgctttgctgaaattgccaattaatcttatcggcattatagccagtgctgaaaatttgataagtggctccgctgtaaaatcaggagacattgtaaccaccatgtcaggacaaactgtcgaaattatcaataccgatgcggagggtcgattagtactagcagacgctttgacttacgcggagcgatataatcctgattttgtaatcgatattgctactttaacaggagcgataatcgtcgctttgggcaatatagctactggctatatgactagagatgaacagctggccaaatcaatcgaacgtgccgctaatgaaagccaggataaagtctggcgtatgccactggatgaggcctatcaagatgctttggaaagcccattggctgatatgatcaacgccggctttgatcgcagtgcaggaagtattactgccgcctgtttcttatcacggtttactgaaaaatatcgttgggcccatttggacatcgcgggaacggcctggatttctggaaagaagcgtaatgcaacagggcgtcctgttcctttattaattcaattattgcgccatgtcgccaattcgcgt

SEQ ID NO: 25249 - DNA, 1011 bp, Legionella pneumophila
atgaaagcaataggttactaccactctttacccattacagataataaagcattgatggacctggatgtttctgtgcccaaagcaactggccacgatattttagttgaaatcaaagctgttgcagtgaatcccgtagataccaaggtgcgtcgtaatgttcaaccagaacctcatcagcccaaaatattaggctgggatgcttccggggtagttactgaaattggatcggaggtgactatgtttaaaccaggtgatgaagtgtggtatgccggtgatttaaccagaccagggtctaattgtgaatttcaccttgttgacgaacgcatcgcagccaaaaaaccaaaatcgttaagttttcaagaggctgctgcattacctttaaccagtttaacagcttgggagcttttatttgatagattgcaattatcagcagaagataaaggtattctattaattactggagcggctgggggggttggttctattttggtacaactggcaaggcaacttacccagttaactatcatcggaacaggagcccgccctgaatcaattcagtggatcctggataatggggctcaccatgtcattgatcacactaaagacatgaaggctcaattgcagaatttacattattctgaagtggattatgtgatcagtttgacccataccgatcaacatgccaaatcgctagttgaggtcctgaaacctcaaggaaaatttgctttgatagatgaccctcagaatttggatattaaattatttaaactaaaaagcatttctattcactgggaaatgatgtacacccgctctatgtttaaaacagcagatatgataaagcaacatgatattttaacagaggttgccagattggtggatgccggtaaaatcaagacaactattgccgaatgtctgggattgatcaatgctgacaatttgagaagagcacatgctttattggaaagtggcacttccagaggcaagatcgttttgaatggattcaagtcaatt

SEQ ID NO: 25250 - DNA, 3244 bp, Legionella pneumophila
gataacaacggcaacaacatctacctgtacaacatcgcaggttctgtggtgggttcaacatcagccacgcaggcgggtattaccacaggcaacaccatcttttcattgagcgtgaacagcagcagtggggtggtgactttaacgcaacaccaggaagtggaccacggtttgccgggagccagttccaattacgcggctcaggaagcgatattgaatacgggcctggtctttttgaacgccaccgcagtgacgacggatggggatggggacacggcgaccgccagtgcgtctttggatttgggcggcaatgtgaagtttgatgacgacggtccgagtgtgacgatggcggtgagcgataataatgcgatcaccttgaacacccaggatgcggagacgattggtgtactttccgacaccgacagcgcaagctttgcggccgcctttgcggtgactcctaattacggggccgatggtgcgggcacgacggtgaccacctacgccttgagtgtgtccgcccaaggggtggattccggccttgataacaacggcaacaacatctacctgtacaacatcgcaggttctgtggtgggttcaacatcagccacgcaggcagggattaccacaggcaacaccatcttttcattgggcgtgaacagcagcagtggggtggtgactttaacgcaacaccaggaagtggaccacggtttgccgggagccagttccaattacgcggctcaggaagcgatattgaatacgggcctggtctttttgaacgccaccgcagtgacgacggatggggatggggacacggcgaccgccagtgcgtctttggatttgggcggcaatgtgaagtttgatgacgacggtccgagcgtgacgatggcggtgagcgataataatgcgatcaccttgaacacccaggatgccgatacgattggggcagccagtgacagcgacagcgcaagctttgcggccgcctttgcggtgactcctaattacggggccgatggtgcgggcacgacggtgaccacctacgccttgagtgtgtccgcccaaggggtggattccggccttgataacaacggcaacaacatctacctgtacaacatcgcaggttctgtggtgggttcaacatcagccacgcaggcgggtattaccacaggcaacaccatcttttcattgggcgtgaacagcagcagtggggtggtgactttaacgcaacaccaggaagtggaccacggtttgccgggagccagttccaattacgcggctcaggaagcgatattgaatacgggcctggtctttttgaacgccaccgcagtgacgacggatggggatggggacacagccaccgccagtgcgtctttggatttgggcggcaatgtgaagtttgatgacgacggtccgagcgtgacgatggcggtgagcgataataatgcgatcaccttgaacacccaggatgccgatacgattggggcagccagtgacagcgacagcgcaagctttgcggccgcctttgcggtgactcctaattacggggccgatggtgcgggcacgacggtgaccacctacgccttgagtgtgtccgcccaaggggtggattccggccttgataacaacggcaacaacatctacctgtacaacatcgcaggttctgtggtgggttcaacatcagccacgcaggcgggtattaccacaggcaacaccatcttttcattggatgtgaacagcagcagtggggtggtgactttaacgcaacaccaggaagtggaccacggtttgccgggagccagttccaattacgcggctcaggaagcgatattgaatacgggcctggtctttttgaacgccaccgcagtgacgacggatggggatggggacacggcgaccgccagcgcgtctttggatttgggcggcaatgtgaagtttgatgacgacggtccgagcgtgacgatggcggtgagcgataataatgcgatcaccttgaacacccaggatgccgatacgattggggcagccagtgacagcgacagcgcaagctttgcggccgcctttgcggtgactcctaattacggggccgatggtgcgggcacgacggtgaccacctacgccttgagtgtgtccgcccaaggggtggattccggccttgataacaacggcaacaacatctacctgtacaacatcgcaggttctgtggtgggttcaacatcagccacgcaggcgggtattaccacaggcaacaccatcttttcattggatgtgaacagcagcagtggggtggtgactttaacgcaacaccaggaagtggaccacggtttgccgggagccagttccaattacgcggctcaggaagcgatattgaatacaggcctggtctttttgaacgccaccgcagtgacgacggatggggatggggatacggcgaccgccagtgcgtctttggatttgggcggcaatgtgaagtttgatgacgacggtccgagtgtgacgatggcggtgagcgataataatgcgatcaccttgaacacccaggatgccgatacgattggggcagccagtgacagcgacagcgcaagctttgcggccgcctttgcggtgactcctaattacggggccgatggtgcgggcacaacggtgaccacttacgccttgagtgtgtccgcccaaggggtggattccggccttgataacaacggcaacaacatctacctgtacaacatcgcaggttctgtggtgggttcaacatcagccacgcaggcgggtattaccacaggcaacaccatcttttcattggatgtgaacagcagcagtggggtggtgactttaacgcaacaccaggaagtggaccacggtttgccgggagccagttccaattacgcggctcaggaagcgatattgaatacgggcctggtctttttaaacgccaccgcagtgacgacggatggggatggggacacagccaccgccagtgcgtctttggatttgggcggcaatgtgaagtttgatgacgacagtccgagcgtgacgatggcggggagcgataataatgcgatcaccttggacacccaggatgccgagacgactggtggaatttttgacgacaacagcgcaagctttgaggcgcccttgggggtgacttctaattacagggcccatggggggggcccccaaggtgaccaaccttcacctttaggggggcccccccaaggggggggatttcggggggttgtgtaccagcggggaa

SEQ ID NO: 25251 - DNA, 1029 bp, Legionella pneumophila
atgtcaaattaccaatttacaaaacctgcaggaccatttcgtttattcgaattagctaagatttctggtgctacactgtatgaaggtaaaggagaaacctttacagtttctggtttggcaaaactttcagaagccacaagcaatgatttggtaatgctgcatcaaaaaaaatacgtcaaagaattaaagcatacagctgctcgtgtttgtatcatcgggccagactatgtgaaatatgcccctgatagcatgtatttactggtgcaccccaatccctacaaagcatttgctttgattgctcaagcgttttatccttctgaaaaaccacccggtttcattgccacttcggcaatgattgagtcgagcgctattattggcgtggattgttttattgctcatggggcttatattggcaatcaggttaaaattggcaacagatgcaaaattggagtgaatacttatattggcgatactgtaaccataggcgatgattgtcttatagaagacaacgtcagcattaggcatgctgttatagggaataacgtggtcatttattccggtgctcgtataggccaggatggttttggctttgccagtgatgcgaatggccattataaaattccccatgcgggtggtgtcattattggcaatgatgttgaaatcggggctaatacctgcattgaccgaggctctctggataatacggtgattgaagattggtgtcgtctggataatcttgtgcagattgggcataatgtcaagattggtaaaggctctgtcctagtggctcaagttggaatcgccggcagtacagagcttggtgaacatgtcactttggcaggacaagttggcgtgattggacacttgaagatcggtaaaggcgccactgttttagccagcgctaaagtctataaaaatgtgaaatccggagacagggtcggcggccacccagcggtatcaattagtgattggcaaaaacaaatccgatttttaaaaacagcgattaagtcaaagaagtccccaaaatcc

SEQ ID NO: 25252 - DNA, 1083 bp, Legionella pneumophila
atgaaagctaaagttattgttggtatgtcaggaggagtagactcttctgtagcagcctggctattgaaagaacaaggataccaggtggaaggactattcatgaaaaactgggagcaggacgatcacaatgattattgccctgcagcaaaagatttggcagatgcccaggccgtctgtaatcaattgcgcataccactacatactgtaaatttttcaaaagaatactgggatagagtatttgcttattttctgagtgaatatgaaaagggaagaacaccaaaccctgacgtgttatgtaataaagaaatcaaatttaatgcctttttgaatcatgctttaacccttggcgcagattatatagctactggccactatgccaaaaatacaatagaaggatctattggctatttatttaaggcaaaagatagggaaaaggatcaaacgtatttcctccacgctgttgaaccagaggcattgtccaaaaccatttttccaataggtgattttactaagccacaaattagagaattcgctaaacaacttggccttgtcactcatgccaaaaaagattctacaggtatttgctttataggtgaaaaaagattcaaaacttttcttaatgaattcatacttgccaaaccgggagaaataaaaagtacagggggaaaaacacttggtcaacatgatggtttaatgttttacacattaggacaacgccagggtttgggaattggaggattacaaaactcgacagatgagccatggtatgtcgtggataaagacatagccagtaacaccctttacgtagcacagggcagtcaacatccaatgctctattctcaaggtttgatatgtggtcccattcattggctggcagactatgagaatcatttaccactaacctgctttgctaaaacaagatataggcaaaccgatcaagcctgcatgatttctcctccggataataatcaacactatgtgatgttttcaagtcctcaacgtgcgattactccggggcaattcatcgtcttttatgaaaaaaatcaatgcttgggcggagctactatagagcagattatccgc

SEQ ID NO: 25253 - DNA, 1266 bp, Legionella pneumophila
atgaaaattagaataaagagtacgagaggacaatgtgtctccacaatagacgaagcgatactgtcaggcctggcaggggatggtgggttatttgtacctgacaggtttcccaatttaacaataaaaaaattttatgaatacggtaatttaatcgacttttctgttaatttactctcgccatttttttcagatagtaaaattgatgtaaataatgctttttttcaaaaattcctcaccttctcctttccgttacatcatctttttaagaaaagttatgtactggagttgtttcatggcccaaccctgtcttttaaagatttaggaactcaatttttcagtgaatgtttattgcatctgatagaaaacaagagcgccaaagttctggtcgcaacatctggtgatactggcgctgcgattgctcatgctttggatgggaaaagagatctggaaggaatcattttatttcctaaagataaacttactttcagacaacaatctcaaattacttgttggggagagaatattcgtgcattggctgttaatggcagttttgatcaatgtcaacagctggtgaagctggtatttgccaaaagagaacataaaggaatattgactacagccaatagcatgaatatagccagattattaccacagattattttctatgcttttaccagcattcaattggcattaagacataatcattctgttaattttatagttccaggcggaaacctggggaatgttacggcttgttattgggcaaaaatgctgggttttccggttgagcaaattttaatagctaataatattaatagtgcactgggcgaatttttgttaactggagcttatcaagccaaatcggttactaaaacattggcaacagcgatggatgtaggtgagccaagcaatttggaccgcttattcgttttatttaataattattctgaatgtaaaaaacagatgaatgcagaatctgttagtgatgagcaaattaagcaagctatcctacattgttacaataaatatcattatataatttgccctcataccgccacagcttatcatcgtctaagtacaatcaatcaggacaaaccctgggttattgtggcaccagggcacccggccaaatttgaagaggtattagaaccactattgaaaaaagaaattcctgtcccggaacagctgaaggtccttttaggcagaaaacaacattattcaatcatagagccaaactatcatgctttgtatcatttcttagttgaa

SEQ ID NO: 25254 - DNA, 1020 bp, Legionella pneumophila
atgagcagacatttgaatgtagctatcgtaggtgccaccggcgctgttggagaaacctttttaaccgttttggaagaaagaaactttccaattaagtccctttacccattagcgagttctcgctcagtaggtaagacagtgacttttagagatcaggaattggatgttttggatttagcagaatttgattttagcaaagtcgatcttgctttattctctgcaggcggcgctgtttcaaaagaatatgcgccaaaagctgtagctgctgggtgcgtggtggttgataatacctcctgttttcgttatgaggatgatattcctcttgttgtccctgaagtgaatcctcatcgaatcgctgattatactaaaagaggcattattgctaaccctaattgctctaccattcagatggtcgttgccctaaagccaatctatgacgctgttggtattagtcgtattaatgtggcgacttaccagtctgtttccgggactggcaaaaaagccatcagcgagctggttgctcaggtaggcgatcttttaaatgggagaccagctaatgttcaagtttatcctcagcaaattgcttttaatgcgcttcctcatattgatcagttcgaagacaatggttatacccgagaagagatgaagatggtctgggaaacccgcaagattatggaagatgacagcattatggttaaccctacagccgtcagggttcctgttatttatgggcattctgaagcggttcatctggagttaaaaaagcctttgacggctgacgatgctcgcgcgcttttggcaaaggcacccggcgttactgtagtggataatctttctaaagcaagttatcccacagcaattaagaatgcagtcgggcatgatgatgtttttgtagggcgcataagacaggatatttctcatccttgtggactcaatttgtggatagtcgcggataacattcgcaaaggtgcggcaactaacgcggtacaaattgctgaaatactgcaaaaagagtttctg

SEQ ID NO: 25255 - DNA, 447 bp, Legionella pneumophila
atgagtatggagttgcgggaactttaccaggaaatcatcatcgatcacaatcgtaatcctcgtaaccaccatgcgatggaggatgcgaccaccgaggcgaaggggtttaaccctttatgcggagataaactgactgtttacctcaagttgcagggtgatttgattcgtgatgtcagttttattggatgtggctgtgctatctcacaagcttctgcatcgttaatgaccgatgcgttaaagggtaaatcaattaaagaagctcatgaactatttcatcgtgttcatcgaatgctaacacaagaggaagaagattctttggtttccatggataaattaacagttctagccggagttaaagcattccctgcgcgtgtaaaatgcgccactttggcgtggcatactttggaagcggctttaaacaaagaaacagaagtggtgaaaacagaa

SEQ ID NO: 25256 - DNA, 1869 bp, Legionella pneumophila
atggttagcaagcagcaaactatgggatttcaaacagaggtaaagcaaatgcttcatttggttgtgcattcgctttatagcaacaaagagatttttcttagagaattaatttctaatgcttctgatgccttggacaagttacgatttttagctttatcaaacgggtcattgtttgaaaatgattctgatttgaaaattagcattcagattaatgaaaagcttcaaaccattaccatcagcgataatgggattggtctgagttgggaagaggcagtagaaaatttggggacaattgcaaaatccggaacaaaagaatttattagccaattaactggtgaacaagcaaaggattctcaactaataggacaatttggagtgggtttttattccgcgtttatcgttgctgataaagtaacagttaaaagtcgccgcgctgggttacaacctgaggatggaattgtatgggagtctaagggtgatggtgaatttactataggatatgaaaaaaaatcgacccgcggtacagaaattaccttgcacttaaaacctgaaaacgacgagtttttaagtgattggcgtattcgcggtattattagtaaatactctgatcatatttgttggcctattgtgatgaaaaagctttcagaggaaggcaaagaatcaaaagaatttgaaacagtaaacaaggcgacggcactttggacactacagaaatctgaaattagcgaagaagactataagcaactgtataaacatatttctcatgattacatggatccattaacctggtctcataaccatgttgaaggaaaacacgagtatattactttgctttacataccagcccatgccccatttgatttatggcagcatgaagccaaacatggactaaagctttatgtaaagcgtgtatttattatggatgaagcgacacaatttttaccccgatatttacgatttgtaaaagggattgtggatgccagtgatttaccgcttaatatttctcgagaaatattacaggataacaagcaggtagaatctattcgagctgcatgcaccaaacgtgttttgtctatgcttgaaaaaatggctaccaatgataaagaaacctatcagaagttttggaatgaatttggacttgtgctaaaagaaggacctattgaggatttcgctaataaggaagcgattgccaagttgcttcgtttttctactacagcaagcggtagtgagaaacaagaagtatcgctggaggaatatgttagtcgcatgaaagaagggcaggataaaatttattatattaccgcatcgagttacaatgctgctaaaaatagccctcatttggaaatattcaggaaaaagggaattgaggtattattgctcagtgataaagtcgatgaatggcttgtaggttatatgaatgagtttgcaggcaaaaaactacagtcaatttcaaaaggcaaggttgaattgggagatgatgaaacttccgaacaaattaaagaacaggaaaaaaccctggagccattgattaagcatattaaatcagttctaaatgagcgagttaaagatgtattgctgactaatcgtcttactgattcccctgcatgtgttgttgctgatgagcaagacatgggattggaaatgcaaagaattttacaagctgcgggtcaacaggttccagtgagcaagcctatttttgaaattaatccggatcatgccctgattaagcggttgcatgatattcaggatgataaccaatttgaattatgggttactatgctgtttgaacaagctgtgttggcagaaggagggcaattggataatcccgctgattttgtgaatcgggttaacagacttctggtttcctcc

SEQ ID NO: 25257 - DNA, 1172 bp, Legionella pneumophila
gcattagctgttttaaaaaaatattttggatttgattccttcagacctcctcaggaaaaaataattgaggatgtcatttctggggaagatgtactggttttgatgcctactggagggggaaaatcgctttgctatcaaattccagccattgtccgccctggtgttggcattgtagtatctcctttaatcgcgttaatggaagatcaagtaaccgctctcaaactgcagggtattcgtgcggcttactacaactcatccttaaccgccgaagaggctagaaatgtattaaatcaattacatcataatgaattggatttactctatattgctccagaacgtcttattagtacctcgtttctggatcggctgtcagaatgtactatctctttatttgctatcgatgaagcacactgtatttcacaatggggacatgattttcgacctgaatacgcctgtttaggtttactgaaaactaactttcctgacattcctatgattgctctgacagctactgccgataagcaaacacgtgaggatattgttaccaagttgaattatcaacccaaaaaatacgttgtttcattcaatcgaccgaatatccattacaaagtagttcctaaaacaaatgcagtgaagcaattaaatctgtttttacaatctgatacccagcaatctggaattatttattgtggaacccgccatacagtcgaacatcttacagcgaaattacaagaacttggatttaaagcacgcgcttatcatgcaggcctgcctcatgcggtgcggcgtgaggtgcaaaaccttttcagatacgatcgcattgatattgtggtagctactattgcttttggaatgggtattgacaagcctaatgttcgctttgttgttcaccatgatttacccaaaagcatcgaaggttactaccaggaaacaggtcgtgcaggacgtgacggattaccggccaaggcccttcttctttatgatgctgcggatagtgcccgtttgcggtcctggatcatgaacattcctcttgaggagcaaagacatatagaaaccaataaattaaatcatatgcttgcttttgctgaagcgtcgcattgtcgtcgtcaaatttattacgctattttgatgaaccttctcatacagaatgtaaaaactgtgatgtctgcgat

SEQ ID NO: 25258 - DNA, 1134 bp, Legionella pneumophila
atgaataataaggtgatgataaagagtatgtttgttttaagtttactgtctttgctgccattaataacctatgcgcaaaatacaaccgatatgcatggtaagatggacatgaaacagcctacacaaaaaaatgaaattgtaattgacccagtccgcttacaagccattggcatcacctcagagccagtacgccgtcaaaacattgaaaaaacaattcgcacggtaggacgggttgcggtcgatgagcgtcgggttgcccatattcatgtgcgctttgatggttggatagagaaattatttatcaattttaccggtgaaaaagtaaaggcagggcaagccctttttacagtgtatagccctgacttggtttccacccaacaagaatatttacttgctctcaatgcacaaaaaattttgagtcaaaatacgacatccattgccgcccaaggtgcgaaagatgcttttcaagcagctcaccaaagattattgttgtggggaatttctgaaaaggatatagagcaattaaaacatactggaaaaataacaaggaccatgaccattcattcaccgattaaaggaacggtgcttaaaaaaatggcgtttatcggtatgcgcatagagccgggtgatgagttgtacactattgctgatttatcgcatttgtgggttttaggggatatttacgagtacgagcttccttatatccgtcttggtcaaacggctgatttgacgatcacctatttacccaatgaattatttaaagccaagcttgattttatttatcccactattgacctaaaaacacgtacagtcaaggtgcgttttgaagtgaacaatcaaaaagaacaattaaagcctggcatgtacgtcaatttggaactcaaaatcccttttggtgaacgtcttgtagtgcctaaaaatgccgttttactcacgggtgaacgagctgtggtctttatttatcacggcaagggtaaaattgaatggcgagacgttactcttggggtgcgagccggcgatttgcttgaaatagtccagggggttaaggaaggagatgagattatcacctcggcaaactttttgattgactcagaaagtcagttgaaagcggccatgggaggcatgcagcataaa

SEQ ID NO: 25259 - DNA, 1329 bp, Legionella pneumophila
atgagtagtcaattgccaatactgaccgtgagtcagctgaatagacaagtgaaaggttttctcgagaatgaaataggccttgtgcatgtcgaaggcgaaatctctaacttaagcaaaccttcttcaggacattactatttcaccctgaaagacagcacagcgcaaattcgttgcgctttttttaaaaatcgacattccaattctctgcttagaaattttaatgatggtcaacaaattgttgccactggcaaattaagtctgtatgaagcccggggagaatatcagcttattgtcgaagagatagttaaagcaggaatggggattctctatcaacgatttgaagagttaaaaatcaaactggccagcgaaggcttattcaatcctgagagaaaaaaaccgctgcccagaatacccgaaacgattggcatcattacatcacccaccggagcagctatccaggacattctctcaactctggcccgtcgattcccaatagccagaattattatttatccaagtgaagttcaggggcaaaccgcccctcaacaactagtcaaggccttaaaactggctaatgcccataaacgatgccaggttctcatcctggcgcgcggcggtggcagcattgaagacttgtgggcctttaatgatgaataccttgctcgacaaattgcaatcagcgaaattcctgttgtttccggtattggtcatgaaacagatttcacaattgctgattttgtagcagattatcgtgcagaaacgcctactgctgccgctacggctgttactccaaactgcatcgaattattcaatattcttgatacggctatttatcgattgcatgatgccatcatcagactagttaaagggttgcaattaaagctcaatcatttgatagataaaattgcctcacccaggcaaactatctcaacatattggcaaaccctggattatctggagagacagttaatatctgctatgactcaatttattaacttaaatattaataaggtgaatattttttcaacacaattgcaagctaacaatcccaaaacacaaattgaacgaactaaaacccaactacgacaattaataatgcaattaaaccaagagatccggatacaagtaaaccaattaaaaaatcaactatccactaatctttccactttgcatgctgtaagccccttggctacactagatagaggttatgctattgtgagtaaaaaccaaagaatactctttgctgcccaacaggcacaaattggagatactatcgatgtccgtttagcaaaaggaagtcttgcttgtgaggttactcaaattaaggat

SEQ ID NO: 25260 - DNA, 1017 bp, Legionella pneumophila
ttgctaaccatagaggaactggcaaaacatttaaatggcgtttggcatggtcatgccaatcacgccatttttagcgtatcctcattggctcgtgcttcatctaaggatcttgtgtattttgataatcctttattgcggcctgtcttaaactctaccagagcgggtgccgttttattaaaatctgagcacaaagattggtgtcctgtaaactgtgttgtagtctccaatccgtcagaagcaatgtttaaagcagcaaaaatcttgcctcaacctggtgtcattgtctctggaattcatccgacagctcaaattcacaaatctgctcaattaggtcaaaacgtatcagttggtgctaacagcatgattggtgaaggcgtacaaatagatgataacgtaaccgttggtcctaatacgacaattgaatcttccgtactgattggtagaggaagtcagctaggtgctggagcaataattcattctggtacagttttaggccaatctgtgattattggttctgggggtattgttggtgcggccccatttaattgctacaaagaacatggtgtatggcaacaagggccaatctttggtggagttgtaattggtcaaagaactcaaatcggtgcaaatacagtaatccatagaggttccattggtgatacttatctaggcgagggagtttgtatagacagtctagtgctcatcgcacatgatgtttatgtagggaataatactgctattgcaggttctgctgcaattggtgctctagtgcaaataggaatggattgtattataggtggagcaagttgccttgcagcgaatattcgtctgaccaatgatgtagtgataaccgggatgtctactgtgacaaaatccatcatgcgttcgggaatttattcttcgggaacgacggttcacgatcatcgcaagtggcgtcgtaacacggcacggttcaggcatttggatgactatattaccaagctgataacaatagaaaaaaaattgaataataacaac

SEQ ID NO: 25261 - DNA, 1599 bp, Legionella pneumophila
gttactgtcgctgtttttttctctttgattttggctattttgatatggagaatggttgatctcactgttctgcatagacaatttttgcagggccagggtgatgcgcgcagcatccgagttatagatattcctgcctatcgaggtatgattaccgatagaaatggtactccgcttgctgtgagcacacctgttgaatcagtttgggtcaatccaaaggaattttctccggatgaagaacaatttatgcagttagctaaatacctgaatttggcacctaaagaattaagtagaaaaattgtccgggctgaaaatcgggagtttgtttatttacaaagacagttacctccacccctttcgaaaaagatcgaagctttaaaaatcccaggtgttaattttcaaaaagaattcaaacgttattatccagattcagatagtatttccccattaattggatttaccaatgtcgatgatcaaggattggaggggattgagctggcttatcaagattggcttatgggagtcgttggtaaaaaaagagtaatcaaagatcgattaggacgagttgtcgaagatctgggagttttgaaggaaccacgcccgggacatgagttaactttgagtatagatagacgactacaatatttagcttatagcgaattaggtaaaacagtcgaagagttttctgctaaatccgggtctgtagttgtaatcgatgctgaaaatggtgagatcctggctgtagctaatgttccatcttataatcctaacgcacgtgggcattatgataaggaaacctaccgcaacagagctttcaccgatactttcgagcctgggtctgtcattaaatcattcagtatagccagtgctttggaaacaggcttatttactccggataccattattgatactaatccaggatggatgactgtccatggccgaacagtaagagatatccataattatggtgttttagatgttaccggaatattacaacattccagtaatgtgggtgttacaaaaatggtattatccactccagctgaacaattaatcgggtttttgcaaaaatgtggttttgggcaacgctctgaattggcatacccgggtgaaagtgaaggaggcatagtaaaagccaaggatgcaaacccattcgttttagctacattaggtttcggttatggcttgtctgttactgcactgcaattggctaaagccaatttaatttttgcaaataaaggacgattaatacctgtgactttgattcataatgatacccccagtaatggcattcaagtgatgcaacctaaaaccgctgaaaatgtattattaatgatggaagcggtaatgaataagggtacaggtaagggagcaagggttcctggttatagggtagctggaaaaactggaacagcacgagttgctggaaagaatggatataaagacaggaaatacacagccagttttattgggatagcaccagtttccaaaccaaagtttgtagtcgctgttattattcatgaaccttcacgaaagggttattatgctgcctctgtggcagggcccttatttgcgaaagtcatgtcaggtgctttacgctta

SEQ ID NO: 25262 - DNA, 423 bp, Legionella pneumophila
atgaatgtttgctatctgagcttgggatcgaatcaaaaaaatcctgagcgtcaaataagacaagccattaatgaaatcaaacagattccatcaacatgccttatcaaggtgtctcgcttatattggaataaggcctggggctttgaaaatcaacaggaattttgtaatgtcgttatagagatacgaactactctgttaccccataagctccttaagtggtgccagaaaatagaaaacaggcacaagcgagtcaggagaaagttttgggggccaagaacattagatattgatatcattttatatggttatagattaattcgcacaaaaaacttaatcgttccacatccttgtttccatttacgagattttgttcttgttcctctaagagaattaaactctaatttaaaaataccaaattacaca

SEQ ID NO: 25263 - DNA, 1017 bp, Legionella pneumophila
atgatcgtcgattttgaaacgcacttcatcactgaagcttgtattgattatctgactcaacgccaggaagttcccaaattggttccagatctcaatggagcttatacaatgtgttttacacctgatgtttccttatttcacacaagtgcattaatggaagaattattaagtttaaacgagcaacgactggcaattatggaccaagcaggggtgacaatccaggtattaagtttgactactatcaatgggattgactcctgccctggagatgaaaacaaaagcaccgctttagcaagagaagtcaatgaccagctttactctgccattcaaagacatcctgaacgatttaaaggttttgcttctatatcgccttatgacgtcaaagaaggtgtaaaagaattggaaagagcgatatctcaattaggttttgtaggttggcttacacactccaattttggccaggataattacctggacgataaaacctattggccattgctggaagccgcggaaggtttaaacattcctatctacctgcatccgaatgtacccatcatgcgcgaattcggtaaatatggttttgccttggggggaagtgctttagggtttgaatttgacacggctttatgtttgatgcgaatgattcttggaggtgtattcgatgcgtttcccaaattaaaaattatgctgggacacttgggtgaaaccatgccgtttttaatggagcgtctcgatcatttataccgtataccagacttaaaagcttatcgaccttctattcagcgtattccctcagaggtattacgtcaaaatgtttacataaccactagcggacgtttcttcgttcccgccttacgttatgttctagaggtcatgggggaggacagggtattgtttgcctccgattacccaatggaatccttacttgacgctactcgatttattcaagattccgatttatcaaaccaaacgaagcaaaaaattttctctataaatgccaagaatttgaacttaata

SEQ ID NO: 25264 - DNA, 342 bp, Legionella pneumophila
ctgatgagcctgttttttctcctaatagtagctggcagccttctatacctttatctcgaaagccaattgcctaatgttgattcattaaaaactgtacaattacaagtgccattacagattttcagcaaagaaggtttattaattcaggaatacggtgaaaaaaaacgtattcccgtaacctatgacgaaattccccctactctgatccatgcattaattgcaacagaagatcaacgattttttgagcaccctggtgtagacgttatgggattgggccgagccgcagtaagcatgctcaaaactggaaccaaatctcaaggtggcagtacgatcaccatgcaa

SEQ ID NO: 25265 - DNA, 909 bp, Legionella pneumophila
atgacaacaattgaatctcagtgttccatagatggaatcctgctattaaataaaccacaaggaatgacctctaacgctgctcttcagaaaaccaaacatttgtttggtgctaaaaaagctggtcacacaggcagcttggatcctttagcaaccggcatgctacctctatgcttcggagaagcgactaaaatatgccagtatctccttaatgcggataaaagctatgaaacaattgggaggctaggcattaagacaaatactgctgattgtactggcgaagtgatattttgcattgaaaattatactgttagccatgaggaaatgattgcaaccctagaaaaatataagggtaaaatcaagcaaattccatccatgttttctgctttaaagcacaaggggacccctttgtatcgacttgccagagaaggtatagagatagaacgtaaggccagggatatagtaatcagccaattgaatttggaacaatttgatggtgaatgttttacattaacggtatcatgcagcaaaggaacctatatacgtaatttagtggaagatattggtgatacgttgaaggcaggagctcatatgacaaaattgcataggctctacactgcagggtttgaaaataatcgaatgtacactctcgatgagttacaggatatgcctttatcacaaagacttgcttgcttaatccctattgatcaggccgttcaacatttaacaccagtaattctttcagattctgaggtaacagcaattcgccagggcaaggtgatttcaaataaaactggtgctgttgaaggagaagatttgcgcctttatggcgagcaatcccaatttattggcattggccaagctttaattcatggtgatattaaagcaaaaaggttagtttcttttgcgttg

SEQ ID NO: 25266 - DNA, 1266 bp, Legionella pneumophila
atgcacatacataaaattcaagcacgtgaaatattagattctcgcggtaatccaactattgaggcagacgttactctcacaactggcattattggaagagccagcgttccttcaggtgcttccacaggaagcagggaagcctgtgaacttagagacaatgatccaaaacgatacgctggcaagggtgtacaaaaagcagttaaacacgttaataacgagataaatcaggcattacaaggattgtcggttgaggatcaggagaacttggatcgcattttatgccaattggataatacagaaaacaaatcccatctgggagctaatgctatcctggctacttctctggcatgtgccagagcaagagcattgtctcttaatcagccattgtatatgacccttaatcagggtgacatgatgaccatgcctgttcctatgatgaatattctgaatggaggcgctcatgctgataataatgtggatattcaagaatttatgatcatgccaatcggcgctcctgattttccagttgcattgcaaatgggaactgaaatttttcatgtactgaaatctgtgttaaaaaagcaaggattaaataccgctgttggtgatgaaggtggttttgcacctaatattcaatccaatcgccaagcgctggatctccttagcgaagcaattgaaaaagcaggctttcgattaggggaagacattgtatttgccctggatgttgcggcttctgagctttttaatgagggcttttatcatatgtattctgaaaatcaaaaatttgattctcatcaactcatagaatactatgcaaatcttatttccagttatcccatagtcagtattgaagatggactggacgaaaaagactggtcaggatggaagcaattaaccacccatttgggaaataaagttcagctcgtcggagatgatttatttgtaactaatcccaaaattctgcgagaaggaattgctcagggaattgctaatgccatattaattaaagtcaatcaaataggtactttaagcgaaaccaggcaagctataaagctcgcatacgacaatggataccgatgtgtcatgtcccatcgttcaggagaaacagaagataccttcattgctgatcttgcagtagccagtggttgtggccaaataaaaaccggatctttgtgtcgaacagacaggactgcgaaatataatcaactactaagaatcaatgaattggcgtctttaccctatgctggaaaaaacattctaaagaga

SEQ ID NO: 25267 - DNA, 1539 bp, Legionella pneumophila
atgaaattgctaggaaaaattctacttgcttttactgctttaatgatctttgtatcaattactttatggattttagcaaaaaatattaaacccgaaaccattaagcaattggttagtaataaaatcacagcaatcactcataagcaaagccaaattgatgggactatttcctggcaattgttcccaagacctggactcaaattcaataagatacatataggtaatgaaaatttaaatgataattattctcttctgattgatacattgctattaaatttaaaaattactcctttgttgaaaggacattttgtatttagtgaaattaacattgatggcctaaaattatttatcaaccaagaaaataatgaaaagcctctctcttctgaaaaaaacgctaatcaatacaacacaacaacgtaccccaatgagcaatttgccattcaaaaattattattaagccatggacaaattatccttaacagtaaggggcattctactgtcttaaaaaatattcaaattggagcagagcaatttaatttaaaaaactcgcccttttcagtacagattaaagccaagctgactgatgctgcttttttacagacagccaaagctaatattaattttaaaggtcgagttagtctatcaccctcaattattgatgaactcaattcaggaattagtaagtcttccatagaaggccaactgcaaatacaaaatattttattgaatcaatttgctatcaaaaaaatcaataccactcttaaaactcataaaagagatatccaatttaatccacttactttgtcactctataatggggaatcgataggagatatggactatgtcatcgctacacaacaattgttaattaatcaaactgcaaccaatttagatggaaaacaattaatcacttctttattaaaacatcctgcaattagcggtaatttagattactcaattcatgcctcaataccattgaaagcactcagtattgagagtcttgttagtaaaggaaccattacgcttaaagatggagaagtctataatattaatcttgatcaattacttaataatctaaaagtaaaacttaattcgcttatgactgaaactccagataacataaaaaaactggctcaatcagcggattgggatcaaaataaaaacacgcaaggcaataccaaatttaaactagcaaattttaaattccagttacaaaccggagcaattagcagtgattcatttttgctgcagactgataaactccaggtgaatggagaagggagaattaatgtgctaaatcaagaaatatactccaatattaaggccacgttaaacgacaatagtacagacaatactttgcaaaaaattcaacaagcattgggcggctatttcccactggtagtatctggcacagttgaaaatcccatagttttgccagattttaaagcaattagccctgtattaagttcgttagcgatcaaatcggctctgacaaaacctttaaaaataatacaaaaaccacttaaagagctaatccat

SEQ ID NO: 25268 - DNA, 894 bp, Legionella pneumophila
atggctaatattggatttgtgggattgggtcatatgggttttccaatggccattaatcttttgaaagccggtcatagtgtcatgggctatgatttgcaacaatcagcacttgagcattttgctgaacaaggaggaactattgctcataacttgcaggaattggcaaaaggcaaagatgtcattgttactatgttacaaaccggacagcaagttttacatgtatgccttggtgtagatggtatattcagtcagttaaatgctggctcattgtacatcgattgctctacaattgatgtaaaaagctctcgagaaactcatcaaatagcgaaagaaaatcatcttctggtcgtcgatgctcccgtctctggcggcgtagcgggggccactgcagccacgttaacattcatggttggtggtgaagccgaggcttataatgcggcgcatcccattctctctgccatgggaaaaaaaatcatccatacaggcggtgcaggcagtgggcaagcagccaaaatttgcaataacatgatattgggtaccacgatgatcgccatatcagaagcgttcattctggcgaaagaactagggctgtctgatggaaaattatttgaggtggtaaacaattcatcgggtcaatgttgggctatgagcaaatacgtccctgtaccaggaatattggaaaatgttcctgcaaacaatgattataagccagggtttgcagcaaacatgatgttgaaggatttgttattgagtcaaaatactgcgaaatcagtacacattgaaacaccccttggcgccaaaacaactgaaatttatcaacaatttgtcgatcaaggccttggtgatatcgatttttcagccattattaaacacattggcaaaatacaagaggtg

SEQ ID NO: 25269 - DNA, 849 bp, Legionella pneumophila
ttgacatcttaccaagaaagacaagttaaaatcccgggttttactattgctcttaaaatttggaatcccaaaaatcctaatccagtactgtgtttgcatggcaaaatggataacgcagcaagttttgatttgctggcgcctttgttatcaaacaggcaactggttgcagtggattatcctggaacaggattgtcaagccattaccctgaaggtgttgtccctcattggaaaaatgatgcttttctcatgtgtcatgttattaaggcattaggatggaagagctttgatattattgcccactcactaggttctttcctggcaactgttctagccattgctcaacctaaacaagttaataaattggtatttttagatattttaggaccaacggttcatattattgagaacagtatggcttatttacccctaaatattgaaagctatttaatatccggtaaacaaccaaggactgtatttagcagtctggatgctgcaatcaaggaccgtatgaatattggtaacataagctatcaggcagctcaagccctggttcaaaggggtacaaaacaagatgacgagggctgggtttggacatttgatccccggttacgctgcattagcgcaactatacctcatgaagatgaaattcgagccatgtttcgtgctatagacgtgccggtttgcctaattctcgctaaccaaggtgtatcttaccccgaatctgtttttaaaggacgtacccaatcaataaaaaatttgaccattcatagggtacagggaggacatcatgtgcacatggatgatccagcctctgtcgcagaaattatttctcaatatttaagttccaaa

SEQ ID NO: 25270 - DNA, 951 bp, Legionella pneumophila
atgacttcaatcagtgaatggtggatgtggttaggttttttagcatttgtgctcattatgctgtttgttgatttgtttgtgtttgggggaggaaaagctcatcgcgtttccacaaaagaagctttatcctggaccatattgtggttcactctggctattattttcaactttcttctatggtggtatcttgttgagaattttactttttcagtggccaatgaaaaagcccttgaattttttacgggttatctgatagagaagtctttatcgtttgataatatttttgtttttcttattctctttgagtattttgcaataccggctaaatatcaacatcgtgttctaatctatggtgtgataggtgccatcgttatgcgtctgattcttattttattagggatatggatagtgaatcaatttcattggattctttatatttttggattttttctgatgataacgggaatcaagatgttcatttttgctgataagaaaccagagctcgcaaaaaaccccatactacattggatgcgaagccatttgcgaattacccaggagttacatggtgagcgattttttctcaggaaaaatcaacttgtctacgtaacgcctctttttatggtgttggttcttattgaaatcagtgatctgattttcgctgtggatagcattccagcgatttttgccataaccaatgatccttttattgtattcacttctaatatatttgcaattttaggattacgcgctttatattttctgcttgtgaatatgcacaaacgattttattttctcaaatatgggcttgcttttattttagtattcgtgggctttaagatgcttatcgcaccttggtttaagataccgattttcattgctctgggtattgttatggcaactttggttttttgtattctattcagtatttggcatagaaaaaatgaagtaacc

SEQ ID NO: 25271 - DNA, 1101 bp, Legionella pneumophila
atgaactacaatgatactcaagaaattatcgtaactcctcttatgggcgcgacagggctcgaaactttagaaatgggggctgcacgcattcatgttgatgataagcaaatcattaattgccgtgctgacttaaatcaattggtgcctttcaaatacaaatgggcttgggataaatacttgacagcctgtgccaatcattggatgcccaatgaaatcagtatgagtgccgatgtcgctttatggaaagatccttatggtcttacagaagatgagcgtttaatcattaagcgtaatttgggatttttctcaaccgccgattcactcgttgcgaataatctggttcttgctgtttacagacatattactaatcctgagtgtcgacaatatcttctaaggcaagcttttgaagaagcgttacacactcatgcttatcaatacattatagagagtttggggctggatgaagctgaagtatttaatatgtatagagaaataccttctgtatccaggaaagcagtttgggcattaccatttactcaaagtttaggtgatgaaaccttccatacaggcactccagaaaatgatcaacgcctgctacgcgatttaattgcattttatgtcgtgtttgagggtattttcttttatgtcggatttactcaaattctctctatgggacgtcgtaacaaaatggtaggaacatcagaacagttccaatatatactgcgcgatgagtccatgcatatgaatttcggtattgatgtgattaatcaaatcaaaatcgaaaatcctcacttatggacacctgaatttaagaatgaaatgatccaactcatcagagaaggtgttgagctcgaataccaatacgccagagacactatgcctcatggcattctcggaatgaacgccgagatgtttgaagaatatttgcactttattgcaaaccgtcgcttaaatcaaataggtctgccggatcaatacccaggtgctgaaaacccatttccctggatgagtgaaatgctggatctcaaaaaagagaaaaacttttttgaaactcgtgttattgaatatcaggctggtggtactttaagctgggatgatgaa

SEQ ID NO: 25272 - DNA, 165 bp, Legionella pneumophila
atgagcaaaactgagagactctttcatctgttgcaaattttgcggcgttatcgttatccccttagtggacaatttcttgccaatgagctgggtgtcagtacccgtaccatctatcgggacattgcggctttacaggctcaaggtgctgatattgagggtgaacca

SEQ ID NO: 25273 - DNA, 228 bp, Legionella pneumophila
atgagcccaagtattgtttttaccgggggaggaactgccggacatgtaacgcctaatatcgctttgattaaggaatttcgaaaagaaggctggaatgtagaatatatcggctctgtttccggaattgaaaaggagatgattgagccgctggacattccttttcatggggtcagtagcggtaaattgcgcaggtattttagtttgaagaacttgcttgatcctttcaaa

SEQ ID NO: 25274 - DNA, 1014 bp, Legionella pneumophila
atgcgacaaatcatctggctaggtttcatttcactcttccttttatctttcactacctattccgacacaacttttacaaaacgtaaagacgtacaatcgtttattaacatgatggtaacgaattatcactttaatcgtaatcagttaactacagtaatgaaccaagttaaacttcaaccacaagtcatcgaatctatggaaaagccctatgaaaagaaaaactgggatgtctaccgagaactgtttcttactcagaaaagattaaaaagcggattgcaattttgggctgaaaatcaaaaaacattggaaaaaattcagagaagatatggggtgtctccggagatcattatagctattttaggagtagagacaatgtatggtgagcgtcagggtgaatacagagtcttggatactctggctacactggctttcaactaccccaaacgttctgcattctttactaaagaattaaaggagtttttcctcctgtgccgagaacagcacgtatccccaactcaatacaaagggtcttacgcaggtgccataggaaaaccccaatttatgccaagcagttatcgatattatgcagtggactttaataacaatggtcgaagagatttagtcaatgacaatggtgactctattgccagcatcgccaattatttgcataaacatggttggaacttaaatcaaggcatcgctcaaccggccaaaatctccggatggcgatacaaacaacttcgcatgaaccctaaaacagcaaattaccgatactcacaacttataagctatggagtaaaaccaattacagcgtcacaaaatcatcctcctcgtgcaggagtcattgagttagttacaaggaagggtaaagaatactggattgcctaccccaatttttttgtaattacccgctataattcgagccctcaatatgctctggcggtttacttattatcccagcaattgaagcaacattggtatactagtgccaccaaaaagcacagagcttatgtt

SEQ ID NO: 25275 - DNA, 996 bp, Legionella pneumophila
atgtttaaacgcataggactaatatcgattgccttatctttaaatactatctccttcaccagcgaagcctgttctgccttagtgttcaataaaaacaagcccgcaactgtcgcagtcaatttggactggaaataccgggaaggagcctttgtgattcatcctcggaatgccatgatggtttccagtgtagattaccacagcatgcatccattaatctggaaaagccaatatggaagtgtgatatttcacggaggaaatcggtttaaagcaggaccatctgctgatgggatgaatgaaaaaggacttactgcttcaatactgatgcttgattcatcaatttatcccagtaactctgagcttcccgctttaaaaactactgaatgggttcagtatattttagataattttcaaacggtccaagaagtcatagatgacagctcaaattatcaactggttgcagacacctaccggggaataaccatgaacgttcacttgatggtgagcgatgccgaaggaaaatctgctgtttttgagtacctggatggtaaactggtaattcatactcaagacaacttgaccacgccagtactaaccaatacggactataaattgtcattggctcttcttgaagaataccaggaccatggtggctctaaggctctgccaggtggatatgattctaaatcccgttttgtaagagcagcacattatctaaaaaaacttcccagctttatagctaaagaagaacatattgcttatgctttcaacggcctcaatgtcgtcacacaagcacctggtacttcttctccaacccaactgagtatggtttttgatatcccgaccaaaacaatttacttccgcagcattaacgaggctgcattaagagtgattccaatggatagcattgactttgattatctttatcaaccaatcgccctgaatgtttatcaacatttgtccggggacgtcactgataaatttcaacccatgatagga

SEQ ID NO: 25276 - DNA, 1251 bp, Legionella pneumophila
atgagtcttgaaatctatacctggaaaaatggttccaaagggttgggatttaccaaaccagttaagtccatgctattaggtggcaatgttggtcatgctgccgttgaattaacttttcccgctgatgcgaaaggggatgagttagcgaaaaaatatcaggatgtacctggcctttcaatcagtaaacgtactgaaattgttccagaaaagcaagaaaatggaagttataaaccgaaagaacaagttgtttactttgtgtattttagctggtggccaggccataccaatggccatcacattaacagtcacagagaagatttggaatcagaatggcgccatgaaccagctcccaaaattaaaccggaaatacaggagcatttatatggagaaaatattccaaccgctaataaaaccaatgttacgggactattaattagtgataaaacaattaccaaagtaaaagagatttcccatcaaagtattaaagaaactaccacaattgaaaatgacccagcctatcagcaattaaaagcagaggaagcagctttacaaactgaattacagcaattaattgataaacgcaaaatttatgaacaagaattggccagatctggccttgaacagagacaacctaataaagaactctgtttaactgatgccgaaatcgctcgtggttatgagattagcaaagaactaaaaagagtggcggagcaaatcaagttatgccaaatagactttgaagagcgttatctcagtgttggagagcctccttcatccgtgattagaatacccacaacacttgaccacaatgctccaacttttgctcttgatgcagcaggaattcttgacaaaatggctagtttggcacaaagcacaaccgcctatagcttctataaatttaattgttccacatcagcaacgcaagtggtgaaagctggtatcagtgacgagctaaaaaatatcatgaaaaccgatgggtttaatgtagaaaaagcatctcaaacgaccattgctacacccacatcgtttcgtcatttcagtcaacaagttcaaacggaattgattcttcttaatacgaatcaagcacttgtggaacagcaaagagcaaaaacagagaatacatctgaagcaccaaccacaagcacacagagcttcaaacaaaaatttcaagatacagtgaaagaaaaatcggaaaaagcagttagagaacaagatgagtctgaagaaaacaggataggtttaaccataagt

SEQ ID NO: 25277 - DNA, 1833 bp, Legionella pneumophila
atgacattaactaagaaaatggctgtaggcgtgttgattatgttgttattcgtttttatcggaacttatttcatcactatgaataatgcgcgtaatttttttatccaacaacttgaaagtaatgctcaagatactgcgacatcattaggtttgtctttatctcagtctttaatcaatcatgatgtacctaccatggattctatggttaaagctgtttttgacagaggatatttttcatcaattaaagtacaagacataaaagggaaagtgatcattttaaagaaacaattgccacaagaaagcgatataccacaatggtttgtgaacttgataaaatggccctcgactgagaagtcatccttaattatggatgggtggatgcaagcaggagttgttttagtcgctagtgatccgagctatgtttacgcctctttgtggcgtaatgctgtagaaatggtaaacgcttatctgatttttgcgttagttgctttggttctaagctatggctttctaaaatatttattgcaacctttaaaacgagtcacagcacaggctttggcaatttcagaacatgagtttcctgtagaaacgaagattcctaaaactcctgaattgaggcaagttaccttggctatgaatcaaatggttactaaagtcaaatccttatttcaagaccaattaaaacaaacagaatcacttagaacacaggtttaccaagattcattaacagggatgagtaatcgtcgttattttttacagcatttggctttgattctggataatgaagatgaatttatacctggttatgtcatgatgctggtcatagacggtctggatgagttaaatcagaagcaagggtatcagcaaggggatcaattggtattaactgtagccaaaatatgtaaaagctattggaagcaatcgtctgttagtacattggcaagaattaacgggacgacctttgccttaattagtcatgaaagggatcctttggtgtttgaaaaggaatgtcaggagtttgaacaaattttgagccaaggtatcaatgatattaaaatttgcaaaatacacatgggggctgcgagttattttctccaccaacctgtctccaatctgttgtctacggtagatcaagcggttaaaaaggctcgtgaaaccggcgtattttattgccagaaagagcatgatacttataaatatcctcagttaatcagcggcgatgaaattagaaactcattgcaacagaaaaaaataagcttgtatgcgcaggcagttacagacggtaagaattgttttcataaagaggtcttcgttcgaattcgcaaccaggaaggggaggagttaggcgctggttattttataccagttgctgagaaattaggattggcctatcctattgatcagtatgtgctcaatgaattaaccgtcatggacattgcaacacatacccattttgctcttaatatttcagaagatactttagcaaataaagtcaatagcactggttatttgcgtcaattggaagacactcctgcagctgtcttgagaaatctttcactggaaattaatgaggctcacgttttgtcacatttttcaaactccaagttctttatcaagcaagccaaaaaattgggggtgacagttggaatagatcgtgtgggtattaaattttctccgttgcattatttgagtgatttaaacatagattatttaaagctgcatgggagtctggtgacagatattgatgaaaatgaaagcaagcagtttttcatacattattttaatgaaatggctaaaacgatggatattgcggtggtagcaactcaagtggaa

SEQ ID NO: 25278 - DNA, 1035 bp, Legionella pneumophila
gtgtcattggtttctgccgcatcggttctaaaacacctggattccgagaaatatcatattatacccattgcaatggataaaagtggtcgatttcatcgtcatgattataatgatttgctcgcctgttctgataaattacctgttgttactgaaaaatcaaccccattggaaggcttattaattaatggacgtctggcagttgatgctaaaattgtttttccagtggttcatggccctttatatgaggatggatgtttacaaggtttacttgagttagccggtgtcgcctatgtaggatgtgacgtattgtcttctgcaatcggaatggacaaagacatggcgaggcgactcgcatgtattaatgggctcaaatcagcaagatataaattattatcatggcatgccaatgcgtctgaaagacaacaattttgtcatgaagtcgcctcggagtttggttggcctctgttcgttaagccatgctcactaggttccagtgtgggaattcacaaagcaaataatatggatgagctaaacgcagcagttgctgatgcattacgctatgatgaagaaattctggttgaagaatttattgtcggaagggaaattgaactggcagtgttggagaacagtatcccctgtgggaaaccaagagtaagtatggtgggtgagataaaagtaaaccaccctgacggttattattcttatactgcgaaatatttggaaagcagtcaaacggatttgattattccagctcaattaaataatagtctggaagaacaattaaaacaggctgcagcgaatatttttagttatcttaaatgtaaaggcatggccagggtagatttttttgtaaatgataagacagaagaaatttactttaatgaaataaatacattacctggatttacctccataagtatgtaccccaaattgtggcaggcaactggtatagcttatcctgatttacttgatgaattgattaatctagcaatggttcatcataactgtcgtcaacatttggtgacaaattacttg

SEQ ID NO: 25279 - DNA, 378 bp, Legionella pneumophila
atgagcgtagacgccagttatgattcaaataatattaaagtcctaaaaggtttagacgcagtaagaaaaagaccgggcatgtacattggggatacagatgatggaaccggtttgcatcatatggtttttgaggttgtagataattcaatagatgaatccctggcaagttattgcaaagaaatttttgttaccattcatagcgatgaatcaattaccgttaaggatgatggtcgtggtattcctgtcgatattcacaaggaagaaggaaaatcagctgctgaagtcattatgacagtcctgcatgccggaggtaaaatttgatgataacctcttacaaggtaatcaggcgggcctaacctgggaatagggggtatctgg

SEQ ID NO: 25280 - DNA, 2538 bp, Legionella pneumophila
atgatgatattaaaatttataaaaaaaggattttactactgcttaataacagcaatatgtctggttagtttgattatctttttgatttcaactaccccggggctatatgcagtaattaaattaactcatttatatcttcctggcactcttaaaatacaccatcttaaaggacaattacttgaccaattttctattggtgaaatggaatatcaacatcaagacactaaaataaaaatttttaacctggcggttaactggcgtttcagctcattgcttcgcaaaaaattgcctattgatagcatgagtgctgaaaagattgaaataaatcaaaagacgcccatactgatactaaaaaatatcaaattaagcggttatttaaatcaacaattaattaaactgaatacactgcaatttaattattggaatcaattgattaccagccaattagaagttagcaactcatttcctcatgcattttcaggaaaaattcgtttaaacccacattctacaaataagaatatattctcaggaggggtagacattggcggtaatcggaatcaaactcaatggggaggagaatttgaaggtcctggaaaaataacaattaacggcagtcttcaacagttaaaacaaataaaacaaatcataaaatggcgtgacttacattggcaagacaataaaaatcacaatttaaaaagctcgcaaggaagaattgaggtatcgggaacaattccaaatttagctatcgacttaaaatccaaacttggcatagatcaattaaaaaattggcaaatgaacgcttcgattaagggcaagctgccttggcaatggagtgtcaatgctacgttctctcaaccattagatttctcatcaaaacttgatggtttatatacaaaatttgctttgaaaatggaaactcaaagtgaccatcatgccaactttctgatcacgattgctccaggccattatcaaatgacagaaaacaatctgatgccgttaattcagtttactggcggcaatattaaaggctctctttccccaaaacaattcagtggacaaggagttctctttctagatgcatataaaaaagtcaatttcaattttaaattcccggagtttaatgtctaccaagatatagcgcagcaaacaatcgatgcgaaactatccattctttttaactccctggattttttgcaaaatgtcagtccttatttcatgaatcccaaaggacaacttcttgcctccattcatgcaaagggaactttaaataaaccaagaattgaaagtaaactcactttaaacaaaggctcagtgaacatccctactttaggcctcaatataactgatatgggattagctgtttttagcaaaaaagatggatgggaagcaactggctccattcattcatctgaaaaaaaactaaccctaaaaggacaaggtagtttcaataaggaacttggtggaactgtttcaatagaaggttctaattttccggttgcaaacactaaggaatttcaggttaatatatctccacagttaaatgtgcgctttactccatcactatgtcaaatcactggaaccatccaaattcctaatgcccatataaaaccacaaacgtttaccaatagtcttgtggctacagatgatattgtatttacgagtaagaatactcaaccgattaccccactctttaataccaacatgtcggtacgagttgaaatgggagaagaagttgaactgacctttaagggattgcatgcttatttggcgggtatagttacaatcaatcaattatcgcaaggacccataacggcaaatggtgagttagctgtcaaaaaaggagaatataaagcctatggccaggatttatctattgaacaaggacaattaatttttacaggcggtagaattgataacccagaaattaatctaagagcatcgaagaatatatccaattcatttggtagtgtatcaggatcctctgagctgtttaattttaataattataataacctcaatgttggcaacaattttaatgttggggtcgaagtatctggacgattacaatcgcctaaaattcaattattctctaaccctccaacactttctcaagcagatatcctatcttttcttgtaattggccgcccagccaatcaagcagataaggcaaaaggccaattacttttaacagctatttcctcgatgaacttaggaacaggaactaatggaacccaactgctggagcaattaaaacaaaaattaggattcgattttaacgtacaaacgacaaccaattttaatcagcaaaccaataaaatcagtgaatcaaccggcgttgtggttggaaaatctctttcggatcgaatttatttaagttataacgtcggtttatctcaaaccgatcctaacgtattaaccttaaaatacatactaaataaatttttaagcattcaggtaagcagcagtgattcaggtaatggcgtcgatgtcctgtatactaaaagctcgtcatcgccgaaaaaaacaaagcctgacaaa

SEQ ID NO: 25281 - DNA, 1284 bp, Legionella pneumophila
gtgattatcagcatccacgactatggacaacttgattactttcttgctggcgttatcaccttattgtttatcatgtatctttctctgtttcctggaatagtcggttattcctttaaactcctttcaaccaagtgtaatttattaacatgcatgcttttgtttagcactctttggtgtatagctgagcttatccgttccaagctttttactgggttcccctggctattagcaggtataacccaaatcgatacaccattgagatatattgcaccagtagttggtgtttatgggcttggattaatatgttcttttttgggtaccctactggttctgataattaaagacaatacgattaaacgatattactaccttagcgtttttatcttgattcttattgcaccatcactggggaaaaatatccattggacagaaatcaagaaagaacctatttctgtcggtgcaatccagcctaatctctcaatgagagacaagtgggacgaaactctcttttgggatttattaaaatactatgaaaacaaaacagataaactgttaggaaaaaatttaattgttttacccgaatcagccatacccctaccagcaagttatgttgaagattacctacagaaactgcatgaaaaagcattaaaagccaaaagcagtttaattttgggaatcttgcaacctacagataatgatgaaaccaatttttacaattccatcattagcttgggggaagctacaggagcctatgtgaaacgccaattggtaccatttggagaatatataccaaaaccctttatccccatcaatcgttggttaaatcttccagaacctaatgttgttcccggcagatcgaatcagccattaattaacatagctaatcatcccattgccagtctaatttgctatgaaattgcttacccaaatatcttgagatcacaaatgcctgcagctcaatggatagtctctatcagtgataatggctggtttggccattccctggcaagctaccagcaattacaaatggctcaaatgctctctttgcttacaggacgataccaaattctggtgaataatgatggactctcctcagtaattaaccaccaaggaactattgtcgaagggctaccagcttttaattcaggaatgctccaaacagatatttttcctgcaaatggcatcactccctggataatttggagtgactatcctacttttgttttttgtttcatatttgttctttttgttttgttttttaatattaaacgatttacagaaaaa

SEQ ID NO: 25282 - DNA, 1275 bp, Legionella pneumophila
atggttgaactaaatcaagtttgttaccgaacatttcatttaccagagtcctggtcgctatcaacttatgaaagtattggtggctatagcgcatggcgaaaaattttaaaagagcaaacatcacctcaattaataattgaagagttgaaaacttctgccttgcgcggacgaggaggggctggattcccaaccggtttaaaatggagttttatgaatagaaactcccctgttcaaaaatacgtagtatgtaattctgatgaaggtgaaccgggtacttgtaaggacagagagattcttactttaaatcctcaccaattaatcgaaggaatggccatagctgggtatgttatgggcgccacggttggttacaactacataagaggagaattctggctaccttttgagcgtactgaggctgcaataaaagaagcatacgatgctggcttgctaggtaaaaatatattaggctccggctttgattttgatttatataatcatttaggcgctggtgcttacatttgcggtgaagaaactgcattgcttaactcaattgaaggaaaaaagggaatgcctcgttttaaaccaccattcccggcaaattatggcttgtatggtaaaccgacaaccataaataacacggaaacatttgcgtctgttccggttattatggaaaaaggtggagaatggtttttaaaattaggtaaaccgaacaatggcggtgccaaatgctttagtgttagcggccatgttaacaaacctggtaactatgaaattcccttgggcacgccattcaaaacgctacttgatctggctggcggcgtgattaaaggccgaaaaatcaaagccgtgattcctggtggttcctctatgccagtgctcccaggcgacgtcatgctggggctggatatggattatgacagtatacagaaagccggctcaggcttgggttcaggcgcagtcattatcatggatgaaaccacctgcatggtggatgctttgtatcgtatttctgagttctacatggatgaatcctgtggacaatgcacaccttgtcgggaaggcacaggttggttagtcaggttattacacagaattataaacggtcatggcgagccgggagacgtggagaaattagtgaatgtggcgaataacatagagggaagaaccatttgtgcattaggcgaggcagcagcttggccagtacagagttttgttaaacatttctatgatgaatttgaatatttcataaagcataaacgctcgatcgtcgcagca

SEQ ID NO: 25283 - DNA, 717 bp, Legionella pneumophila
aaaaatagcaaaggattacctggtcgttggaaatatttttggcagtcagtcattgctttagatgctgtctcttatttgtattggaatgccagtttgccagtacatactcagctcacagttcctttttttaaaacggtcacttgggatctgggcgttttttttcctgtacttgcctatttcgtcattgttggaagcagtaatgcagtgaatttaactgatgggctggatggcttggctattatgccaatagtaatggtggctggtgccttgggtgtgtttgcctatgcatcgagtaacgccgtatactctaattatttaagaattccttatgtgcccaatactggtgagctaacgattttttgttcttctattgttggtgccggcctgggttttctttggtataacagttatcctgcccaagttttcatgggcgatgtgggctctttggcgttaggagcagctttagggatagttgcggttgtagttagacaagaacttgttttgctcattatgggtggattatttgtaattgagacgctttctgtcatattacaagtgggttattttaaatattcaggcggaaaaagattattcaggatggccccattacatcaccattttgaattaaaggggtggtcagagcccaaagtgatagtaaggttttggattattacggttgtatttgtgttatgcggattggctactttaaaacttcga

SEQ ID NO: 25284 - DNA, 750 bp, Legionella pneumophila
atgaaatttattcagggattattgctttctttcctttttctagtttcacctctccacgctcaaaacgagcctgtacctttaatagtaggtgtaggaggcttttaccctccctttatcatgcaaggaaccaataatgaactctttggttatgacatcgcaaccatgacagagctgtgtaagataatgaaacgccaatgtaattttcgagtcatgagattcagacaattaattcctgctctgattaacaaacaagttgatgcagcgatcagcgccatatctattacttcagaacgcgcaagcctggttaatttcagtatgccctatttattgagttactccagatttcttacaaataatatacacaacactcatcaaccgtttaatttaatgctcttaaaaggtaaacgaatcggtgtagaagaaaatacggtgtttagccaagaaatcaggaggatggggataatagaccctgtgatagtcgaatttgacagaacggaagagatgcttgaggccttaaatgcaaatgaagttgattttgttctgatggataatcctgctgccttatactggtctgctaattcgtccggaaggcttctggtggttggtagtcccatgctggttggttatggtttgggcattgcagtaaatcgggaaaatgctgaattactcaaatcgcttaatgacgcattaatagaataccagcgttcagaaaaatacaaggaaaattacaacaaatacatgatgaatttt

SEQ ID NO: 25285 - DNA, 1368 bp, Legionella pneumophila
atgttacatttatataattctttgaccagaaaaaaagaaccatttgtttccttaaagcccggaacgataggtatgtatgtatgcggaattactgtgtatgaccactgccacttagggcatgcccgttcaatggttgcctttgatgtaatggttcgttatctgcgctcacaaggattcgatgtaacttatgtacgcaatataactgacatagatgataaaatcatcgcaagagcctcggagagaggtgtatctattgatgaattgaccgcacaatatattgatgcaatgaataatgatactcatgcattaaatattttgccacctgaccatgagccaagggcaaccgggcacattgaaactatcattcgcttgattcaacgtttgcttgaaaaaggtaacgcgtatgtcagtgagaatggcgatgtgtgctatgaagtagatacctttcccgaatatgggaaattatcgcataaagatattgaaggcttggtttcgggttctcgcgtagagattgtaaaagagaaacgttcaccgcttgattttgtgctatggaaaaaagcaaaaccgggtgaacccagttggccttcaccgtggggggaagggcggcctggatggcacattgagtgttcagctatggctatgcatgaattaggtgaacaatttgatattcatggaggtggattggatttgcaattcccacatcatgaaaatgaaattgctcaaagtgaagcggctacgggtaaaccttttgctaattattggctgcatgtcggaatgttgcaggttaatggcgaaaaaatggcaaaatcaatagggaacttttacactattgccgatgttttaaaagagcatcatccggaagtcatccgctattttctattaagtagtcattatcgcagtcctttgaattattcagaagaaaatttgttaaatgccaaaaaagcccttatcaggctttatcaagcggttaaagatgttccgccacaaaccgaagatagtaaactggatgagtattggcaagtgcaatttaatcaggcaatgaatgatgatttcaatactcctgttgcattatcggttcttttccaattggctcatgaggtaaacaaaagtaattcacctgcattggctcataccctgaaaaaccttgctggtattcttggatttttacaaaaagatcccgaatcattcttgcaatccggtttggcagaggaagaaaaattggttatagaacaactcattgccgagcgtcttcaggcgcgagcggaacgcaattgggcaaaggcagatcagattagagctgatttattgagcaaaggcatagagctggaagatggtgcaacaggaacaacatggcggaggattgctgaa

SEQ ID NO: 25286 - DNA, 768 bp, Legionella pneumophila
atggcgaaagtcatagccattgccaaccaaaaaggtggagtaggtaaaacaaccacagccatcaatttatctgcatctcttgccgcatccaaacagcaagttttgctgatcgatttagatcctcagggtaatgcgacgatgggtagtggggtagataaaagacagttggttcacacaaccaatgatgtcttgttacgtgattgcctggctgagcaggcatgccttgcgacaacttgcggatatgatttaattcccggtaacgaagatttaacggttgcagaagtcagcctgatggagcgcaatcatcgggaaactttcttatttaaagcgttacaacccatccagtccaattatgattttattttaattgactgccctcctgctttgaatacattaaccattaacgcctttgttgctgctgactctgttttgatacccatgcagtgtgaatactatgctttggaaggattggctgctttgttgtcaaccattgagcaagtgaaatcgacggtaaattcgcgtttgcacatcgaaggcgtgcttcgtaccatgtatgatgcacgtaacagattatgcgccgaagtttccaagcagttattagagcatttccctgcaaaagtgtatagaaccgttgtgccacgcaatgtaagactggccgaagcgccaagtcatggaatgcctgccttgcaatatgataaatcctcaccgggagcagcagcttatatggttctcgctgccgaagtgattagtaaacaaactgtagccagt

SEQ ID NO: 25287 - DNA, 237 bp, Legionella pneumophila
tctattactttacctcgtgtaagagattttcgtggtttgaatccaaaatcttttgatggaacaggaaactacagcatgggaatacatgagcaaatcgtgtttccagagattgattatgataaaacagacggaatacgcggtttagatatttgtattacaacaagtgctaaaacaaatgaagaagctaaagctttgttagaagcatttaatcttccactgaaagacaaagatagaaaa

SEQ ID NO: 25288 - DNA, 1812 bp, Legionella pneumophila
atgtgcgggattatgggagctgtttcagaacgggatattagcaagattttattggaaggcttgcgccgattggaatatagagggtacgattctgcaggtattgctgtcatagatagtcaagatcgtttaaagagagtaagaatccaggggaaagtgcagaatttggcggatgctatgcaagagaccgctatcgctggaaatacaggtatagctcatactcgttgggcgacgcatggtaaaccctccgaacaaaatgctcatcctcatttatctcatggagaaatcgcattagttcacaatggcattattgaaaatcatgaacatttgcgtcaacaacttattacttatggttatcaattcacatctgaaactgatacagaggttgctgcgcatttaattcattatcattaccagcagcatgagaatttattacttgctgtacaaaaagctgctgcagaaatgcaaggggcttttgcattaggagtgattcatcagaaaagaccagaagaattggttgcaattcgtaaagggagtcctttggttttgggatttggaattggtgagaatttcattgcatctgatgccttggcactcagatctttcgcacaatcagttatttacatggaagagggtgacagtgcttgtgtcacaacacaggatattaaggtctatgattccaatcgaatacttgttcaaagagcggttcatccgttgaacagtgattctgagatagtgaataaagggccatacaggcattttatgctgaaagaaatatttgaacaatcgaaggtaatcacagacacgttagaaagtcgaattaatagcattgatgtgctaagagcgagttttggtgagaaagcatcccatattttcccggtggtaaaaaatattcacattgtggcatgtggaaccagttatcatgctggaatgattgccaaatattggcttgaatcacttgccggcttacctacacaggttgaaattgcaagtgaatatcgataccgagatgttgttgtccccgacaataccttatttatcactgtatctcagtcaggagaaacagctgatactcttgctgccctatttaaggcaaagcaatcgaattatttggctagtttagctatatgcaatgttgcaaccagtactttagtgagagaggcggattgtgtttttttaactcgggcaggtattgagattggtgtagcatctaccaaagcgtttactacacagttagcagccttcctgatgttggcagcagcactttgtaaggacaatcgtgcgcaggaagttttaagacaattacaagagctgcctgcctgttgtgagcgtgttttgcagatgaatgaagaagtcgaatcattggcttctttgtttgtaaataaagttcatgccttatttttaggtcgaggggttcaatatcccgtagctctggaaggcgcattaaaacttaaggaaatatcttatatacatgcggaagcttatcctgccggtgaattaaagcatggtccattggctttggttgataaggatatgcctgtgattgcagtagcccctaatgatgaacttttagataaattaaaatccaatttacatgaagtgagtgccagaggtgggcagttatttgtatttgttgatgattcacaaaattggaaagcgaatggcgctcgtttaatcaaagttccatcctgtggtgcttggcttgcgcctattgtttacactattcctttgcaattgctggcctatcatgttgctgtagctaaagggactgatgtggatcaacctagaaaccttgcaaaatcggtgactgtagag

SEQ ID NO: 25289 - DNA, 2526 bp, Legionella pneumophila
atgcaatcgatggtgttccataaatcatccaattcttactacactgcatactatctaactgtagctttcgccactctaacatttatctttgggctgtctgttttaattggttggcattttaatattgagtttttaattcaataccaaccaaatacggtagcaatcgtttacaatacagctttatgctttattattttatccttttctatttttttattcctcaattgctactacaagtcagccattactttaagtactactgttttcattttatctggtttagcgcttacacagcatgtttttagtattaaccttcagatcgacgaagtattctttcatcactatcaatctattgaaaatgcttatccaggcagaatggcctctaatacagccttttgctttttattaatcactacagcacttgttttgatgaatataagaggctatcaatcctttaataattctctggcaggtgcacttggcttattagtattttgtttggctttattgttcataagtggttatttttcagacattcaacaggcttataaatggggtaataaaacccccatgtcaatcaacacagggattggttttttgttactttctttagcggtgatgggattatattggcacaataataccctttatcaattaaactctggtattgcaatgccttatttaagtgcattttgcattatgtttactttttccttgttatcatttgaaatttttaaaaaggaaaaagaactaaatttaagcactaatttatcaatcagtacgcttgctttaggagtttttttttccatcctgtttggattaatcattagattatggcaattggcaaaaatatcagccgtaactgctaaatacgcattatcagaaattaaggcaactctggaatctacagcagatggtattttggtagtggatagagcaggcaaggtgatgaattacaataaacgctttttaaatatgtggtatcaagaagaaagatctctgaaaacgataaattatcatgatataaaattgataattaataaacaattaatcaatcgaagggaaacaatccaaagaattaataagatcttgaaaaacccaaattatcaacacgcatttgagttaaaatttaaaggtgaaatatattacgattgctatactcaaccactaaaactggatgatgaaatcattgggcgtgtttggagttttagagacattactattcctaaaaggcttgaaatagagctatctcaccaatctacacatgacatgcttaccaatttacctaataaagtattggctattaacatgctgggatatgcaatgaaaacagctgttagtagtaaaaaaatagtaggagtatatttattagatttagatcgatttacacaaatcaacgatgtgtttgggcacagtaagggagatgaaataataaaagctatttcaaaacggttaattgattgcgtgccgatgaatcatatgcttggacgacttagtggcgatcagtttattgtaattgccagtattaacaatagtaaggaggtagttactggagtcacacgtttactgagtgcatttcacgaacctgttaaaatgaacggtcatagtattaaaatgagttgcagtgtggggatttcgttttaccctaaagatggaaatacagttgacaccttattgtctaaggctgacattgccctgtctcgaacaaaagttgaaggtcgcaatagttttcaattttatacacaagaaatgcatagctatactttagaacacattttactggaaagtgagttaaagaatgcagtggcaaaaaatgagtttgttttgtattaccaacctattctcaaattgagttctttgaatgtgattggttttgaagctctaattcgctggaatcaccctcgcaatggattaattcttccggacaaatttattcctcttgcagaagaaataggaataattggtgaaattggtgattgggtgttcgtcactgtatgcaaacagatacaagcatggcaacttcaaggatttaaaaatataaaaatttcaatcaacatttcaccaaagcagtttaaatttcaatatattcccaagaggattaatgaattattatctgaatttcaagtaaaatcagaatctattgaattagaattaactgaaaatatattaatagacaagtcgactgatattattgatactttaagtaaattaaaggaaatgggtatccaaatttcaattgatgactttggtactggttattcttgcttaagctacttaaaagacttaccaattgatattttaaaaattgatcaaacctttgttaaggatctaaaaaataatcaatccaatcaaactctaataaaagctataattgcgatggcaaaaaaatttaacttgagtttgattgcagaaggaatcgaaaaccaatatcaactcgaatttttaaaaaaactgggctgtcattatggacaaggatattatttttctcatccaaagccaaccgaaaaatgcatgcaatttttgcaa

SEQ ID NO: 25290 - DNA, 390 bp, Legionella pneumophila
atgactgaaataaacaaaataatacataaaaaaacttttgatatcgcctggggcgatatggacgcattaggacatgttaacaatgctcgctattttgactattttcaggaagcccggattgattggctccgggagcttgacatcaaaatgacaggtcaaacaggtcctgttgtcattcatgtggcctgtacctttctgaaaccaatcgtttatcctgctactgtaaccatacacagcaaggtaaatagtcttggcaattccagcatgattatggaccatgatttgtatcaggaagaaacgcttatggcacaaggtgtgagtaaaatagtttggattgattatacccaaaataaatccgtgcctttgcctgatattattaggaatttagtg

SEQ ID NO: 25291 - DNA, 1158 bp, Legionella pneumophila
atgaaaaaaaatgctcttcttatagtgttattaacctggtttcttggaaacatggatatacatttccttactccagccttgccatcattagttgattacttctcggtaactcccaatacagttcaactaactatcagtctttttcttttgggaaaagccctcagtatgattttatggggtcttctttccgaacgttatggaagaaaaccaatcttcattggaggactgttgttatttattctgagcaattttctgattgctctaaaccactccatccttccctttttagtatgccgatttctccagggaattagcgtaggcgctacccttctaatgggtagagcaatgattaacgatacccataatgaacaaaatgccacaaaatactttgcgtggttatttactctggctgggctgtttatttgctttcttccattttttggaggtttgataaacagttattggaattggcaaatcgcctctcttatcattgctgcctatggcctgcttttattacctttatgtcgaggtttaaaagaaaccaaaccccattatgtaaaattccctcgcctaggtcatagtattatggtggtcttcaaccatcccctttttgtttcttacctccttatttctgccttgatgatggctggagaatcggcgtttaataccagcgcctcttttattcttattaaaggagaaaattttaccagcgctcagtatggtacaatcaagactactatggcaattatgcatttattaggtaccgcttgttgtggcttaatagcaaaatattatcatagtatccaattaacaaaattaggagtacgtttctttattttcgcagcattcttgatgtggttatttgtcttttctgctgaaaatatatatttgacttttatagtgcctatggtgatttattattttggtacaggtttcattgttgcatcagcaacagcatcagctgttcgcccttttcctcagcaaatggctcttgcattagctatcactttattttgtcaatttaactgctccgctttctttagttttattaccagcatgataggaattcagcaagtagaaacttttatgttcttattaagtttggtaagtattttgagttttcttgcccttctaaaacttcaacgaatggagccctgc

SEQ ID NO: 25292 - DNA, 774 bp, Legionella pneumophila
atgaatagtatcctggaacgaatagcaaaacataaactagaagaagttgcagttgcgaaaaaaaataagcctttacatgttctgtcaaaacaacagccgggggaaatgcgtgacttcataactgctttaaaatccaatacctcacctgcagtcatagctgagataaaaaaggcttctccaagcaaaggtttaattcgaaaagattttaatgttgcagaaattgccaagatttatacccaaaatggcgcaagatgcttatccgttttaacggatattgagttttttcaaggtcatcctgattatttggctttagcaaaatcaaaaaccactttgcccgtattgcgtaaagactttattattgattcttatcaaatctatgaaagccttgtcttgggtgctgattgcattttactgattgtcgcattattagatgatgttcaattaatggatttttgccaactggctcaagaacttaaaatgtctgttttggttgaaagccacacgcaagatgaattagaaagagcattacgcttacccaccccccttataggcattaataaccgcagcctacacaactttaaaacagacattcaactgagtatccaattaaaacaatttgttcctaaagataaaattattattactgaaagcggaatcaacacccgtgaagacataaaattaatgcaatcccatggcattaatgcctttttgattggagagagtttaatgagggcagataacatcgggaaagcattacagaaactaatgactgac

SEQ ID NO: 25293 - DNA, 969 bp, Legionella pneumophila
atgagtctcaggatattgtctttaagcgatgtaaagcagagcatcaccatgcatcaggcaatcagtgctttggaaagcgcatttattcaattggcaaataacacggtgaagttgcccttgagaacgggtgttaccattgaggaagaaaacggattaatgttgactatgccgggttatcttgcccaagaaaaaagcttaggcttaaaagtagtatccatttttcctgaaaatttgactaaaaataaacctactatcactggttttattatgttgcttgacgcaacaacaggtgaagctaaagtattaatggatgctgcttacctcacctccttaagaacgggcgctgtttcaggactggcgacaaaatattttgcacgcgataatgcgactcaggtcgcgatcattgggtcaggtgctcaagcgaaaacacaacttgaggcagttgcttctgtgcgagatatacaacaggtttttgtttggtcgcgcaatattaaaaatgccgaaaaatttgctaacgaattcgaagatcaatttgatatgacaatttgtccttctgtcgccatggcagtgaaagatgccgatattatttgtacagcaaccaatagcacagaaccactgattcattttggagacatttcgccacatgcccatattaatgccataggctcgcatcacccttcaatgaaagaaattagccatgatgtgttaagccgagcagtggtgattgctgatcagttagacgctgttttagctgaatcaggggaaatcattagtgcagtagagcacaatcatttaaaaaaggaattgattattgaaatcggtcactggctattacaaaaaaatactgactataaagataagcttacagtgtttaaatccgttggtttggcaatacaggatttaagtgttgctgaagcagtttatcaaaatgcattgaaaaataatcttggtgagatcttttctattagt

SEQ ID NO: 25294 - DNA, 921 bp, Legionella pneumophila
gtgaatatcttattggcaggaggctctggattaataggacaagagttagttcgtggaatgggagaggagcaccattatactgtgctggggcgtgataaggacgcaatacaaaagatttttacaacaaaagcatcctctttgtcctgggatgaattaaatacccaggatgccagtcggtttgacgctgtaattaatttatgtggcgtcaatattgccatttcacgatggacaccaaaaataaaagaagaaataatcagttcgagagtgcaaacaacagaaaatttgcttcattggattttgcagcagaatgccaaacctcgcttttattgcgccaatgcagttgggatttatggtttacaggaaaatggtgacgcaactgatttgactgaagacacagcaattaattgggaacacccaaaggattacctaagtgaagtgggaattcgttggcagcaagccttacaaaaggcagaggaggcgggccttcctgtgacttccacacgctttggcgttgttctaaaaaaggggaaggggtttttagggaagctctatcccagttttatttgcggattaggaagtactattggggatggtcgccaatatctttcctggatagacagtgaggatttggtcaatgcctatcggtttttgttaaatcatcctgaaattaccgggcctgtgaatgtgacctcaccaaatccatgcatgcaaagagaatttgctaaagcttttgccaagtctctgcataggccactattattgtggactcctgcttttataattcatcttttatttggtgaaatgggtgattgtttaatcaatcacgggcaaaaggtaaaacccaaacgacttttggaagctggttttgagtttaaatggcctgacattgaaaaggcattaaagcaccagtattctgctata

SEQ ID NO: 25295 - DNA, 2931 bp, Legionella pneumophila
atgattaaaaaattgttaattaaagtcgaaaaattaattaataatctcccaaaagagtttaaattatctgaaacagttttattctccattaaagaagatataaacagcttggcaagtcgttttgatgggtcaaaaggctatattaattattattctccaaaagtcgtgcaacaaatcaatgacaaacaaaagttacttgagaaatacaaaagttatttaactgcattactcgctgttttaatttgttctaagcaaagcaaagacattagagacaataaaaaacttcaacctgtttatgagattaccgatttaaaaaatttattagaacgcaaggatgtcgaaaaaattatcaatgaaattacccaatttgatgaggatcaaagagaacttcagagaattgaacgtcagatacaaaaagatgaggagaaagaggataatcaaaaaatgcatcttggtaaaagatccaaattagagcttaggagggcagagctttctaaaagagttcaattgtttaataataagttaaaaaacattccacaagctgaggaaatcaaagccgttttagattattgtcaaaaatacatcgagaaacatatcaaccttagcaagcaattaccaaaaggaatgcttgatgttaaacgagcattgtctttatttgacgagataaattccaccaagacccaaattaggaagttaagcaaagacaaactggattcttcagggcaaataaaacttgaaggtttaaaaaaggaacttacaaaggctgaattggctttgcaatttagttattcagaggaagaagataaaactctcaaagacatgctcaatgatttgaaaaggcttatgaaaatgagcatcagagattatcaaaagttagctacatctggcggagaaataaatgtttttttgcataagacaactggtttttattgggaaagcctttttctgtacagaaatgttttgtgcgaaattaatgaatatcttaaaaaaaataaaaagaaactgtctgagcaaggaatgctggtagctgaatgcatttctaaagccttcagccagatgcctgaattggataccattgaaaaagctttagaaaaagtcaaaagaatagatggtgatcttcacagacaagaagaatataacgacaaaatcaatggtgcttggattcggttttataaaaagggtccagtaaaatttgttcaaaaagtccttgaacaaaacttagatgagaaaattttttacataccgtataatccgcataattacgtgctggatcatcctgcccaatctgatttcgccgataccttaggaaattgctatggcgaaacacagatgtttctcaaacaaataaacagtaaatctccttcaattaacaatatttgtcctgagagagtattaattaattatcagcttgatcaatccaggacaattgctaaaaataccaaaaaagaaaaaatagggatatttgaggcagatgagaagacaaaagcacaagtaacatgggatggaattaaagatatcttaacatcaaaagttacctctaccgcttttggtgatgtgtgcatgatcactttgacgggagctcaagtttctggtcgtgaaaaattagtaggtcatggtattggccttatcaaaatgaagaatcctgctccttataaatatgtggtatatgattatgcttttggcggtgcaatgggattcagcagtgatactcaactggagctattctttaaacaaatccttgaaggagagggatcttatgttccttttaaggaatgtctggttgaaaaagtaggagaggtgagtaaagaatgtcaacaatttattaatggtaatccgggtattgcttctctggcacaaaaaagtcttgataaaacatgtaagagagacttctgggataaagatcgcatcagttttttgataagatatcaccccatcggcacagatgaaagcaggatacttgatttaatagaaaagttacctctatctaaggatagaatagagctatatgaacagcttgttaaagagcctaaaattggtatcggtaacctggttaagtgtatcattcgctcaggtaagataagttacctggcaaatcttttgacaaccaatttattgaccgttgatattacaaataaaataaaatttaagttgaatgaacaagttaaaaaagaaatagtggctttaattaataatgatcagattgaaccaaacacaacttgtaaactattctctaacaatcaagcgattgttttggcaacctataaaaaggacaaaaactcactccaatatgcggacatagatccggttgtaacgcttttgcaagggaagaataccatcgtaccctctgatgcttgtcgggcttttcctaaggcagaaaaaatagtcatcgcagcctataaatcggatccattatcgttgcaatttgccgatcttggtttggttcaacaattattacgaaaaggttctattaatctcgagcatgcttctaaagcttttacagagagctcacaattcaaggaggccaatgaagcttatcagcttttaaaatctctgaagcttctgccaaaaaatgaaaaagaaactgagaaagccaagagaatcgagttattaaaatcgattgatcaaaagctggaaattactaatttgagacaagaactttatcccttaatttcaaatatgtgtattcgattacttgatgatattcgaatcctgtcccttgaagatacaataatcaaaaacaccagattgtccaagttaatcagttcgaaacagtgtgatatcaatacattaaaaacacttgaaaataaaaaaatggaattaactaaaacatgttctctggcaaaatcaaattttactttatttggagctacagataataaagttgatggaggaaatgctaatactcataaccacatcactccagagaataaa

SEQ ID NO: 25296 - DNA, 1296 bp, Legionella pneumophila
atgaaaattctggtaacaggcgcatctgggtttatcgcttcacagtttgttaccgatctgctgattgctggacatgaaatcatttgttgtgtacggaataccaaacacacgcaaaggatttttcctggggcacaagttatcttttgtgattttatcaatgacacaaaacctgaaatctggtcaaaaagattgcaggggattgatgtggttattaattgtgtagggattttataccatcctgatgagagaatcatatggaatgtccattatgaaactccaaaagcactttttgatgcgtgtataaactctggggtaaaaaaaattattcaaatatctgctttgggaattgataaagttgatgtgagttatgctacgagtaaaaaagcgatagatgattacttactgacactctctatcccgtcagttatagtaaggccctcttatgtgtatggaaaaggctcttatggagggtcttctctattcagagggattgctggaacacctttttttaccgctatacctgggcaagggacacaaaaatttcaacctatctctctaaatgacctatctcaagcaatagtacgattggtgagtacgcctgtaaccgaaactattattttgcatgccgtaagcaaaaaaataatcacgctagaagaaataataataaaactgcgttcctggcttgggttcaccaaaaccagaataatacatattccattgacatttattcgactattgacccgacttggcgatttgctcccctattcaactataaatactgtttcgtataaaatgcttgccagtgataacattactactcaggaagaaacacagcgatttgctaattatgttaactttactccaagagactatgaagaaggtctctatagtcaaccgagttcagtccaagaccattggcatgcgcaattatactttcttaaacttcccctaagactcggaatatcctttgtctggatttggacagccttatgttgtttgtttttttaccctaaaagtgactcattaactttgtttgctcaaataggtttttcatccttatggcagttattcttattttatgcttcagctttatgggatggccttttaggtatagccatgttgtttaattatcgatttaaattgaccagtatattgcaactgattaccattttggtatatacagtgattattaccatcaaactgccttacctttggttagatccatttgctcccatagccaagaacattcctttgttaatagctattttaataggtctgggtttggagtctgataaa

SEQ ID NO: 25297 - DNA, 1110 bp, Legionella pneumophila
atgaatatttttaatctacccgatttaggtgaaggtttacctgacgctgaaattcatgaatggtttgttaaggaaggcgacacagttaaagcagatcaacctttagtttctatggaaacggcaaaagcagttgttgacgtaccctgccctcaatcaggcactatcgcaaaactttatggcaaaccaggtgatgttatcaaaacaggtgagcctcttgtagcgtttgtttcaactaccgaaaaacctgcagataagggcacagttgttggtaatctggaggaaagtactgatgtgtcagaagataattttattattggaagtcagcgttcttctcaccgcgttaagacaacacctgctgtaagattgttagcaaaaaaattaggagttgatttaagctctttaaaaggtagtggtgacaatggtgttattactcgagaagatgttcaaaatcaggccaatatcaattcacaaccacctgccgggtttgagcacttgcgaggtgttagacgagccatgcttaatagcatggtacaatctcatgcagaaatagttccagtcagtatttttgatgaagcagatatccatatttggaaacccaacacagacattactgttcgtttaatccgggctattatccatgcctcaaaaaaggaacctgctcttaatgcctggtttgataccaaacatgccgcacgtagatgctttaaagaagtgcatcttggcattgccatggacaatgaggaaggtttgtttgttcctgttatccatgatgcagaaaaatactccgacagtgaattaagaaaaataattgatgaattcaaagagtcagttcgtaatcgggcggttagtgcagacaagctaaaaggggcgacaattacgttgtctaattttggaaaattttcaggacgttttgccagtccaataattgttcctccaatggtagcgattttagcagttggaagactttataaagccgcagtaattaatgatgaggataaaattgaagcccacaaaatgcttcctttatccttgagctttgatcatagagctattaccggaggagaagccactcgatttttaggtgctgttattgaatctttgcaacaagca

SEQ ID NO: 25298 - DNA, 2536 bp, Legionella pneumophila
atgcgaatggacaaactaacatcaaagtttcaaatggcacttgcagatgcccaatccctggctttaggtagagacaatggatttatagaaccagaacatttaatgaaggccttgcttgatcagcaaggtggaagttgcagacctcttctcagtaaagcgggtgttaatataccactattaagaactttaattgaccaagctctggataaactacctaaagtatcaggcaccggaggagatattcacatatctaatgcattgaatagactacttaacctgactgacaaattatcgcaacaaagaaaagataactttatttcaagcgagctttttatattagcagcgataaatgaggatagtaaccttgcaaaaatacttaaacaagccgggggtgacaacaaagcaattgaaaaagcaattgatgagttaagaggtggagaaacggttaatgatccaaatgcagaggaacagcgacaagcccttgaaaaatatacactggatctgactgaacgtgccgagcaaggaaaattggatccagttattggacgagatgatgaaatcagacgcaccatccaggtattgcaaagaagaactaaaaataaccctgtattaataggtgaacctggtgttggtaaaacagccatagtagaaggtttggcacaacgaattattaatggtgaagtacctgaaggattaaagaataaacgcttactggcgctggacatgggtgccttgatcgcaggtgcaaaatatcgtggagagtttgaagaacgcttaaaaggggtgcttaatgatttggcaaaacaagagggtcaaatcatattatttattgatgaattacacactatggttggcgctggcaaggctgaaggagctatggatgccgggaatatgctcaagccagcattagctagaggtgaattgcattgcattggggctacgacattagacgaataccgacaatacattgaaaaggatgctgcccttgaacgacgttttcaaaaagtactggtcgatgaacccagtgtggaagacactatcgctatattaaggggacttaaggaacgttatgaagttcaccatggagttgaaattacagatcccgctttggttgctgcagcaacgctatcccatcgttacatcagcgaccgtcaactacctgataaagccattgatttaattgacgaggccgccagcttaatccggatggaaattgattcaaaaccagaaagtatggataaactggaacgacgcttgattcagctaaaaatcgagcgtgaagcattgaaaaaggaaaatgacgaagcatctaaaaaaagacttgttgatttacaaaaaagtatcgatgaattagagcaaaattattcagacttagaagaaatttggaaagctgaaaaagcgaccatgcaagggtccactcaaatcaaagaggcacttgagcaagccaaactggaaatggaaactgcaaggagagcaggagatttaagtcgtatgtccgaattacaatatggacgtatacccgagttggaaaaaagattaagccaagtctcttccgttgatgctatggaaacaaagttggtacgcaataaagtcaccgaagatgagatcgcagaagttgtttcaaaatggacaggaatcccagtatctaaaatgatggaaggagaaaaggaaaaactgctgaaaatggaagaagctttgcacagtagactcattggccagaatgaagcggtggatgctgtttctaatgccataagacggtcacgcgcaggcctgtctgatcctaatcgtccaattggttcatttctttttctggggccaactggtgtgggaaaaactgaactatgtaaagcacttgcttcttttctttttgatacggaagaggcgatggtgcgcattgatatgtctgaatttatggaaaaacactctgttgcgcgcttaatcggagcgcctcctggctatgtaggatatgaggagggtggctatttaactgaagcagtcagacgcagaccctattctgttatcttacttgatgaagtagaaaaagctcatacagatgtatttaatattctgcttcaagtgatggatgatggccgtctaacagatggtcagggacgtactgttgactttaggaataccgttattgttatgacctctaatctgggatctcaactcattcaggaaatgagcagcaaatttaattacgatgagattaaggctgcggtaatggatttagtcagccaacatttcaggcctgaatttatcaacagaattgatgaatcggtggtattccattccctgacaaaagaacaaattgcaaaaattgcagcaatccagattaactatttacatcatcggctgaaacaacaaaatatcactattgaagtcacaagtgaggctttatctcatttggctgaagcaggttttgacccggtctatggtgcccgccccctaaaacgtactattcagcaaaaattagagaatccactagctcaatcattattgactggaaaatttaaatccggggataccattattg

SEQ ID NO: 25299 - DNA, 1044 bp, Legionella pneumophila
atgtcagaaactattggttatgccgcccacaaagcgggagcccctttaaaacctttcacttttgaacgccgccctgttggtgcacacgacgtagcaattgatattctattttgtggtatctgtcattccgatttgcatcaagtcaataatgattgggcaggagcattctatcctatggttcctggacatgaaatcattggacgagtcaaggaggtaggacatcaagtccgccggttcaaagcaggagatttagtgggcgttggctgtatggttgactcctgccgtcaatgcacctattgccatcagcatgaagaacaatattgcaaatctggagcaacttttacctataatagtcaagacaatcatctgggaggggtgacctacggggggtattccaaacatattgtcgtcactgaagattttgtattaaaaattgatgaatcacttgatcctgccgccgccgcaccattactctgtgccggaataaccacttattcccccttgaaaagggctaaagtaggtaaaatgagtaaagtaggaatcgtaggcctgggtggcttaggacatatggctgtcaaattagcccgtgccatgggggcttatgtgactgtatttaccacttctataaacaagataaaagcgggtaaagatttgggagctcatgatgttgtcttgtctaccgacaacaatgtcatgcaaacactagccaatcaatatgattttattcttgatactgtttctgccaaacatgatcttggccaatatttaaaccttcttaaagtggatggacaactaacccaggttgggcttccatcagatccacttgaagttaccatgtttcctgttattttaaaaagactgagcattaacggctcattgattggcggcattaaagagacacaagaagttttggatttttgcgccaggcatgggatcaccgcagacattgaattaataaaaatgcatgaagtaaattctgcctacgaaagactgttaaaaggagatgtgaaatatcgatttgttatcgatatgtcaaccctggat

SEQ ID NO: 25300 - DNA, 2661 bp, Legionella pneumophila
atgttagctgaatctgttatcggtatagtaagagccgtcaatggactgctagaaaaagtaaatgtgcaaggacaagcaagcttagtaaagtctggcgctcgattagaggaaggggatgtacttactttattaagtggtgaggcttacatacaatttattcatgggtttcctgaagcactggccttagaaaaaccggtcaagctagatggtgtttccccaacactacagtatggtgcggaagatttaaaagaacaaatggtccaagaagcgatagccaaaggtattgatccttcagtcatacttgatgttctcggctcagcagcagcaggtgcggtagctgttggttcaggcggcgatgcctttattatcgatcctttgtttggtttcggacatgtcacagcaggatatcctaccggccctatttcctttgcttatgaggcagacactcagcaattattttggtttgtgccagaagagacaggggcgattgcagaatctgaattgactaccgaacccgaatttactccgcaaattcctcaattcactacaaatcaagcagtgctaacagtctttgaggatgctttgccaagtggtattccagattcagcaggacaagcaagaacagcaagttcttctctaagtactttgctaacttcttcaccagacgttgctgcttcctttgcatttaataccaatttaagtgttcttcctacattaaaatcaggtggtatagaccttgactataatttatcccctgataaacgcactttaacagcatcaatccctggtgggggagatgtcatgcaatttgagttgacagcagatggacggttaactcaaacattaatggattcaattgatcacccaacaactgatagcgatgacggcgaatggatgagattagacctttcacctttaatttatgtgactttcacaagaacaagtgatggcactgttttagagtcaagaacactgcctgctaatgcagttgttgcaggaattcaagacgatgttccaatagcaagggctcaattgaccaataatgaaatcttgctcgatgaaactgtaggagtgaaagtcggggatgctgatgcagctaatgatgattttaatccaacgatcactacggatccttttaataatacttatggtatacccataggtctggtgcaaaatgcgaatctcctcgataacggtacttctgaaatggggggggattataaaaatgcaacaatgacccatttgttaaaaattaccgatgctgtttcaggattacagacaactgacggtacttctatcaatctctttttggagtcgaatggtgatattacggggcgagcaggcgatattggtgagcctgcagtttttgcaattcgcatgaatccaaataccggctcaattactgttgcgcaatatggttcaatcaaacagtttgataccaacagccatgatgaagcggttgatttgacaggtcgcatttcagctgttgttacagccaaagacagtgatggcgatgtatctaatgtagaaatacctataggacaattgattatttttgccgacgacggtccgagcgtgacgatggcggtgagcgataataatgcgatcaccttgaacacccaggatgccgatacgattggggcagccagtgacagcgacagcgcaagctttgcggccgcctttgcggtgactcctaattacggggccgatggtgcgggcacgacggtgaccacctacgccttgagtgtgtccgcccaaggggtggattccggccttgataacaacggcaacaacatctacctgtacaacatcgcaggttctgtggtgggttcaacatcagccacgcaggcgggtattaccacaggcaacaccatcttttcattggatgtgaacagcagcagtggggtggtgactttaacgcaacaccaggaagtggaccacggtttgccgggagccagttccaattacgcggctcaggaagcgatattgaatacgggcctggtctttttgaacgccaccgcagtgacgacggatggggatggggacacggcgaccgccagtgcgtctttggatttgggcggcaatgtgaagtttgatgacgacggtccgagcgtgacgatggcggtgagcgataataatgcgatcaccttgaacacccaggatgcggagacgattggtgtactttccgacaccgacagcgcaagctttgcggccgcctttgcggtgactcctaattacggggccgatggtgcgggcacaacggtgaccacctacgccttgagtgtgtccgcccaaggggtggattccggccttgataacaacggcaacaacatctacctgtacaacatcgcaggttctgtggtgggttcaacatcagccacgcaggcgggtattaccacaggcaacaccatcttttcattgggcgtgaacagcagcagtggggtggtgactttaacgcaacaccaggaagtggaccacggtttgccgggagccagttccaattacgcggctcaggaagcgatattgaatacgggcctggtctttttgaacgccaccgcagtgacgacggatggggatggggacacaggcaccggcagtgccgtttttgattttggcgggaatgttgaatttgatgacgacggttcgagccgtaccatggcg

SEQ ID NO: 25301 - DNA, 816 bp, Legionella pneumophila
atgattgatttcattggaaagcatctcgatgaagagctttctcttgaaagcttaagtgaaattttttgtatatcaaaatttcactttcatcgcttatttactgcatttaccggattgtctttgcagcagtatattaaatggctacgcttaaaacgcgctgctcatcagcttattgtcgataaagatcagtccgtcattaacattgcaatcaatgcaggttttgagtctcatgaagccttttccagggcctttaagaaagcttgtgggtttagtccaagtcagtttaggcaaggttttgggaggtcatattgggagcagccaccgtattgtttgcccggacagagtagaactgatatgaaagtagatattaaaagtattgataagatacgattagctgtaattgagcacaaaggcgatcctaaattgctgggtgaaagcattaacaagctggtatcctgggcaaaatctcaatcgattaatcttaaaccacgcgccggagaagcgtttgcccttgcttatgatgaccctaaaacaacaccaccatctgattttcgtattgatcttgggatcaaggtccccgaaaatttaaaattggatggtgtgattgaaaagtttctgccatcaggtcgttatgcagtgacggtacacaaaggttcgcgtaataatattggtgatgtggtttattatctttatcgagattggttacccaatacctcagaacaattaggagatttaccctgtatcttctgttattacaattttgatcatgaagtagctgaaacggaacttttaacggaatgttggcttttgttaaaa

SEQ ID NO: 25302 - DNA, 1431 bp, Legionella pneumophila
atggaatgggataccgtcattggtcttgaggtacatgctcaattaaaaaccaaatcaaaattattttcaggagcatctactgcttttggtgccacccctaactcgcaaacgagttttatcgatgctggtttgcctggtgttctccctgtgttaaatgaacaagccatcataatggctatccaatttggtttggcaattcatggaaccattaatgatttgtctgtttttgaacgcaaaaattatttttatcctgacttacccaaaggctatcaaatcagtcagtatcaaaaacccattgttactaatggctatttaaatatacagcttggtaataacctggaaaaaacagtccatattgcacgcgctcatttagaagaagatgctggcaaatccctacacgatgcccatactgattacaccgggatcgacctcaacagagcaggtaccccactattggaaatagtcacaaccccttgcctgtactcggctgaagaggcgattaattatttaaaaacgctgcatcaattagtgagattccttggaatatgcgatggcaatatgcaagaaggttcttttcggtgtgacgtcaatctgtctataaaacctaaaggcagctcagttttaggcacacgaacagaacttaaaaatctgaattcatttcgttttattgaaaaagccattgcttttgaacaggcaagacaccaagatatattggaaagcggtctgtcagtcatccaggagactcgcctttacaatcctgacaataacacaactcaggcgatgagaggcaaggaaaatgaaaatgattaccgttattttcctgatcctgatttattaccaattcatattgacaaagaacaagttgaagagattaaaaataacctgccggacttgcctgaagcaatttccaaagaattaaaaaacactccgtccctaaatgatgaagacattaatttcatattatcatcaccggacacttatcaatattacaaaaaaattaaatccctttgtccggctgctgataaaacaattatcaactggttaaaaggccaatatgccgcctttcttaatgaacacaacctaacctttgaaacaccaccaatttcagctaaaaccatggctgcttttcttagcaaaattcatgagaaaaaaatctcttctagtattgctaaaaatattttcagtatgctttgcacaggtgaaaaagatatcgatgcgattattgaacgcgaaggctaccagcaacagaatgacaactcggcactggaagaaatagttgagcaaataatcaaacaatatcccgaacaagttacagaatacaaagccggtaaagagaaattattagctttttttatcgggcaagcgatgaaacaaactaaagggaaagcaaatcccgagcaaatcaatctgttattaaaaaaacatcttgga

SEQ ID NO: 25303 - DNA, 1674 bp, Legionella pneumophila
atgtctgaaagtttcaaagaattatttgagcaaagtattgccggagctcaattttatcctggtgccattattactgctaaagtcatcgatattgatgatgattttgttactctcaatgctggactaaagtcagaaggtattgttgccgtagaagaattctacgataaaaatggcgaattggaagttaaagtaggcgatactgtcgaagtggccctggattcagtagaagatggtcacggcgaaacgctcctttcaagagaaaaagcaaaacgccaggaagcatggcgcaagttatcgaaatgccacgaaaataatgaaacagtcactggtttgatttctggaaaagtcaaaggtggttttactgtggaaattggctcaatcagagcatttttaccgggttcccttgttgatgttaggcctgtaagagatccatcttacctcgaaggtaaagaacttgaatttaaagtcatcaagatggatttgaaacgcaataatattgttgtttctcgacgagctgtagttgaagaagaaagtagcgctgacagacaagcactactggagtctttacatgatggtcaagagcttcacggtattgttaaaaaccttaccgactatggtgctttcattgatcttggcggcatagatggtttgttacatatcactgacatttcctggaagcgagtcaagcatccaagtgaagtattatcagtaggtcaggatgttaaagtcaaagtactaagctttgatagtgaaagaaaccgcgtttccttgggtatgaagcagttagggaatgatccttgggttgatttggttgaacgttacccaataggcaagagattgcaaggtaaggtaaccaacatcaccgattatggttgctttgtcgaaattgaggaaggtgtagaaggtttagtccacatgtcagaaatggattggactaataaaaatgttcacccaagcaaagtagtgtctctgggagatgtagtagacgttatggttcttgaaattgatgaagaacgacgacgtatttctttaggcatgaaacagtgtgtgggtaatccatggcagcaattcgcatctactcataataaaggcgaaaaagtaaaaggcaagatccgttctattactgactttggaatctttataggtcttgatggtgatattgatggactagttcatttatctgatatttcctggactgttcctggtgaagaagcggtaaaacaatttaaaaagggtcaagagttagaagctgttattttagcaatcgatccagagagagagcgtatttctctaggattgaaacaattggaaggcgacagttttgccagttttgctgaaacttacacgaaaggatctattgttaaaggtacagttacagctgtagaacctaaaactgtaacagttgcgttagcagaagatgtttctggcacaattcgtgtgagtgaattatccgatgaacgtgttgatgatgctaccactatcgtaaaagttggtgatgaagttgaagcaaaaatcactaatattgatagaaaaaatcgcaccatttcactttccgtcaaggcaaaagatgcccaggatgaagcggatgcaattaagaagtactccagaacagaggcagcatcaactactctgggtgatttattgaaagaaaaaatggctagcaaagaaggtgaa

SEQ ID NO: 25304 - DNA, 2622 bp, Legionella pneumophila
atgggacatggttttcaacacaccataatggatgcattaaccagatatcatcgcatgcttggtgacaaaacattatggcaacccggtaccgatcacgccggcatctcaactcaacttgttgtagaacgtcaactggaagcccaaggcgtatcgagaaaagatctcacccgtgaacaatttctggataaagtgtggcaatggaaagaagagtccggtaataccatcacgcaacaaatgagacgtttaggcgcttctgtagattggagtcgagaacgtttcaccatggatgaaggattgtctgctgctgtacaaaaggtatttgtacagctctatgaagaaggacttatttaccgaggaacccgcctggtgaattgggatcccaaactgggcactgctgtttcagatcttgaagttctctctgaagaagaagatggctttctttggcacattcgctatcctgttgttgattctgaagaatttctaatagttgcaactacacgccccgaaaccttactaggtgattgtgccgttgccatccaccccgatgactcacgtttcaggcaccttattggaaagcaggttcatctgcccttatgtgatagaacaatacccgtgattgcggacgattacgttgacaaggaatttggcagtgggtgtgtaaaaattacccccgcacatgattttaacgatcatgaagtaggcaaacgtcatcaattaccacaaatcaatattttaacaaagaaagggacaatcaataaaaacgcccccttaaaatatcaggggatggatagatttgttgcccgagagcaaatcattaaagatttggaaaaggaaggcttgctggcgaaaacagagcctcacaaattaaaagtgcctcgaggtgaaaaatcgaatgtcatcatcgaacctttattaaccgatcaatggtatgttaaaaccaaaccattggcagaacctgctatcgctgctgtaaagaaaggagacatccgttttattcccgagacatgggataaaacctatttccagtggatggataatattgaggactggtgtatcagccgccaactatggtgggggcatagaattcctgcgtggtatgataatcatggtaatatttatgtaggttatagtgaaaacgatgttcgctttaaacataaaattgatcaatctactcccttgaaacaagatgaagatgttctggatacctggttttcatcagctctctggcccttttcaacattaggctggcctgagcgtactcccgaattggaacaattttaccctacttctgtactggtaaccggatttgatatcatatttttctgggttgcccgtatgatcatgatgggactaaagttcactgggaaaattccttttaaagaagtctttataacaggtttaattcgtgacagtgaagggcataaaatgtccaaatccaaaggaaatgtactggatccattggacattgtagacggaattgatctggattctttaatagccaaacgaacgtctaacctgatgttaaattctgttcgtgacagaattacaaaagccactcgtaaggaatttcctgaaggaatcagcgcttatggaacagacgcgctgcgattcacttactgctctcttgcctcaacagggcgtaatgtgcgttttgatttaggacgagttgaaggatatagaaatttttgcaataaactatggaacgcagctcgctatgtcttattaaatacagacgaagagcaaattgattttggggatggcgcatttcaatacagcccagctgatcaatggatactatcccggctacaaaataccgtaagtaaggtgcatcactattttgaaacctatcggtttgatctcctcgctaatacgctatatgaatttgtctggcatgaatattgtgactggtatttagaattatccaagcccatattacaggatgaccaggctttaagcgccatgaaaagaggcacgcgaagaactttaattcatgttctggatcaaatattgaagcttcttcatcctctgatgccatttattacagaagagatttggcaaaaaactaccaaatttaccagtgaaaatgggattagtatcatgctgagcacatatcccaaagtcaatgaggaattcataaaccccgctatagaggaagaattggattggttaaagtcagccattcaatcactacgaaccatacgcagtgaaatgtctatctcacccgccaagttaatacctttatacatacgcaatattactcctgaattaaaggagcgtatcgcaaaatatgaaaaaattctcaagacgctaagcaagatagacaaaattaattatcttgctcctgatgagaaagttcctgtttcagctactgcggtattgggtgaaattgaattgttgattccaatggcagatttgattgataaggaggcagagttatcaagactgaataaagagcttgccaaattgaataaagacatcgagctggctcagggtaaattaaataaccctaaattcactgataaagcgcctgaagaaatcattgctaaagaaaaagacaaattagctcaggctcaagtggctaaagataaacttttgcaacataaaaacaggattgagtcatta

SEQ ID NO: 25305 - DNA, 840 bp, Legionella pneumophila
atgaatataaaacaaaacgacacatcaaccactccccctattttatatggtacagcatggaaagaagatgacacaaaacgtttggtgctccaggcactcaactcaggatttcgagggattgatactgccaatcaacgtaggcattattttgaagaagccgtgggtgatgcaattgatcaatttttaacaactagtcaaaaaacacgcagtgatttatttctacaaacaaaatttacctctgtacatggccaagatcatagaaaaccttatgatgaatttgattcattgaccaaccaggtcaagcaatcctttgcaagctcactagaacatttacagacagactacattgacgcctatatacttcatggcccttcactatctcatggaataatcgatgcagatttagaaatttggcaggccatggaagagctggtgtgtagtagaaaggtaaagtttctcggcatttctaacgttaatatggtacaagttgaagaactatatagaaaagtctctataaagccgtcgtttatacaaaatagatgtttcgccataacacaatgggatcaagacgttaggacatttagtcaaaaaaacaagattatctatcaaggattttctttgctcactgcgaatcagcggtatttattaaaccctcacatgcaatcacttgctgtaaaatatgataaaaccatcccgcaaattatatttcgctttgcaaaccaagtggggatattgcctttaaccggcactacaaatcaacaacacatggataatgatttaaacatatatgactttgagcttacacaagaagaaattcaatatatagaaaatataggatta

SEQ ID NO: 25306 - DNA, 885 bp, Legionella pneumophila
atgaaacattcattagcaacaatagaagaggctgtggcgacacttaaagccggtaaaatgattattctaatggatgatgaagatagagagaatgaaggtgatttggtgattgctgctgagcacgctactcctgaagccattaattttatgtctcgtcttggttgcggtttaatttgtttgcctatggctgaagaattgatagacaaactccaactgcccatgatggctcggcataacaaatcgccgtatggaacggcgtttacggtttcgattgaagcagctaacggtgtctccacaggcatctcagcaagagacagagctcgaacaattcaagtggctattgatccaaaaagcgggccatctgatatcatttcacctggacatgtttttcctttacgggctagaaagagaggagttttagaaagaccaggtcaaacagaaggcagtgttgacttggtaaaacttgccggattgaccccggccgcagtgatttgtgaaatcattaatgaagatggaacaatgagcagacgtgatgaattagctcttttttcaaaaaaacatcaaatccctttagtcaccattaaagatttaattcagtacagagtacggcatgaaaatctgattcatcccgttgcaaccacacaaattcctctggaggagaacggtgtttttactatgactgtttttgagaatcagatagattcctgtgaacattttgtcttggttaaaccccctttgtatggtaatcaagtgcctttggttcgaattcattctgagtgcataacaggtgatgtttttggctccagaaaatgtgattgtggaaagcaactggagttgtctttatcccagatcggagcggaaggcggtatattaatttatttgcgt

SEQ ID NO: 25307 - DNA, 1887 bp, Legionella pneumophila
atgccctcaacaagaaacattgaaacgcataacgactccaatcccacattgcgagcactaagcctatcagccttgggcatagtttacggagatattggaacgagccctctttatacttttaagacggtgatattgctggctggagggggaactccagccgtaaacaccattatgggttcggtatcattgattatatggactctgataatcatcgcatctgttaaatacatccactttgctttacggattgacaacgatggtgagggagggattctcgcgctaatgtcccttttgagtttaaaactgaagcaaaggcctttcattatcgcagttggacttatgggggctgctcttatctatggagatggcacaattaccccagccatatcggtgctctctgctgtagagggacttgaaatcctttccccatcacttaagtattatgttttgcctattgcgataacaattctgataacactttttgcgattcaatctaaaggtaccgcaactattggaaaggcctttggcccagtgatggcattttggtttttaaccattggtattttaggggcaagaggagttatccaacacccttctgtattagcggcgattaatcccatctatggcctaagttttttattttcaaatggcgccacaggattttttattctatgtggggtctttctttgcgtcactggtgcagaggctttatacgccgacctgggacattttggtaccgccccaattcgctgcgcctggtttggtctggcttttccaagccttatctttaactatctgggacaagccgctttggttttggaaggagcatccacggagcataatattttttatatgctgtgcccgggtgattttttattaccgttaataattctgtccaccgtcgcaacaattattgccagccaagccattattaccggagcattttccatgacaagacaagcaatgcaactgggttggctgcccagattacgagtcacgcaaacgtcttcagaaggttatgggcaaatttatataggagtcgttaactggcttttaatgctggctacccttgggcttactattggatttggcagttctgaaaaattagccgctgcctatggcattgctgtttcagctactatgctttgcaccactctgcttttatttattgctctgcataaactatggaaatgggatattatcacatcagggcttgttgctggattattcatgattgtcgatgcctctttttttgcggctaatctcacgaaattcatcaatggcggatatataccaatcacattggcaatcataatctattccatgatgtatatttggcataaaggctatcaaaccatcgcaatcaagcaaaaagaaaaaaatataacagtcgcttcctttctggacagtattcaaaaagagagggtagtccgtgtgcctaaaactgctgtttttcttacatccaaagagcaggatattcctccaatcctggtttggcatgtcaagaaaaatcatgtgttgcaggataaggtgattattttaaaaattaacaacttgtccattccccggtgtaaacctggtgatcgattacaaattgtagaaacaggaacaggcatctggcatgccgtagcaaattatggctttatggaacaacctcatattccaaaattattaaagaaattagaggctcaaggctatgacatcaatatcaaagacataacctattatatcggtcatgaaacaatatttgtccgcaatgtccgtcatactctgtcaaaatacattaaaattctcttcgtttttatgcatcgcaatgcccttcccatgagtaactactttcatcttccgccagaatcagtatttgaaataggacgacagatagaaatt

SEQ ID NO: 25308 - DNA, 3444 bp, Legionella pneumophila
atgcgacaacgttttgttcatttaagagtacatacggaattttcattagttgatggtttggtacagattaaaccattgatgaaagctttgccagccagaggtatgagcgcagttgctgtaacggatttttgtaatttattcgctgctgtcaaagtatttaaaagtgcgacagaggcaggaatcaaacccattattggtagtgatttgccatgccatgatttggaaaccccggataacattttttctttggttttgttatgtcaagacacagcaggctataaaaatttaacctgtctggtatccaaagcatatcaggaagggcaatatcatggccaacccagggtgcaattacaatggattcaagagttttcacagggattaatcgcattatccggaggaaagttcggtgatattgggcaagcattgctggcaaatgatgacaccttggcaagaaaacgtgctttgcattggatgaatttatttccgaatcgattttatctggaaattcagcgaaccggaagagctgatgagttgcattataatgagaagctgatcgcgttagcggacgaattgcaattacctttggttgcaaccaacgacgttaggttcatcgatgaggatgattttgatgctcatgaagctcgtgtatgcattcacgaagggtacacgttggctgatcccaggagagttcaacaatacagctcccaacagtatctgcgctcagcagatgaaatggagctattattctcggatcttcccagtgcattacaaaacacagtcgaaattagtaaacgctgtaatgtgaaactcgagctgggccataattatctacctaatttccctataccggatggaacaacagtagaggcgtatttatcacatctttctgaaattggcttggaggaacgtttaaagcaattattcagagacaagtctgagggggagctgcttgctgccagaggggagtacgacaaacgccttaaaattgaactggatgttattaataacatgggctttgctggttacttcctgattgttgctgattttattcaatgggctaaacaaaatggggttccagtaggaccaggtcgtggttctggtgctggttctctggttgcttatgccttaaaaataacagatctggatcctttagagtatgagctgctttttgaacgattcttaaaccccgaacgtgtttctatgcctgactttgatattgatttttgcatggaaggccgtgatcgggtcattgaatatgtagcagagaaatatggccggcagagtgtttcccaaattattacttttggcactatggccgcaaaggctgtggtgagagatgttgggcgtgttttaggtcatccttatggctttgtggataagcttgcgaaattaattccctttgagttaggaataactttaagtaaagcgatggagcaggaagaagagctgcgccgacgatatgaagaagaggaggaagtaaaagagctatttgatcttgccctgaaactggagggaattactcgtaatgccggcaagcatgctgggggagtagttattgcaccttctcagctgactgatttcacagcgatatattgtgaagaaggatcaacacaaatagttagccaatttgataaagacgatgttgaggcggttgggttagtcaagtttgattttttagggttaagaacactaaccataatcgattgggctctggccacagtgaataagcaatgcgaaaatgccgggttgtcaccaattgatattagtcaaattccaacgagtgatgactctacttttgagttattaaaagcatgtaaaactactgctgtatttcagttggaatctcgaggaatgaaggagctgattagccggctgcaacccgattgttttgaagacatcattgctttggttgctttattcagaccaggtcctctacagtcagggatggtggatgactttatcgacaggaagcatggcagggctcgagttgattacccccatccagacttggaaccaattcttaaacccacttatggggttatcctctatcaagaacaagtaatgcaaatcgctcaggttctggccaattacacgcttggcgctgctgacttgttaagacgagccatggggaagaaaaaaccggaagaaatggcaaagcaaagggaaatttttacccagggagctgttgcgagaggagtagatgagcaagtagcaacccatatttttgatttaatggagaagttcgccggatatggattcaataaatcacattctgccgcgtatgctttagtcgcttatcaaaccgcctggctaaaagcacattatcctgcagcttttatggctgcagtgatgtcctctgatatggataacacggataaggttgtaacttttattgatgaatgcgcgcacatgaaattacaagtgttgcctccttctatcaataactccatgtatcattttaccgtgtccgatgaaaagacgattatttatggccttggggcaataaagggagttggcgaatctgcgattgagtgtattattcaggagagaaaccagaatggaccttttttggatttgtttggtttttgtcaaagattggatttacgcaaagtcaacagaagagtgattgaagctttaatcaagagtggtgcttttgatatttggaaagtggaaagggctgtgttaacagcgtccttggaaaaagcactgaaagttgccgaaaaggaacatcaaaatcaatcaagtggacaatttgatttattctcccttttagaggacaaagcggatgaacaaaattatgtggaaagtaaatcctggtctgaagctcaacgattagaaggcgaaagagaggtattaggtttttacctcactggccatcctgctgaccaatacagacgtgaattgggagattttattgttcctgtcagccaattaaatccgtctttacataaaaaagcgattatttgcgctcaggttgtagcaattagaaaaattatcaccaaacgtggcaagaaattagtgattattggaatggatgatgcgactgccaggattgatgccgtagtttttggtgagatttttgaacaatattctgatccattggcgacgggtaacatgcttgtaattgagggcgaggttgcaattgatgattacaacggtggtgttaaaatgaccgccaatcagcttttaagtatcgcttcagctcgaacaaaattcgctcgttgtctggagttgcgtttaaatcaaaacaatgctgctgtattgccttctatccaatccttactgaagacttattcaggacggtgcgctgttcaattggcttatgctaatggtgttgctaaagctaatttaaatcttggccaacaatggtgtgtgacccctagtgatgagttaattgggctattgagcaatcttttaggggaagagcaagtaataatgcgttat

SEQ ID NO: 25309 - DNA, 729 bp, Legionella pneumophila
atgaaaataagtcgattaaaaactttttggataattacccgcctattttattacacaggtgttgcttgcactcgctccatatttaagtatctttttagcacccctacgaggccatgggttgataaagtcatccaccattgggttgatcaactcttaaatgctgtgaaagtagaatataaagtaatcaatccacataatgtccagcctcagcctggcaaggcaacgatccttatgtgcaatcattccagtgcttatgatattcctttaggcttcaaagcattccctaataactctattcgcatgcttgccaaacgagaactctccaaaattccacttttagggaagggaatggctgcagcagaattcccttttattgacagaaaaaacagatttcaagccataaaggatttggaatttgcccagcaactgatggagagtggcattattctatggattgcaccagaaggaactcgctcaaaagatggcaaactagccccatttaaaaaaggtggttttatcactgctattcaagccaaggctactataattcccataggaattcgcggagcttttgatattctccctgcccgcacctttaatatacatttgaatcaaaaagcagaaattcatattggcgagcctattgatgcagctcaatattcaattgaaaataaagaggaattaatcgaaaaaacccatcaatcaataaaaaagctggttggggagaat

SEQ ID NO: 25310 - DNA, 3819 bp, Legionella pneumophila
atgaccgataataaccttttggcaaataaattttttaaaaaaatttggatggtattagccgtccttataattgttgcagctgtcttttccagtgtatttcgcgctcttactccctgggctaaacaatataaaggggaggtggaacagcatttgacttcacttttgggtcaacctgttactgttcaaactatggaaacagggtggtactggtttgaaccagtagtcaaattaaaacatataagaattcatgatggtcataataagtcaatttatctggataggttaattgtcggtgttaatttatttaaatccctatggaattggcgcattcaacctggcgtactttatattgatgatatgcatttggtttttcgtgaaaaagacgggcattggtgtattgagggaatttcacgtaatgcaatgaaagacactgatattacacctgaaaaaactagagaaatattagattggctcgctcagcaggaaaaattaattgtacggcatgtttccgctcacttacattttaacgacgggtcattaatccctgttaacgaattaaacctgtcgatagttaataaggggggaaattataagataaagggggaagcaagactcgaacaaacaaatgcaaccgttttccaactgctagggaatgtacaattcgatccttctcaaattaagaacaccaatggacgcttctatttttcagctattaatgttttacctgcacaatggcaaaatttattgccaaaatcctcaatgcaactggagggaggtaaaggaaacgtttcattatgggttgatttggagaaagggaatatttcatcaattcaggcagaattgagacttaagcgtctggcatggaaattattaaataaaaaaaatagtaagttgatccaatcattttatgccaacatgggctggaaattggataaacaagggtggcagttccaggcagaccatatgaaactaagagtagcaggggtcacttggccagagaaccaattgtcaattcgttttaataaaaatcagaatacctatcaaatctttacaaaatcccttattgtagaatcactattatccgaagcaattaattggccaccggctattcaaaatgtactgcagttaaaaccgcatggaatattgagtgatgttcaggtattaatcaaagaaaatcaaattaattatattttaactcgatttgatcaattaggatggagagcaaaggataatattcctggagtgagtaatttatccggcgttttaaattggcagcctacggaaggacgccttgagttagattcagagaattcaactttcgatatcaaaggttatcccgctcaaaaactgaccatttttaatggtgcttttgattggaaagagttaaatgatgggttgcggttgagtattgaacgcttggttgcaagtcaacccgaattgactattagtctggaaggcgctattgatcagctgacccaaaattctgtaggcaatattcgtttagtgggtaatttttctgggaaaaatttacagaagtggatgccttatttgcctaaaaaacacatgaaagccaagttatttgcttggttaaataatgacatcaaacgtttagggcaagcaacaggcaagataactattaatggaatggcgaaggattttccatttgataatggcaatggggagttttctatagtaagccatgttgtcggcggagatattttaattactccagaatggagattgattaaagatttggaaggttatattaaactaaaaaatagaaatcttgacattgatatcattgatggtgatgctcaaggtactcttcttaaacaaatgaatttgcgtattgatgatattggcaaagatagggaaaccttattaattcatggaattgttcatgggaaagcacaacaaatgctcaattttgttatgaattccccattaaagaaaaaattatctgctttaaaaatattattaataaaggggatgctatcactcaatttgcgtttggaaatacctctttatccagagaatgatgataatctggcccgaggtgaattaacctttgaaaataatataatcaacatcaagcatcagatgggagatttttctgtaagggatgttactggaaatttactgtttaatgaaaaaggcatccaggatagtgccttaactgccagggcattcggctaccccctgaatattaaaattcaatcggaaaaatctccacaaccattaaccgcaatatcaattgaaggtgaatgcactgtagaatccctaaagaaaaaatggcacttacctattttttctgtactcaaagggaatattttagctaaggcattattaaaaattaccgacgatcctaatgatttggataatatgaagttgagttccgatttgattggattggcagttgatcttccagcacctttaggaaaaacatataaagaaaaaacccccttacaggttaatctggactttaatccacaaaagactcttcgtttaagagttaattacaatggacgactaagtacggatctattgatgcaaaagcaaaaaggcgtgtttaagttaaaatcaggtcaaatacgtttaggtagtgcgcaagctgtaaatcaggaccatcctggcctcggtatagctggtactttagacggctttgatttgcaggcatggaaagaggtaataaacagattctctaaagagaatgtgaacccctcactcttgagtttggttaatattattgatgtaaaaatgggtaaactaaactttttgaatcagcagtttgataacatgtctttgtatgcgaaaaaacgccctgataatgattggtcaatcaatttaaaacagaaaaaagtcgatgcggatttaacctaccattcggcaaccaattctctgagtggctttgtcaaatacttacatttatctgaaatcggatcctcaaaaaataataaagatactccttcacatactactcctgggcaaatccccaatttgaatttaagagttgataatttttcaattggaaaaattcaaattgggaatatcacccttaaaagtcattctacatcagaacagtggaagattgattattgcaggatagactcaccttattatcaagctaattttgaaggggaatggcttcagaaagggaagtttaatcaaacaaagctacagtctaaaatgtatttgaaagatttggccaagagtcttgatcgttgggcgattaatccagcggtggatgcagggaagggatatatagagtttcatgggggttggcaaggttccttatatgatttttctctgtccaagttgaatggttccatgtatttacagttgaaaaatggccgcattactcatttgagcccggagactgaagagaaacttggtttagggaagttattaagcatattgagtttgcaaactattccaagacggttaaaacttgattttagtgatctctcaaatgatggctacagttttgatatatttaaaggcaactttaatgtcaataatggcattatgagcaccaataacagttacattgatggcccagtagcttatgctagtatgaaaggggatctggatttggtaaggcgattatatgatttggatttaaacatttcaccgcatatcactgccagcttacccgttgtagctacgatagctggaggtccgattgctggtcttgctgcatggattgcaaataaaattattaatcaaagcatgcaaaaaattgcgggatatagttataaaatttctggcccctgggatcagcctattgtgcaacagcttaatatagtgaagaaattgcct

SEQ ID NO: 25311 - DNA, 1341 bp, Legionella pneumophila
atgctcagtaaaatagttattgctaatcgaggcgaaattgcgcttcgtatactgcgtgcttgtaaagaacttggcattcagactgttgctgttcactctgatgtagacaaagatttattgcacgttcgcctggctgatgaaaccgtatgcataggccctgcacctgcccaaaaaagctatctcaatattcctgcaattatatctgcggcagaaattactgatgcagtagcgatacatccaggttatggatttttatcagaaaatgccgattttgcagatattgttgagcaaagcggtttccgttttattggcccacgcggcgactccattcgtcttatgggggataaagtttccgcgattgctgccatgaaagcggcaggagtaccctgtgttcccggttcagacggtcctttaggagatgacgacaacaaaaatctcgagttggcgcgaaaaattggttatccaatcattatcaaagcagccggcggcggtggtggacgtggcatgagagtcgttcatagcgaatccaatttacttagtgctattgcgttaacccgaagcgaagcaaaagccgctttcaataacccgatagtttacatggaaaaatttctggaaaatcctcgccatgttgaattccaagtccttggtgatgggaaagggcatgctatacatttgggtgagcgtgattgctcgatgcaaagacgacatcaaaaagtcgtagaagaagctccggctccaggaatcactcctgaattaagagaagaaattggcgcgtcagtgattaaagcttgcaaagagttacaataccgaggtgctggaacctttgaatttttatttcaagatggttgtttttatttcatcgaaatgaatacgcgcattcaggttgagcatccagtaactgaaatgatcactgggattgatttaattaaggaacaaatcaaaattgccagcgatattcctctgacattaacccaaaaagatattaaattacgcggccatgctattgaatgccgaatcaatgcggaagatccaaggaattttatgccctctcctggaaccataaaattacttcatcaaccaggaggcccaggcattcgttttgattctcacatctacagcagctatgttgttccacctaattacgattccatgataggaaaattaataagttatggggcaacaagagcagaagcgattgccaggatgcgtaatgcccttgatgaaattatcattgatggcataaagacaaatattgaattacaccaacgtattcttcatgacaaatcttttatggaaggtggcacaaacattcactatctagaaaaaatgctcaaggattca

SEQ ID NO: 25312 - DNA, 681 bp, Legionella pneumophila
atgatccctgaaaaactcttgacttatacaaaaacaatttttgaatactcccatagtaccgtatacatcaaagataagaattttcattaccagtatatgaataataggggactcaaacaattgcaattacaagaaaaagatattatgggtatgcctgataaagcacttccctttgggaaatatgcgcatttttataatagtcatgattactcggcaatggaagaaattatttactttcaattagatgattgtattactaaaaacggtgaaaaaatatttgccttatctcacaaattaccgcttaaagatgaagatggaaaaactcatggtgtcattggctttacgaaatttatgaatctccatcaactgatgaataaccttaattcaaaaaatacctttttaacacctaatcttaaaatcaatgttaatgttgatgattggctaaaaacaacgattaatttgtctcggagagaaatggaggttttgtactattttttacaaggaaaatcgatcaagcttattgcaccattgcttcatattactgaaagaaccgttatttttcatcttaataatataaaaagcaaatggggttgctacaataaagaagatatatatactaaatcctttgaaaaaggcttgaaaaatcttacaattatctgggatttgttagcgatgcgttcc

SEQ ID NO: 25313 - DNA, 1236 bp, Legionella pneumophila
atggctaaaaaaatagaaaaaaatattatcacagggttggatattggaacttcaaaaattattgcattaattggtgaagtaacatcagatggaacgatagaaattataggtattggccgtcatccctctcgcggattaaagcgaggagttgtagttgatatagaaaccacagtcaattcaatccaacgtgctgtacaagaagccgaattaatggctggttgtgaggtgaggactgtttacgcaggcattgctggcagccatatacgtagccttaattcccatggtattgtggccatccgtgatcaggaagtatctcaagccgatgtggaaagggttatcgatgcagcaaaggccgtggcaatccctgctgatcaaaaaatacttcatatattaccgcaagaatttatcattgatcatcaaggcagtattcgtgaaccgataggtatggctggtgtaaggctggaatctcgggttcatattgttactggttctgtcagtgctgcccaaaatattgtgaagtgtgtcaggcgctgtggtttggatgtgattgatattattctggagcaattagcttcaagccatgctgttcttactgaggatgaaaaagagcttggggtttgtttaattgacataggtggcggcactactgacattgcgatattttgtgagggagctatccagcatacctcagtcataccgattgcaggcgatcaagtgacaaatgatattgcaatggccttgcgtacgccaaccaaggcggcagaagcaattaaggtcaatcatgcttgtgcattaccagaattagccaatccaaaccaaatgttagaagttaccagtgtcaatgatagacctgggcgaaaaatctcggccaaagctttggcagatgtcgtttcagctcgatatgaggaactattttcactggtacgtaatgaattacgccgaagcgggtttgaagaccgtttggctgctggtattgttctaacaggtggagcttccaatgtaagaggagcaattgagttggccgaactttgttttgaaatgccagtcagaaaaggatgtgcgcattatgtctccggtttgacagaagcgacagaaaatccttcgtttgcaacaggggttggtttactgcttcatggctttcaacagcaatatgaaagtggctataatgtgccagcaatgaatgataatggtaaaagcatttggtcacgcatgaaagaatggtttcaaggaaatttt

SEQ ID NO: 25314 - DNA, 1422 bp, Legionella pneumophila
ttggaaacgaaaagagttttggtggttggtgccgggcaggctggtgaaggcttggtgcgtgatttgaaaagaagcagttattatcggccaataggctttgtagatgacaataaaagcaagagaggattagaagttcatggagtgcgggttctgggaacgaccaaccaaattaccgaattagtcaatcagtacgacgtggatttgattttcattgccataccttctgccaaatcggcaaccatgcgaagaattgtaacgctttgtgaacaaagccatgtgccttttagtactttacccagtatttcagccctggctgcgggtcgagttgaagtgaatgcgctgaggcctgtgaatattgaggatttattgggtcgggatcaagtgacgctcgaatgggaaaaaattgctcgttcaatcgcaggaagacgcatattgattacaggcggtggtggctcaatcggttcggaattgtgccgtcaggttatggctttagagcctgcgagcatagctattgttgagaatagtgaatttaacctgtatcgcattgaacaggagttgttaaagagttttccaggtattcccgttgaattgagtttaatcagtgtgacagacgaaattgcgattaatcacttatttcgtcggtttcaacctgaaattgtatttcatgcggctgcatacaaacatgttcccatgcttcagcatcaagtacgagttgctgtgtttaataatgtcataggtactcaggttgttgccaaagccagtgtgacattcggagctgagaagttcattttaatttccactgataaagcagtgaatccaacgaatataatgggaactaccaagagagtcgctgaaatttattgtcagaatttaaatacacgagttaaaacccagtttattacggttcgttttggaaatgtcttgggttcagctggtagtgtggtgcctttgttccaaaaacagttgcaggagggggggccactgactgtgacccatcccgatatgcaaagatattttatgactataccggaagcatgccaattgattttgcaagcgatggtgaatggggagggcggtgaaatttttgtcctggatatgggagagccggttaaaatcagttatcttgcagagcaaatgattcgcttggcaggcaaagaaccgggaagagacatcatgattgaatatacagggttgcgtcctggcgagaaaatgtatgaagagttgtttcatgagactgaacagttaacttcaacaaaacatgaaaaactattcaaagcaaggtttcgtgaactggattggaatgatttgacacaaaccatgcgaatgttgcaggcagcttgtattgagcatcaggatgaagaattgcttgttctgttaaaaagtctggtgcctgagtttcaattggaacctatggttgaagct

SEQ ID NO: 25315 - DNA, 1266 bp, Legionella pneumophila
atggataaattattgattaatggtggtaaagcattacatggtgaagtggtcatttcgggagcaaaaaacgctgctcttccaatcatggctgccagtctattagccagtgatcacgtcacaatatctaatgtgcctcatcttaaagacatcactaccatgatggaactgttaggacaattgggagctcatttaattgttgatgaaaagatgaatgttcaagttgactccagtcaagtcaatgagtttgttgctccttacgatctggtcaaaacaatgcgtgcctccattttggtattaggcccaatgctggcgcgcttcggtaaggcagatgtttctctgcccggtggatgcgccattggaacaagaccagttgacctgcatttaaaagcattaagagccatgggggcagacattacggttaaaaatggctacatcaatgctcgttgcaaaaagggatgtctgcaaggtaaacgcttgatgtttgacacagttactgtcacaggaaccgaaaatgtgttaatggctgctgtgttggcagaaggcattactacgattaaaaatgctgcgcgcgaaccagaagtagtagacttggctaactttctgattcaaatgggagcgaaaattcgaggcgcgggtacttctactattgaagtagaaggtgtggaatcactaaacggtgggacttattcggtcatgtccgatagaatagaagcgggcacttatttggcagctggagcgcttactcgtggtcaagtgactgttaagaaagtacgtcctgatactttattatctcaattatgtaaattcgaagaggcaggcgcggaattaaccattggtgaggattgggtcagtttaaatatgcataacaagcggcctcaggcagttaatatttcaaccgccccttatcctgcatttgcaacggatatgcaagctcaatttatggcaatgaattccgtagcagaaggttcttcaactattatagaaactatttttgaaaaccgatttatgcatgttcaagagttacagagaatgggggctaatatccaacttaatggaaatacagccatcgttcatggtgttgaaaaattaactggcgcaccggtaatggctactgatttaagggcatcagccagtttaattctcgcgggcctggttgctgaaggggaaacagtagttgagcggatttatcatgttgatagaggctatgagcgaatagaagaaaagttatctctattgggagcggacattaagagagtttctgacagg

SEQ ID NO: 25316 - DNA, 1917 bp, Legionella pneumophila
ttgaacgacatggttaaaaatttatttttgtggctgataatagcgatagttcttgtctctgttttcagtaattttggtcctcgtaactcagttgctgagaaaatttcttatagccagtttttacaggaagtggatcaagggatgattaactctgttacgattgaggataacaaaatcatcaagggcgtaaccaagaataataaacgctttgtcacgtacatgccgatgcaagacaatgctttgttaggcgaattgttgaaaagcaaagtcgatgtcagtggtcaggaaaaacaacaggaaagtttccttttgcatttatttattaactggttcccaatgttgttattgataggtgtatggatatttttcatgcgccaaatgcaaggcggcggtggtcgcggcgcaatgtctttcggcagatcaagagctcggctattaggtgaagatcaggttaaagtcacctttgcagatgttgcaggtgttgatgaagccaaagaagaagtgaaagagcttgtcgattttttacgtgatccaacaaagtttcaaaatttgggtggacgcattccccgcggtgttttgctggtcggttcccctggtacaggtaaaacattattagccagggcagttgccggggaagcgaaagtccctttctttaccatttcaggttctgattttgttgagatgtttgttggggtcggtgcgtcccgagtgcgtgatatgtttgagcaagccaaaaagcatgcgccatgtatcatctttatagatgaaatcgatgcagtaggtagacacagaggcgccggcttgggtggcggtcatgatgaacgcgagcaaacacttaaccaattgcttgttgaaatggatggatttgaaggtaatgaaggagttattgtcgtagcggcaactaaccgtcccgatgttttggaccccgcgcttttacgtcccggccgctttgatcgtcaagtcgttgttcctttgcctgatatcagaggtcgtgagcaaatattaaaagttcatttacaaaaggtccctgtagatagccatgtagaagtgaaagctattgcacgcggtaccccaggtttttcaggagcggatttagccaatcttgttaatgaagcggcattatttgctgccagggctaataaacgcaaagtgggtatgattgaactggataaagcaaaagataaaattatgatgggggctgaaagacgctccatggtaatggatgataacgagaaaaaactcaccgcatatcatgaagcaggtcatgctatcgttggtctgtcagttcctgagcatgatccagtttataaagtatcaataattcctcgaggccgagctttgggtgtaactatgtttttaccagaacaagacagatatagtcacagcaaacgccgtttggaaagtcaattatgcagtctgtttggtggtcgaattgcagaggaattaatttttggtcctgaaagtgtgacaacgggtgcttccaatgacattatgcggtctactgagattgctcgcaaaatggttacaacttggggcttatctgctttaggtcctctaacttttggtgaggaagaggaagaaatatttttaggacgctcagtgaataaacataaggagatgtccgatagaacagcacagcaaattgatgacgaggttcgtgctattattgacaggaactatcaaagagcaaaagaaatattggaaactaatatcgataaattacatttaatggctcaaagcctcatcaaatacgaaacgatagacaccaatcaaattcaagaaattatgtctggtaaagagcctacccctccggaggattgggggtcaacaaaaccgatggataaggctgagtcggttaatgatgctcctgcaaagcctattaatggcgaaacaatagaaaatccggcagaaggacat

SEQ ID NO: 25317 - DNA, 1446 bp, Legionella pneumophila
ttaaaatttgattttgttgctgcaattgtcgttttcctcgtggcgattcctttatgcttaggtattgccctggcttctggcgcacctcttttttctggtatcttaagtggaatcattggcggtattgttgtgggtatatttagcggctcacaagttagtgtcagcgggcctgctgcgggtatggcagccgttgtattggcggcaatctctcaacttggtgattttaataccttcttattggctcttacgattgcaggccttttacaaatgataattggtgcattaagggcaggatttgttgcagattatgttccttcgaacgtagttcaaggcttactgtgttcaatcgggatcttgctaatcattaagcaattaccacttgcattcactctctcatcagattttgatgagcttaaaacacatttattggaaacaacagaagggtttacagtaagccctttgttagctttgtcgcagcacattaatgaaggcgcactcatcattactactctttcattggctattttaatctattttgatataaccaaaaataaaattctgaaggaaatcccagcccctatccttgtagttctggcaggaatactgttaaatgaacttttcatctggacaaactccagcctggcacaaaactcgcctcaactggttaatatcccagataccaatggttttttccaatttttcagccatcttgagtaccctgactggtccgcctggactaatcctaaagtctatctctatgcgctagtcatatgtatcgttgcttctttggaaacgttgcttaatctcaaagcgtcagaacgattggataaaaaaagaaggcacagcccaactaaccaggaattagttgctcaaggcttgggtaatataacatcaggtttggttgggggtattcctgttacatcagtcattgtcagaacatccattaatatccatgctggttcaaaaaccaaattttcagccgtactccatggttttttcatcttgtttgctgtcatgttaatacctggtgcattgaataaaattcctttgtcttctctcgctgcaattttaatttacactggctataaactaaataaaccagccatctatatcaatatattttcacaaggcagcgatcgattcatcccttttatagtgaccgtgatcagtattattgccttcaatcttcttgcaggtatattaataggtctggctatcagtctcttttatatattaaagtccaatagccaagctcgtattgatatcattaaggaaatttatccaaatggttcaacataccgtttgatgcttccccaacaaatgacttttcttaacaaagctgcattggtcgctgaattggatacattgcccagacgttctcaactgattatcgatgcgcgtcattctcaatacattgataaagaaattctggacttatttaatgaa

SEQ ID NO: 25318 - DNA, 810 bp, Legionella pneumophila
ttgatattattttggggtataaaggtgctggtcgactctcattgtcatttaaattttatcgatttgactcattttaatcatgatcttgctcaggtaatcaatcaggctcgcgagaatggggtggagtatttcttgtctgtttgtgttgagttgagcgattatcctcaattagagcgtttagctaaggattatcctgatattagcatttctgttggagtgcatccgaatagtgaaatgaattatcctgttacggcacagatgttatgtgaattggctcaaaatcctgcctgtattgccataggagaaacagggcttgattattatcgtaatcccactgaggaagctcaatctttgcaacgagatcgcttcagggaacatatcaaggcggcacttataacttccaagccgttaattattcataccaggcaagctgctgaagatactttgttgatgatggctaaggagggggctagtcagataggcggagtcatgcactgttttgctgaagactttgatattgcgcaaagagcaattgatttaaatttttatatatcattttccgggatagttacttttaaaaatgctgtttcattgcaagatgtagccagacagatacctttagagaggatattgatagagacagattcaccttatttggctccggttccacacagaggaaagcaaaatcatcccgctttggtgaaacacgttgcagaaactatcgcacaactcagagggatggatttccaagagatagcagaaatcactacaaacaatttttataattgttttaatatcaaacgacaagga

SEQ ID NO: 25319 - DNA, 1269 bp, Legionella pneumophila
ttggcttatatcatcccgagaaataaacataacatatcgaaagcagatataagtaataatgcgcttaaagttcttaaccgtttaatcagccatggttttcaggcctatatcgttggaggcagtgtcagagatttactgctccataaagcgcctaaagattttgatatagcgacaaatgcgactcccaatgaggtaaaaaatctttttaaaaatgctcgtatcattggtcgtcgatttaaactggtacatattttatttcatcgtgaaattattgaagtagcaacttttcgtggccataactcaagcgatgcaagccaccaatttaatgaacgcggcatgcttgtaagagataatgtttatggttctctggacgaagacgcatggagacgtgatttcacaataaactctctttattataatatttctgattcttcaatcattgattttactggtggtgtagaagacgttaagcaaaagttaattcgaataattggcgatcccgttacgcgttatcaagaggatcctgtccgtatgttacgtgctgtcaggtttagtgccaagctgcaatttaatttatctccggaaaccaaagctcccttccccaaaataagccaccttataacccatgtttccagttcgcgactatttgatgaaataacgaaactttatcaatgcggagaagccgaatcggttcaaaaattattggtcgagtatggtttatttaattatctatttcctcaaacagctgctctatttgatagtcattacccggttaatccgcttttgggcatagcacttgaaaatactgatacaagaatacgtgatggaaagcctgtgactccggcatttcttattgctgttttgttatggtttccaatgatagagtgttccagaaaactgcaagaatctgggcttccgcctttaccctcgattgaaaaagccatgtctatagtgcttagtgaacagaatgcaattatttcgatacctaaaaggtatagccaggttataagggaaatttggcttttgcaatatcgcttcgaaaaaagatttggtggcagagcatttaatttacttcttcatcctcgattcagagcagcgtatgattttatggctcttagggcattatctggtgatgagtcaatggagctggcgcagtggtgggccacgtttcaagaagtcgataatgttgaaaaaaataacatggtaacccaattggctgcaacaacgcccgggcggcctaaaaaacgtcgtaaacggaaaatagcaaaa

SEQ ID NO: 25320 - DNA, 657 bp, Legionella pneumophila
gcaattggttatgaacaatttgttgaattgctggctggtgcccatgatgtcgatactcatgtccaatttactgattttaaaaataatattcctgtgctaatggctttaatcggtatatggaataacaattttttgaatattcataatttacttattcttacctattcaaaaaaactggagtactttgttccttatgtacaacagctggatatggagagtaatgggaagtccattgatgtgaatggaagtatggtagattacgccactggacctatcgtttggggtggattaggaaatcaggcacagcatagctattttcaattattatgtcagggtacgcatcgatgtgttggtgattttattactttgaaaactaatgatgagcatgagattaattccatgtgtcattataaaatgaaagttttaagtgagggaattcaaacaattgaaaatccttatgggtatattcctggcaatatgccaatgaatcatctcattttgtcagattgttctccttatacattaggggctctggtggcactctatgaacataagatttttgtacaaagtgtgatatggaatattaacccattcgatcagcccggtattgaaagcgccaagagtgctcacagagaaatcacattatcaagcgaatca

SEQ ID NO: 25321 - DNA, 1293 bp, Legionella pneumophila
atgtcatcaaatgaatctgcagctatagtatctccgatagtcaaccaaaaactatcacaatggaaaaaacaagatacgatttggatgttaagcctctatggcacagcaattggtgccggaactcttttccttcctatagatgctggtcttaatggcattttgcctttaatcattatgacaattctggccttccccatgacttattattctcatagggctttatgtcgttttgtcctttcaggctcgtcctcacacaatgacatcaccgatgttgtagaagaacactttggctcatttgcgggtaagatgctaactatcctgtacttttttgcgatttatccaattttgcttatgtacagtgtcgcaataactaataccacggaaagtttcctgattaatcaaatgggaattacccctccgccacgggctcttttagcaatcatattaattcttgggttaatgggtatcgtgcgtttaggacaagaaattattgtcaaatcgatgtcggtattggtatatccttttgccactattctatttctgctttcgctttatttaattccaaattggaataacgctatttttatccaaagcaattccttacatgccaatggagggcatggactattaatgactttatggttaattattccagtgatggtgttctcctttaaccattctcctatcatttcatcttttgctgtgaatcaaaagcagcaatatggtagccaagctgacgagaaaagctcattaattatgaaatacagtcacttgatgatggttttctctgtgatgttttttgtatttagctgtgtgttgagcctgtcacctcaagatcttttgcaagcaaagcaacaaaatatttccattttgtcttatctggcgaatcattttaatacccctattatggcctatattgcaccggttattgcattcatagccatttcaaaatcttttctgggacattatttaggtgccaaggaaggtttaagtggaattattgttaaatcattaaaatcaacaacaggcaaaacaattaataagaattccctgcacagaatcattgaaatctttatgattctgacttgttgggttgttgctacaattaatcctaatattttaaaaatgattgaaacattaggaggtcccatcatagctgtcttattatttatcatgccaatgtatgccattgctaaagtgccagccatgaaaaaatacaacaatcaaatcagtaacgtatttgttaccgtcatgggcattatttctatctcagccatcatttatggcttaatt

SEQ ID NO: 25322 - DNA, 1767 bp, Legionella pneumophila
atgaatcaagaaatatcaaacttctctacttttaatttttctaatgctttaaataaggcgttagaagatatgaagtttattacgccatcgcctatccaggctcaaaccattcctttgatattgcaaggtcgtgatgccattgctcttgcgcaaactggtacaggtaaaacagcggcttttgcattaccaattttgcaaaatttgtcccctgagatatctaccactcaggctttgattttagcccctactcgtgaattggcaatccaggttgcagagcaatttgaattattaagcaagtaccaacgcaatgtgacgatcgccgttctttgcggtgggcaagaatatggtcgtcaattaaaacaattgcgtagtggtgcgcaagtggttgttggaacgccaggacgtattctggaccatatcgataaaggcaccttgctcttaaataatctgaagacatttattctggatgaagcagatgaaatgttgcgtatgggtttcatcgaagatgtagaaaccattttagaaaaactgcctgaaaaaaagcaaatggcattgttttcagcaaccatgccctatcgaattcgtcaaatagccaatacttatttgaatgaccctgcctcaattgaaatccgtatggaaactgcgacggtcaagtctattgagcaacggtttttatttgcttccgtacatcaaaaaccggatgcgttaatccgggtcttggaagtggaggattatcaaggggttatcgtttttgtacgcactaaaagcagtactgaggaagtagcagaactattgcaacaacatggattaagagcaatggcaattcatggtgatattactcagtctttgcgtgagcggattattgctcaatttaaacaaggagcgattgatattctggtggcgacggatgtcgctgcaagaggtttggatgtcgagcgagttactcatgtgattaattatgatatgccacatgataatgaaacttatgttcacagaattggcagaacagggagagctggccgttctggtgttacgattttatttgtaactcccaaggaatcgcgtttaatttccagcattgaacgccataccaggcaacgaattgagaaagttcaagttcctaatgaccatatgatacagatggctcgtcaacaaagattcatgtctaacattactactcgactgaatcatgagcatgtgtattcctacaaaaggattgtggaagaatacattaaagagcatgacgtatcagcagtagatgttgcggctgctcttgctttattgctgcataaagacatgccttggagaaaagaattaaatatgcctaaagcagcttcagcattcaaagaagagagagctcgggcaggagaaaaaggattggatttacgtggtcgatttaaggaagatagaaaaagttcttttgctgatcggaaaggtgcgcgaggaagcaagaaagattttgccaaagacttttctaatgaaagaaaaaaatttaatgatggcaggaaggccgttaatcaagaatcagtagcccaggatttatttcgtatcgatgtaggcaaaattcatggagtcaaacctggcaacatagtaggggctattgctaatgaggctggcttgcaaagccgatatattactggtcttaaaattcatgaagatcactctactgttcgtttaccaaaaggtatgccaaaagaagtgatgaaggacttaaccaaggcttgggtttgtggccgccaactcaatttaacattaattggtagtgcc

SEQ ID NO: 25323 - DNA, 954 bp, Legionella pneumophila
atgagtaccgtacgatttaacaatcaatcttttgcattaactccggatgaaagcctcttgcaatgttttttgcgccacggggtagaataccctaactcctgccaggcaggcatttgccagtcatgcctgattaaagccaaagacgggaagattaatccagactggcaagaaggattacccgaaacactcaaatctcaagggtatttcctggcttgtcttgccaaaccaagcacttcgctttatgtcacatctcctgacaatgccgaatgcgagacacaagctcaaataatgagcctgcaacgcttaaatcacaatgttattcaagtcaaactgaacgtggaacatcctgccccatggctacccggacaatacctgtcgctcattaatcctgaaggaacaatgcgcaattattccatagccaatatccctgctgatgatggatacattgaactgcacataaaaatttacccgcaaggcaagatgggacaatggcttttgcaacgcgcagccattaatacattcatcaccatccgaggcccttttggtcaatgttattatcataatccacataatctggcttttgatatattgctggcagggacagggactggcctcgctccgctgataggtatcatcagaagcgcattaacacaaaagcatgaaggaacaattacgctggtgcatggcggggttactgatgaggatatctattacaaggaagaactggaaatgttgtctttattgttcagcaacttccgctatgatccctgtgtgctgcaaagtcaagggctttatccagaaggctcaattgaaaaacgggtgctaactcacttgcactctcccaacaatacgaaagtgtatgtgtgtggtccaaaggaaacaaccaataaattgaaaacacgaatttttcttgcgggtgttccttcaacaaatatttatagtgatgttttttta

SEQ ID NO: 25324 - DNA, 1461 bp, Legionella pneumophila
ttggcaggtacggtcaaaggccgtaaagcagacaggcatgccacttctgattggatggaaatggaaaaagagagaggaatatcgattaccacgtctgttatgcagtttatacataatcaacacgtcatcaatttgctagatacaccaggccatgaagacttttctgaagatacatatcgtactctcactgctgtagattctgccttaatggtaattgacgtggccaagggagtagaggagcgaacggtaaaattgatggaagtttgccgtttacgtgatacaccgatcatgacttttatcaataaattggacagagaagggcgagaacctattgatttgttagatgaagtagagtctgttttgggcattcaatgtgcgccaattacctggccagttggaatgggtaaacgcttcaagggaatttatcaccgctatcaagatattatttatttatatcagcagggaagtaatgcaaaaaaagtcgaagctatgcagattaaaggattggataatcctcaattagatgagttgataggtgacagtgcggacgaactcagagaagaaattgaattagtcaaaggagcgtcccacgagtttaacttggaagcttatcttgcaggaaaaatgaccccggtatactttggttcagcaattaataattttggtattaaagaattattggacgattttgtcgagtatgcgccaggacctcaacctcgagcaactcaggagagagttgtttctccgcatgaagaaacattttccggttttgtttttaaaattcaagccaatatggatcccaaacacagagaccgaattgcctttgtgcgggtttgttctggctcttacaagaagggaatgaaattaaatcatttacgcataggaaaagaagtgcaaatttccaatgccttaacttttatggcaggcgatagatcacacacagaacttgctttagctggtgatattattggtttgcataatcatggtactattcgtattggtgatacttttacacaaggtgaacacttaaagtttactggaattcctaattttgctcctgaattgtttaggcttgtcaggttgagggacccattaaagagtaaagccttacttaaaggattaatcgaattatctgaagagggtgctacccaggtttttagaccattaaacagtaatcagctaatattgggagctgttgggatattacaatttgatgtggtagcgcatagactgaaacatgaatataaagtggattgtatttatgaatcagtcaatatagcttgcgctcgatgggtttattctgaagatgataaagcaatgagcgagtttcgtaccaaggcttatgattatttggctttggacggaggagatatgcttatgtacttggcgcctaccaaagtgaatttgacaatggcagaagaacgttatcccaagattaagttctgcgctactcgagaacat

SEQ ID NO: 25325 - DNA, 612 bp, Legionella pneumophila
gtgtttaccggattgatagaaaatacaggcaaagtattaatgaataggcaaggagaaaattctagtcgtttagtcgtatcttcaagctatcaggatttgaaacctggtgagagtatcgctgtaaatggggtttgtttaacccttttgccagcagattttcctgaactgtgttttgatatttcacctgaaactctgcatgttaccacattgtcaaaattatcatctggcgacatggttaatcttgaaagagctatgctggcatcaacccgctttggtggtcattatgtatcgggtcatgtagacaccagggccaaagtgaaatccattcgtgctgttaatgaatttatcgcgatggatttggatggttttatcccagaacataatcattatttaatacccaaaggtagcattacagtagatggagttagcttgactattaatactgtatcagaacaaaccgtcggactcatgctggtgccacatacattatcaatgaccaatctcggttcattgagagtgggccagcaagtcaatattgaatttgattatcttacccgtattgtggctcatcagcttcaaattatcgggaaattgaacctagaggaagtgtca

SEQ ID NO: 25326 - DNA, 393 bp, Legionella pneumophila
ttgcaacaaatcctgttaagacctgaagactatagtgtcattgctacattaaatttgaatggtgattatatttctgatgctttggctgctcaggttggtggaataggtatagctcccggagcgaacattagtgatcaaatggctgtgtttgaagcaactcatggaactgcgcctaaatatgctgggcagaataaagtgaaccccggttctattattctttctgccgaaatgatgttacgtcatatggggtggtatgaagcagctgatttgattatcagaggtatggaaggcgcgatagaagccaaaaccgtaacttatgattttgaacgtggtatgcaaggagcaacgttagtcagcagctctggttttgcagatgccatgattaagcatatg

SEQ ID NO: 25327 - DNA, 744 bp, Legionella pneumophila
atgatcaatttagaaggtaaaattgcattagttactggtgccagccgtggcataggtcgtgctgttgccgagaaattggcaagaaatggtgcctttgtttttggaacagcaaccactgaacagggtgctgcgtctattaattctttttttgaaaaagaaaaattggctggtaaaggcatcgttttggatgtaaccagcactgagcaagtagaaaatttgatgtctaccttgtctgataatgatcagtgtccttctattcttgttaataatgctggcattaccgcagataacctgttattgcgtatggatgatgatgaatggtacaaagtaatagaaacaaatttgaattctatttacagaatgactaaagcttgcttaaaacctatgttcagagcgcgttggggaagaataatttctataggctctgtggtaggtgccagtggcaattctggacaggtaaactatactgcagccaaggctggagttattggtttttccaagtctttggcacaggaaattggtagtagaggaataactgtaaacgtggtagcccccgggtttatcgacacagatatgactactgcattgcctgatatggtgaaagaagaaatgttaaaaagaattcccatgcgtaagctgggccagccagaagatgttgctgatgctgtagcttttctagcatcagacagcgcaaaatatatcacaggtgaaacaattcatgtcaatggcggtatgtatatgagt

SEQ ID NO: 25328 - DNA, 1813 bp, Legionella pneumophila
atgccaaaacgaaccgatataaaatctattctaattcttggagcaggccctattgtgattgggcaggcttgcgagtttgattactcaggtacccaagcagtacgcgctttgaaagaagaaggatatcgagtgatattagttaactcaaatccagcaaccataatgactgatcctgagcttgctgatgccacctatatagagcctgttcaatggaaagaagtggctcgtattatcgaaatagagaggccagatgctcttttaccgacgatgggaggacaaacagccttaaactgcgccttggacttggtaagagaaggggtattagccaagtactctgttgaaatgataggagcgacgcgtgaagccatagacagggcggaagatagagaaaaatttcgccagctgatgattaaaatcggattggatatgccaaggtcggcgattgctcatagcctggaagaagcaattcaagtacaagcccgtttaggctttcctgccatcatcaggccttcatttaccatgggtggtagtggaggcggtattgcctataatcgtgaagaatttgaagaaatttgcattagaggattggagttgtcgccaactcacgagcttttgattgatgaatcggttctgggttggaaagaatatgaaatggaagtcgtcagggataaaaatgataattgcattattgtttgtactatagagaattttgaccctatgggagtgcatactggagattccattaccgttgctccggcacaaacattaactgataaagaataccaacggatgcgggatgcggcgattaaagttctaagggcagttggtgtggatacgggaggttccaacgttcagtttgctattaatcctgaagacgggcgcatgctggttgtggaaatgaacccgcgtgtatctcgaagctcggctttggcgtcaaaagcaaccggttttcctattgctaaggtcgcagctaaattggctgtgggctataccttggatgaattgaaaaacgaaatcaccggaggtaaaacacctgcgtcctttgagcccagcattgattacgtcgttaccaaagttccacggtttaattttgataaatttccacaaactccagatactcttaccacacagatgaaatcagtcggggaagtcatggcgattggttctaactttcaagaatctttacagaaagccataagaggtttagagattggacgctgttggattgcattcgctgtttcaaaaagaggatatggcgcgtttaagagggcatttacgagaacccactccggatagactttggtatattgctgatgcctttaggcaaaatttatcacttgaggaaattcatctggaaagtcgagtcgatccatggtttctggcacaaattcaagagttggttcttttagagcgctcaatcatcggaaaaacgattcgggatctggataaaaccgctttacacttgatgaaacaccggggttttgctgacgcctacttggccaaattgcttggttgtacggaagcagaagttcgggcaagacgtgttgaattagagatcttgcccgtctacaagagaattgattcttgtgccggagaattccctagtgatacagcctatatgtattcttgttatgaaggaagctgtgaagcacgtcctgagagcaataagaaaaagattatgattcttggaggtggacctaatcgaatcggccaaggcattgaatttgattattgctgcgtgcatgcggccttgtcattaaggagcgcgggttaccaaactattatggtgaattgcaatccagaagcggttgag

SEQ ID NO: 25329 - DNA, 474 bp, Legionella pneumophila
atgacaggacaattaattgataaaaccaaagagagattatacaacgtgaaaaacgatgcaataggaaatatgggaatagcgccctaccaagagactgagggcgaggaatatatgaatgaaaaacagctggcacatattgaaaaaatattgctcgcctggcgccaatctttaatggaagaagtagatcgtactgtctcgcacatgaaagatgaagcagccaacttcccagatccttccgacagagcaagccaggaagaagagtttagcattgagcttagaacccgcgacagggaacgaaaactcattaaaaaaatcgaagacgctcttgagcgattaagaaatgaagattttggatattgtgaagcctgcggaatcgaaattggcctgaaacgtcttgaagcaagacctactgcgaccttatgcatagattgtaaaactctatctgaaatcaaggaacgccaaaatcagggtgct

SEQ ID NO: 25330 - DNA, 1479 bp, Legionella pneumophila
ttgagttttcaaacagataaagagattcaacaaaaattctttaattacaccttgtttgtgttggttgttctgctgatatgtcgcttgattgccaattatttttttcctttgtttgatacgaccgaatcccgttacgctgaaattgcacgcaaaatgctggaaacagggaactgggtgactttgcagcaggattatggtgttccattttgggctaaaccacctttatcaatctggttgtctgctttttttatgcaactgttgggtgttaatgaattcgcagttcgcctgccaggtcttttgctgtctattggtgttttatggttggtttggggagtggcaaaaaaacagagtggctcaatggctgcgctcttttccctattaacactggcagggtcgctttattttttccttgatgcagggactgtgatgactgaccctgccctacttttttgtatcacacttgcaagtgtctcgttttggcatgccatggtttatgaaaacaaaatatggtcttatgcatttttcgcaggattgggcctgggtttattagcaaaaggcccaattgctgtggtactggtcggaatggctgtatttttctgggttctgttacgcaatgaatggcttaatttatggaagagattgccgtgggttaaaggcacgcttcttcttttgttaattgctgtgccctggtatgttctggctgaattacgaactccgggatttttaaattattttatcctgggagagcattttcatcgatttttaacccctggctggtctggtgataaatacgggatagtgcaccatgtacccaaaggaacgatatggttatatgctacagcaggcgtctttccgtggaatattatagcaggtggctggctggtgaaacatggaaaaatgttgccctctctgtgccaaagtggagacggatggttaagttatttaactctttggatgattactacgcttctttttttcacttttgccagcaatattatatacccctatgtgtttccttctctgcccgcatttgctttgttttttgctgaaattttgaatcgtctgaatttggaattgaaacatttgaagtggatctttatctcctcattactctgtggagttttatttttggcagtggcttttgtatttagtgtaaaaccaaatgttgtgcctaatacgcataagccgattattactgcatggctaaatcagaacccaacagcaggcagttaccttgtttattggggatataagacggatttctctgctgaattttactcggaaggtcaagttaaagcggttaaaaattcgaacgatttatgcaaattaatatctaatcggttggaaaactatttggttatcaacagtaaagaaactcagcagattcgcgagggattacttgcaagattcacactcatcgacactttcagagtccatcgggatactttaatattgttctatgccccagtgctaacttgt

SEQ ID NO: 25331 - DNA, 750 bp, Legionella pneumophila
atgacgaatcagaaacaaaccacccattttggttttaaatcagtagactggaatgagaaagaaaagaaagtagcagaagtatttcattctgttgctaaaaattatgatcgtatgaatgatctgatgtccttgggaattcatcatctatggaaacgctataccattgaattaagtcatgttcgacctgggcagagcgtattggatttggccgggggcagcggtgatttaacccggttattattgcaaaaagtgggcgactccggacaagttattcttgccgacatcaacgcagccatgctccatgttggccgcgatcgcttgcttgatgagggattatttaaaaacattcgttatgttcagggtaatgcgcaatgcctcccttttgcggataacagttttcattgcatcactatgggatttggacttagaaatgttactgataaagacgaagcgctgcaatccatgtacagagtatgcaaaccgggtgggaaattaatggtgcttgaattttcaacaccagtttttcctggacttaagcccgtttatgattggtattcatttaacattttgccaaaaatcggaaaatttgttgctaacgatgaagccagctatcaataccttgcagaatcaatcagaatgcatcctgatcaggaaacattaaaagcaatgattgaacgggttggatttgaggattgtcattatcataatttaagtggcggtatagtcgctctgcatatcgcctacaaatat

SEQ ID NO: 25332 - DNA, 1422 bp, Legionella pneumophila
atgagttggtctattcgtattgaaaacctttccaaacaatatcggattggtagtactactacaaccgcagcagagctgattaatgaaaaattgagaaaatttcttttattactggattttaaaaaaaggaatcgattttcatccgataagccactgccttcatccattgcacaagaaggtagaactgtagtcgatgcaagtcaaattagcccggaatatcccaatcatttctgggctttgcgggatattaatcttgaaatcgaggcaggggagcggcttggtatagtaggacaaaatggttgcggtaagagcacattattaaaaattctatcacgtattgtttctcctaccgaagggttattccgatttagggggcgcttaatcagtttgttggaaatcggtacaggatttcatggtgaactgactggacgtgaaaatatttttttaaatggcactattatgggaatgaaaacccatgaaattaaaaatcgactcaatcaaattattgaattttctgaattggggtcaatgatagatactcctgtcaagcgctactcttccggaatgtatatacgcttggcatttgctgtagctgctcatttggagtctgaaatccttatagttgatgaagtgttagcggtaggtgatgcagcatttcaacgcaagtgtacggaaaaaatgctggatttagcaaatcagggaagaactttattatttgtcagtcacgatatggaaaccgtgaatcgaatttgtaatagagccatacgaatgtcgcatggcagaattgtcggtgacagtaaatttgatacaagtgcagcaagcaaaagttcagtcatggatatcactcgcgactatctccgctcaggagcgaaatataaatcggaacaggtttggcctagtgataagccaatgatatttttaaattcccttaagcttaaccgagttagattgatagattacgacaataaagttcgttctaattttaatttaaatgaaactattgttgttgaaatagattttacaattattaaagaaacatacccttttaatattcatctttatcttaaagacagctctgggcgtgtgatatttgtgtcaatggataatcatgcctggcaatctaagaaagtacgtccattgggaaattataccgaacgatgtactttgtattcacccttattaaacattggcgattatcatattgatattgaattttggccaggtaatgctttggaaaatcgattggtagtcaattcagtagtcagcttcgagttgaaagatggagctgtaaatgagggggtaagaggcaattgggcttctgattggccaaactcattgattagaccacagttggattggagtatttcgacaaataagaaacagcatcttgttttaaaagagcatgaattagtcactgaaaag

SEQ ID NO: 25333 - DNA, 993 bp, Legionella pneumophila
atggactacaatacgatattcattctattcgtcatatttattgcgttcgtatttgattttatcaacggatttcatgatgccgccaattcgattgcaaccatagtcactacaggtgttttgacgccaagacaagctgtactatgggctgctttttttaacttcattgcttttctgattttcaatttaaccgtagcccaaacaataggctacggactaatcgatacggatctggtggatacttattttattttagcagccctgatgggagcgatattctggaatttggtgacttggtattatggactgccatcaagctcctctcatgccttaattggcggattagctggtgcggcaatagccaagggaggcctgtcttcactcaagattacaggttttgccaaagtagcggcagggatatttatatctcccgttctgggattattgattggcttattatttactcatattttctctttgtttctcagacataagaacgaagaggaactgaatacattatttaaaagttttcaactgatatcttcagcattattgagtatcacgcatggaggaaatgacgcacagaaaacgatgggtatcatcgcggtattacttttttccgcatcttggcttgatggtgtattttatgtgccattttgggtcgtcatttcatgtcatggggtaattagtctggggactttggctggtggctggaggattgtgcataccatgggaactaaaattaccaaacttaacaccctgaagggttgtgctgctgaaacaggagcagccattaccattttcgctgcaacagaatttggagtacctgtctcaaccacccatacggtcactggctccattgcgggagttgggctaatcagtggcataggtggcgcccactggaaagttttacgcaggatattctactcctggttgttgaccattccagcagcagccttagttgctgctgctattgtaaacatcgcaccaacagct

SEQ ID NO: 25334 - DNA, 1005 bp, Legionella pneumophila
atggatctggttatagcggcaaattatctttctactctggaaaaatgtcttgaacaatttgggattaaccattttttagaaaaaattggctttgatctgataagagtacatgatcctgatgcctacttaactcaggatgaatttaaccaggttattttggaagcttataaattaagcaattgtccggaattgggtttggtttttggtcaaaacttatctatagtcaatcacggttttcttgggtatgcagcaatgagcagtcctacatttggaactgctatacaaactgtgctcagttaccttaatacacgaaccaatttgttgtctctggagttacgccagtttaatactgaaaacagtgcttatatcaagttattaccacacacaaaagaaatggttttatcacgttttataactgaattggcaattactcatcttattaaaatgagaaattttttgattagttgtaatgacccattgctcaagattgagttaaattacgatgaacctccttatgcaaaatattatcaaacaatttttcagactaaaattatttttaatacagaggctactcgcgtttggtttaaagcggaggaactgaattatcccatccattttgctgacgatgtcagttatcaactggcaaaaaggcaattgcaagaacttgaaaaaaaaatgtcattaaaagaggatatggcaagcaagattaaatctattttaatcaatcagaatttaaatcacgtcagcatggatgagatagccagtcgattatgtatgacttctcgtactctaagacgtcatttgcagagattggatgtgacttaccaagagttgcttgatgaggtaagagaacaaaaagcaaagacatttttgctcaataataatatttccatgaccgagatctgttttttattgggttttcaagatacatccaatttttcaaaagcattcaaacgatggacaggaatcactcccacagaatatagggaaaaacatgaagtccaa

SEQ ID NO: 25335 - DNA, 372 bp, Legionella pneumophila
atgactgaatcattgtttgagcgattaggcggccaaaatgccgtcaacacagctgtggatattttctaccgcaaaatgctcatggatgacagagtgaattatttttttgatgacgtggatatggagcaacaaatccttaagcaaaaaggatttttaaccatggtgtttggcggaccaaatcaatacactggaaaaagtatgcgggaaggacatcagcatctacttgccagaggcttaaatgactcacatgtggatattgtaatcgagcatttaggggaaacccttaaggaattgggcgccaatgaagaggacattcagaaagtagctgcaatcgccaatagtgttcgtggcgatgtattggggcgctcatca

SEQ ID NO: 25336 - DNA, 333 bp, Legionella pneumophila
ttgggggataccaaaaatgaaacttttcccgcattctttttggataaccaccccggaattattgctttggagaaatttttctcaggacccttcacacgggaaacagtctatccccgaccgattgtagaacgtgtattgcaattaaatgctgctgctttaattctggcacataatcatccctcgggcttgtctgatgcaagccagcaagatttagccattacagaacgcattcgagatgctctggatttggtagatgcccggttactggatcacattgtcattggggataatgaagtgtattccatttttgctgagaacaaatgggtatgtaac

SEQ ID NO: 25337 - DNA, 2580 bp, Legionella pneumophila
atgaaaagttctgaaattagacaagcattccttaactattttgttcaacgcggtcatcaaatagtagcttctagctcattggtcccttcaaatgatcccactttactatttaccaatgcaggtatggtgcaattcaaggatctttttttaggtcttgaaactcgttcatatcagcgtgctgctacagcacagcgctgtgtgcgtgcaggtggtaaacataatgatctggaaaatgttggttatacggcgagacatcatacattttttgaaatgttgggtaattttagttttggtgattattttaaacgcgaagctattcaatatgcttgggaattcctaacagaagttttacacataccggcagaacggctatgggttactgtctataaagaggatttggaagcagaagacatatggctaaaggaaatgaaggtatctcccgagcgattctctcgatgtggggaaaaagataatttctggtcaatgggggatacgggtccatgtggtccttgcacagaaattttttatgatcatggtcctgaagtagcaggtggtcccccgggcagtccagatgaagatggagatcgttatatagaaatatggaacctggtattcatgcagtttaacagggacagagagggacatttgcaccccttgccaaagccttctgtggatactggtatgggattggaacgattagccgcagttattcaaggtgtccatagtaattatgaaattgatagttttcagtatttgattaaagcaatagcacaattgggccaggatattgatttaaatcatacttccttaaaagtgattgcagatcatattcgttcctgctcttttttgatagttgatggggtattgcctagtaatgaaggcagaggatatgtattaagaaggattatccgcagagcagtcagacatgggaataaattaggcttacccagcccatttttttccaaacttgttcagcctttgattgatgttatgggggatgcttatcccgagctaatcaattcgaaagcgcatattgaaaggatcttgcaacaagaagaaaatcagtttacccgtactttggaacaaggattgcgtttattacaagatcatattaaaaatttgcaaggccaggaactatcaggagaagtggcattcaagttgtatgatacttatggtttccctatcgatttgacagcagacatcattcgtgaacaaggtttacatattgatatggaagcatttaatcaattgatgcaacaacaaagagaacagtctcaagccgccagtcagtttactacagattatcacgccgtgtctcaattggatcatcagtctgaatttcatgggtatgaaaaagaatccatggaagcaaagattattggattacttcaagaaggtaatgaagtgaaatctattaataagggagcaaaaggggctgtaattcttgatcataccccattttatgctgaaagtggtggtcaggtaggagataaaggattactcataggaaaagaatttacttttcaagtcgatgatacacaaaaagtagggcaagctgtcgtacattatggaaaagtaattaaaggtgagctcactttagatttattaatccatgcgcaagtagataacataagacgggatgcaattcgattgaatcataccgcaactcatttgttacatgctgctcttaaaaaaattgtagggcaacatgttcaacaacgaggatccctggtggatgctgaaagggcacgttttgacttttctcatttcgaggcattgactcctcaacaaattcagcaaattgaagaggtagttaatgcacagatccgagctaataatgaagtaataactcaagtaatggacattgaatcagccaagcaaagtggtgctgttgctttattcggggaaaaatactccgacgcagtacgcgtattatccatgggtgatttttccaaggagctttgtggaggaactcatgcacgacgtactggtgatataggtcttttcaaaatcgtagcagaatatggtattgccagcggtatcaggcggattgagatggttacgggtcgttatgcattagcctgggtcaatgaacagctgggatttatgaataatctggcagctacccttaaaacaacacctaatagtctacaggaaaaagtttctcaattattgcttgataataaaaatcaagaaaaaatgattgcaaaacttttaagtgaaaaagcacaaaaatctggagcagatattcttggtgagatcgaggagatcaagggtattaatttattgattaagcagttagagggtatggatagccaaaccatgcgccataccatggatcaattaaaatcaagaattgattcagcggtgatcatattatttactattgaacagaataaaatgaatgtcattgccggggtgagtaagaatattattggcaaagcaccaagtgctgctcaattagtaagacatctttgtggtaaaggaggtggtcgagatgatatggctcaaggtggtgggggtgttcctgaagatttgaacagtaagatcaaagaaataaaggaaatgattgaaaaaatt

SEQ ID NO: 25338 - DNA, 1440 bp, Legionella pneumophila
gtgaaaattaggcacaaacccttaagaacgctagtgagtactgctgttctcggagttctagctactggtacattaaacgcaggtggattttctttgtataccgaaggagctggatatacaacaggtaacttcgctgccggtgtggctgctgaagcagcggatgcttctacaggttggtataatccagcaggtttggtattaatccgcgatcagcaagctgtatttgcaggtgtcggtgtattcccaactgccaagttaagcggagttagtacttactcaacaattaatccgccccctttcccttcttttgtttattctgaggttttcaataatatcaatggggctgaggatgcttttgtgccctcgtttcattatgccttgccattgggtgaaaatgctacgtttgggttaagtgttgtatcaccatttggattggcaacagattggggcccagattctccagtgcgctatcaagccacttttactgagttaattaccaccaatatatcacccgaaattggtggtagattaacagagcacgttgctttgggggctggtttggatttgcaatatgctagagttaaatacaatcgtatacttggagtacctaacatactgaatgttttgccaccttttaaccccatgttagccgattcactgacttacaataaaggacactcttttggagtaggttttcatgtgggtgttctgggcatgtttaacgataatcatactcgtctcggtgcaaactatcagtcatcaatgcggcatgaattctatggctacagtcgtctaacagggccattggcaagtccaggtaatatattagcgccatttttgttcccggcacctggcatatttcaaagcgatgatttatttagtaactcaattgattttcctgatgtagtgactattagtgcttatcatgatgtcaatgacaaacttgcactgttaggctctttagtttatactgcatggagtagttataaaacagtacaactctctaatgcagctgccggaagaccagcggataatggaaatgtttcccaagccaaggcgataagcatatcaccgcagaattataacgatactttgcgggtagcgattggtgccaattatcatgttaatgataaattaatgcttcgtgtgggcggtggttatgatccaacacctacgaacaatattgacagagacgtgcgtttaccggatacagatcgttgggctttatctgctggcgctcattatcaggcaacgaataatatcggtctcgatatcggatatacccatttatttacttcaagtgatccagttattaacaggactgatgcgtttactgcaacaaccagatataacgttacagcatctggaactgcaggtgccaatttagtaggtgtgcaagcaacttggactattgataaagaacctccagcaccgactaaa

SEQ ID NO: 25339 - DNA, 945 bp, Legionella pneumophila
atggtaaaatcagcatttgtatttcctggacagggatcgcagtctatcggcatgttgtctgactttatgccacagtatactgttgtcaccgatgcttttgcagaggcctcagatgctttgggctatgatttgtgggatttggttcaaaatgggccagagacaaagctaaatcagactgaatacacgcaggctgccatgttaactgctgatgttgcaatttatcgtttattaatgcaattaggcgtacctcagcctcaagtaatggctggtcatagtttgggggaatacgctgctttggtttgcgctaattctttatctttaaaggatgctgcgcagttagttgctcgtagaggacaggtgatgcaaaacgcgatccctctgggagagggggctatggctgccatagtaggcttatctgatgaacaggttcgttcattgtgtgagcaggccagcacagccaatcatcttgttaccccggcgaattataatgctctgggccaaattgttgttgctggacatcgagtagccgttgataaactaatacaattggctgaagaggctggagccagactggcaatgataattcctgtaagtgtgccttgtcattgccccttattaaaaaatgctgccgaattatttgctgaagatcttgctcaaattgaatttcaagttccttcagtcgatgtaataagcaatgttgatttaagtatttatcattccactcaacatataagagataaactcaaagagcaactatacagccctgtgcgctgggttgaaacagttcagttaattcaacagcgcggaattgatctggttgtggagtgtgggccaggaaaagttctgaacggtttgataaaaagaattgagagaaatttaactacgattagcgtttatgacaccattagtcttgatcaagtcatagagcgtttacatatcccagtt

SEQ ID NO: 25340 - DNA, 267 bp, Legionella pneumophila
atgatcaagaccaaaataaagataatcaacagactcggtttacatgctcgtgcctcagcgaaatttgtctcaacagcagcaaaatttcaaagccatattgatgtaaccaaagatactcagaccgttaatggcaaaagcattatgggtgtgatgatgcttgctgctaacaaaggtagtgagttgacgttggaaattgacggtccagatgaagaacgcatgaatgaagctttagtcgaattaatcaataatcgatttggggaaagcgaa

SEQ ID NO: 25341 - DNA, 1647 bp, Legionella pneumophila
atgatgaagagatactcgaaaagattactgacttatatttatttacttatgaaaagcatacctctagtgttcacgatgcaacaactatcatatagcacagataaaatccctataccaaccaataaactacctgatgacctaaacaaagtgatgaataaatctatttataaaaaagcgttgtggggattacgtgttgttgatcttgatactggtaatgtattgctgaatctcaactcaagtacgcagttttatattggttctgtgcgcaagatatttagtgtaggcgaactattgaatgaaagaggagctgattatcaatctgttactagagtccattatgatggtgtagtacacaatggtaatctgaatgggaatctggtactcgttgcttcaggtgatttgaccatgggaggacgaactttacctgatggacatgtcgctatcactgaatacgatcataacgaggcaaattcattgggtaatgcaattattacacagactaatcttttagcaggttatcaatatctcgctaaacaagtttacaaagctggcattcgctctatttcaggcgacattgtgatagacgatagattgtttgaaccatttaatttcaggggtgaatttgatgtaacacctattttcataaacgatgatgtagttgatattgtaattcttccaagtttgataaacgagaatgcaaatgtatcgtggctgccacattcatcggcgttcaccgttatcaaccaacttcttacagttaatccgcatgaaaaatataatcttgaacttgagtcaaaattacctgcctgcataggtaaaccaggctgttctggcatcattaaaggccatttgcctatcaattttataccgccacttactcacaactacccattagtacaaacttttcgaatcactaaaccatctaattatgccagaactatttttatcgaggcactacaagaagcaggcatcaacgtttcatcgattgataaaaccaaagaaaatccgaaaaaactactaaaatctactaacttgtacaataagaataacaaaattgctgctttgaaatcattgccattgggagagcatgtaaaatatattctcaaagttagttataatatcggagcagataccagcctggtgttgtacggactaacaaaaggcgcgcgctccatgattgaaagtctaaacgtggaaaaaaaaatcctggataaaaaatatggcatatccccatcagaatatcattttattgatggcagcggcggcggcgaaacgaaggcaaccaataccgctataataaaatggcttactataatgtctaaaagaccagtatttaacatattttacaatagtctgcctattcttgcagtagatggttcacttggctcaattaataactttcaatcagatccatcgctttctggggcgacaggtcgagtgcatgcaaaaactggaacttatgtattgggaaatgagtcgggtatgttagttaaggggcgctctcttgctggttacattattagtaaaaaaaatcaccgacttgcatttgccttagttgttaataatatacctatacagtcactagaagatttatttgctgtagctcaggatcaaggcataatagcatcaattctatggcgagattat

SEQ ID NO: 25342 - DNA, 1236 bp, Legionella pneumophila
atgaactcaattctttttaaaaatgccaacgttattttgggagagtctacagagcttaaaaaaaaatttgatgttctggtgcaaaataatttgatctcccaggtgtcgcaaacaccgcttcaacctttcgaaggaatgcgcattatcgatgtcaaagggaaaacattaatgcctggtttaatcgatgcccatgctcatattaccggattgaccctaagcccaaaaaatatcttctactctgaagcagagatatttttggctgctgctacttatcttaaaaacagcttgttttatggttttacgactttacgagaagctggaggcgctgattttagaatagcacaattactagataataagagtattccagggcctcgattattttattctgggagggcattaactcaaacgggtggaggagctgactttagaaaaccgaatgaacagattgatccttgtgggcatgttggctctttctcgacgatgtcggttattgcagatgggattgatgaagtgagaaaggctgctcgagaagagttaaggaaaggagcaacacaattaaaagtatttgcttcaggcggggttgttttcccttcccttagcaatccaacactgtatgaatattccgaggaggagttatcgactattgttgaagaggcacgagcaagaaatacttatgttatggcccatgcttatagcgatgaatcagtaagaaagtgcattaaatcgggtgtgcgttccattgaacacgctaattttgtaagcgaaccaactgtagaattaatgtcggaaagtggtgtgttttacgatccgacatttatttcattggtgcaaagaattgaaagtgctgaacaaaaccggttgtctgaagctattgtagccaatttgaaaaatactattgaaaaaggcaaaaaggtttatgaatatgctttaaaatataagattcctattgcttttggtacagatttgtggggtcctgaggcacagagagatcagttaagagaatttgaaatgctcaaggagcttgattcagcagccaatattattcgttcagctaccgtagtcaatgcggaattattaatgcaaaagggaaaacttggcgtcataagcgaaggagcttatgctgatctgttagtagtagatggtaatcctttagtcaatttaaatgttctgctccgcccggatgaaaaccttaaattgattatgaaagatggggtcatttataagaatgaatta

SEQ ID NO: 25343 - DNA, 631 bp, Legionella pneumophila
ttggtttgcggttttgctcgcttataaggatatcctatagggatttattgctaataagggcatactttttagtgagagggcgcaaaaggcaagccatttcatagagctgtgctgtcaacgtaaaataccacttgtattcctgcaaaatattacaggatttatggtgggctccaaatacgaagcatcaggtattgcaaaacatggagccaaaatggtgacagcagttgccaatgctaatgtacccaaatttaccatcattgttggtggaagttttggagcaggtaattatgccatgtgtggccgggcatatgctcctcgtttcctatgggcctggcctaatgcacgcatctcagttatgggtggtgaacaagcagcgaatgttctcgcgcaaatcaccagagagaaatatgcaaagcaaggaaaagaatggtcactcgaagaagaagaacaatttaaaactcaaatgagaagtcagtatgaaactcagggaaatccttactatgccagtgccaggctttgggatgatggggtcatcgcgcctcaggatacacgcaaaatactcggacttggattatctgcagccttaaacgcaccgattgaggatactcgtttcggtgtatttcgcatgtaa

SEQ ID NO: 25344 - DNA, 1269 bp, Legionella pneumophila
atgactcaaaagacagcgaaactcagcatcgatgggcaagagacgattgatttaccaatctatactcccaccctaggtaatgatgtgattgatattacccagcttggttcacatggcgtctttacctttgatcaaggttttttatcaactgcctcctgtgaatcaaaaatcacctatattgatggggataaaggcattttgttgtataggggttatcctatagaacaattggcagaaaaaaaggacttccttgatgtaagttatttattactcaatggagaactacctaacaaagaagaaaagaaagctttcgttagtctgatcaacaatcatactatggttcatcagcaaatgtaccagtttttgaatgggttcagacgtgacgctcacccaatggctataatggttggaattgtgggggctttgtctgctttttatcatgaatccatggatttgaataacgcacaagaccgttttatttccgcaatcagactggttgctaaaatgcctactttagctgcgatgagctataaatactccattggcatgccttatatgtatcctaaaaataaaatgtcttatgcagagaactttctccatatgatgtttggtgttccatctgaagatactacgccagatcctgtactggtaagggctatggatactatttttattctccatgccgatcatgagcaaaatgcctctacatcgacggtacgtctggccggttctaccggagctaatccctttgcttgcatttcagccggtataggggctttatggggaccagctcatggtggagcgaatgaagcctgcttaaatatgctaaaagaaataggcgatgtgagtcgcatcgatcattacattaaacgagctaaagataaaaatgatccattccgcttgatggggtttgggcacagggtctataaaagctatgatccaagagctaaagtaatgcgtaagacctgttatgatgtactagaagcggtaggagccaaagacgcacctttattcaaattggcaatggagcttgaacgtatagctcttgaagatgaatatttcattgagaaaaaactctaccccaatgtagacttttactcaggactgactttaagtgctattggaataccaaccaatatgttcacagtgatatttgctctggcccgcactgttggatggatgagtcattggatggaaatggtagccaccaagtcacgcattggcagacctcgccaattgtatactggtgaaaaaattcgtgacgtaaaa

SEQ ID NO: 25345 - DNA, 1518 bp, Legionella pneumophila
atgacggataatttattatctggtgcgcctgacgcattcatcttaaatacaaagtgggatcagctcgactggcctagtattgagaaaaatgtatacagacttcaagtgcgtatcgcaaaggcagtgagtaataaacagcacggaaaagtgaagtcattgcaatggctgctggttaattccatcagcgcaaaacttcttgcagtgagacgagtaacgacagcaaaaggaagcaagacgcctggtattgatggtgttgtttggacaacatcagaagaaaaatgcgaggcggtgcgcaacctaaaagcaagagggtataaggcaactccgcttcgaaggatttacatcccgaagaagaatggaaaagagcgtccactaagcatacccactttgaaagatcgggcaatgcaagcactctatttgttagcattagaacccgttggagagactacagctgatctaaattcctatggatttagaccaaagcgaagtactcatgacgcgatataccagtgctatgcaaccttggcacggaaaaattgcgctcaatggattttagaaggcgacattaaggcctgttttgatgaaattgatcatggatggctcaaaagtaatatcataatagatcaacgagtgctaacacagtggttgcaggcaggctacatggaaaagaatcaattatttgaaacagcacgaggtactccgcaaggtggtccagcctcaccactgctcgcaaatatggttctagacggacttgagagggaaattcactccggctgtgggcaaggcaataaaataaattatattcgttttgccgatgatttcatcgtaactgcaaacagtcctgatatcctcaaagaaaaagtgatgccgataatttcaaactttcttgcacaacgaggtctttcattgtcacaggaaaaaaccaaaattgtgcatatcgaggaaggctttgattttctcggatttaatgtcaggaaatataagggtaagttcttaactacgccctcaaaagacagcattaaatccgtacaaatgaaaatcaaagagaccgtcaagaaaggatatggttggaaaggctcggagcttatctcagcgctgaatcctatcataaaaggatgggctaactatcatcgaaaagtcgtctcaaaagcaacattttccgaactggataattacatatatcaagaaacattccgttggacgatgaggaagtttagtggtcataatcgctataaagcaatggatcgttattttcgaaatcgtagccttacaaggcgctggatttttagtgacgtggttaaggccaaggacggtacgaagaagtatgtttgtattaacaaaatgatggatataaaaatacaacgacacgtcaaaattaggtcgagcgccaacccctatctacccgagtatgttaaatactttgaagatagaaaaaaatgggctaaagactgctcctttgttcaacgaataaaggacaaacaattgaatgttattggtagcgaatacctgctgggtgaa

SEQ ID NO: 25346 - DNA, 1404 bp, Legionella pneumophila
atgactcaatcagaacacaacgaccaacacctatcattctctcaattcccccttcgtcaagaattaataaaaagtcttgcttcttcaaattatgaaaatatgacccctatccaaatgcaaagcctgcccataattcttagaaatgaagatatgatagctcaagcaaaaacagggagtggaaagaccgctgcttttgctttgtgtttattaaataatttaaaaatttctttttttgtagtacaagccttggttctttgccctacccgtgaactcgcggaacaagtaagccaagctatccgtcgattagcctgtttgatgcctaatgtcaaaattattaatttatctggtggtataccaatgcagcctcagcttgattcattacgacatggagctcatattattgtaggaacaccggggagaatacttaagcatttaaaaaacgcctctttagacttatctcaggtaaaagctttagttttggatgaggcagacagaatgctggatatgggtttttttgatgacattaaaaacattatttcggtttgtcccaaacaacgacaaaccctgcttttttctgcgacttatcctgaagaaatcaaacggctttcaaaacaatttatgaaggacccgaaagaagttcatgtggtaacccctcctgaagaaattgatattgaacaacatttttatgaagtctcgagacatgctcagaaatttcccttattaaaatcattactgttgcactatcaacccgtttcagtgttaatcttctgtaataccaagcaacaaacaatagaagtcacagaccagctcatcaatgaaggcttcagtgccatcgctttaaatggtgatatggaacaaatcgagcgtgatcttgctgtcttgcgttttgccaaccaaagttgttctattcttgtcgccactgatgttgcagcacgaggacttgatataaaagaactttccgcagtgattaattttgatctcgcttttgatcacgacgtccatattcatcgtattggtcgaacaggacgagctgggagtaaaggcattgccttaagcattgtaacgcctgcagatgcacaacgaatttgcgccattgaagataactacccgctccccattcattggggaaacattaatgaattagaaaatcacaacactgctcgcttagtgccagaaatggttacactctgtattgcttccggtaaaaaagataaaattcgccctggtgacatccttggggcattaaccaaagatgcaggattagcaggcaacacaattggcaaaattaacatcaccgccatgtactcctatgttgcaattcaccatagccaagcagataaagcctaccaatatttacaaagtggaaaattaaaaggacgcaaagttaatgtacgtaaaataaat

SEQ ID NO: 25347 - DNA, 126 bp, Legionella pneumophila
atgcctgaattacccgaagtcgaaacaacaaagcaaggtattaaaccccatcttgaaggccgtatgattaccgcagtgcaagtgcgtaatccaaaacttagattaccagtacctctaaacctgaat

SEQ ID NO: 25348 - DNA, 627 bp, Legionella pneumophila
atggcaaaattatatttctactatgcggctatgaatgcaggtaaaagtacggtgttactgcagtctagttataattacagagaacgcggtatgcaaactctgttgtttaccccagccatcgatacacgtttccaatatggaactatctgttcacgtatcggtttatccgaacaggcttatgcttttaacaattcggataacctgtatgttttaactcaagaatttcaactacaaactcagaaatactcttgtgtcttgattgacgaggctcaatttttaactcgagagcaagtttatcaattaacggaaataaccgatcaaatgtctatcccagtactggcttatggtttgcgcactgactttagaggcgagttatttccgggaagtcaatttttattggcatgggcagatgagttaatcgaattaaagacaatttgtcattgtggccgtaaagcaattatgaatatgagaattgatgaaaatgggcaagctgttgttgagggtgagcaggtattgataggtggcaatgaatcctatgttgctacctgtcggttacattataaacgaggtgaggcagaggtgacatttccaagaaataaattgttcaataaagataccaatgctttt

SEQ ID NO: 25349 - DNA, 2367 bp, Legionella pneumophila
atgcaggagccttttttcattaaaaaagttgcagttttaggggctggcgtcatgggtgctcaaattgcagcacactgcgttaatgccggaatagagactttactgtttgatttagctggcaaagaagggcctaaaaacagcttggtcgataaagctattgccaatttaggtaaactaaaaccaactcctcttgcaactccccaaaccaatgagttattacaagcaaaaaattatgcggaaaatttggaagagttatcttcttgtgatttagtcatagaggcgatagcggaacgtgtagattggaaagaggacttatacaagcgaatttcgccttatttatctgataaaacaattttagttagtaatacatcagggctaagtatcaataagctatgtgaggtattacctgcgcagcatagatccaatttttgtggagtccatttttttaatccaccgcgttacatgcatttggcagaactaattcctgccaatactacatcatctgatttgctcgattatttggaaacatggttaaccgagtatttgggcaaaggagttgtgagagcgaaagacactcccaattttatcgcaaatcgaataggagtcttttcactattaactaccttgcatcatactttagccatgaatatgggaattgatgaagtggatgccttgactggtccattattaggaagaccgaaatctgcaacttttcgtaccatggatgtggttggtttggatactatgcaacacgttattaataccatgcagtctcaattaactggtgatccatggcataaaatgtttattctgccggactggttgaatggtttaattaaggaaggtcatttagggcaaaaatctggccaaggaatttaccgaaaagcaggtaaagtaatagaagtttatgatattcaaaccggtcaatatagaccctctcgagcagaagtgagtgatgaactgaaagcgataatggatattaaagatcctgaagctcgaatgaagaatttaatggcatcaaataataagcaagctcaatttttgtcggcttgctttagagatttattccattactgtgcgtatcatttggaagaaattgctgataatgcaagagatgttgatctggcaattcgctggggatttggatggtcgcaaggaccatttgaaacttggcagctttctgatttacacagtgtgactcgacaaatcgatgaatcaatacaggataatacggcattatcaagcgcaaaactacctgagtggttatatgaaataaaggaattttacacacgagaaggcgcttattcgcctggtaaaaacaattatcacgccagaagtcagttacctgtttaccataaacaattcttccatgacagggtattaaaggagtcacatcatcctgttcatgttatttatgaaaatgagggtgtttgtttgtggtacttaaaagatgatgtggctgtgattagttttaaaagcaaagccaatacaattggtcaatcagttctcgatggcatagagactgctttggatatcgcagaaagggattaccagggattaattatttatcaacaagatgcatccaattttagttcaggagctgatctacgtggcgtctccaaattattaacagatggaacaatacaagctcttgagcatatggtagagcaatttcaacgggtagcaatgcggttaaaatatagttcaattccaactgtagctgctttaagaggtcgagcattaggaggtggttgtgaattaatgatgcattgtgattctattgttgctgcttttgaatcttatcccggtttagttgaggctggagtaggagttatacctgctggtggtggttgcaaagagctcgctatgcgttcagcacatcatgcccaacaagctgatttattaacttttatattgccagtttttcagcaaatagcaactgcaaaagtagctgcaagtgcggtggaagccagaaatatgggatatctgcgtgcggctgattctattctaatgcatgctgatgaggttttatatgcctctttagaaaaaatcaaagccatgcgagctgctaattatcttcctcctatgaaaaaacaacgatttaaagtggcaggtatagaggggcatgcccgattacaatccggtttagtgaattggttggaaggtggatttatatcacagcatgattattttctggcgaatgaattggcgaaagtgttgtgtggtggggatgtcaatcatggaaccttggttgatgaacaatggatgctaaagttggaaagagaagcattcataaaactagccaatacatcattaacccaagccagaatcagtcatctgttagagactggtaaaccactgcgcaac

SEQ ID NO: 25350 - DNA, 1869 bp, Legionella pneumophila
atgaagattaaattaactatggctcaggccctattaagatttttagctaatcagtatgtcgttctggataataatgaataccgtttcatcaatggtgtatttggaatatttggccatggtaatgtaaccggattaggtgaggcattggaatacgatgctcagggtttaatttattatcagggacataatgaacaaggaatggctcacgcagcaaccgcctatgccaaacaaaaaaatcggctagggataatggcttgtacttcatcaattggtcctggcgctactaatatgattactgcagcggcgacagcgacaaccaatagaattccattactgttgttgccaggtgatgtattcagttgcaggcaaccagatccggttctccaacaattggaggtgccatatgactacaccatatctgttaatgattgctttaaaccagtaagtaagttttgggacaggataaccagacctgaacagttaatgacagcgtgtatgcatgctatgagggtattaaccgatccagttgaaacaggtactgttactttatgtttgcctcaagacgttcagtctgaagcttatgaatatgaggaatctttttttaaaaagcgcttatggcgtattgagagagagaggataagtgatgcaatgttgacagaggccataaggcatatcagaacggctaagcaaccattaatcattgcaggtggtggtgtacattattcactggctacggagactttatcagagtttgcattaaaacatcgcattcctgttgctgaaacccaagcaggaaaaagtagcctgacagcgaaacaccccatgaacgttggtggaataggtgttactggatctgaaatagcgaattctctggcagctcaggctgatgttattttggttatcgggtctcgattacaggattttacgacagcttccaaatgggcttttaaaaaccaggactgccaaatcattcatcttaatgtatcacgtcttgatgccatgaaaatgaatggagttatgttaaaaggagatgctaaagctggtttggagcaattggggaaagagctggcagattatcaaacctctctctcttatcagcagttaatacgtcattatcaaaatgaatgggctcaagagttagataaattgactcagtcttattctacagagcaggctgggttacaccaaactactgttttgggactgctcaatcagtatgttactgaagaggatgtgataattagtgcagcggggagtttgccaggtgatttgcatcgaatttggcaatccaaaaaggcaaaggattatcatttggagtacgcttattcctgtatgggatatgaggttgcagcgggtctaggagtacgtattgcaaaagaaaatcaggaaggagaggtctatgttttagttggagatggcagttttgtcatgatgcattcagagcttttaactgccatccaggaacgcaagaaaattacaattctcatttttgataaccatggatttcagtgcattagaaatttacaggaagggaatggtagtctgggttttggtaatgaatttcgttatagggagccaactactaatgctttaaatggcgattatttacccatagatttttgtaagtacgcagagggattgggggcagctacttattttgttaaatcctatgagcaattccggactactttagactcagcaaaaaaacaggaaaatagtacggttattgttcttcctgtattaccaaagaccatgagtcaaggatataagacttggtggcgggttggagttgctgaggtatctcaatcggaatcagtgagtaaagcttaccaaatgatgcgagagcaaattgaaacagttagacaatat

SEQ ID NO: 25351 - DNA, 468 bp, Legionella pneumophila
atgactaccaaaaaacaaccagattccaccatagccttgaatagaaaagctggttttgattactttattgaagatcaatacgaagcaggcctggttttggaaggctgggaagtaaaaagtctgcgtgctggaaaaatcaatttgtcggattcacacgtgataatcaaatacggtgaggcattcctattgggcgcccaaatacagcctcttcccaccgcatccactcattttattcctgatccgatcaggacgcgcaagctattgatgaataaaaaagaattaaaccatctcataggaagtgttgaaaggcaaggctataccatagtccctctttctttgtattggaaaaaaaataaaattaaaataaaaattgctctggctaaaggaaaaaaagagcatgacaaaagagacacgatcaaagacagagaatggcaaagggatcgttcaagaataatgaaaaagaacact

SEQ ID NO: 25352 - DNA, 1164 bp, Legionella pneumophila
atggacaatgaaagccagggatttctggaaactctttataaattacaaaattatatttctgaaattacggggatgcccggtgtttcactaactccaatggcaggttcacagggagaatttgccggagtcgccatgattaaagcctatcaccagtctcgtggcgacaccgcccgagatgaaattctcattccagatgcggcgcatggaacaaaccctgcctctgcggtaatgtgtggcttcaaagtagtagaaatagctaccgctccggacggtgacattgatcttgacgaattaaaaagaaaagtaggtcccaggactgctggaattatgctaactaatccatccactttgggattatttatgcgtcagataaaagaaatagccagtcttgtgcaccaagcaggaggattattatactacgatggggctaatctcaatgctattttaggtaaagtaagacctggtgatatgggttttgatgtcatgcatcttaatttacataaaacatttgctacacctcacgggggtggcggtcctggcgctggccctgttgctgttggcaaacgccttattccttacatgcccttacctgttgtgaaaaaaaccgactccggatatcactgggcaactcgccaggattatccacaaagcataggaagattatcatgttttatgggtaatgccggcattttattacgtgcttatttttatatgcttgtccttggtaaagaaggcctattgcgcgtatcagagttcgcaacacttaatgccaattatttacttaaagaattgactaaagtgggctatacagcagcctatcctgacaggcgtgcatcgcatgaatttattcttactttaaattccgaaaagaaaaattatgacgtgactgccatggattttgcaaaaaggttattggactatggagttcatgcccccactacttatttccctttactagtaccggaatgcttgttgattgaaccgcccgaaacagaaagcaaagaggaattggatgcttttgtggccgtgatgaaaatcattcgcgaagaagctagcaaacaacctgatatactcaaagctgcgccccacactttaccagtcaaaagactggatgatgtgaaagcggctcgcgaactggatttaaattattttgcaactcacgag

SEQ ID NO: 25353 - DNA, 1722 bp, Legionella pneumophila
atgaaagatcattataaatggctgagttgtttatttttttttatttgtaatatttatcaggttaatgcaaaaacatttccgcaacacccgcctggatatgctgtagcaagtgcccaccccttggcaactcatgccggtttagagattttggcagcaggaggaaatgcttttgatgctgcagttgcggtagctgctgccttggcagtagttgagccatatcattcgggacttggaggaggaggtttttggctacttcatcaggaaaaggaacatttaaacctctttattgatggcagggaggtagctcctctggccgcaagtaaggatatgtatttggctcctgacggccaagtgatccccggcctttctctaaatggtggtttatctgcggccatacctggacagccagctgccctggtttatatagccaagaactatggacgtcttccgcttagcaagacattagctccggctattaagcttgcggaagagggttttcctgtagatcctcaatttcgttatttctccactctggatgatagattggaaaacttgaagaaatatcccgataccgccgctatttttttaaagaatggtcagccttttgaaattggagaaaaacttgttcaaaaagatttggcaaaaacactcaggttgatagccaagtacggaaatgctggattttattcaggagaaacggcttctttgctagttcaaggtgtcaatgcggcaggtggaacttggtctcttgatgatctggctcaatataaaattaaagtgaggccacctttaattagtgcttatcataatatgttaattatcacagctcctctgccttcggccggtggagtggcattggtaaccatgctcaatatattatccaaatttcctttgtcttcatttcccaaattaaaatgggttcattacgtcgttgaatcgatgagattggcttattggcaaagagatcaatttctgggtgatcctgattttattaaggttccacttgataaattgatttcctcagataatgcgaaacaattaagccgcttgatttcaccaaataaagcgattgatagtaaagtcttgcaaggctcagttccaacgggaaaacactcaaatacctcacatatttcgattattgatacggaaggaaatcgtgttgctgcaacaatgacaattaattacatttttggctccagtgtagttgcgaagggaacaggggtattattaaatgatgaaatggacgatttttctactaaagtgggtgagcaaaatgtctttggtttagtgggaagtgagcgcaatgccattgaaccaagaaaaaggccgctatccagcatggctccaaccttcctggagatgccagggcgtgtagctatcctggggactcctgggggaagccgtattcctactatggttttacttgcctcactattattttatgatgggtatggagctatcagtatggtttcagccatgcgatttcatcatcaatatttaccagatgttttgcaatttgagcctgatactttcccaagttcaattcaacagggtttacaagctatgggataccatttaatgccattgaaacaatattatggagatatgcaagccattacatgggacaaagaaagtaatgtcttaacggctgcttctgatccaagacatattggtttagctgctgcgatatctaatatggcatatgggtatggggttaattac

SEQ ID NO: 25354 - DNA, 927 bp, Legionella pneumophila
ttgtcccacgccttgcattcacaaattgccactcatcgtgtacatggcggtgttgttccagaactggcatcaagagagcatgtgaattacttggttcctttggtcgatgaggtactaactaaagcgcaaattcgtaaaaaccaattggatggaatagcttacaccgcaggacctggattaattggcgctttgttagttggctcctgctttgccaaaagtctcgcctacgccttaaatatcccggcattggctattcatcatttggaagcccatctgttagccgcaaaaatggaaaccccatctctggactttccctttattgccctgttggtttccggtggccattgtcaactgatagaagtaaataatattggtgagtatcgattattaggagatactctcgacgatgcagtaggagaagcctttgacaagacagccaaactgatggggattccctatcctggaggagccgtgttggcaaatttggctgatcaatgtttatcaactccctatcaatttccccgtcccatgactgacaggccaggcttggactttagttttagcggactaaaaactcatgccttaaacacctggaatcaaagtgaaaaaaaagaaagcgaccgctccgaaattgcaaaagcattccaacaagcagtagttgaaacactaattataaaatgcaaaagagcaattaaagagtctcaatcaaagcgccttgtggtagccggtggagtaggagccaataaagcgttgcgcagcgctttgcaaaaatggattaaggacatccaaggggaagtgtacttccccgctctggaatattgcacagataatggtgcaatggtcgcttatgcaggatgtttgcgcatgatgcggggggagattgatggggggttgggggttatagtcaaacctcgttggcccctcgct

SEQ ID NO: 25355 - DNA, 1233 bp, Legionella pneumophila
atgactaataaaacatggggagggcgatttaagaaatctttggatagcagtgtcaaccagtttaatgcgtcattgtcttttgatcatgtgctttttgaccaggacattaatggcagtcaggttcatgtaaaacaattagctaaacagaagattttaacagaagctgaatgccaggagatttattctgctcttgaagaaatcagaacagagataaaacaaggccaatattcatttaatgaacgtgatgaagaagacatacatatgtttattgagcaattgctgattcaaaaaataggtgatttgggtaagaaattacacaccggccgtagtcgtaatgatcaagtggctttggatcttcgtttatataccagagataaaggctgtctgattaatgaacttttgacaaggcttatcgattgtctagatgatctaaccagtaaacatcaacaggatttaatgccaggctatactcatttacagcaagcccaacctgttacgttaggggcttattttaacgcgtatcaatgcatgtttagccgagacaaaagcagattagaggattggtttaaacgcatgaattattctccattgggcgccggggcactggcaggaagtaccttacctcttgatagagaatgggtagctgaatccttgggatttgcagggatcattcctaatactcttgatgcagtcagtgacagggactttgtcattgaattatgcagtgttgctgcaatgattatgatgcatctctccagattgtgtgaagatttgattctatggtctacccaggagtttaattttgttacattggatgatgcgtttgctacaggctcttcattgatgcctaacaaaaaaaatcccgatgttcctgaattgattcgtggcaaatcaggacgagtttatggtcatctaatggccattttaacggtaatgaaggggttgcccctggcttataacaaagacatgcaggaggataaagaaggattatttgatacgattaatacgataatcgtttgcctgcaaatgataactccttttttgcaaagtctgacttttaataccccgttaatgagaaccaaagctcaaagtggttaccttgatgcaactgccattctggagtcattagtgatgaagggtatgccttttcgtgatgcgcaccatcaagttggggcatggattgcagaagcgatagaaaaacaatgttcactgaatgaattattaaaaggaggc

SEQ ID NO: 25356 - DNA, 1431 bp, Legionella pneumophila
atggataaaagaccgaatataccaaaaagaaaatctggtaactcatcaaagctattagcgttttttgcgttggtatttgccttttcgcttccgtatttgctagtgaaaaatttttcacaccctaaacgaagcagttatgctgaccaaactgatttataccccgaactatcagacgagttatcaagagatatacctgctgaagcttccacggaaattccgcatgaaaaacctgatattaaatctgctacaaaacctatgcaaacaaagcaagatcagcaagacaaaccaatcaatacaagtcatgtaaaaaaagataatgaatggcaaatagtcaatcctcattcaggagattctatggcgaccattttccataggctaggactaaccgcgcaaaatttaaatgatgtgataaaaaataacccgcacgccaagatgcttacaagaatcaaacccaaccagaaattacaatttttaattaaaaaaaataaattggaaaaattaattgttcctgtaaacaccattcaaacactaacagtttatcgcgcagggaaaatatacaaaaccaaaattgactcaaaaaaaacaaccactcaaaatcgttatgtgactgcaacagtccaaggttctttgtatacaacagcccaacgatttaacatcccctcaaaattagtccgtcaaatgaccactatctttaacaaagaaattgatttttccagatctttgcgctccggagatcaattctcgataatttatgatgcttattacattgaagataaaatggttggagtaggagacattctggtagtaacgtatactaatcgtggaaaaacttatcaagcaatacgtcatactaacgctcatggtgagcaagactattttaccccacaaggcaccagctttaaaaaagccttcactcgatatccaattaaatttagccatataagctcgacttttgctttatcgagataccacccaattcttcattacagacgagcgcacaaaggtatcgatttggctgccccgattggaacaccaatacatgctaccggcgatggggttattacaatcatcgataggcataacggatatggcaatatgattaaaattaagcatgataaaacatacagcactatttatgggcatttactcaaattccagaaaggtctatcaaaaggcagtagagtaaaacgaggtcaagtaattggttatgtaggacaaaccggcctggcaaccggacctcattgccattatgagcttcatgtcaataatcagccaagaaacccaactacaataagcttgcctactgcagcaccagtaccagcaagagaaatggcagcattcaaagcaaaagccagtacacttttagcccgtctaaaacttttcgagcaagcgcaattagcaagtaaagggaaaaagaaagttaacgttgga

SEQ ID NO: 25357 - DNA, 1275 bp, Legionella pneumophila
  misc_feature (19)..(19): n=g, a, t or c
gtggaacccgcttaccaanttaatcccaatgcaattcatgtcatttatggtcatggtggtgaacaaattaaaagttcactccccaacttacctgttcattgggtgcatcaggcagagcaactagggactggccatgctgttttgcaagccatgccccatatccctgacgatgcatacgttctggttttatctgccgatgttcccctgatacaagtggaaactcttcaatcattaattgaatgcagccaacgtcaaaatccagatcattctgttttagcactcctggttgcagaactggaaaatccaagcggtcttgggcgtattatcagaaacaaccaaggtgaaatttatagcattgtagaagaaaaggatgcaaatgagcaagtaaagaatataaaagaaatttattccggggtgtgttgtactttggcaaataatctgaagaaatggttgcctcaactaagtaatagtaacgcacaaggcgaatattatttaactgaaattatctcattggctgtacaaaataaaacacccattacgtcattaaccgccaagaacagctttgaggtacagggcattaataatcgccaacaacttcagcaactcgaacgcatctggcagcaaagagcagccaatcaactcatggaaaaaggcgcgaccctggctgatgccaaccgctttgatttgagaggagaattatattgtggcaaagacgtctatatcgacattaactgcatttttacaggcaaggtagttttaggtaatggctgtaaaattggcccaaactgcagtctgactaatgtgacattaggcgatgggtgcgaagtttacgctaatagcgtactggaaggctgccacattgcaaacgactgccacatcggtccttttgcccgcttgcgctcagggacgcaattagcttcccattgtaaaatcggcaattttgttgaaactaaaaaagcgatttttgatgaaggcacgaaagccagtcatctcagttacttaggggacgtcctgttaggaaaaaatgtaaacgttggcgctggaaccattacttgtaattacgatggggttaataagcatcaaacaattatcgaagatggtgtttttattgggtcagatactcaattaattgctccagttaccgtgggcgctaacgcaacaataggagcagggagcaccatacgccggaatgtgccgcccgatgagttaacattaaccgaatcacgacaaaaaaccatctacggctggaaaaggccggtaaaaagagagagggat

SEQ ID NO: 25358 - DNA, 1570 bp, Legionella pneumophila
gtggaacacgaaacgatggaatttgatgttatcatagtcggtgcagggccttctggattatccgctgcaatcaaattaaagcaactggctttagcttcacaaaaagaaattactatttgtatcctggaaaaaggagctcaggttggcgctcatattctttctggcgcagttttagagcctagaagcttaaaagaattactaccagataattggcaacaggccccactggatactcctgttaacaaagatctgttttattttttgactcaaaataaatcatttaagctccctactccaaaacctatgcataatgaaggaaattttattatcagtttaggggaactatgtaagtttcttgcagaacaagcagagtctctaggctgtgaaatataccctggatttgctgcagcagaaattctctacaatgataaaaatcaagtcataggtgttgctactggggatgtaggaattgatagacaagggaaaaaaactgataattatcaacctggaatgcatttattagccaaacaaactttatttgctgagggatgtcgcgggcaattaagtcaaacattaatgagtcgctatcatttaagagatcattcgcagccacaaacttacggcatagggattaaagaaatctggcaagttgatgcatcgcgccatgaacctggaaaagttatccatacggttggttggcctcttgatcatgcgacttatggaggctcctttttgtatcatctttcagagcagagagttgcaataggttttgttgttgggcttgactacaagaacccatggctcaatccctttggcgaatttcagagatttaaaacgcatccccttattaaatctgttctaacaggaggtgagcgaattggttatggagccagagcacttaatgaaggaggatggcaatctctccctaaacttacctttcctggcggcgccttgattggagatgctgccggtttcctaaatgtgcctaaaatcaaaggaattcacaccgcaatgcaatctggaatgcttgctgcacaagcttgctttgatgcgctaagtgaagaaaagagcggtcaatttgaactaagtgcataccctaagaaaatcaatcaatcctggctaaagcaagagctctatgcagtgcgaaatattcgaccaggattcaaatacggtttatttccaggtctaattaatgctgccttcgagacttatgtgactcgaggatattctccatggaccttaaaaaatcattctgactataagtcgttaattccagcagacaaagctaaaaaaattaactacccaaaaccagatggcgtactcacgtttgataaactctcatctgtatttttatcaaatacatttcatgaggaaaatcaaccctgtcatctcaaaattaaaacaacccaagctggccactgaagtgaacttaaaccaatacgctctttccgaaaggcgatactgcgccggctgctgtttatgaaataaatgtgagaggtgagaaaggacctcgattaccaattaacccccagaaatgtattcattgtaaacgtgcgaaaattaagagctt

SEQ ID NO: 25359 - DNA, 2469 bp, Legionella pneumophila
atggataatacctataacccccaagaagttgaagaacaagcacaacaatattggcataagaagcaatcatttaatgttactgaagatttaaacaaagaaaagttttattgcttatccatgtttccctatcccagtggcacattgcatatggggcatgtgagaaactatactctcggtgatgtcatagcccgatatcagcgggcattgggaaaaaatgtcctgcaacctataggatgggatgcttttggcctaccagccgaaaatgcagccatcaagaataaaattcctcctgcagaatggaccaggaaaaatattgctgcaatgaaagagcagtttttacgcttgggaaatgcctatgactggaaaagagaaattactacctgtgatcctgaatattatcgctgggagcaatggttttttattcgtttatttgaaaagggcttagtttacaagaaaaacgctgttgttaactgggatcctgttgatcaaacagtattagctaatgaacaggtagttgacggtcgcggctggcgttcaggtgctttggttgagcgcaaggaaatttctcagtggtttattaaaattacctcctatgctgatgagcttttaagctctttagatagcctggatgaatggcctgcacaagtaaaacaaatgcagcgcaattggattggcaaatccataggcacagaaatttacttcaatgtaaacaattatcccaaacgattgaaaatttacactactcgcccagatacattgatgggagcaacctatcttgctgtggcaacagatcatccattagcaaaagaagcggcttccaacaataaaaaggttcaagaattcctcgatagttgtcaaggaattaagatagctgaagcagaactggcaactatggaaaaacgagggattgacactggaatgactgcaatccaccctataacgggtaaggagttacccatatgggttgctaattttgttttaatgcaatatggttctggtgcagtcatggcagttcctgcacatgatcagcgcgattgggagtttgcgcaaaaataccaattacctgtcaaacaggtaatcaagcctatagacattgagcatgactttaatcaatcagcttatactgaagaaggaattctgattaattcaaatcagtttgataatctactctctagtaaagccattcaagtcatcacaaactttctggaagaaaatgacgctggcaaagctaccattaattaccgtttaagagattggggcgtttccaggcaaagatactggggaacccctatccccatgattatctgcgaacaatgcggtattgttccagtccctgacgaagaattacctgttgttctgccagagaatgttgattttaccggtaccggctctccacttacacaatgcaaagagtttgttaatgtaacatgtccaaaatgcggtcaagatgcaactcgagaaacagatacatttgatacctttgtcgaatcttcatggtactatgctcgctttgcttgcaaaggtcaggaaaatgccatgcttgatgaccgagccaaatattggacaccagtagaccaatacatcggtggaattgaacatgcagtgatgcatctgctgtacgctcgattttttcataaattgatgcgcgatgaaggattagttaattcggatgaaccctttaaggctttattaactcaaggtatggttttaaaagacgggcataaaatgtcaaaatcattaggtaatgtggttgatccaaaccatcttatcaatacctacggagctgataccgctcgcttatttgtcatgtttgcatcccctcccgagcaatcactggaatggtcagattctggagtcgaaggagcacatcgctttttgaaacgagtttgggctttttcacatcagcatagagacatgctcattgacattaacgatagtattttgagtggaaatggtcatgtcgactggaaggaagcggagtctcgattaaaaaaatcccgtcatattgtgcatcaaatacttgctcaggcaacccatgactatgaccgaaatcaatttaacacggttgtttctggctgtatgaaattatttaatgaaatatctgattactccattgaaactgaaaatgataaattttttatacactcaagcatcagtatattgctgaggctactcgctccaattaccccgcatatttgtcattgcctttggcagcaattaggttttgataaagcaataattgatgcgccgtggccaaaggtggataaaagtgctctaaaaactgatgaagtagattatgttgtacaagttaatggaaagctcagagctcaatttactgcaagcactgatgcgactgaagaggaattaattgctgcagctaaggaacatgcccacaactttgtggtaaaccacaccattaaaaaagcaattattgtcccacataggcaactaatcaacttggtcattgga

SEQ ID NO: 25360 - DNA, 2304 bp, Legionella pneumophila
atgagaaaagtaataaaatatcttagcataatcctgggttcgctatttgtcagtgggtttttattattatttttttctcccaagccttctttattagaagaattcaatttttctaaagcggtatatgatgataatcaacaattattaagattaattttaagtgacgatgacaaatacagactttatgtaccgttatctcaaatacccaaggagttaatggaggccacacttttacaagaagatcagtattttctctggcataaaggagtgaaccctttttccatggtgaaagccatctggcaaacttatgtggttaaatcgcgcagaatcggggcttcaacaatcacaatgcaggtggcacgaattcgttttggaattaactccaagaaaatttctggaaaattatggcaagttattagggcgttacaaatagagcgtcattatgataaagataaaattcttgaggcttatttcaatttggcgccttatggtggaaatatagagggagtaggggcggcgagcttaatttattttaataagcctgttagtaaacttggtttaccagaggcactaactttaagcattatccctcaaaatccagtaaaaaggacatcaaaaaacagtgaattaaaaaaaataagaaatcgcttatttgccagatggctgaagcagcatccgcaagaccaggagaagcagcctctgtttggactgcctttagttatgcaaaccaatcaaaacctacccttcctggctcctcattttgtaaatatggtactgaaggaaaatcctggtttatcacaaagtatttcaacaactttggattacaggcttcagttaatagttgagcgaattacaaggcattatttagcaagaaaaaaaatgtttggtgttcacaacgcggcggttttacttgtggatagccgtactatgagtattaaagcgttgatgggatctgctgatttttttaataacaagataagtggacaaatcaatggtgtagaaaccaaaaggtcgcctggctcaactctgaaaccatttatttatggattagcactcgatcaaggtttaattcaccccaatacagttttaaaggatgtaccacagagttttaatggttataatccggaaaacttcgattatgattttatggggcccatcaaagcaaaagatgctttggtacttagtcgtaatatcccggccatcgagctttccaatcaattaactaatccaacattacataaattacttgaacaggcgcatataactcagttgcgttctgaatcatattatggcttgtctcttaatttgggtggtgttgaactcactatgaaagagttagtcggtttatatgctatgctgattaatgatggggtctggtatccaatcaattcattaaaaggggttccgcgacaaaaaggtcgacacttgcttagcgcagaagcaagctttttagttttcgatatgctaaaaaatactccaatgaaagagtcgaataatgatggcagtttacaattaccaattgcctggaaaacaggaacttcatcaggatacagagatgcctggacagttggagtttttggtccttatgtattggcagtttggataggaaattttgataatcaggcaaatccggcttttataggtaaagaaattgctgcgcctttattttttgaattgattaatgcaataaaacatgaaagaggaccaatagctcgagttgaaaaataccctgaacacatgcatttggaaaaaatagaagtatgcaaagcctcaggtatgcttcctggtcgatattgtacggatacagaatggacctggtttattccaggtaaatcccctattaaaacggatacaatttttcgagaggtagcaattaacgggaagacggggcttcgtacttgtcacatcgatgaaaatactcgttttgaagtgtatgagttttggccctccgatttattaagaatattcaggagggcagggattcaacgccataccccgccattttttgaaccaggttgcgctttgtcgggaaatagtggtattagcccccaaattacatctccccaggcaggggtaagttatattgtccatgctaatacccaatcaaacaagataatcccattaactgcggtaacagatgctggaattgcacatttatactggtttatcaatgaaagttttgtagctgaaacaaaatcggatgaaccttatctctggcaggcgaaacctggtaaatatgtggtaagggtggtagatgaccgtggtttatctgatgcgcgggatattactattcagatggttagt

SEQ ID NO: 25361 - DNA, 2121 bp, Legionella pneumophila
gtgagctactttaaagagctcgatgaagagcttaaatgctaccttgagcaggcgcaaatagagaaatgttatcaagcttatttggtggctgaaaaagcacaccatggccaaatgcgtcgttcaggtgagccttatattacacaccctgtagcagcagccctcattctggcaagaatgagactggactatcaaactatcatggctactctgcttcatgacgtcgttgaagatacctccataagtaaagaagaactggttaatcaatttggtgaagaagtcactgcccttgttgatggcgtcaccaaactcaccaaaattaaatttgaatcaaaggccgaagctcaagcggaaaattttcgcaagatggttttggctatggttaaggacattcgcgttattatcgttaaattggctgatcgcttacataatatgcgcactttaggatcaatgcccgcagccaagcgcagacgaattgcaattgaaacgctcgagatttatgcccctattgccaatcgtttgggtatgcattctatttatatcggccttgaggatttagggtttcaagctttatatcctatgcgttacagggcaattaaatctgctgttgaaaaatctcggggtaatcgaagagagttgacacagaccatagagaaagatttgcaacacgccttatcgcagttgaacattccctatgagcaagtatttggcaggcaaaagcatttatatagtatttatagaaaaatgaagcaaaagaaagcatcctttacagaaattacggatgtgtttgcatttcgcatcattacagaagacattgactcctgttatagaattttgggagctttgcactgtacttataagcctgtaccacaacgctttaaagactatatcggaattcccaaagccaatggctatcagtcattgcataccactttgtttgggccttttggtgttcctcttgaggttcaaatacgcacaagagagatggataaagtagctgataatggtgtagcagcgcactggatctataaatcttccggattggaagtcaatgaagctcaacttcgtgccagagagtgggttcaaagtttgcttgaaatgcaaaggagcacaggcagttctcttgaatttatcgaaaacgttaaaatagatttatttcctgatgaagtatatgtttttactcctaaagggcacattatggagttgccgaaaggagccactcctgtggattttgcttacacggtacactctggagtgggaaatagttgtgttgcagcgaaagtgaacaggcgtttggttcctttaagcattcctttatccaatggtcaaaccgtagagattattacagccccgggagcacaccccaacccggcttggctgaattttgttgtgactggaaaggcaagatcaaatattcgtcattttctgaaaagccaacaacacgctgagtctattgttttaggcaaacgattattggagcaatctttggctgaattatccagtgattacgccaaagtgcctccggaaacattacaggcattgctcagcgatttacactataaaacggttgatgacttattgtatgccataggaataggtaatcagatggcaatggttattgccaagcggttggtggtttcgcaagacgccaatgaatcggataagggcaataaaaaacctttggctattaaaggcactgaagggatggttgtgcattttggtgaatgctgccaaccaatacctggagataatatagttggtaaatttcaacaaggcagaggcattattgttcatgccagtgactgcactacactaaaaacaactcgtagtaatccggaacagtttattgctttgcgttgggatgagcaggttcagggtgaatattgggtagacattactgtagatgtagccaacgaaagaggtgtattggctgctttagcaactgctatttcagaagcagactctaatatagggaatattaatgtggatcccagagatggtcgtcataatgcggtcactttttccatcagtgttcgcgacagaacccatttggctcgagtcatgcgtcgattaagggcaaataaagtagttatgcggttatatcgaaaaaaacaaggggagatt

SEQ ID NO: 25362 - DNA, 1737 bp, Legionella pneumophila
atgctgattaaacaacgacaacagcctgagtttactgtcaatttacctaatgtacctgatgtattaaaacgtatttatataacacgaggcattagtgacgaatctcaacttgataaacaattacaaacattacttccttttcacactttaaaaggcattaatgaagcttgtctaagattagagaatgctttgcgttcagagcaacgtattcttattatcggtgattttgatgccgatggggcaacttctacggcattagccattactgccttgcgtgctatgggtgcaaggtttgttgagtacttggtacctaatcgatttgaatttggttatggtcttactcccgctattgttgaagtggcaagcaaatggcaacctgatttaattatcactgttgataatggtatagccagttttgaaggagtagatgcggctaataaaatgggaatagatgtattaattactgatcatcatttaccagcagaatcactacctgatgcttgtgcaattgttaatcccaatcagcctggttgtttatttccaagcaagtcaattgcgggagttggcgttattttttacgttatgctggcattgcgaaggcatctttccaattgtaactggtttaatgaaatcaacatggctgagcctaatatggcgagttttctggatttggttgcattagggactgtagccgacgttgtggggcttgaccaaaataacaggatcatggttaatcaaggcatgatgcgtattcgtcaaggacaatgcagagagggaataaaagccttgattgaaattgctggtagggattattccaggctaagagagtctgaccttggttttgccatagcgccaagattaaacgccgcaggccgtttggatgatatgtcgcttggtattgaatgtttgattacgacggatccaaaaatggcaagaaatttctgtcaacagttggatgagttgaatctggaaagaagacaaatagaatctgaaatgaaagagcaagccatgcttgctttggagaaattgtcaattaacgatgaagagaataagcacttaccggttgccttgtgccttcatgataaaacctggcatcaaggagtgataggaatcttggcaggaaggatgaaggaaaaatatcatcgtcctgtcattgcatttgcttctgtcagtgagcatgagttaaagggctcagcacgttctgtccccgatttaaacattagagatgtattggcagctgttgataaagacaatccaggactgattcttaaattcggaggacatgctatggctgctggcttaagtattagcccagaattattgaatgattttcgctcagcattcgtgtcagaggttctgaaacatcttgacttatcacagtgcgaaggagaaatactgacggacggaccattgcaatcccatgaactgagtttggaaacagcacaattaatacaacaagctggtccttggggccaagcgtttgcagaacccgtatttgataatgtatttgaaattctggatcaacgaattgtcggtaaaaatcatttaaaaatgacattaatttcctcacaaggaggggagctacttgatgccattgcttttaatgtggatttaaaatcctggcctaatcataggattaagtacattcatgccgcctataaactggatatcaatttttatcaggggagaacaaggctccaattgcttatccaggcaatgaatcctgttcagcaagca

SEQ ID NO: 25363 - DNA, 543 bp, Legionella pneumophila
atgaaattactattcgatttttttcctatcgttttattttttatagtctataaattttttggcatttataccgctactgctgttgctatggtagcttcattaactcaagttgcgttttacagattaaagtttcagcattatgaaaaaatgcatttgtttagtctggctatcattatggtcttgggaggagcgacgttattctttcaaaacccttggtttatcaaatggaagcctacaggaatctactggttatctgctcttgtcttttatggttcaagttatataggatctaagccactaatacaaaaaatgatggaagcaaacatcaatttaacaacaaaaatttggtatcgacttaatttagcatggacattattttttatagtaatgggggcattaaatttatatgttgcctatcattatgacactgatgtatgggttaattttaaattatttggtggtgttgggtttactttactttttgtgttgattcaagctttttatttaacaaaacacacagatgaaaaaagctttgaaaaacaa

SEQ ID NO: 25364 - DNA, 855 bp, Legionella pneumophila
ttgaataaattggaagatggtgggtcgtggttttctcgtttaaaacagttcttacaaggagagccacaaaatcaggaagaattggtcagtttattaagagacgcgcaaatacgctccctgattaattcagagaccctcgcaatgattgagggagctatccttttctcaaaaatgcgtgttcgagacataatgctgcctaaaaatcaaatggtttgcattaataaggatgatgattttaagcatattatatctattgtaactcaaacgggacattcacgttttcctgtaacgggtgaaaattctgatgaagtggttggcattttgcacgcaaaagatttgttaaaatatcaaccagaaaatatggaatcatttgatttattggacatctgccgccaggtaacttttgtacctgaaagcagacgtcttgatagtctgcttagtgaatttcgaagtaatagaaatcatatggctattgttgttgatgaatatggagaggtgtcaggtttcgttaccattgaagatatcattgaacaaataatcggtgacatagaagatgaatttgatatcgatgaagacgcctatattaaaacacatgaaggacactgctatatcatcaaagcccatactccaatagaagaatttaacgaacagctcaacgctgattttagtgacgaaacctatgatacaattggtggcatagtattaaataaattcggctatttacctcaacgaggtgaagtaataatcatagatgattttgaatttaaagttcttaatgccgattcgagaagaataaagttattagaatgtctcgataaaagaagtcccgagaaactaaattctactgttgaagga

SEQ ID NO: 25365 - DNA, 1767 bp, Legionella pneumophila
atgacagtggcacgtaacagatttgatgcggtaattataggagctggtggtgcaggaatgcgtgctgcactccagatgacaaattctggtttaaaagtagcgttgttatcaaaagtatttccaacccgctcacatactgtgtcggctcaaggcggtattacagcggctttgggcaatgctgatgaagacgattggcgttggcacatgtatgataccgtgaaaggcgctgattacattggtgatcaggattgtatagagtatttgtgtaaaactggccctgaagcagtttatgaactggagcatatggggctacctttttcacgaatggataatggaaaaatttaccaacgtcagtttggtggccagtcaaaacatttcggtggagaacaagcggcccgtacctgtgctgcggcagatagaaccgggcatgccttgctgcataccctttatcaacagaatttaaaagctaaaactcatgtatttagtgaatggtatgctctcgatctggtaaaaaactcacaaggaagaattgcaggtgttactgccatgtgtatggagactggcgagattgtattttttcagactcgagtttgtattttggcgactgggggagccggtagaatttttcaatcgacaacgaatgcttttatcaatactggcgatggctttggaatggcactaagagctggtatacctcttcaagacatggaaatgtggcaatttcatccaactggcatagcgggtgctggtgttctggtcacggagggttgccgaggtgaaggcggctatttaataaacaaagatggtgaacgctttatggagcgttatgctcccagagtaaaggacttggcttcccgggatgtggtcgctcgcgctatggctttggaaattcgggcagggaagggatttgatccaaaaggcgtcgatcatgttaaattaaagcttgatcatctaggcgctgatttgatcatgtctcgcttgcctggtattcgcgagttatcaatgaagtttgccggtgtagatccaattgttgagccgattccagttgttccaacttgccactacagtatgggaggaatacccaccaacatgcatggccaggttataactaaaactgatggcaaagagcatgtggtggagggattgtatgcggtaggcgaatgtgcctgcgtttcggtgcatggcgccaatcgattaggcggtaattccttattggatttggttgtgtttggtcgtgcagccgggatacatgttgaagaattatggcaatcaaatcaattgcctgatatgtcttatgtgagtgaagacgatgtagcggcttccctggtgcgttatgagcgctgggaaaactcaaaggatggtgaaagccatgcggtaatacgagatgaaatgcaaagagtaatgcaggaagattttggagtattccgtacaggtgaggtaatggcttcaggattgaaacgtttacaagctctgcgcgatcgattagcacatgctaaacttgatgataaaagtcaaatttttaatacagaacgcgttgaagctatggaattggataatttaatggcaacagcttatgcaacggctttatctgcaattgcgcgaactgaaagcagaggagcgcacagcagggaagattatccaaaacgagatgatgcaaactggattaaacacacattgtattttgaggaaggtgaggtgatagattatcgtccggttaatacctcacccaagtatgtcgagccttttgagccgaaagaacgcgtttac

SEQ ID NO: 25366 - DNA, 2589 bp, Legionella pneumophila
atggtatacctagccaaagaagtcttaccagtcaacatagaagacgaattgaagcaatcctatttggattatgcgatgagtgtcattgtgggtcgagcattacctgatgtacgtgatggtttaaagccagtacacaggcgagttctttttgcgatgagtgagttaagtaatgattggaataagccgtataaaaaatctgctcgtgtagtaggggatgtcattggtaaatatcatcctcatggggatacagctgtttatgacactattgttcgtatggctcagcccttttccatgcgttatatgctgattgatgggcagggtaattttggctctgtagatggagatgctccagctgccatgcgttacactgaagtaagaatgtccaaagtggcgcatgctttactggctgatttggataaggaaaccgttgattttagtcctaactatgatgaaacagaatttgctccagtggtattgccatcgagaattcccaatttactagttaatggctcttccggtattgcggtagggatggctactaatattccaccacataatcttaccgaagtaatcaatgcatgtattgctttagtggatgaacctgacacgagtcttgaagatttaatggaaattattcctggccctgattttcctacagccgcaattattaatggtcgtgctggaattattgaaggttatcgtactggaaaagggcgggttgttatcagggcacgcacagaaattgaaacggatgaaagttcaggccgtcagtcaattattattcaggaattaccctatcaggtgaataaagcgcgtttgatcgagcgtattgctgaattggtaagggacaagaaaatcgaaggaatttccggcttgagagatgagtcagacaagcaaggaatgagagtagtcattgaattaaaacgcaatgaagtagcagatgtggtattgaataacctgttcgctcatactcaaatgcaaaatgtattcggaattaatatggttgctctggtggatggccaaccgcgtactttgaatttgaagcaaatactggaatattttataaaacatcgaagagaggttgttaccagacgcacaatatttgaattgaaaaaagccagaagtcgagcccatttattggagggcttgggaatcgccttagctaatatcgatgaaatgatcgcattaattaagcaatctcctactcctcaagacgcaaaaagtgctttattaagcaaaatatggcaacctgggttggtaaaggccatgttggaaaaggctggctcaaacgcgtcaaggcctgatgatttaactgaagagtatggtttgcatgagagcggatataaattatctgaagcgcaggcacaagcaatacttgaattaagattacataggctaacagctcttgaacaagataaaataattaatgaatttgaagagctattgaatttaattaaagaattacttgatatattggcttcacctgaaagacttatgcaagttattcgtgatgaattgatagagattaaatcccaatttggtgatgagagacgaacggaaataacagcctcacaagaagatttgactattgaagatttgattaccgaagaagatgttgtggtcactttatctcatcaaggttatgtaaaatatcagcccattacagcctatcaggctcagcgccgaggtggcaaaggcaaatcggcaactcatgtcaaggatgaggattttgttgagcgtttggttattgcgagtactcatgacaccttattatgtttctccaatcatggcaaattatattggctaaaagcatatcaattgcctcaagcaagccgcgcttcgagaggaaggcctataatcaatattcttcctttggcagaaggcgaagagattaatgctatgctccctgttcgtgagtataaagacggcagctacgtgtttatggcaaccaagaagggaacagttaaaaaagtgcctttaaacgcatttagcaggccgcgttccaatggtattattgctgtggacctggaagaagatgacagtctcgttggagttgatattactgatggtgctcgcgatattatgttgtttactgatgcaggcaaagtaatccgctttgatgaaagtaaagtgcgacctatggggcgcacggctcgaggagttcgtggaattagggtagaaaaggatcaagccgttaaatctcttgtggtagtcgatccaagtggaggcaccattttgacggcaactgaaaacggctacggcaagagaactcatattgatgaatatcgagtgtcaggacggggcgggcaaggtgttatttccattcaggttactgaacgaaatggtaaagtggtccgctccttgcaggttaccgataatgacgaagccatgttaattacagataaagggactttggttcgttttaaagttaatgaattatctgtgataggccgaaatacacaaggagttcgtctgattaacgtcagttctggtgaggcagttgttggaatgcaaaaaattgtagatcttggagaagaattagaagaggcagaagattcatcccttaatgctgaagacagcagtgatgaa

SEQ ID NO: 25367 - DNA, 2349 bp, Legionella pneumophila
atggctactattgaaatcgacggtaaaacatttgaagcagaaaacggtaaaatgattatagaggttgctgatgaggctggcatctatattccacgtttttgctatcataaaaaattatctgtggcagctaattgtcgcatgtgtttggtcgaagtggaaaatgggaggaaaccggttcctgcttgtgctacacctataactaatgggatgaaagtatttacaaagtcagagcaggctatacactcccaaaaggtagtaatggaatttctcttgataaatcatcctttggattgccctatctgtgatcagggtggagagtgtgagcttcaagatatttctatggggtttggcgctgataaatcagagtacacagaaaccaagcgtgcggtagacgatgagaatttaggaacactaatatctactgaaatgacacgttgcatccattgtacacgctgcgtgcgcttcggcgaggaaattgcaggggtaagagagctgggagctaccggccgtggcgaaaagacgcagattggtacttatgtagaacacagtatgacatcggaagtttcagggaatatcatagacttgtgccctgttggcgccttaacttcgaagccttatcggtttaaagcccgtgcatgggaattgactcagcatgatagtgttgcgcctcatgattgcttggggtcaaatgttcatattcatacaagaaataataaattaatgcgtgtagttcccagggaaaacgaatctatcaacgaaacctggctttcagacagagacagatttagctatttggggttaaatgcggtttcaagggcgagcaaaccacaaatcaaaaaaaatggccaatgggaagcggttgattgggaaaccgcacttaagtttgccgcagaagggataagccgagttatcaaacaacatggcccagagcaaatggccgcttttgcgtccagttcttctaccctggaagaaatgtatttactgcaaaaattaatgagagagctaggtgttcaaaatctagatcaccggttacaacaaattgattttagagatcaggcatttttacctactacgccagtaagcactttgccttacgcagagatagatcatcagcattcaattctgttaataggatgcaatattcatagagaagtgccgttggcaggaacaagggtaagaaaagcttttcgcaatggcgcaaaaatttatgcccttaatccagtagattttgattatcattttgatttatccggacgagtcattatttctcctttggaaatgccgatgcaattagctaaattagccttagcgcttacaaccgaattggcatcgcttccagaagaagttcaaaaactgttaataggtttggaagtagataaacaaaccaaacaaatagcacaatcattaaaagaagagaaagcctgtttgataaccggagcaatagttgaaaatcatccagaagcttccttattgcgtactttggtggctattgttcaaaaacttagtggagccaaattagtcagattaacgactggagcaaacagcgcgggcgcatgcattgcaggtatgctgccgcatagaacagttgctgggaaatcaattgcagagccaggtttcaatgtacaagaagcgttaaattccaagttaaaaggttatttactcatgggtgttgaaccaggctatgattttgcaaatccagccggggcaaggcaatcaatgttagctgcagagtttgttgtactcttatcagcctatgagcatgaatccatgcatgattatgcagatgttattctaccgatcgctccttatgctgaaacatctggaacatacataaacattgataatacctggcaaacagtaaaaggagccatgctgccatttggcgaatcacggccagcctggaaggtgcttcgtgttttgggtaatttattgcactgcaaaaaatttgattatacctcaacagaggacatcttggaggaagtcaaagaagcagtatcgatgacaatggagcacgaatacgaaccttactatcctgaatcattgcctgtcattaatcaatcactggtaagagttggagagtggcctctttatcgaatagatgctattactagaaatgcaaaagagttacaattatgtgccgcatctgaatctgcctgtataagaattcatccatcaacggcagatagattgaaattagaagaaattgctactgtatctcaaggagatattgagataacattgccgctaaaacgtgatgagcgcattgcggttgatgttgtgtgggtggcaaatgcaatgccagaaacagttgaccttggtcactcgtttgctgcaataacaataaagcgc

SEQ ID NO: 25368 - DNA, 2688 bp, Legionella pneumophila
atgctgagtacgttaattaagaaaatgtttggaagccgaaatgaacggacattacggcgaatggaaaagtctgtaatggctattaatgcgtttgagccgaaaatgcaggctttatcaaacgaagagctggctggaaaaactcaagaatttaaagagcgtttcaataatggtgaaagtctcgatgagttacttgcggaagcttttgctacggttagagaagtatcattgcgcactctcggtcttaggcattttgacgtacaattaataggcgggatggtattgcatgagggaaatattgctgaaatgcgtaccggggaaggtaaaacattggttgcaaccttgccagcctatctcaatgccattagcgggcgtggtgtacatatagttactgttaatgattatcttgcaaaaagagatagccaatggatgaagcccatatatgaatttttagggcttacagttggcgttatctatcctgatatgtcgcacaaggaaaaacaggaagcttacaaagcggatattgtttacggaactaataacgaatacggttttgactatttacgtgacaatatggcttttagtctgactgataaggtacaaagagagcttaattttgctattgtcgacgaagtagattccattttgatcgatgaagcgagaactccattgattatatctggcgcggcagaagatagttcagagctgtatatcaaaattaattctttgatcccacagttaaaaaaacaagaagaagagggtgacgaaggcgattatactatagatgaaaagcaaaaacaggctcatctgactgatgcaggccatctgcatatagaagaactgctgaccaaagccaaattattagatcctggtgagagtctttatcatgccagcaatatcatgttgatgcatcatgtgaatgcggcactcaaggctcatgcaatgtttcacagagatattgattatattgtcaaagacaatcaagtggtgatagtggatgagcataccggccgtaccatgcctggaaggcgttggtcagaaggcttgcaccaggcagtcgaagccaaggagggagtcccaattcaaaatgaaaatcagactctggcttctataacttttcagaattttttccgcatgtataataaattgtcaggaatgacgggtactgctgacacagaagcctatgagttccaacaaatatataatcttgaagtggttgtaatacctaccaataggtcaatgattagaaaagacgaggctgatttggtttatctaacacaggcagataaattccaggcgataatcgaagatgtacgagaatgtggtgttcgtagacaacctgtcttggttggaacagtttcaatcgaagcttctgagtttttaagtcaactcttaaaaaaggagaacataaagcatcaggtattgaatgcaaaattccatgaaaaagaagcacaaattattgctgaagccgggcgccctggtgctgtaaccattgcgactaacatggctggacgaggaacagatattgttttaggtggtagcttggcagctgatctggctaatttgccagctgatgcgagtgagcaagaaaaagaagcggttaaaaaagaatggcaaaaacgtcatgatgaagtgattgcagcaggcggacttcgaattattggctctgagcgtcacgaatcaagacgtatcgataatcaattaagagggcgagccggtcgccagggtgatcccggaagtagccgtttttatttgtcacttgaagacaatttaatgagaatatttgcttctgagcgcgtggcctctatgatgcgtcgtttaggaatgcagccaggtgagccgattgaacatagtttggttaccagagcaattgaaaatgctcaacgcaaactggaaggacatcattttgacgtaagaaagcaattgttggattatgataatgtagcgaatgatcagcggcaggtcatttatactcagcgttcctctattatggcaatgacggatacacaggaagttgttgaaatgatgagagaagaggtaatggatagtttggttgatacttatatcccccctcaaagtttggaggatcagtgggatccacaggctttgtctgatgttttgtcagatgaatttaaaatcaaagcccctgtgcctgactggattgataaagatcatagtatacaacctgagaaaattaaagaaaaaattcttgctttagctatagagcattatgatgagaaagtaagaaaagttggaaggccagtcatttcacaatttgaaaaatcaattattttacaaactttagataatcattggcgtgaacacttggctgcaatggatcaattacgtcagggaattcatttaaggggttatgctcagaaggatccaaagcaggagtacaaaaaagaagcttttagtttgtttacaatgatgctggataatcttaagtatgaggtgatcaggatactatcatccgttgaaattcaaacggaggaggatgctcacgttgttgaagagcaacgtagagcggatcagattagaaaaatgaatctcatgcatgaaagtttatcagagaatgatgaagcaagtgaaacgcaaacttttagacgacaagaaaagaaaattggccgtaatgatccttgcccctgtggctcaggtaaaaaatataaagcctgtcatggaagcctcgtg

SEQ ID NO: 25369 - DNA, 2589 bp, Legionella pneumophila
atgccagacacgaccatttatttgaagaattatcaaccgccttcttttacagttgagactgtggaattgaattttgatttgtatgatgaccatgctctagtgaacagcactcttaagttaacacgtcaaaacgatggcgctttgcatttgtatggcgaagagctggaattaattgctttgcatttaaatgggcgacctttagaacatgagaagtatgtgttgacgaaagatgctcttattatagagcaatgcccggatgaaatagtacttaatattgtgactcgcattaaacctcaagaaaatacgcaattatcaggactttatcgttctaaccatttattctgtactcaatgcgaagcagaaggtttcagacgaattacctattatcttgatagacccgatgttttggcaacttttactacacgaattactgcagataaaaagcaatatccgattttattgtctaacggtaatttaatggataccggagaaaccgcggatggacgtcattgggtgatttgggaggatcctttcaagaagccctcttatttattcgctttggtagcgggcaatttagcttgcgttagagatagttttgttacttgctccggcaggattgttgatttacggatttatgtagaaccggggaatgaggacaagtgctctcatgccatggaatcattaaaaaaagccatgaaatgggatgaagaggtttatggccgtgagtacgatttagatatttatatgatagttgcggtgagtgatttcaatatgggagcaatggaaaacaaagggttgaatatatttaattccaaatacatcctcgctcgccctgaaaccgccactgatcaagatttcgcggatgttgaaggtgtagtaggccatgagtatttccataactggacaggaaatcgtgtgacttgtcgcgattggttccagttaagtttaaaagagggattgactgtattccgggatcaggagttttctcgggatatgaattctcgtgatgttaatcggattatggacgttaaggtattgcgcagtgctcagtttcccgaggatgccgggagcatggcgcatccagtaaggccggaatcctatcaggaaattaataatttttacacggcgacagtatataacaaaggcgcggaagtgattcgcatgcaacatactttgttaggcaaggagaggtttcgacgaggcatggatctttatttcaaacgccatgacggctatgccgtaaccattgatgattttgttgctgccatggaagatgccaatggagttgacttaacgcaattcaaactctggtatagccaggcagggacacctgaagtgcgcgttctcagccatttttcagaaggacgattggaaattaccatgcaacaaaattgtcctcctacgcctgagtgccatgagaaaaagccatttcatatcccggttcgcattgcattatttgatttgaaaggggaaatgattcccatagaaaacgagcttctggagttaaaggaaaaggagcaacgttttattttttctgggctaaatgaaaagcctgttgtctcgctattaagagaattctcagcccctgtgaaaatttatgatgatctggatcaggatgacttgttatttttattgcgttatgaaacggatggatatgccaagtgggatgcggcacaacgcctggttcttaactgtctcaatgaaaacttgaaattgccagccagtgaatggcaagtctctaaaactcttgttgctgcctttcagcatgttctgcttgatgactctcttgatatggatctcagggcagagttgttgacacctccaggatttgaagaagtggcagctaccatgaaatgggttgatgtcagcaaggttgaatcagtgcgagattatttccgtcaacaattgggattgggcttatacactgaggcgtctgatctttataaagaattatgggaagtagaagatcatcgcatgcatggccaagcttatggacgcagaaaattaagaaatgtttgtttatggttgatgatgaaagcgaacgaatcagatgctttagaattatgccgagaacaattcaaggcttctcgtaccatgacggatcaaattgccagttgcagcttactagtcaattgctccagggaatctcaacgaaatgaagccatagaaggattttataaacaatggtctcataatgaattggtactggataagtggtttgcgatgcaagcggcatgtgagttgccaggcacattggatcatgtcaaaaaactaactcaacatcctgctttttgtattaaaaatccgaataaagttcgggcgctggttggcgctttttgtatggctaaccccagaaacttccatgcgttggatggcagcggatatgtctttttaagtgaggtattgattaagctcgacaaactaaatcctcaaatcgccgcacgcttggctacgccttttacgcgttggcgaagttatgatgaaccaagacaaaagttaatacagaaccagttggagcagcttacaaaactcgatttgtcgcgggatttacgcgaggttgtagataagagtctgattgttgaggaaaaa

SEQ ID NO: 25370 - DNA, 673 bp, Legionella pneumophila
gggtaattgggcatcattttagggtttgcttttggtttttagaagcaatcgggcttatgaacgttggtgggaagcgagaaccctgtggggtcaattagtcaatgccagtcgtaatttagcaataaaaatcaggatattgttatcacccaatgccgatgaagctaaaaaattctctgaactcatcaatacgttttgtgaagtattggccatccatttgaggcaaaaaagtactcgggatgattttaaaaaatttttaaaaatggtgagtcttcccaatcatgtgccgtcttatgttgcacaagaactgtatcgtgagctttctgagaagaccaaagcatcgaaaagattgaatctatggttattggataacgaatttagcaaatttatggatatttgcggcggttgcgagcgtattaaaaatacatttatctcgctttcatttcgggtttttgtaaagcatgtattcattatttttatcctttttttaccttgcagcctaatcgatacgcttggagtttgggcaatacctgctaccattattattacctatttaatcatcgccatagagggaattgctcgaaatttagaagaaccatttggtttaacagaagatcacttaaaccttagtgcaataacagaaagtattagagaaagcgtcaatgaagtcttgcta

SEQ ID NO: 25371 - DNA, 729 bp, Legionella pneumophila
atgcgaacacgtatcattgttaatggtgccaatggaaaaatggggatactagcctgtgaaacattggaaaaccatgaacagtttgaaatagtagccaaactaagcagacaggacaatcttgggcaaagtatactggacaccaaagcacaaatagttgttgatttgacaagagcagactgtgtctatgaaaactctttaaccattattaatcacggcgctcgaccggttattgggacatcggggttggttgaaacacaaatcgatgagctcaccaaactgtgtgaaataaaacaaataggtggaattattgcacctaatttttctctcggtgccattttaatgatgattctcgccacaaaagcttctgaatatttttcagaggttgaaattattgaaggccatcatcaacaaaaattggatgcgccatcagggactgctttaaaaactgcagaaatgatagccgcggcgcgcaaaaaacccaaaaacaaacttccattaaaagaattaacccctggggcccgaggcggctctcatcatgatattaatattcattcccttagactgcctgggttgcttgctcgacaagaagtcctctttggcaacataggcgagacactctccattacacataacagtatagatcgccgttgttttatgccgggaattgtgctggcctgtcaaaaagtattgaatttaaataacctggtttatggtctggaacatttgctt

SEQ ID NO: 25372 - DNA, 975 bp, Legionella pneumophila
atgattaaatacatactccgcagaattttatatgcgattccaattttgtttggtattaatcttattacttttgcattgtttttcatggttaattctcccgatgatatggcacgtatgcacttgggtaataaacatgtagagcaaaaagccattgaagattggaaagtggttcatggctatgatttaccgttattttataatgaaaagcagactggatttaatcaatttagacagactttgttttatcaaaaatcgctgatgttgtttacatttaattttggtgtctcggatgctggtagagatattagccacgatatatcctacagaatgtggccaagccttgccattgccctgccaacattattatttgctgttttggtgaatatcatttttgctatggctatggcatttttccgttcgacttatcttgatttatccggggtagttatttgtattatcctaatgtccatttccagtttgttttacatcattggcgggcaatatctgtttggaaaaatattaaaatggttccctatttccggctacgatgatggcctcgatgctttaaaatttactattttaccagtcctggtagctgttctgggacaattgggtgcgggagcgcgttggtatcgaaccttggttttggaagaaattaataaagattatgtaaaaaccgcaagagcaaaggggctctctgagcaaaggattttatttaagcatatattaaaaaatgccatgttacccattttgaccggaattgttgtaatcattcctactttgtttatgggaagtttggttttagagtctttttttggtgtgccaggcctgggtagctatattattgatgcgatacaacagcaagattttgctattgtacgagctatggtatttctggggtcagttctttacatcataggcttggttctgactgatttttcttacatcctagttgatccccgagtgcgattatcc

SEQ ID NO: 25373 - DNA, 1146 bp, Legionella pneumophila
atgaatgaagtctatgtttttacctcagagtctgtttccgagggccatcctgataagatagctgatcaaatttcagatgccattttagatgctattttagcccaagatccaaaagcacgagtggcttgtgaggtattggttaaaaccggcatggttttggttggtggagaaattacgacgaaagcttgggttgatgttgaagaaataactcgtcatgttatcaaggacattggctataatagttcccagatggggtttgattgggaatcttgtgctgtgctttcagcgattggcaagcaatcaccagacatagctcaaggtgtcgataatcagcaaactaaaattctgggtgctggcgatcagggacttatgtttggttatgccagccgtgaaacagatgtttttatgcctgcccctattgcctatgcgcatcgtttgatggagaaattagctaaagctcgtaaatcaggccaattaccctggttaagacctgatgcaaaatgtcaacttactttgaaatatgaacaagggatgccggttgaagtggatactgttgttttttctacgcagcattcacctgatattgagcataaagatttggttgaggcgatccgtgaagaaattattaaatcagttcttcctgctgaatggctcaatgataagacccggtatttcattaatccgacaggacgcttcgtaattggtggtcctttgggcgattgtggcttaaccggccgtaaaatcattgttgatacttatggtggtatggcaagacatggcggaggctgtttttcaggtaaagatccttcgaaggtagatcgctccgcagcatacgccgcaagacatgttgccaagaatattgtggcggctggtttggcggataaatgcgagttacagatttcctatgctattggtgttgctgaacctacatctatttttgttgatacttttggtactggacgactaaaaaacagcgaaataattgatttaattcatacgcattttgatttaacaccgcaaggtattatcgaccaacacgatttgcttcgtcctatttataggcagacggcaacttatgggcactatggcagggagagttttccatgggagcgattggacaaagtagctgaattaagcaaggcatta

SEQ ID NO: 25374 - DNA, 678 bp, Legionella pneumophila
atgaattccccatttcaattattcggaaaacagttcaggcgtgaaatattaatccaggtgcggcaaatcagatatttagttaattcgtgtttattttttttaatgttgttatttattttccctcttactctaagaccagaattaatgttgatgcgtatgtttgctcccggattagtgtggatggccattttgttatccatgcttctttcgttagaacggttgtttcaacaagattatgaacaaggagtccttgaacagtggctagtttcagggcaaccattaaatctccttgtgacagccaaagttatggcacactggttgatatccgtgactccgttattattattatctcctttgattgcaatattattttcattcaatgtttgggaaacatgtatattgttattgagccttatttgcgggacgcctgccatattatttttatgtgcgcttgcagcagcttttggtatagggataaatcagcgtggggctttgatggcattgattctattaccgttaactttacctttactgatatttggtagtggtactttgagcgttgcgatgcaaggtttgccggtcagcggctatctggctttattattggcgatgtctctattggctgttggttttctaccttatgcgattgcggcagtgatacgtattagtcatatagac

SEQ ID NO: 25375 - DNA, 804 bp, Legionella pneumophila
atgggaggagatactattgtgggatttttaactggaaaaaaagcacttattgttggattggcaagcaacagatcgattgcatatggcattgctaaagcattccataatcaaggcgctgagttggcttttacttaccaaaacgaaaaattacagtcacgtgttgaaacaatggcatcggaatttaattcaactctagtttttccttgtgatgttgcaagtgatgaagaaataaaagccgtgtttgataatttgcgtaatcactgggataaattagatatcctggtccactctgtagcttatgctcctgctgatcagatcagtggtgattttgtagaatgtgcaaatagagaaggatttagaatagctcatgatattagtgcctatagcctcataggtttgtctcaagccgcattgcctatgatgctagatactcagggttcaattttaaccttaagctattatggggcagaaaaagccgtaccaaactataacgttatgggtgttgcgaaggcaagcttggaagcctctgtgcgctatctggcagccagcttaggatccagaggattaagaattaatgccatatcagctggaccaattaaaactcttgccgctgctggaattaaagattttcgtaaaattcatgctgcctatgcaaacattactccattacaaagaaatgttactgctgatgaagtcggaaatactgctgccttcttatgctctgatctggcatccgggattactggtgaagtgctacatgttgatgcaggatatcacgcagtatcagcgatgagcgaactaggt

SEQ ID NO: 25376 - DNA, 1032 bp, Legionella pneumophila
atggatatcgcggaattattggcattttcagttaaaaacaaatcatcagatttgcatatttcagctggcatgcctcctatgattcgtgttgatggtgatttacgcaaaattaatttacctccattagagcataaagacgtcattaagattatttatgacataatgaatgacaggcaaagaaaagaatatgaagaattttttgaaacagatttttcctttgaaatagccaatctggcacggttcagggttaatgctttcaatcaatcgcgcggtgccgctgctgttttcagaactattccttctgaaattcttagcatggaagatttaggattgcccccaatttttaaagaaatggctagtttttccaggggtctggttctggttactggcccaactggatcaggaaaaagtaccacgcttgcagcagtcatcgattatattaattcaagtcgttatgagcatattttgacagttgaagatcccattgagtttgttcatcaaagcaaaaaatgtctggtcaaccaacgcgaagtacacaaagacacattgagctttaatgccgctttgagatcagcgttacgtgaagatccggatattatattggtgggtgaattacgcgatttggaaactatacgcttggcgatgactgcagcagaaaccgggcatttggtttttggaacattgcataccaattctgcaacaaaaacaataaacaggataattgatgtatttcccgctgaagaaaaatcgatggtacgctccatgctttctgaatcattgcaagctgtcgttgctcaaagtttattaaaaaagaataaaggtggtcgggttgcggcgcttgaaattatgatgtgtacgggggctattcgtaatttaattcgtgaggataagatagcgcaaatgtattcgtcaattcaaactggtcaagccaaaggaatgcaaacattggatcaacatttgactgaattggttaataaaaatattatttcgaaacacactgctcatgaggctgccctgaacaagtcattattt

SEQ ID NO: 25377 - DNA, 1133 bp, Legionella pneumophila
atgctcaatctaatatggttaggaatgatactgatttcagtggtggttggagttattgaggggcgtattgacgaggtggtaagagcagttactgactctgccaagctgggatttgagttagcgcttggtttggctgggataatgactttctggttaggaataatgtcggttgctacagaatcaggtttagtttctattttaggtaaagtactcaaaccggtgttaaagcgattatttcctgatatacctgttgagcatcctgcaatgggagcaatggtaatgaatattgctgcgaacatgttgggtcttgctaatgccgcgaccccttttggattgcaggcaatgaaagaattgcagagccttaatcagaatttgaaagttgccacgaattccatgtgtactttcttggcaataaacacttccagtgtgcaattaattccagtcaccgctatcgcatttcttgctgcaaacgggagcacaaacccaagtagtgtggtcttcacttctttgatcgcgactactgtttctactctggtagctatcgttgctgtaaaacaattggctaaattaccgcgatttaaaattgaaaggacagacagcttatgaatggattcgctaatcatttatccaattggttgtttttgactttcatcgttggtatccctttgtacgctgcaattaaaaaagtaaatgtatttgatgctttcataattggagcaaaacaaggttttgatgtgagcgtaaagcttataccttatttagttgcgatgatggttgccattggcatgctaagagcttcaggttttttttccttaatgagtcagatcttatcgccagcgttgactatgataggaatgccttccgaattattacctttagctcttattagaccattctctggaagtgcttcaacaggagttatggcagagctgattcataaatacggaggagattcattcatcgcaaaaaccgcagcaacaatgatgggaagtacagagactactttttatgtgattgccgtttattttgggtctgtgggtatcagaagaacaagacatgctattcctgccggattattggcagatttagctggaatcattgcctcggttttgatttgtcgatatttatttaca

SEQ ID NO: 25378 - DNA, 1071 bp, Legionella pneumophila
atgacaactgttgctcaatttgaaataacatacacacaatacctgaatgaacaaggtaagttggtcgctgaattacctccattcgcagataatcaatccatacttaaagaattgtataaaatcatggtactcacccgtacttttgataaaaaagcaattgcattacaaagaacagggaaaatgggaacctatgcgccaattaatggccaggaagctatttcgactgcaattgggcatgctcttaaacctgaagatgtacttgtaccttattacagagattatgccgctcaatttcagagaggcgttaaaatgtcagagatactcgccttttggggaggggatgagcgaggaagtcattattctaataatgccgaagatttgcctatttgtgtcccaattgcatctcaatgtttgcatgccgcaggagtcgcatttgccttcaaatacagaaaccaaccaagagtagctgtggtatgtattggagaaggaggcacttcagaaggtgatttttacgaagccatgaatgtggctggggcatggaaattaccagtggtcttcgtagtaaataataacaaatgggcgatttctgtgcctatagagaaacaaactggctcacaaacaatagcccaaaaagcgattgctgctggtttttctggcgttcaaatagacggtaatgatatttttgctgcaagacaggttataggggatgctattgaaaaggctcgtcaaggtggtggacctactctaatcgaagccttaacctatcgcttgtgcgaccatacaacggctgatgatgcaacacgctatcagccttctcatgaagtagaggaggcaaaagccaaagagcctattgttcgttttaaacactatttaatgcaacaaaatatttggacatctcaggatgaagaaaagctggttatagaatgcagtgaaacggtggaaaaagcagtagaggaatatttgaataccaaacctcagcctgttagcagcatttttgattatcattacgcagaattaccagaatatttaattgaacaacgcgcaatagccatggaggagtattctcatgcc

SEQ ID NO: 25379 - DNA, 1376 bp, Legionella pneumophila
attacatttatcaaattaaaagattggcaaaccctgctgtgagttctccgatatatggattgatgagctattatattctgggcttcaaggagtatggagatagtcttcctaaaggattggccaataaaaattcttttattgatttacgtaagtatcctttgaagggggttaaaaaattagacgattatacctttgagattacattaaagggacaatatacacaatttttgttttggttagccatgcccttttttgctccggttccttgggaagcggacttattttattcccaaaaagatatggatgataagaacttatcttttggctggtatcctataggtacagggccttttatgctgactgaaaataatcccaatagaagcatgatattggagaaaaatcctaatttcagagaagtgtattttcctgtcaatggttcagatgccgatagacgggcaggttatttaaccaatctgggaaggcgcttgcccttaattgataaagccgtttatacccttgaaaaggaatccatacctcgatggaataaattcttgcaaggctactatgatatgtcggggataagtgctgacagttttgatcaggctattcatattaatcgctttggagaacctatccttagccaggaaatgaaagataaaaaaatatatttaagacaaaccctggaaccgtctatctattatactggctttaatatgcttgacagcgttgttgggggcaatagcaaaagagcacgaaaattacgccaggcaatttctattgcggtgaattttgatgaaaatattgccatattttttaatggccgaggtattccggcgcaaggccctattccacctggtatctttgggtacaaggaaggaaaagagggtattaatccctatgtttatcaatgggtgaataatgcgaggaaacgcaaatccttaaaggacgcgcagaagttaatggttgaggcaggatatccgagagggatagatccgaaaactgggaaacacctgattcttcattatgatgtcatgacgacaggtggacctgatgataaagcaaggcttgactggatgcgaaagcaatttgcaaatatagggatagatttgaatattagggcgactctttacaatcgtttccaggaaaagatgcggataggtcatgctcaaatatttagttggggctggaatgccgattatcctgatcccgaaaattttttatttttgctttatgggaaaaatggaaaagtgaagtatggtggtgaaaatgcatcaaattatgaaaatcctgaatttgatagattgtttaatttgatgaaaaatcgccctaacgatctacaaagacaaaagctgattgataagatgttagcgattata

SEQ ID NO: 25380 - DNA, 420 bp, Legionella pneumophila
atgactgcatctttaaaccgcgttcaattaatcggtaatctcggcgctgatcctaaaagcatcaccggaaaagacggacaatcttttgtcactgccactttggctaccaatgaatcattcaaaaaaagtgatgaatggcaaaccagagtggaatggcatcaactggtgctttttggaaaactgatcaaagtagctgaatatttaaagaaaggctcgcaagtataccttgaaggtaaactgcgttctaatcaatggactgacaatgaaggtaagacacatcaaacgttaagcgtcgtcgtcaatcatatccagctactcagtcactccaaatctgctgatgaatctagcaacaagaccgcagagcaccacatggcgcaaatgcgtgaaatgttgcaaaccgattcagaagaaattccgttt

SEQ ID NO: 25381 - DNA, 951 bp, Legionella pneumophila
atgtctgataactcctggttgccctcagcttcaattcaattattacgtgcgcgagccgagctaataggtaaaatccgccaattttttactgaacgccaatatctggaagtggaaacccctgtgatggcgcggcatggggttacagatgtttacctgagcaatatcaaagcgattttcagaggtgaaacatgctatttacaaacttccccggaatatcatatgaaacggctgttagctgctggcagcgggcctatttttcaattagcgcgagtttttcgtgatgacgaactggggcgctggcataatcctgaatttactttacttgaatggtatcaattacatattgatcatcatgttttgatggatgaagtggatttattattacaaattattcttaaatcccggcctatgatcagaaaaacctatcaacaggcttttgaagaggcttgcggcattgaccctttttctacatccatagaacaattcaacaaggtattagcacagcatgatttggatggtgtcttatctcctaacgaacaagacagggatcaatatctgtttttattaatgagccatgtcgtggagccttttttggcagaagaatcaacccccgttgctgtgtatcacttccctgcctcccaggctgccttggcacaagtaaaagagggcttggctgagcgctttgaagtgtactatcagggagttgaattggctaatggttttcatgagttgactgatgtcgaggcgcaaaaaaagcgttttatgctggatcagcaacatagaaagcaaaagggattgacggcaatggaagccgatgcatatcttttgaaagccctggaatatgggttacctccttgcagcggggttgccctgggggttgatcgattgttggcgctcgccttaaaacaaccaagcatagaaaaaattctctcatttgatttttcaaggtct

SEQ ID NO: 25382 - DNA, 2196 bp, Legionella pneumophila
atgagaatttttgtcatgattttgcttttcttttttagtatttccccgaccttgggggatagcactttgcctgcaatttttgatgtcaaaaatgcaaataaacaatttgatcaaatcaatctccagttgtcagtacaaaatcttaatttaaataacctgaataaggcagtagaaactctcggtgaactgtccgcgcaatccgatgaatgtatagctgatatacagaaaaaaataaatggagtggatgtattaatcaaacaagctacctctacagggaatgataaaggagctgatttagtctatctgaataatcaaaagcatcagttagctgagttacaatctcaatgtcgattattctcaattcgagctcaggaagcaatagaagcttataaaagtgctattttgcaattaaggcaagaaaagactttggcgcgtaccttaccattatggcaattagcaagtaaaattattaattcatctgataataccaaatggataaatcatactaaagagaaatttttacttcaggatttgcctgtatatctatggttttgtattgttgcaggaagcttttttatctctatcctgatcttgtcaaaattacggcaatccaatgttatacgccgttatgtgaaattaaaaaaaattcgctggtctcatattacacttttggctttgtttatgatgacgggttcattttatggctacatttccctatttactgctgaagagcagctaatcaattctcaattccttttaataaaggagcttttttggtttctttgcggcacattattcattgtttgtttattcaaagtcaaaaaaatcaaagctttttttgattggtatgctatggatagtgaattttttgaaatactaagcattgtgattgttgcattttatttcctcgcattatcagaacagagattatttgatatttgggaagtcaataagattattgtggagttaactcgctccatctttctttttttattgcttggtacaaccgcttattttactcactatttctgccgttctcatctgcatatttcttttgtaaaaagacattataattttattcggtactttatttttgcactgctttcagggtgcgcaattcttaatattaatggcttttatactttagccatgcagcttactctatctgggattttcacattttttatcttgtatatcactattttaataggacagagtattaataaattttatgcttcattaagttactcacaaggtaaattgaatgttatacgaatattcggatataaaaaggatcagatgcttactgagttttatattcttaaagttaccttaaaacttgttattgtactcctaagtgtctatcttatagggatatcctggggttttgctactgattttattgatactgtttataagaaattattgtatggctttactctggcaaatattacaatttatccaacgcgcattctcttcggaatcataattttttgttttttatatttggtgtctcgcgccatttcaacttcaatcagtcgtcaccaacagttcgaaaacgaagaagaaactcaggtagctattgcttccattttgacttatgttggattcagtattgctgttatttcaggcttactcgtcgcgggctttaattttactggacttgccattatcgctggagcactttctgtaggaattggtcttggactgcaaagcatagttaataattttgtatcaggtataattttgcttattgagaaaccaataagacctggagatcgaattaatatcgatggtgttgaaggatttgtaaaaaaaatcagagtcagatcaacacaaattctcactccggtaaatgaagatattattattccaaactctgatttaattacacgccgtgttgtcaattatatgctgacagataattattggcgtgttaattgtgaggttagcgttgctttcgggacaaacctgaatcttgttaaagacatccttttggagatcgctaataagcatgatgatgttgtaaaaagtggcagaaacaaacctgttgtgttatttaccagttttgccgacagtgcattaacttttcaactctggtgtatgattaaagatgtaaataaaaaatcgacagtcaaaagtgaattaaatttctctattgaggaggcttttcgcaagcatgacatttcaataaca

SEQ ID NO: 25383 - DNA, 717 bp, Legionella pneumophila
atgttcattcttttgatgtttttaaatttttacacctttggaaaaccacttatcattggtgttccggaatttgcgcccccatttgtatcaagatctggaggaggaggagagacatattttggatttaacatcgatttgatgaattccatttgcaagatcattgaaatggaatgccaatacaagggcatgaatattcaacagctatataccaatcttaaccaagggaagcttgatattatgctggctcctactccaatcgtatccactgttggcactaattatatattcagtcttccctatttaccgagcaatgcacaggtgataaccctgaaagctaacaatgacatcaatagcttagcagatctgaaaggtaaaaaggttggcactttaaaatacacgttgtatggtagcctccttgcagaacattttcaggattattttgacctggtacaattttccaaactgtctgacatggccctcgcattatcaaaccaaaaaattgaagccattgttcttaacacaaatgcagcgaaatatgcgatgagcaattctgcaactgagttaaaatttgtgggcgataaaatggctataggtgatggttatggaatactggccctcaaaaataatgctcctctcattatgaaaatcaataaggctttattacaaatagaaaaagacgggacctatttggaaatctataatacctatttcggtgat

SEQ ID NO: 25384 - DNA, 1296 bp, Legionella pneumophila
atgtccatagctgctaatgccggtgaattatttcgcggattctcaaagttatcacgtgaagagcgctttcaaaggttatgcgctttaggtgccttgactcatgaagacataacatttcttaaacaaggtggtattaaagatttaaacttggccgacaaattgattgaaaatgtgattggatattttcagcttccattgggtgtggctactaattttaatattgatggacgtgattatgtaatacctttggcagtggaagaaacctctattattgctgctctttccaaatcagcgaaatggattaggcagcatggtgaaatcaatacctgggttcacggagaatgtattcttgggcaaattcaactggcaaaaataaaggactttcaaagattctctgacctctttaataaaaatcgtcaatattttatagaaatagcgaataaagacgttgccgccaatatggtcaaacgaggcggcggtgttacggatttgcaagtacgtcatttaaagagagacgatggacaagatatggcagtaattcatttgacgatgaacagctgcgatgctatgggtgccaatatcatcaatcaagtacttgaatatttaaaacaacccatagaacaaataactggtgaagaagtcaccatgtgtattttatcgaacttaaatgatcaaaaattaacgaccgctcaagtcatcattcgtaatattgaccccatcctcggtcaaaaattgcaagaggcctcactctttgcagaaatagatccctatcgcgctgctacccataataaaggggttatgaatggaattgatccggttttaattgctacagggaatgattggcgagctgtggaagctggaatacacgcctatgcggcacgttcgggacaatacaaagcaattactcgctggcggtatcaaaatgaaatactcacaggagagttaactgctcctatcatagtaggtactgttggaggcgtaacctctttacaccccacggctaaaatgtgtttacgaatgatggatatcacttctgccaatcaactctcccaagtcatcgcagcagttggactagtgcaaaatcttggcgcactcaaagctttatgcactgacgggatcattcaaggccatatgaaattgcatattgataatttgctattagttgcaggggctaatgaaaatgaaatgcccgtgctcaaagaaaaattgcaagaatggcttaacctgaacaaacgagtcagcttgaataacgcttatgacctattagctgaaatccgacaagctcctgttgcagta

SEQ ID NO: 25385 - DNA, 1410 bp, Legionella pneumophila
atgactgttagaacccgatttgccccaagccctactggttttttacacgttggtggggtaaggactgcattattttcatggctatatgcaaaacatcacaatgggcaatttatactgcgtatagaagatacggacagagagcgttcaactcaagaatctgtacaggctattttagacggaatggcctggttagggcttaacttcgatgaaggtccttattatcagactgagcgatatgctcgttatcaacaagtagcgcagcaacttttggaagaaggaaaggcttatcgctgtcaatgcagtaaggaaagactggaagctttaagagaggctcaattagccgccaaggaaaagccacgctatgacggacattgcagaaaccaaagtcttcctgatagtggaattccttatgttattcgctttagaaatcctgatgcgggtatagtgtctttccacgatgaggtttatggtgacattcatgtggataatagcgaactggatgatttgattttggttcgttctgatgggcatcccacctataattttgctgtagttatcgatgattgggatatgaaaataactcatgttattcgcggggatgatcatatcaataatactccgagacaaattaatttattcaaggcattggatgcaccggtacctgtttttgcccatttacccatgattttgggtgaagatggcaaacggctgtcaaaacgacatggtgcagtaagtgtcttgcagttcaaggagctgggtgtattgcctcatgctttattgaattatttagttcgtttaggatggtctcatggcgatcaggaaatttttagtgtacaagaaatgataaccagctttgacttgaaaaatgtcagccgaggtgtctcaagtttcaattatgataagttgtattggttgaatcagcattatcaaaaaagtgactctccagaatcagttgctaatgcgttgcaatggcattttgagcaggcaggaattgatttgaatcaaggtcccgatttgaaggatttggtcgcagttcaggcagagagatgtaagtcattagcagaaatgtgtcaaattagtcagtatttttatacagatatcattgaatataatgaagatgctgttaaaaaacacttgcggccagttgttctggagcctttaatggtattgcatgagcgcctaaaagcgcttgacgaatggaaaaatgataaaattcaagaatgcattaatgatgtgagcctgcaatttgatttgaatttaggtaaaatcgctcaaccgttgcgtgtcgccgtgaccggatccggaacatctccttccattgacatgacattggctttgttaggtaaaaacaaatcaatcaaacgtcttgaagacgctttggagaaaatacgagccagagccagtgttgtt

SEQ ID NO: 25386 - DNA, 273 bp, Legionella pneumophila
atgaatgacataagttggtttagtttagcgtcaaccgttattgccgcaatagccattgccataggaactatagggccggctctagccatggggcgcgcgattagtcacgccttagatgctttggcaaggcaacctgaagccgaaaaatccatcaccagaaccttatttattggtttggccatgatcgaatcgttagccatttattgtttggtgattgttttgattatcctctttagaaatccattattgtcttattttgtaacgcaacaggga

SEQ ID NO: 25387 - DNA, 1851 bp, Legionella pneumophila
atgagtatagtttcccttaacggtgcctctttaatcttggctggcaattgtattctggaccgtgcagatttacagattcagccacaggatagaattgctcttgttggacgcaatggcgctggaaaatcaacattgctgaaaatactacaaggcgagttggtgcttgatggtggacaaattcaacgctcatccggcttgcgtattgctggtttagttcaggaagtcccaagtgctgagggagagtcagtgtaccattttcttgttaaaagcttaggtgaaacaggggaagtattgtcccagtttcatgagtttacgaaacaaggagatatggacaaattggccaaatgtcagcagcgaatggacaacttgaatgcatggcatttattacctgaaattgaaacgatggcaagccgattgggaatagatattcatgagcagatgtctaatctctcaggcggtatgaaacgacgcgtattattaggtgcggcactgcttgccaagcctgatttattgttactggatgaacctaccaaccacttggatgtcgaagcaattgaatggctagagaattatttaaaatccttttctggtgctgtaatagtagtaactcacgacagggaattcttaagccagatagcaacaagcatccttgaaatcgatcgtggaaaattgtatctacaccattgtaattatgaagcttaccttgacaggcgtgaatcgataaggcttagcgaacaaaaacaaaatgatttgtttgacaaacggcttgcagaagaagaagcctggatacgtacaggtatcaaggcaagacgcacacgtaatgagggcagagtcagggccttaaaggcaatgagagagcagtacaaagcacgtcgtaatcaattaggaacagtgaaatccttaaatttggatgtaagccgttctggtgctcttgtagtagaagcaaacaaagtgagttatacaattaatgacaagcccattataaaagatttttctttattaatgacaagaggagacaagcttgggattatcggccccaatggttgtggcaaaaccactttagttcgattacttctgggagaaattaagcctgatgctggaactataaaattagggacagggcttcaggtagcctattttgatcagttacgccgacatttgcttgaagatcaaacagtcatgtttaatgtgggggaaggggctgattatgtaacaattaatggtaagcaaaaacatgttgccagttatttgaaagagtttttattttcctctgatcgatttaatcagccagtatcttccttgtctggaggggaaagaaacagattattactggcaaaactttttgccaaaccggttaatttactcgtaatggatgaaccaactaatgatttggatatagaaactctggaacttcttgaagctgtattagctgattatcctggtactttaatactaatcagtcatgatagagcgtttattaatcaagtagtaaccagtgtgttggtttatgaaggaaatggtaagtttaatgaatttgttggtggttatgacgattataaaaaacatcaattaacacgaaatgagcagcaaacgaaatctccagtttcaaaacggagcagcccagagaaagccaaaaatttatcttttaatgaacaacgtgagttatcgaagttgccgcaacagattgaagccgtagagaaaaaaattgaagcactgcattcgcaaatggcctcacctgaattttatcagcaagatgccaagcttatttcagaggtaactcagctgttagccaaggaagaggcattgttaaatcaatattttgctcgatgggaagagctggaagagaaaaaa

SEQ ID NO: 25388 - DNA, 1317 bp, Legionella pneumophila
atgaaacaccagtcgaatttaagtggtcgtaacgtttatgttgtcgatggaagtcgaacgccttttcttaaagcaaaaggagtaggtccattctgtggttcagatttggcagttgctgcaggaacaactttgctaaatcgtcaaccattttctccggacgagcttgatgaggtcattattggtagcgctatgcctggaccagacgaggccaatatcgctcgcgtggttgctctgcgtttgggatgtggtgataaggtgcctgcatttactgtaatgagaaattgtgcgtcaggcatgcaggcattggataatgccgcaatccaaattgctacagggcgcagtaatttggtccttgctggtggaacagatgccatgagtcatgcaccgttgttatttaatgaaaaaatggcttcctggcttgcaaactggtttgcagctaaaagtatggggcaaaagctggctttaattacaaagtttaaaccttcttatctggcaccggtaatcgctttgctcagaggcctgactgatcctatagtaggattgaatatgggacaaacagctgaaaaagtagcttatcgatttaacatcacaagagagcaaatggatgaattcgcagctcaaagccatttaagaatagctcaagcttatgctgaaaatagaatgtctgaagttgccccaattatagattataaaggttgtatatatcctcaagatgatgggattagggcagattccacagtggaaaaattgtcaaaactaaaacctttttttgacaaaaaatatggcatggtcaccccaggcaacagttcacagataactgatggtgcctgtatgttgctattggccagcgctgaggctgtaaaaaaatatgctttaccggtattaggtcgaatagttgattcacaatgggctgctctagatccctctcaaatgggtttgggtcctgttcacgcggcaacccctatattagaaagacataatttaaagccacaagatttggattgttgggaaatcaatgaggcctttgccgctcaagtcttagggtgtttggctgcatggaacgatgaagaatactgcaaaacacagcttggccttaaggaggcaattggagcgccatcgctggagcgactcaatcgggatggaggagcaattgcgttaggtcatcctattggtgccagtggggctcgtattgtattgcacgttcttaaatctttagagcaaagaaatgagtcgcgaggtatggcagcaatttgtatcggaggtggtcagggaggagctatgtatcttgaacgagttactgaggtgaaaggacatgaa

SEQ ID NO: 25389 - DNA, 717 bp, Legionella pneumophila
atggaagtgaactctgtcggcttgcgttatttaacgataatgggtttgttaattcttagtgctttgctgctagcgggtcgcttaggctatttatatcttgctgatgcagagcgttttccaattacaacgatcaaagttgcagcgacgtatgaacatataacacataaagaattggagaatgtgttagctaaatatctggatgccagtttctttttattatcagtaaaaggattgcaaagtgaattgaattcaatgagttggattgatactgcctatgtagaaagagtttggccagatacattgaaaattaaactcactgaaaaaaagcctgtagcgatttggggtgatgctctaatgacaagggatggaaagttgttcaatcagggttctgttccatctgatttggatattcccaaattaaagggtccgcaatctcagcaattagaagtcttacaagtttatgaaaaattgagtaagatattatcatcatacggtttaaatgcttcaggcttgtatttaagagataatcaatcctgggtgttgctgcttaatcatagtgtaaaaatatacttgggaaagaaagagttagaagagcggttgctgcgtttttgtaaagcataccctgctgtttttgctgaaaaagcagatcagttggctggcgtggacctgcgttatccacgtggcatggcagtgcagtggaaacaacaaatgggacga

SEQ ID NO: 25390 - DNA, 642 bp, Legionella pneumophila
gtgtcaagacctacacgtttagtgatagagcccagtgctttattgcataatttatctcaaatcaagcatttagctccaggcaaaaaagttatcgctatggtaaaagccaacgcctatggctgtggagtcagggaagttgcccctgtccttgatgggcgtattgaggcttttggagtagcctgccttgaggaggctctggctattcgagctttaggtgttgaaaccccgtgcattctctttcagggcgtctttagttctgatgaattgtcagtagccgttgagaatgatttcgcctgtgttcttcatcacgcacagcagttggaatggctaatcaagactccgttgccttacccgataaaagtatgggtgaaggtaaacacaggcatgcacagactgggatttaaaatccatgaattgcaaaaagtgatgggggcattgcaaacctgtacttgggttgataaaagtatagggttaatgactcatttggcttgcgcagatgaacctcatcgtcctgagaatcaacaacagatctctttgtttcaggagatatccatacctgggtttcgccaacgcagtatcgctaattcggcggcaattatttcattccctgattcgcaggctgatgtggtgaggcccgggatt

SEQ ID NO: 25391 - DNA, 1881 bp, Legionella pneumophila
atgcttcccgttcatctaaagcaccctcatttaacagctacagaagaatatctatctgaattttggtctgaaattgccgcacaaaccattgactggatacaaccttggagtatcaccctgcagggaggattacacaaaggcgatgtgaagtggtttcaaggcggcttactcaatgttagcgctaattgtctggataggcatttaccccataaagcaaatcaaacagccatcatttgggaaggtgatgatgaaaaccaaaataaaaccctgacttttgcgcagctttattctgaagtatgcaaaatgagcaatgtgttaaaaagcctaaatgttcgcagaggggatacggtaggcatttacctacccatgattcctgaagcggccattgccatgctggcttgtgctcgtataggagctattcataccgttgtgtttgccgggttttcggcccatgcattgcagcagcgattaatagcctcttcctgtaaatgtttaatcactgcggatgcgtttcaacgcggtggaaaaactatccctttaaagaaacaggctgacgaagccagcgtggacttaaatatcaccaagctggttgttaaaaattcaaatgccccaacggcactaaataagaacaaagaacattggtggcatgagctaaaacaaaccgtatcggatcaatgcacgccggaaccaatgaacaccgaagatcccctgtttattctctatacttccggaagcacgggacagccgaaaggagtggtacataccacaggcggctatttagtgcaggccgcttatacgcatcaactgatatttgcttgtcaggataatgaagtattttggtgtactgctgatgtcggttggattacagggcatagttatgtcgtctatggccctctctgcaatggcattaccacattgatgtttgaaggaatacccacgtggcctgacgcagcaagaaactggcgcatcattgataagcaccaagtgaatgtgttctacacagctcccacagccatccgctccctgatgagagctggcgatcaatggctaaactcaagctcaagaagttctcttcgtttactgggttcagtgggtgagccaattaacccggaagcatggaattggtatcaccaaaaagttggacaagggaaatgcccgatagtggatacatggtggcaaactgaaaccggagctattatgattagtcccagagccagtgatgaagtgatcaaaccaggctctgctcgtaaacctattccggggatcgtaccactcctgttaaatgagcaaggacatgaaattaatggcgctggagaaggccttttggctatcaaatacccatggccttctatggcaagaaccattgcaggagatcaccaaagatactgtaacacttatttatccaacggctattacatcactggtgatggagccaaacgagatgaagatggagattattggattacaggccgaattgatgacgtacttaacgtttccggccatcgattgggtactgctgaaattgaatcagcattggtcagccatcctaaggttgctgaagctggcgttgtaggtattcctcatgatttaaaaggtcaagcaatatttgcctatgtcattctgaagcagggaaataagcctgatgccgagctccaaactgaattgatggagcgagtcaaagatcaaatcagtgctatcgccaaaccagatgtcattcagtttgcaaatgatttgccgaaaacccgttcaggtaaaattatgcgccgaatactaagaaaaattgcttgtaaagaagtgtcgcacattgatgagctgggtgatttaacaactcttgctaaccctcagatcgttgaggaactcatgaaaaatattttgaagcgg

SEQ ID NO: 25392 - DNA, 1374 bp, Legionella pneumophila
atgattacacgtataaaattattcatagcaagtctgcttgtatttttcatcccggtagccgatgcagcacaagatcttacaaacatgcccagcttggctcctgttctgaaaaatgctatgccggctattgttaacgtggctgttcaagggtacttgcctaataatatggcatccggaaatgcagacgatgatgacggggaaaacagtaaacagccttccagaatacctgaaaaaggcagaaaatttgaaagtatagggtctggagttatcattgaccctaaaaatggcattattataacgaatgaccatgttattcgtaacgccaatttaattactgtaactcttcaagatggcaggagattaaaagctcgcctgattggaggtgatagcgaaacggacttggctgttttaaaaattgatgctaaaaatttgaaatccctggtaattggtgattccgataagctggaagtcggagattatgttgttgctattggaaacccctttggattaaacagctttggaaatagtcaatctgctacgtttggaatagtgagtgccttaaaacgcagcgatttaaatattgaaggtgttgaaaactttattcaaactgacgcagctatcaatcctggtaattcaggaggggctttggtcaatgcaaaaggcgaattaattggcattaatacagccattatttcaccctatggaggaaatgtaggtatcggctttgcgatcccaattaatatggcaaaagatgtagcgcaacaaatcattaaatttggctctattcatcgtggtttaatgggtatatttgttcaacatttaacaccagaacttgcccaatcaatgggatatgccgaagattttcaaggggctttagtatcacaggtcaatcaaaattcacctgctcaattggctggcctaaaatcaggcgatgtcattgtacaaattaatgacaccaaaataacgcaggcaacacaggtaaaaacaacgattagtctgttgcgagctggctctactgctaaaattaaaatcttgcgagataataagccgcttacattagatgtagaagtcacagacatcaaaaaacatgaacaaaaattacaatccaataatccatttctctacggattagccttgcgtaattttgaacaagagtcaccacctcatggtaatgttgttggagttcaggtagtaggtgcttcggaaaccagtgcgggctggcgagctggcttaaggccaggagatattatcatttctgctaataaaacaccggtcaaagacattaaatctttacaagctgttgcacacgagaaagggaaacagctattagtccaggtgctgagaggagcaggagcactctacctgttgatcatt

SEQ ID NO: 25393 - DNA, 837 bp, Legionella pneumophila
atgtgttctgccatcgacattcttcataaacattcctctcaatcccggtatatttacagagctcccacagaaaaattcctggcttaccaaatctccggaaatgagccacatgtccttgcagaagcagcagctaaactgcaatcactgggtgcggatctaattgatattaattgcggctgccctaaaagcaaaattcgtaaaaaaggggctggtagcgctttattggaagatccacaaaaattgattgccattatctctagggtacgcgcagcgatcagcattccgctgactattaaaatacgcattcaaaacaatgaaaaggatttaaccttagccaaacaaatagaggacgctggtgctcatgccctgatagtgcatggcaggcgatggacagaagattatgatatcccatgcaattggcagcaaattgcaaatatcaagaatgctgtcaatataccagtcattgtaaatggtgatattaacaatatattcagtttaagaaaggccctggaaatcagcgcgtgcgatggttttatgatttctcgagcaggtacgggcaaaccctggctatatcgggatttattgaatctggaaacaaatgatgtcgcttttgatgagaaattaaaactgtttatgctccacctcgaaggattgtcatgccttgaaaacgagtataaagcggtactgcaaagcaagtccctggttcgctattacttcaaaaagcaactgaacgaacaacaactgcaacagttctatcaattaggttcattaatggaaatcaaggattttttagctgaggcaactcaccgagtttcccccatattagttgccgcctca

SEQ ID NO: 25394 - DNA, 1687 bp, Legionella pneumophila
aagcctatatcattattttaacttatttattttgttaattttaggctcttctctcaattgggcttccgtcaatcagcacagcacagcttcgccaaccctcaacattaaaattttaggcattaatgattttcatggtcaaataagcagtgggagagccgtaaaaaatgaacctgttggcggggcagctgtcctggccgcttatcttaaagaagctcaattgggaatggaagatcgatcaataattaccatcatgggtgatttggttggagcctcccccccttcttcaggactgttgaatgatgaacccagtattttatttattaatggcttgggaaataatcaatgcaagcccgaatcaagaatggatcctctttgcaacatcgttgccacagtaggaaaccatgaatttgacaaagggcaaaaggccatgtttgatttaatttatggtaccaataatccaccgaccgattcatggatctcattacccaattatccgggtgcatcttatccctatgtttctgcgaatatcgttgacgccaagtcagaacaacctctcttcccaccctacataattaaacggatacataatactcccatagcatttattggcgctgttttaaaagatgcggcggactctatgtttccagcaaacgcagaaggagttaaatttttagatgaagcagacagtattaatcattacatcccggaaattaaagcgaaaggagtcaatgttattattgtcctgattcatgaaggtggaaatcaaattccttatgagggagacacccaaactacctcagcagtagaaggtcatattaaagaaatagtttattcccttggtgatgaaatcgacgttgttatgggtggtcacacccatcaatttctaaatgctttccttccaaatcgcaatgggcataagatcctggtcacacaagcgaatagttacagtgctgcttttgctgaagttaccctccaaatcgataccaaaaatcatacggtaaaaaacaaatcagccaaaattattacaacttatgctaatcgatggcctggaacaaatccggatacacaagccttggaaattgttaaattagcagaagataaaattgggccaatgataaataaccatgtaggcactgcagaatatgatctgctaagaaaacaaaataaagatggtgaatcgagtttagggaatctgatcgcagatgcttatagaacagtaatgaataccgatctgggtatcactaatcccaatggaattcgtgatgatttaaaagctggggaagttaactggggaaatatctattctattttacccttttccaacaggatagtcacaattaccttaactggaaatgatatttatgacttgttagagcaacaatggatgggctcttatatcaatatgttacaaatttccgggtttgcctacacctatgattcacatcaacctctgggacataaaataattgaaattagacatcaaaataaaccattgcttagagaaaagatgtataccatagccacttcagattttcttgccagcgggaatggagttttttcagttatgaaaagaggaaaaataatccatattggtcaaagtgatcatgacacggtaatcgcttatattaaaagtttacctcaaccctttcacgcgtccattgaggcaaggataaaagaatcagagact

SEQ ID NO: 25395 - DNA, 666 bp, Legionella pneumophila
atgctgcaagtcattaacgcatcgaaaaaaatcggcaatgcccaagtacttaatgagattaatttaagtattcaagcaaacagtattgttggtttagtaggtccttctggtagtggaaaaacaactttactgagatgcatacaacaattggagtcaatcgattcaggctctatccagtgcgaaggaaaaagcggatttatgtttcaggattttcaattatttccgcacatgacagtactcaataacctaatttatgcgccaagtcttcacgataaaactgctgatcatatagcaaacgcgtgggctttacttgctatgttaggtttgtcagacaaagctcattcttacccacaaggattgtctggtggacaaaaacaacgcgtggccttggctagaagcttaatgatgaaaccggatttattgctttgtgatgaaccgacttctggtcttgatatggcgaccactaatgatgtcattgctttgttgaatacagtgaagactctaaaaatcactatgcttatcgcttctcatgatttgttttttttatccaatattgcggagcgattgttggttgtaaagcaagggcaactaattgctgactttaaaacccaagaggtgcctgatcctattttatatctacagcagttttaccagggggaaatatta

SEQ ID NO: 25396 - DNA, 903 bp, Legionella pneumophila
atgattacttatcaagaacaatggcagaaaatgcaaatggccttggcgataagacgaattcctcaagccatgctattttcgggttctttgcattgtggtcttatagaatttacaaatcaagtgatcaaattactcttgtgtaaaataaaacagaatgagccttgtttgacttgcatggattgccaaatgatagagcgttttgagcatccggatgtggaatggattaagcctgaaagaagcggtggtattattaaaattgatcaaattaggggattgcagagtacggcgtttctaacaccacagaggactaatcataaacttataattatcgaatcagctgaatcaatgaatattgctgcatcaaatgccttattgaaaattctggaagagccagcgcaacatactatctttattttgttagcgcaacaaattggcaatataccccccaccgtattgagccgatgccaaataacgcaatttgctgtttttgatgagttgccttgcaacaatttattggctttaggagagtactatactcaggaattgaatagcacaatggtcttcaagcattcagaatctattttagaaggcttgattgcaattattgagcgaagagagcatccatgcactttggctgcacaatggattcaacatgaattaagtgcttttttgtggtttttatatttgatctattctcaactacagtatatgcatttgtttcgagtggcttattctggtacgttaacaaaacaattgaataagctatcctcattactcaatccggttatgatttttgcccaagtagataaaatcaatactttgttaagaaaattaagccataatatgaatataaatcatacattggtcttggaagatttattattttctttggttgttgattat

SEQ ID NO: 25397 - DNA, 252 bp, Legionella pneumophila
atgaatgaagtcatactctacactacaggctattgtccttattgcatcaaagcaaaagaactactagatagaaaaaaggttatctataccgaaatccgcgtcgatttacagcctgaattacgtgaagaaatgatacaaaaaagtggccggcgtacagtgcctcaaattttcattaatggccaggcaattggtggctgcgatgatttatatgccctggaagcccagggaacattaaatgaacttttaaaaaaa

SEQ ID NO: 25398 - DNA, 1125 bp, Legionella pneumophila
atggttgccggcgaactatctggagatttactgggagcaggggtaattcgtgagctgaaacagcatttaaccaacgtagaattcatgggggtcggtggtcctcaaatgctcaaggaaggcttccattccctgattgatatctccgagctttctgtgatgggaatcagtgatgttctgcgacgatatcctcaactgtatttaataagagaaaggttattgagggaatggacaattaatccaccagatgtattcattgggattgattaccctgactttaatttatccgttgaagcacggttaaaaaaacagcatattaaaaccattcatctggtgagccccaaagtttgggcatggcgacaaaaacgggtgcatttaataaaaaaggcagttgatttagtattaaccctatttccatttgaagaagcattttatcgacaacatggggtatcggcacaatttattggtcatcctttagctgatttaatcgaaataaacccaagttgttctactttgcgtaaaaaatataactaccattctgatgacaccattctggcagtattaccgggtagtcgggtaggtgaaatcaaatacatggggcccttgtttttggaagtaatgcaaagaattgctgtggagaggcctcatgtgcatttcatagtaccgattgcgtgtcaggatttgtatccagttttttttaaacaactccatgccgagtatggccacttaaaaattcagattattcaagggaatgctcgtgaggccatggctatctctgacgttgttttaacaaaatccggaacagcaacacttgaggcgatgcttttaaaacgacccatggtggttgcctttaaatggggtatacttactcatgcgattatcgcgccgcaagtaaaagttccctatattgcgttgcctaatttattggctggtaaaaaattaatccctgaatttgttcaggaaaaagcgaatgttgatagcattacagaatcagttctgaatttactcgactcatccaatcaaaacgaactaattaaacaatttactgatattcactgcacattaaggcaaaatgctaatgagaaagcggctttatctatcctcaggattttggggacttctttgact

SEQ ID NO: 25399 - DNA, 885 bp, Legionella pneumophila
atgcatgatacttcagcattgaagaaaaaacttgattatgctcgatttattcatctagtcatcatgttcatggttgccatgctcatttttttgttttcgacttttcccgaaaagtggtgggtattgatcaccgtcttgtcagtaagtgcgggtattgaaccaggattgattatcagaagagctaaacacaggataggagggacactgttggctctcatcattttgattcccttactctatttattgcaattgaactatcgattgatatcaatcttatttgttctggcgatagttggtttgagtgttgctaccttaaacacaagacgttacgacattagtgtattttttattactttagttgtcttttttttgatggcacaaactgaagaggcgacatcgcctcgtggtccttttgagatggttcttaatcgaggcatatgtacactgtttggtgtttttattgtgttggcaggcgattattttttatttcaggcataccgttattctcataggctttatttttttcatcaggtgatagtttatgattttttaaatgatattgtgcgaaaaatagacgaatccaatacagaaaaaattaatacattgctctttgtagagaaattacgtggccaattcaccgagcattatctcccgatatccatcagctccgaaaatttgaaactggattttaaaacaagtgaacacactaaaaaaagaattgatatttttcaagaaacgatttgggaaatacgacgcttggtttttgcattatgtatttcagagtttgttttacattcctcaacggcatctgaacagcatttgcaacgatttaagttactgatgaataaagctcgaacccattttattcagtttgaaggtcgttat

SEQ ID NO: 25400 - DNA, 294 bp, Legionella pneumophila
atgactctctctgctaaagatcttgaaaatatttcaaaattggcttatttaaatgaagactctgagcattctgcaaaattgactcaagaagtaagtgcgatcatggattttgttgaccagctcaaaacaatagatacaagccaaatagcacctctttttcatcctttggcactaaatcaacgcttaagaccagatgaagtaactgaagcggaatgtcttgctgaattagaagccatggcgccattatttgaggataacttatatttggttcccaaggtgatatcatcggataaa

SEQ ID NO: 25401 - DNA, 540 bp, Legionella pneumophila
atgtctgatagtaccactatagccagaccctatgcaaaagcgatatttgaacatgctttagcagaaaaaaaactgagtgaatggtcagaatatcttacattactggctcaagttgttttaactcctcaagctactcagtttatcgctaatcctgcatcaacagatgaacaacaaattgaacttcttattgaggtatgtggttcaaagttcaagaaaaatgatgcactaaataatttaatcaagctattaacaaccaataaaagattgatgttgttgccagaaattgaagctctttatgaagtatatagagcagagcaagaaaaaatactggaggttgatgtagtcagctattccgaattgactccagcgcaacaacagcgtttgagcgaatccttaagtcaaagattatcacgtaaggtttctttaaaaataagtattgatccctccttgcttggcggagcgctaattcgagcaggcgatttagttatcgatggttcagttcggggcaagcttaatatgcttggcaccagcttggccgct

SEQ ID NO: 25402 - DNA, 132 bp, Legionella pneumophila
atgaaacgcacttttcaacctagtaatttaaaacgtaaacgcgatcatggttttcgtttaagaatgtctactcgagctggtagattagttataaaaagacgtcgtgctaaaggtcgtaagcgtttatctgcc

SEQ ID NO: 25403 - DNA, 2808 bp, Legionella pneumophila
atgagcagttctgatctgcaaaaagaatgggcttcttcctatttgtctggaggaagtatggcttatgttgatagtctttatgaggattacctcgcagaccctgattcagtgtcagaggattggagagcggtatttagcgctttacccaaagtaaatggtgctaccaaagaagtatctcatagggacattcgcgaatattttttgcagcatgctgataagaagcttaataaaataattcaaattgcagacagtcagcagtaccaggttgccagtctgattaatgattttagatcattaggacatcttgccgcaaagctagatccattggaaatgacggagcgtatgccagtgccacggctggagcttgcttatcataatcttgccgatgtagatgtaaatcgtaccttttttgctggcaccagttttaatgggccagagatgaccttgggggaaatatacaacgcccttcgcgaaacatactgccgcagtataggcatagaatatatgcatatctctgatacggaagtcactgaatggttacaaaacaaaatggaatcagtacgcggatgtcctgaattcagtccacaggaaaaattgaatatccttaaagacttgatagcggcagacggtttggagcgttatctcggaacccgatatgttggtcaaaagcgattttctcttgaggggggagattctttaattccaatgatgaaagaactcattagaagatcgggtataaacaatgtgaaagagcttgtcattggaatggcacacagagggcgcctaaatgtattggtgaatgtccttggtaaagagccaggactattatttcaagaatttgaaggaaaaattaaatacgagcgaactggtgatgtgaagtatcatctgggtttttcctctgacataaaaacagaatcaggcgctattgtgcacttggctttggcatttaacccttcccacttggaaattatagggccagtagttgaaggatctgtacgttcacgtttgggaagacgcaacgatttggctaaaaaggataaagtagttcccattgtcattcatggcgatgccgcttttgcaggtcagggtgtggttatggaaacctttaatttctcccaggcgcgtggatattgtactggtggaacaatccatattgttatcaacaatcagataggatttacaacgagcaatcctttggatgcccgttcaactctctattgtacagatgttgccaaaatggttcaggcaccagtcattcatgtcaatggagatgatcctgaggcagtagtttttgctacccaggttgcttttgatttccgaatgaagtttaagcgagacatagtaattgacttggtctgttacagacgtcatggccataatgaagcggatgaaccttctgtgactcagccaaagatgtataaaaaaatcaaatccatgcccacattacgtgaaaaatatggggaacaattggtcagcgctaatttattaaccaaatcagaagtagacaagttagttgattcctacagagaaacattggataagggtaaagcggttgtcgatttggttcatgaagattatgaaggaaagcaatctttagattggactccttatataaatgccaagtggacggataaagtagacacaaccattagcaaggaagaattggaaaaaatttcatcccaattaaacaaattgcctgatggaatgaaactgcatcccgttgtggagcgtttgttagctgaacgaaataaaatgaccgctggtgaaatccctatgaattggggctatgccgagatcatggcttatgccagtttgttacatgaaggctacggagtaagaatttctgggcaagatagtggtcgaggaacttttgcccatagacatgccgtactccacgatattgaaacaggcgatacttttattcctttggaacatatctcaaccagtcccaaacgttattttactgtaatagattcagtgctttctgaagaagcggtattagcttttgaatatggctttgcttcgtctgagccatctttcctggttatttgggaagctcaatttggtgattttgcaaatggagcacaagttgttatcgatcaatttataagttccggtgagcaaaagtgggggcggctgtgcggattggtgatgcttttaccccatggctatgaaggacaaggccctgagcactcttctgcccgattggagcgttatatgcagctttgtgcacagcacaatattcaagtatgcactccaacaactccagcacaaatatttcatttgttaagaagacaagttattcgtaatttcaggaagcctttaattgtcatgactcccaaaagtcttttacgacataaattggctgtttcacctttggaagctttgtttaaaggaaaatttcacacagtgattccggaaatcgatgccttggacgcacaaaaagtaacaaaggtggtgttatgctgtggtaaggtttattatgatttattgcaaatgcgccgcgataaaaacttaaaccacgtagcgattgtccgtatagagcaattgtatccatttcccaaaaaagcattaatggctgaattggagaaatatcaaaaggctaatgaagttgtctggtgtcaggaagagccacaaaaccaaggagtctggttctcttctcagcataatatgcgtgattgcttgcgttctgaccaaaccttgcaatatgctggcagagagtttgctgctgcacctgcagttggtagtcccgggttgcatgcggagcaacaagttgctttggttgagcaagcattacttggtaaaaaa

SEQ ID NO: 25404 - DNA, 735 bp, Legionella pneumophila
atgaagttactacaacttctcttatttattattatttcctctaattcttattcattaaatttaacaattggtacttcaaaatttaatccgccttttgaagtttggtctggtaacaacagttcattgtatggctttgatattgaccttatgcaagaaatatgtagaagattacatgcgacctgtacttttgaagcctatatattcgatgatttatttcccgcgttaaaaaaccgcgaagtcgatctggttattgcctcaatgattattacagatgaaagaaagaaacactttatttttagtcttccctatatggaaagtaactcacaatatataactaccgtcgattctaaaatcagcacatttgatgatttgcacggaaaaaaaattggagtaagaaaaggaactccttacgcaaggcaagttttgtcagaaaaccgcaacaatcaggtaattttttatgagctcatacaagatatgcttcttggcttaagcaataatcaagttgatgccagtttaatggattatgaagcagcaaaatattggatggcatctgaaccctatgcttataaattaattggtaagaaatataaattaattggtaagaaaatttctattggagaagggtattctattatggcaaaccctgatcaatttgtattaattaaaaaaataaataaaattcttcttgaaatggaagctgatggaacttatctgagactatattcagagtacttt

SEQ ID NO: 25405 - DNA, 2072 bp, Legionella pneumophila
gactctctgctagcctgcctggtattattaactcgatattatcaaaatccgttttcgcctccatcacttatagctcgtttgccattggtcaatagtaaattgagtgttgatatgttttcgcgtgccgctgccagagcctctttggattctgaagtcaaaactataaaattagaacaaatcactgattcagatattcccttagtattgattaaaaaaaatggcgaggctgtgcttctaatactggaggatgatggtaaaaaagcaatccttgatcccaagcaacctgattcccggattgatttgaaccaaattgccgatgagttaagtggtgaagtcatttttgttgagcaacaatacaaacctagcaccagagcacatgaaactctttccaaagagcaaaaaaactggttttggaaagttgttattaaatcttggccattgtattctgaagttcttgtggcctccttgctcgtgaatatatttgcactcgttgttccattatttagcatgaatgtgtatgaccgtgtggttccaaaccatgctattgaaaccatgtgggtgcttgctagtggtgtagctttggtatttctctttgatatgttgctcaagagtttacgatcctatttcattgatgtggcaaataaacacagtgataaagagttgtctgctttaatatttcagcaagttctcggattaagtatggctaacaggccaaaatcggttggttctttagccaatacagtacagtcatttgaagtattcagagattttattacttcgactactatgacagttcttgttgatcttccttttgtatttatttttctttttgttatttatttgattggcggggtgttgttttggataccttttttagtgctccctactatttttataacaggtttgttgctgcaatggcctttaattcgacttacaagaaaatcctatcaatatggtgctgaaaaacaagcgacgttgtttgagtctttagctactatagaaactgtaaagacaactggagcagaatcagtcctgcaatcacggtgggaaagaataattaatgaatcttctaaaaactctatgcaattacgttttgtagccaatacaagtatcagtatcactaatctggcccaacaaattgcgactatcgctattattattgcaggtgtttatatgatctccgaaggtgagttaactaccggtggattaattgcctgtaccatattgaccggaagagcattggcgccaatggcgcaggtatccactctatttacacgttacttccaatcagttaatgctctggactcattaaacaagattatgcaacttgagacagataccacagaagaaactcgttatctccacagaccttctctgaaaggtgccgttgaatttaaacaggtgtcttttcattacaaggaagatgagacgaaggtattacaaaatcttaattttaaaattaatgctggtgagcgcgttgcaattataggacgagttggttcactttgggaaaactaatattaaagctttacgttcctaacgaaggaactattttgctggatggcaccgattataagcaaattaatcctgacgatttacgtcagcaaataggttatgttcctcaggatattgttttattttatggaagcataagagataacatttgtgtaggtgccccctttataaacgactctgctcttttagaagccgctgaaatagctggggtaacgagttttaccaataatcatcccaaaggctttgatagacaagtaggagaaaaaggagctgaattatcaggaggacaaagacaatctgtcgctcttgcccgtgctttgattatgagccctaatatcttgttattggatgagcctacttcggcaatggatgataataacgaaaagcaaatcaagaaaaatcttaatgaatacttatccgataatcgtactttgattttaataactcataagatttccatgctggagctggtcaatcgtattatcgttttggaaaatggcaaaatcattgctgatggtaataaagaagctgttctaagcgcccttaggacaggggta

SEQ ID NO: 25406 - DNA, 1263 bp, Legionella pneumophila
atgtcgcaattaattgatagacgacaaaatgctggaaaaaaaagcacggttaatcgccaacgttttttacgccgttataaaagccaaattaaaaaagcagtctctgaggctgtcggaaaacggagtattactgaaattgaccaaggcgaacaaatcactataccagccaaagatatttatgagccccaattccatagaggccatggtggccatatcgaacgtgtactacctggaaatgataacttcatcgccggagacaggataaaaagacccggcggtggaggtgctggaggagctggaggtaacgccagcgatagtggtgaaggcgaagataattttgtttttgaattatctcgagaagagtttttggaactctattttgaagatctggaattacccgatttggtaaaaaaagaactagcaagaattagcacttataaaacagtaagggctggcgtaaccactagtggaatacctaacaacattaatgtccttcgctcaatgaaacaagcgacaggacgccgtgtcgctttagcctccccctataaaaagagattaaaggaagcagaagaagagcttgaacggctgaaacaattggccaatccagacaaaatagacctattgaagcttgaaagagacattgagtttttcaaaaaaaagatacaaactgtaccatttatagatacaatcgatctgcgttataatcaccgtgtgcgtgtgccttcaccatctacacaagcagtgatgttttgcgtaatggacgtatcaggttccatggatgaagcgaaaaaagacatagcaaaacgctttttcatcctactctatatgtttcttaccaaaaattacgaaaaaattgaattggtttttatccgccatcacacctcagccaaagaagttaatgaagaggaatttttttattcgcgcgagactggcgggactgttgtttccagtgccctggagttattaaacaccatcatcgaggcacgctaccctcctcaagcctggaatatttatgttgcccaagcatcagatggtgataattggaatgccgactctccttattgtcaggagttgctgcaagaaaaaattatgcctttattgcaatattttgcctatattgaaattatgccccgtcatcatcaaagtttgtgggaagtatatcaacaagtaaaagaacgttatcctaattttgccatggaaaatattgataatgttgctgatatttatccggtatttcgcgaattatttaaaaggaaaacggta

SEQ ID NO: 25407 - DNA, 636 bp, Legionella pneumophila
atgtcatcgttaaccgggaaattgatagttattgaaggtttggagggagcaggaaaatctacagctgtcaatttagttgttgaactgttatcccaaaaaaaaatcagtactataaccacgagagaacccggaggaacaaaaataggtgaaattttaagaagtattattaaaaatccagagtacaataatgttctggatgacagaagcgaattacttctcctgtatgccgcaagaatacaactgattgagcaagtgatcaaacccgctttaaatgtggggcagtgggtcatagctgatcgatttgagctttccactttagcttatcagggagggggccgcaaaatggatatgcgggttattaatgagctatcgaatttctgtttaaaaggattcaaacctgatcttactttatatttagacattaatcccgagcttggcatgataagagccaaatcaaggggaaaatttgacagaattgagcaggaatctattgagttttttcatagaatacatgatacatatcatattcttgttaaacaaaacccggaaattataatgattgatgctaacaggtctttggaagaggttcaatcttccattcaatcagtaatcgaggagtttatagagcataaccta

SEQ ID NO: 25408 - DNA, 984 bp, Legionella pneumophila
atgatttcagttgtaaccggcgctacaggatgtttaggtttaaatcttacaagacgcttgattaaggaaggccatgcagtcattgcattaggacgcaatttgcagttgggtgaaataataagccaaataggagcaacatttgttccactcgatttaaaggatctggagtctttgtctttgataagtcaaaatgcggatttcatatttcattgcgcagctttatcaagcccctggggaaaatataaagatttttatcaggctaatgtcatagggactcacaatgtcgttcaggcaactcccagtcaggctcgacttgtttatgtctccactcctagtatttattttgattttaccgagaagcacaatattaaagaaaatgcacttttaccagcaaaaccggtcaattattatgtgcaaaccaaattaattgctgaatccatcgtagataaagctcaactacagcatgatctggatgtgattaccatacgtcccagaggaatttttggaccatatgatcgcgctattttcccccgtttattgaaagcagagcgccaaggggtgcttccaatcattggttcaggtaatcatttgattgatattacttttgtagagaatgtagtggaaagcctgattttggctgctttggcagataaatgctattcagggaaaaaatataatatcactaatgatgaacctcggacttttattgatatcatttcaaggatgttttctgctcttaataaaccattaaaaaccagaagcattccttataatcacgcaagatttgtcgcaaagtttcttgagtttttgcatcggttgctttatctgaaaacagaaccaaagattacagagtatggtgtcggagtgttggcttttggacaaacattaaatattgaagaggcaaaaaaagatttaaagtataagccaatttatagcattgatgagggtataatgaaatttgctgaatggtattgttcatgcata

SEQ ID NO: 25409 - DNA, 1365 bp, Legionella pneumophila
atgagtcaacgtaaatattttggtacggatggaatacggggtcacgttggattatcaaatattaaccctgaatttgttttaaaattaggctgggcagtaggctgcgttcttgcgaacggagcgaggaaaaaggtagtgattggtaaggacaccagagtgtctggctatatgttggagtcggctttggaagcaggtttgtccgcagctggagttgatgtggcattattaggaccaatgcctactcctggaatagcctatctaacacaaacattgagggctaatgcaggcatcgtgattagcgcttctcataatttatttgaagacaatggcattaaatttttttctgctgatggaggaaaacttccggatagtgtagagcttgcaattgaagcccaattagaaaaacagttgcaaactgtaccttcagccaagctgggtaaagcaacacgtattaatgatgcagcgggtcgttacatagagttttgtaaatctacgattccttccctatctcgactatccaatttgaaaatagttgtggattgcgccaacggggcaacctatcatatcgccccaaatgtattctctgaattgggtgctgatgtagttcctataggaattaaaccagatggttttaatatcaatcaagaatgtggttcgacagcgcctgaattattaagagaaaaggtgattgctgttggggctgatattggtattggtttggatggagacggggatcgagttattttagtggattcactgggaaatctcgtagatggcgatcaaattatttatatcattgccaaggacagacaccaacgaggagtactgcatggaggggtcgtaggcacgttgatgagtaattatggtcttgaattagcaattacctcattgggggttccttttcaacgctcaaaagtaggtgacaggtatgttcttgaaacgctaagagagaaagattggaagattggaggtgaaacttctggacatattgtttgtttggataaaacaacaacaggtgatggaattgtagcagcactgcaagttctttcaatcatggtgaagcaaaataaagcactgcatgagttaactgcaggtattcaattgttacctcaaactttagtgaatttaaaaacgaataatgctgccttgttagcctctaatcctgatgtaattcaggcggttaaaaatttggaaaaacatcttaatggagagggtagagtgttactcagaccttctggcactgagcctttactgagagttatggtggaaggtgctaatgcatcgatagtcaagcaacaagcacaaatgttatgtgatgacatcagtcagatcgataaaaaaatgactgagagcctaccgtccact

SEQ ID NO: 25410 - DNA, 669 bp, Legionella pneumophila
atgttggcccctgaaatatccttgctggatcatcttccaggctatattggctggaaggatttaaaccgcaattatttaggtgcaaacaaagcgctgctggaattgaaaggatttcgtgatatagaagagctggctggtaaaacagatgaggagttgtcgccttgggctactgaagagaataaaatgttccagcagcaagatttgcgcgtattaaacggcgaaaaaatagcaacagtacatttcgattcaaagactagtgaagttttcctgttggaaaaacgccctttaacagatcaggaccagaaggtgacgggattgatttattattgccatccttatcccaagaatgaaatattcagagttttaaggctgtttgatgataaatggcatttaagtccccattattatacactgaatgacaataaaaatatctatggattaacagaccgtgagcatgaatgtgtgtttttattaataagaggaaaatccgcaaaagaaattggggctttgctttctctatccaaacggactatagagtcgtacatagaaaatattaagaataaaatggattgcaggaataaagcggagatactggtaaaagcagtgttaaatggttatcacaattacttccctgcaagattacagcaagcggctattataaggtcactt

SEQ ID NO: 25411 - DNA, 846 bp, Legionella pneumophila
atgaaaacaaagattttaagtatcccgggactatctatagcatgcaaagtatggggaaatcctgataatccgcctattcttgccttgcacggttggttagataatgctaatagttttgataatattgctgaacatttacagaatgattactattttatagccgtagatctacctggacatggtcattcttcacacttacccccaggatgtatatatcattttactgatggaatatttactgttgttgaaattattaatgccttgggactaaataagcttcacttgctagggcactctatgggagcctgcttgggaagtcttgtagctggggttgcgccggatcgttttctttcattaagcttaatcgaaggtttaggccctttttctcacccggcagaaacagcatgccagcaactgtcaaaatacctggactatctatcacaaaaacaatcaaaaaaggcaaaaggctacaataagtttgaacatgctgctcttgcccgatccgttaaaggatatgtttctctggatattgccaagtcactttgcgaacgcggaattcaacaagaaaatggtctatattattggagacacgatcgcaggctattagccccatctccattacaaatgactgaagcacaagttctttcctgccttacagaaataaaagctcaaacttaccttatttgggccagcaaaggattttcatttgattcggataagatgaaagcaaggattcaagcagtaaaaaatattaaaattgagaggttagatggtggacaccatattcatatggaaaagccagaagtcatcagtcgacttctggctaaattttatcaatcaataaaa

SEQ ID NO: 25412 - DNA, 600 bp, Legionella pneumophila
atgaaaaaattagcactcgtattaatcctgtgctcttcatcagtgatttttgcccaggaaaacccgcaagaggctggacaaaataagtcaacagtctgtaccgcctgtcatggtccgcaaggtattagtacgaatcccgaatggcccaatcttgccggccagcatgaaaaatattttgtgaaacaattgaaagatataaaagaaggtaagtcgcgctctgcgcccactatgactgcaatagttgctaatatgaatgaacaggatatggatgacttggcagcctattatgctaaaatgcccgttgctgaaggttcaacccctgaaaaatatttaaaaagaggcgaacaactttacagaggtggtgatttaaacaaacacatcgcggcctgtatagcctgccatggtcctaaaggaagtggaaacgctcaagcaggctttcccctgctttctggtcagcatgcagcttatactataatgcaactgcaagcatttaaagacgggaagcgaacgaatgacttaaatcaaattatgcaagatatcagtagtaaaatgagcccagaagatatggaagccgttgcttattatattcaagggttatat

SEQ ID NO: 25413 - DNA, 1212 bp, Legionella pneumophila
atgtatccaaaaaccaaactttctttcatgactttattattgttaatttcttttgcttccgtgaatgctgtcctatttacaccggcattgcccagcattactgcatttttcaggatcacagaacatgccgcacagcagacaattacctgttttttggttggttatgccatagggcaacttgtttatggccctacagcgaatcgctatggaaggaaaaaaacactttatataggtattggcttgcaaattatcagcagtcttctatgtgtattggccggaatgatttccatgtacccgttgcttgttttaggacgatttctattagccttaggatccggtgtaggactgaagatgacttttactttggttaatgaatgctatgagcctcaattagccgcgcaaaaaacctcctatctgatgctggcttttgcgatagcacccggtttgagtgttgcacttggcggcattttaaactcccattacggctgggaaagttgcttttatgcaggaactgtttatggtgctattctgcttgccatggtcaggcaacttcccgaaacacaaaaaaatcttcaactcgaagcgtttcaaatgaaacatctgctccagggatatgtaagtcaatttaaaaacaagccattaatctctggtggagcattaatgggtggcgcatcctgctttgtctacattttcgcagcaacggcaccatttattgccatcaatttgctaggaatgagtacagcagagtatggcgctgccaatattttaccttccttgggtctgaccctcggctcaatctggtctgctcaatttgcaaaaaaatactcgcaacgcgcgggaatccaattaggcattttaatctcagggtttgccgcactggcaatgatgatggccgcgttaacccatcattcagcgcttatcaagctattttttcccatgatattcatctatttgggactatcttttatttttgcaaatgcttcgacatttgccatgagccatacctccgataaagcccatggctccgcggttatgaacttcatcaatatgggattggttacagtggttattttgggattaagcttacttccaatgtcacaatatttattaccagccatctacatcattctatgcattttcatgatgtggctattcttttctttcataaaaagtaatgaaataatttcttctatcgacaggaacaaggaatca

SEQ ID NO: 25414 - DNA, 1575 bp, Mycobacterium avium
gtggccgaatccccccccaccgaggtgcccgaaccgcccgctcgacccgtgttggtggtcgacttcggtgcccagtacgcgcagctgatcgcccggcgggtgcgtgaggcgcgggtcttctccgaggtcattccacacaccgcgacgatcgaggagatcaaggcccgccagccgcgggcgctggtgctctccggcggcccgtccagcgtctacgagccgggcgccccgcagctggatccggcggtgttcgacctgggggtgccggtgttcggcatctgctacggatttcaggccatggcgcaggctttgggcggcaccgtcgcgcacaccggcaccagcgaatacggtcgcaccgagctgaaagtgcttggcggcgaactgcattcggggctgccgggcgtgcagccggtctggatgagccacggtgatgcggtcaccgccgcgccggacggtttcgaggtggtggccagcagccccggcgccgtggtggccgcgttcgagaaccgggcccgccgcctggccggggtgcagtaccacccggaggtgatgcacaccccgcacggccagcaggtgctgagccggttcctgcacgacttcgccgggctgggcgcggactggacggccgccaacatcgccggtgtgctggtggagcaggtccgcgcgcagatcggcgacggccacgcgatctgcggattgtccggcggggtggattccgcggtggccgccgccctggtgcagcgcgccatcggcgatcgcttgacgtgtgtgttcgtcgaccacgggttgttgcgtgccggcgaacgcgcgcaggtgcagcgcgatttcgtggccgccaccggcgccaacctggtcaccgtcgacgcggcggacaccttcctgcaggcgctggccggggtgaccaacccggagggcaagcgcaagatcatcggccggcagttcatccgggcgttcgagggcgcggtgcgagatgtgttgggggacaagccggtcgagttcctggtgcagggcacgctgtatcccgacgtggtggagtccggcaggggcagcggcaccgcgaacatcaagagccaccacaacgtcggggggctgcccggcgacctgaagttcaccctcgtcgagccgctgcggctgctgttcaaggacgaggtgcgcgcggtcggccgggaactggggctgccagaggaaatcgttgcgcgccaaccctttccgggccccgggctgggcatccggatcgtcggggaggtcaccgcgacgcggctggacacgctgcggcgggcggactcgatcgcgcgcgaggaactcaccgccgccggcttggactcgctgatctggcagtgcccggtggtgctgctcggtgaggtccgctcggtgggggtgcagggcgacaaccgcacctacgggcatccgatcgtgctgcggccggtgaccagtgaggacgccatgaccgcggactggacccgggtcccctacgaggtgctggagcggatctcgacccgcatcaccaacgaggtccccgaggtcaaccgcgtggtgctggacatcaccagcaagccgcccggcaccatcgagtgggag

SEQ ID NO: 25415 - DNA, 477 bp, Mycobacterium avium
gtgaacaccaccccgcggatcggcctgggcgtcgacgtgcacccgatccagcccgggcggccgtgccggctgctgggcctgcttttcgacgacgccgacggctgcgccggccactccgacggcgacgtgggcgcgcacgcgctgtgcgacgccgtgttgtcggcggcgggactgggcgacgtgggtgcggtgttcggcgtcgacgatccgcgctgggcgggtgtcagcggcgccgacatgctgcgccacgtcgccgatctgacggcgcgccacggctttcgggtgggcaacgccgccgtccaggtgatcgggaaccggcccaaggtcgggccgcgccgcgccgaggcgcagcgggtgctgtcggagctgctgggggcgccggtgtcggtggcggcgacgacgaccgacgggctcgggctgaccgggcgcggtgagggcctggccgccatcgccaccgcgctggtggtccccaccggc

SEQ ID NO: 25416 - DNA, 2199 bp, Mycobacterium avium
acctcgtggttccacgccgccgggccggtcggggcctgggtggacaccgcgctgcggacgttcatcggcgcgggcgtgctggcgctgccggtcgtcacggccgcggtggcggtgacgctgatgcgcaccgagcccgatcccgacgtgcggcccaggctgatccttggcgccgggctgatcgccctgtcggtgctgggcctgcgccacctgtggtcgggatcgccgggcgaccccgacgcgcgccggcgcgcggccggattcatcggcttcgccatcggcggcccgctctccgacgggctgacgccctggatcgcggcgccgctgctgttcatcggcttcatgttcgggctgctgctgttgaccggcaccaccatccgcgagctgcccgtggtgatgcgcaacctgttccacacccggttcgtcgaggactacaccgacgaggactacaccgacgcggactacaccgacggggactacggcgacgagccctacgactacgccggcgaattcgacgacgcgaccgcgcaaccggagccggaaccggcggcgtgggcgcccgacgacgacgcccaggccgcgctgcaggacgacatccccaccgtgcccgagcccgccgtcaaaaccgggcgcggccgcaagcggggacgcgcggccgacaactccgacaccatcgagctggaccgggtggtcgagggaccctacgtgctgccgtcgctgagcctgctggtggccggggacccgccgaagaagcgcagcgccgcgaacaacgtcatggccgacgccatcaccgaggtgctcaaccagttcaaggtggacgccgccgtcaccggctgcacccgcgggccgaccgtgacccgctacgaggtggagctggggcccggggtgaaggtggagaagatcaccgccctgcagaagaacatcgcgtacgcggtggccaccgagagcgtgcggatgctggcgcccatccccggcaagtcggccgtcggcatcgaggtgcccaacaccgaccgcgagatggtgcggctggccgacgtgctgaccgccccgtccacccgtcgcgaccaccacccgctggtgatcggcctgggcaaggacatcgagggcgacttcatttcggcgaacctggccaagatgccgcacctgctggtggccggctccaccggctcgggcaagtccagcttcgtcaactcgatgctgatctcgctgctggcccgggccaccccggaagaggtcaggatgatcctgatcgacccgaagatggtggaactgacgccctacgaaggcattccgcatctgatcaccccgatcatcacccagcccaagaaggccgccgctgcgctggcctggctggtcgaggagatggagcagcgctaccaggacatgcaggcctcccgcgtgcgccacatcgacgacttcaacgccaaggtgcgctccggtgagatcaccgcgccgctgggcagccagcgcgaataccggccctacccgtacgtggtggcaatcgtcgacgagctggccgacctgatgatgaccgcgccgcgcgacgtcgaggacgccatcgtgcggatcacccagaaggcccgcgccgcgggcattcacctggtgctggccacccagcgcccgtccgtcgacgtcgtcaccggcctgatcaagaccaacgtgccgtcccggctggcgttcgcgacgtcgtcgctcaccgactcccgggtgatcctggaccaggccggcgcggagaagctgatcggcatgggcgacggcctgttcctgccgatgggcgcgtccaagccgatccggttgcagggcgccttcatcaccgacgaggagatccaggccgtcgtcgccgcctgcaaggaccaggccgaacccgagtacaccgagggcgtcaccgccgtcaaaaccagcagcgaacgcgccgacgtcgaccccgacatcggcgacgacatggacgtgttcctgcaggccgtcgagctagtggtgtccagtcagttcggctccacctcgatgctgcagcgcaagctgcgggtcgggttcgccaaggccggccggctgatggacctgatggagacccgcggcatcgtcgggccctccgaggggtccaaggcgcgcgaggtgctggtcaagcccgacgagctggccggcacgctggcgctgatccgcggctccggggccggatcggccgacgccgacggcggcgatcccgac

SEQ ID NO: 25417 - DNA, 597 bp, Mycobacterium avium
gtgccggggcagccgcagacgggtccgatggtagggcgggcaaacatcgccaacctggccaacacgttgaccctgctgcggctggtgttggtgccggtctttctgctcgccctgttcgccggtgacggccacgagaccggcttccgcatcctggctttcctgatcttcgcgttcgcctgcatcaccgatcggttggacgggctgctggcccgcaactacgggatggccaccgagttcggcgcgttcgtcgacccgatcgcggacaagacgctggtcgggtcggcgctgatcgggctgtccatgctcggcgagctgccgtggtggatcaccgtgctgatcctggcccgcgaattcggggtcaccgtgctgcggttggcggtcatccgccggggcgtgatcccggccagctggggcggcaagctcaagacggtggtgcaggtgttcgccatcggtttgttcgtgctgccgtgggcgggcacgcccgggccgttccgggtgggcgcggccgtggtgatgggcgcggccatcgtgctcacggtgatcaccgggatcgactacgtggtctcgacggtgcgcgaagtgcgccggaccgccgcc

SEQ ID NO: 25418 - DNA, 825 bp, Mycobacterium avium
atggccaatccgttcgtcaaggcgtggaagtacctgatggcgaagttcaacgccacgatcgacgagcgcgccgaccccaaggtgcagatccagcaggccatcgaggaagcccagcgcacccaccaggcgctgacccagcaggccgctcaggtcatcggcaaccagcgccaactcgagatgcggctcaaccgccagctcgccgacgtggagaagctgcaggtcaacgtgcgtcaggcgctgacgctggccgaccaggccaccgccgccggcgacaccgccaaggccaccgagtacaacaacgccgccgaggcgttcgccgcccagctggtcaccgccgagcaaagcgtcgaagacctcaagacgctgcacgaccaggcgctcaacgccgccgcccaggccaagaaggcggtcgagcagaacgcgatggtgctgcagcagaagatcgccgagcgcaccaagctgctcagccagctcgaacaggccaagatgcaggaacaggtcagcgcctcactgcagtcgatgagcgagctggccgcccccggcaacgtgcccagcctggacgaggtgcgcgacaagatcgagcggcgctacgccaacgcgatcggggccgccgaactggcacagggctccgtgcagggcaggatgctcgaggtcgagcaggccggcgtgcagatggccgggcattcccggctcgagcagatccgcgcctcgatgcggggcgaggcgttgccgaccggaggcacaccggccgccggcggcacccaggccacccccgcgcccggccagggcgccggcgacgcggtcagcgagaaaccacttggtcag

SEQ ID NO: 25419 - DNA, 1008 bp, Mycobacterium avium
gtgatccgcggcgtcgtcgcgctgaccgcgaccgtcgggctcttgctgaccggatgcgtttcccggacaacgacttccggacccacaccaccaccggccgcggtgccgttgtccgagctgtccggcctcaccctgcaggtcggcgaccagaagggcggcaccgaggcgctgctgcgcgccgccggtcagctggacaaccttccctaccgggtcgccttctcgacgttcacctcggggccgccgcaggtcgaggcggccaccgcgggcaagatcgacttcgcgatcaccggcaacaccccgccgatcttcggcgcggccagcaacgcccggatcaaggcggtctccgcctacggcggcggcggggcgggcaatcgcattctggtgcacgcggattcgccgatcacctcggtctccgacctgcgcgggaaggcgatcgccgtcgccaagggcagctcgtcgcacgccaacctgctggcccaattggaccgggcggcaatcaaacccgccgacgtcaagttcgtgtacctgcagcccgccgacgcgctgtccgcgttcagccagcaccaggccgacgcctgggccatctgggatccctacacggcccaggccgaacagcagatcccggtgcgcagcatcgccgaggcgcagggcgtcaccaacggcgactggatcggcgtcgcatccgaccaggcgctggccgatccgaaacgcaacaccgccctgggtgacctgctggtgcggttcgaaacggcggtgcgctgggcgcgggcgcatccgcaacagtgggcccaaagctacgctgccgcagtcggattggaccctcaagtggcggcggtgtcgcaggcccggagcctgcggttgcccaccgaactcggcgatgacgtggtggcctcggagcagaagctggccgacctgttcgccgcggccggccaactgcaatccgcgccgaggttcgccaactgggtggaccgccggttcaacgcggcattgcggccgggcctggtcagc

SEQ ID NO: 25420 - DNA, 210 bp, Mycobacterium avium
ttgaccgccgagtattgcgatccgctggacctgcgcgccgactcccggctcggggtggccggcctggtggaggcgcagcatcgcgggacggtgaccgtcgtcaacaccctgggcagcggaattctggaaaaccctgggctgcaacgttttctgccggcgatggcgcggcacctgctgtccgaaacgctgctactgcccagcgcgccggtc

SEQ ID NO: 25421 - DNA, 2589 bp, Mycobacterium avium
gtggcacttcccaatctcacccgcgaacaagccgtcgagcgcgccgcgctggtcaccgtagccggctaccggatcgacctcgacctcaccgacgggaacggcgctcccggcgaacggaccttccgctcgatcaccacggtggtgttcgacgcgctggccggcgccgacaccgtcatcgacatcgccgccgacaccgtgcgcagcgccaccctcaacggtcgcgacatcgacgtctccggctacgacgaatccaccgggatcccgttgcaggggctggccgaccgcaatgtcgtcgtggtcgacgcggactgccgctactccaacaccggcgagggtctgcatcgcttcgtcgacccggtcgacgacgaggtctacctgtactcgcaattcgaaaccgccgatgccaagcggatgttcgcctgcttcgaccagcccgacctcaaggcgaccttcgacgtgcgggtgaccgcgccccggcattggaaggtgatctccaacagcgcggcggtgtcggtgaacgacgcggcgcaacaccgggtgcacacgtttgccaccacgccgcggatgagcacctatctggtcgccctgatcgccggcccgtacgccgagtggaaggacagctacgtcgacgagcacggggagatcccgctgggcatctactgccgggcctcgctggcgcagtacatggacgccgaacggctcttcacccagaccaagcagggattcggcttctaccacaagaacttcgggatgccctacgcgttcggcaaatacgatcagctgttcgtgcccgaattcaacgccggcgcaatggaaaacgcgggcgcggtgaccctcctcgaggattacgtgttccgcagcaaggtcacccgggcctcctacgagcggcgcgccgagacggtgctgcacgagatggcgcacatgtggttcggggacctggtcaccatggcctggtgggacgatctgtggctgaacgagtcgttcgccaccttcgcgtcggtgctgtgccaaagcgaggcaacggaattcaccgaggcgtggacgacgttcgcgacggtggagaagtcgtgggcctaccgccaggatcaactgccgtcgacgcatccgatcgccgccgacatcccggacctggccgcggtcgaggtgaacttcgacgggatcacctacgccaagggcgcttcggtgctcaaacaactcgtcgcctacgtcgggctggagcactttttggccgggctgcgcgattacttccgcgcccacgcgttcggcaacgccaccttcgacgatctggtcgccgcgctggagaaggcatccggccgcgacctgtccgactggggtcggcagtggctgaagaccaccgggctgaacacgctgcggccggatttcgacgtcgacgaccgcggccggttcacccggttcgcggtgacccagagtggtgccgccccgggcgccggggagacccgggtgcaccggctggtgatcggcatctacgacgacgacgggtcggggaagctggtgcgagtgcaccgggcggaactcgacgtcgagggtcctgtcacggaagtgcctgcgctggttggtgtttcgcgaggcaaactggttctggtcaacgacgacgacctgacctactgctccgtgcggctggacgccgagtcgctgggcaccgcgctggatcgcatcgccgacatcgccgagccgttgccgcgctcgctggtctggtcggcggcctgggagatgacccgcgaggccgaactgcgggcccgcgacttcgtggccctggtggcgggcggcgtgcagggcgaaaccgaggtcggcgtggcgcagcggctgctgctgcaggcgcagacggcgctgagctcctacgccgagccggaatgggcgcgcgaccacggttggccgcagttcgccgaccggctgctggagttggcgcgggccgccgagaccgggtcggatcaccagctggccttcgtcaacgcgctgtgctcgtcgctgttgtcgacgcgccatgtggtgacgctggcggatctgctcgaccatgacccggccgagttggggctggccggcctggagatcgacaccgacctgcggtggcggatcgtcaccgccctggccgccgccggcgagatcgacgccgacgggcccgcgacgccgttcatcgatgccgaggtgcagcgtgacccgacggccgccggcaagcggcacgccgcgcaggccgcggcggcgcggccgcagctgccggtcaaggagcaggcgtggacgacggtggtcgaggacgacaccctggccaacatcacggcccgctcgatgatcgcgggcatcgcccagcccgggcagcacgagctgctcaagccgttcaccccgcgctacttcgaggcgatcccgggcgtgtgggcgcggcgatccagcgaagtggcccagacggtggtggtcggcctgtatccggcctgggacatcagcgacgagggcatcgcggcggcggacaggttcttgtcggacccccaggtgccggcggcgctgcggcggctggtgctcgagggccaggccggggtgaagcgtgcgctgcgggcgcgtcgcttcgacgcgacagctgac

SEQ ID NO: 25422 - DNA, 804 bp, Mycobacterium avium
atgcgccttggtcgaatcgccagccccgacggtgtcgccttcgtcagtatcgagggcgaactcgacaaccccgccgagatgatcgcccgcgaaatcgccgagcatccattcggcacccccaacttcaccggccggtcgtggccgctcgccgacgtccggctgctcgccccgatactggccagcaaggtggtgtgcgtcggcaagaactacgccgaccacatcgccgagatgggcgaggcgaccggccccgtgccggccgacccggtgatcttcctcaaacccaacaccgccatcatcggaccgaacgtgccgattcggttgccggccaacgcatcacccgtgcacttcgagggcgagctggcggtggtgatcggccggccctgcaaggacgtctcggccgcccaggccgccgagaacatcctcggctacaccatcggcaacgacgtgtcggcgcgcgaccaacaacgatccgatggtcagtggacgcgggccaagggccatgacaccttctgcccggtcgggccgtggatcgtcactgacctcaatccgctggacccgggcgacctggaattgcgcaccgaggtcaacggcgaggtcaaacaacgcagccgcacgtcgctgctgatccacgacatcggctccatcgtcgaatggatctcggccgtgatgaccctgctgcccggtgatctcatcctcaccggaacaccggcgggcgtgggtcccatcgaggacggcgacaccgtctccatcaccatcgagggcatcggtaccctgaccaatcccgtggtccgcaaaggaaaatcg

SEQ ID NO: 25423 - DNA, 447 bp, Mycobacterium avium
gtgctgggcgtggagcgggtcggggtggacgactcgttcttcgacctgggcggcgacagcatcctgtccatgcaggtggtggcacgggcccgggccgccggcgtgatgtgcacggcccgagacgttttcgtcgaacagacggtggcccggctggcccgggtcttcacccgttggccccccccaacgggggagttgggccgcggccgacgaggggaatcggggccggtgcagccaccccccgatcattgcgctggctgcaggacatcgacggccccaatcgacgagttcaaccagaccatggtgctggccgccccggcgggggtgagccaatccgaccgtggcggtggtgctgcaggcgctgctggatcggcatccgatgctgcggctgtgcctcgacgacgacggcgccggcggctgggacctgcacgtgccgccccccggttcggt

SEQ ID NO: 25424 - DNA, 1308 bp, Mycobacterium avium
atgaccggctggtctgagttgctgggtgcggtggcgttgatcgccttgggcggcctgttcgcggcgatcgatgcggccatcagcacggtgtcgctggcccgggtgcaggagctggtgcgtgacgagcggcccggcgcggtggcgctgtccaaggtgatgtccgagcggccccgctacatcaacctggtggtgctgctgcggatcacctgcgagatcaccgcgaccgtgctgctggtggtgtttctctacgacaacttcgggctcaggtgggggctgttcggcgccgccgccatcatggtggtgaccagtttcgtggtcatgggggtgggtccgcgcaccctgggccgtcagaacgcctattccatcgcgttgacgacagtccttccgctgcaagtcatttcatggctgctgatgccgatcagccggttgctggtggtgctgggtaatgcggtcactcccggccgggggttgcgcaacgggccgttcgcctccgagatcgagctgcgcgaggtcgtcgacctggcccagcaacgcggcgtggtcgccgccgaggaacgccgcatgatccagtcggtgttcgaactcggtgacaccccggcccgtgaggtgatggtgccgcgcaccgagatgatctggatcgagagcgacaaatcggcgagccaggcgatcaacctggcggtgcgcagcgggcactcgcgcatcccggtgatcggcgagaacgtcgacgacatcgtcggggtggtgtacctcaaagaccttgtgcagcaggcgctcttacccggcggcagcggccgggccacaccggtgtcgcaggtgatgcggcccgccgtcttcgtgccggactccaagccgctggatgcgttgctgcgggagatgcagcgcgaccggaaccacatggcgctgctggtcgacgagtacggggcgatcgccgggctggtcagcatcgaagacgtgctggaggagatcgtcggcgagatcgccgacgaatacgaccaggccgagaccgcaccgatagaagacctgggcgacaagcggttccgcgtgtcggcgcggctgcccatcgaagacctcggcgagctctacggcgtggagttcgacgacgatctcgacgtcgacacggtgggcggcctgctcgccctggagctgggtcgggtgccgctgcccggcgccgaggtgatatcgcacggcttgcggctgcacgccgaaggcggcaccgatcaccgcggccgggtgcgggtgggcaccgtgctgctcagcccggtcgaatccgacgggtcacccgacggtgaggaacccgagcatcatgac

SEQ ID NO: 25425 - DNA, 291 bp, Mycobacterium avium
  misc_feature (32)..(32): n=g, a, t or c
  misc_feature (52)..(52): n=g, a, t or c
gacgaccggatcgcgctgatcgccaatgagcntgtggtgcccgactttccangtgcccaggtggaccggccgctggcggtcagcctgccgacgcggcagtgcaccatcgacaaggtcaccgcgctcaagcaggtgctggcccgtcacccgggaacctcgcaggtgcatttgcggctgatcagcggcgaccggatcaccacgttggagctggacgcgtcgctgcgggtgacgccgtcgccggcgttgatgggcgacctcaaagagctgctcggccccggctgcctcggcggg

SEQ ID NO: 25426 - DNA, 1200 bp, Mycobacterium avium
gtgccccccgtcggatcagacagcccgctggacagcgtcgaggatgtcgtgcggcggcgcggtgccgatctcgtcgagctgtcgcacgccatccacgccgagccggagctggcgttcgccgagcaccgcagctgcgccaaggcgcaggcgctggtcgccgagcgcggcttcgagatcaccgcggccgccggcggcctggacaccgcctttcgcgccgacttcggcagcggccagctgaccatcggggtctgcgccgaatacgacgccctgcccgagatcgggcacgcctgcggccacaacatcatcgcggcgtcggccgtgggcaccgcgctggcgctggccgaggtggccgacgacctaggcctgcgggtggcgcttgtggggactcccgccgaggaggccggcggcggcaaggcgctgctgctcaaggccggggtgttcgacgacatctccgcggcggtgatgctgcatcccgggccggccgacatcgccgcggcccgctcgctggccctgtccgaggcgatcgtgcgctaccgcggcaaggaatcgcacgccgccgtcgcgccgcacctgggcgtcaacgccctcgacgccgtcaccgtcgcgcaagtggccgtcgggctgctgcgtcagcaactggcgccgggccaactggtgcacggcatcgtcaccgacggcgggcaggcggtcaacgtcatccccgggcacgcgtcgctgcagtacgcgatgcgcgccgtcgaatccgactcgctgcgcgagctggagggcaggatgtatgcctgcttcgccgcgggcgcaatggccgccggctgcgaatacgagatcgacaaccccgcgcccgcctacgacgaactcaagccggacgcgtggctggccaacatctttcgcgaggagatgtgccggctgggccggcagccggtggccccggagtacgaagccgcgctgccgatgggcagcaccgacatgggcaacgtgacgcaggcgctgccggggatccacccggtggtcggggtcgaatccggtggcgccatggtgcatcagcgcgccttcgccgacgccgccgccggacccagcgccgaccgcgcggtgatcgagggcgcgatcatgctggcccgcaccgtcgtcgcgctggcccagacgccggccgagcgcgatcgggtgctggccgcgcacgagcgcagacgcggcggggcgcaccca

SEQ ID NO: 25427 - DNA, 1578 bp, Mycobacterium avium
gtgacacccgaggaatggatcgcccacgatcccgacccccgcacggccgccgagctcgccgcatgcgacgccgcagaactcgccgcccgcttcgcccggcccttgcgattcggcacggcgggactgcgcggcccggtccgcggcggccccgacgcgatgaacgtcgcggtggtgtcgcgggccagctgggcgctggcgcaggtgctcaagcgccgcggcccggccggcgcgcgggtgatcgtgggacgcgacgcccggcacggctccgcggtattcgccacggtggccgccgaagtgattgccgcccaagggttttcggtactgctgctgcccggtccggcacccaccccggtggtcgcgttcgcggtgcggcacaccggcgccgccgcgggggtccagatcaccgcctcgcacaacccgccgaccgacaacggctacaaggtgtacgacggcggcggcatccagatcgtctcccccaccgaccaccagatcgaagccgcgatggccgacgcgccaccggccgacgagatccgccgaacacccgtcccaccggcgcacaccgacctcgtccagcgctacatcgagcgggcggccggggtgcggcgcggcaccggttcggtgcgggtggcgctcaccgcgctgcacggcgtgggcgggacggtggccgtcgacgctctgcaccgcgccggcttcggccgaatacacaccgtggcaagccaattcgcgcccgacccggactttcccaccgtcgcgttccccaaccccgaggagcccggcgccaccgacgcgctgctgaccctggccgccgatgtggacgccgacgtggcgatcgcactggatcctgacgccgaccgctgcgccgtcggcatacccgacgcctccggctggcggatgctctccggcgacgaaaccggttggctgctcggcgattacctgctctcccagccgcagcgggccgaccgaccggtagtggccagcacggtggtgtcgtcgcggatgttgtcggccatcgccgcgcggcacggcgccgtgcacgtcgaaaccctcaccggcttcaagtggttggcacgcgccgacgccgaggtgcccggcggcaccctggtgtatgcctacgaggaggcgatcggacattgcgtggaccccgccgcggtgcgcgacaaggacggcatcagcgccgccgtgctggtgtgcgacctggtggccgccctgatcgcgcggggcggttcggtgtccggccggctcgacgagctggcccgccgccacggcgtgcacgacgtcgccgcggtgtcgcgccgcgtcgggaccgacggggctgccgagctgatgcgacggctgcgcaccagcccgccggagacgctggccgggttcggggtggcgctcaccgacatcaccgacgccctgatcttcaccggcggcgacgacgacacgtcggtcaggctggtggtgcggccttccgggaccgagccgaaggtgaagtgctacttggagattcgctgcgcgccgagcgacgacctggcatcttcgcggcggcgcgcccgcgccctgcgggagcttctggtcgcgacggtgcggagctgg

SEQ ID NO: 25428 - DNA, 771 bp, Mycobacterium avium
atggacgtgtgcgtgatcgaccacccgttggccgcggcccggctgacggtgctgcgcgacgaacgcaccgacaccgccggatttcgggccgcgctgcgcgatctgacgctgatgctggtctacgaggccagccgcgacgcgccgcgcaagtcggtccggatccgcaccccggtggccgcggccgccgggacccgactggtcaatccgccgctgctggttccggtgctgcgcgccgggctgggcatggtcgacccggcgcaggccgcgctgcccgaggccgaggtgggcttcgtcggcgtcgcccgcgacgagcaaacccaccggccggtcccgtatttggcggcgctgcccgacaagctggccggcaggtcggtgatggtgctggacccgatgctggccaccggcggctcgatggcgcacaccctggggctgttgcagcgtcgcggcgccaccgacatcaccgtgctgtgtgtggtggccgcgccggaaggccttgcggcggttggggaaacggcgcccgacgcgcgagtgttcaccgccgcggtagacaagggactcaacaaggcggcctacatcgtgcccggcctcggcgatgccggggatcgccaattcgggcctaacctgttcaccagctccgcaccgtcgcgaccagaagctcccgcagggcgcgggcgcgccgccgcgaagatgccaggtcgtcgctcggcgcgcagcgaatctccaagtagcacttcaccttcggctcggtcccggaaggccgcaccaccagcc

SEQ ID NO: 25429 - DNA, 744 bp, Mycobacterium avium
atgatcaccgaacccgcaacggcgttctcacgcgtgttccggggctatgaccccgccgcggtcgatgcgtacgtcgaggcgttgctggccaagcagaagcttctgatcgacgaagttcagaacctcagggcgcagcgaaacgaatccggcgaccaattggccgcgctgcggatcgaagtcgcctgcctcaaggacgaggttgcccacctctcggacacctcgccgacgccgtacgcgatccagcatcggatgacgaagatgctgcgccgcactctcgaggagatttcccggatgcaggccgaggcgcaggccgaggcggagtcgatgatcgcggcggccgcggcgcaggtcgaagcatcgcatcgagagcaccaagagctgttggcggacatggccgcacagcgagaggcgttggaaacggagcgcgaggaagccaagaaggaactcgaggccgaactcgcgacgatgcgtgcggaggcccgagcgtcgatcgacgaggcgcgccgcgaagctgagcgtgagtgcgcgcggctcctcgccgaggcgaagcagaaggccgatgatctcgatgagcgggcacggcgcacggtcgaggaagcgaatcagcaacgcatcatgatcttggaggaactgatggacgtggcccgcgacctccaaggtcttccggccagcctggaatccgcctatcaggaacgaacgagcccttcggaagccagcgtcgtggtgcccttggacccgttgaat

SEQ ID NO: 25430 - DNA, 3795 bp, Mycobacterium avium
atgagccgatccgggctggtgtggacgggtgggtccaccccgccggtcacaactgagagcgtgcccagctcgcggcgtgacgctatcgaccaggaggagtacttcttgactgccacaccccacgtcggtggagtgctcgaggagctgctggagcgcagcgggcggttcttcacgccgggcgagttctccgccgacctgcgcacggtgacccggcagggcggccgcgaggccgacgtgttctaccgcgaccggtggagccacgacaaggtggttcgctccacgcacggggtgaactgcaccgggtcgtgctcgtggaagatctacgtcaaggacggcatcatcacctgggagacccagcagaccgactacccgtcggtgggtccggaccggcccgagtacgagccgcggggctgcccccgcggcgcgtcgttttcctggtacagctactcgcccacccgggtgcgctacccgtacgcccgcggcgtcctggtcgagatgtaccgggaagccaaggcacgcctcggcgatccggtgctggcctgggccgacatccaggccgaccccgagcgccgccgccgctaccagcgggcccgcggcaagggtggactggtccggatcacctgggccgaggccaccgagctgatcgccgccgcccacgtgcacaccatcaagacctacggccccgaccgggtggccggattctcgccgatcccggcgatgtcgatggtgtcctacaccgccggctcccggttcttcgagctgatcggcgccccgatgacctcgttctacgactggtatgccgacctcccggtggcctcgccccaggtgttcggcgaccagaccgacgtccccgaatccggggactggtgggacgcggcgtatttgatgatgtggggctccaacgtcccgatcacccgcacgcccgacgcgcactggatggccgaggcgcgctaccgcggcaccaaggtggtcaccgtcagcccggactacgccgacaacaccaagttcgccgacgagtggatgccctgcgccgccggcaccgacggggccctggcgatggcgatgggtcacgtcatcctctcggaatgctatgtgcaaaaacaggttccgttcttcaccgactatgcccgccgctacaccgatctgccgttcttgatcaagctcgaagagcgcggcgacatgctggtgcccggcaagaacctcaccgcggccgacctcggcgaagcggtcgagaatgcggcgctcaagcccgcgctgctcgacgagaccaccaattcggttgcggtgccgcatggttcgctgggcttccggtacggcgagtcgggcgtggggaagtggaacctggacctgggcgacctggtgccggcgctcagtgtgcgggccgccccgaccgaggacggggagacggcgctggtgcacctgcccagcttcgacaccgtcgacggcgaggggacgaccgtggcgcgcggcgtcccggtgcgccgcgtcggtaaacacctggtgtgcacggtcttcgacctgatgctcgcccaatacggggtggcgcggccggggctgcccggcgaatggcccaccggctacgacgacgcgacccagcagaacaccccggcctggcaggaggcgatcaccggcgtgtcggccgcccaggccacccgggtggcgcgggaattcgcgcgcagcgcagaggaatccggcggccgctccatgatcatcatgggcggcggcatctgtcactggttccacagcgatgcgatctaccgcgcggtgctggcgctgctgatgctgaccgggtcgatgggccgcaacggcggcggctgggcgcactacgtcggccaggaaaaggtgcgcccgctcaccggatttcagaccatggcgatggcgacggactgggtgcgcccgccgcgccaggtgcccggcgcctcgtactggtacgcccacacggatcaatggcggtacgacggctacggggcggacaagctggccagcccggtgggccggggccggttcgccggcaggcacaccatggacctgctggcctcggcggtggcgatggggtggagcccgtactacccgcagttcgaccggtccagcctggacgtcgccgacgaggcgcgcgccgccggccgcgatgtcgccgactacgtcgccgagcagctcggccgccgcaacctcaaactcgcggtgaccgatccggacaaccccgtcaactggccgcgggtgctgaccgtgtggcgcgccaacctgatcggttcgtcgggcaaggggggcgaatacttcctgcggcatctgctgggtaccgactccaacgcgtcggcggtgccgcccgaggacggggtgcggcccgtcgacgtgacctgcggggcggacatccccgagggcaagctcgacctgatgatgtcgatcgacttccggatgacctcgacgacgctggtgtccgacgtggtgctgccggcggcgacctggtacgagaaggccgacatctccagcaccgacatgcacccgtatgtgcacgcgttcagcgcggcgaccgacccgccctgggaaacccgttcggacttcgacgctttcggcgctatcgcccgcgcgttcagcaccatggccaaggagcacctgggcacccgcaccgacgtggtgctcaccgcgctgcaacacgacacacccgacgcgatggcctatcccgatggcgccgaacacgattggctgcgcagcggggcgacgccggtgcccggacgcaccatgggcaagctcaccgtggtggagcgcgactacgccgccgtctacgacaagtggcgcacgctcggcccgctggtcgacaagttcgggttgaccaccaagggcgtcaccgtgcatccgttccgcgaggtcgaggaattggccgcccggttcggggtgctgaaatccggtgtggcggcgggccgcccggccatcacgaccgccgcgcggatggccgacgtgctgctgttgctgtcgggcaccaccaacggccggctggcggtcgagggtttccacgagctcgagaaacgcaccgggcagcggctggtgcatctggccgagggcagcgaggacaagcgcatcagctacgccgacacccaggcgcggccggttccggtggtcaccagcccggaatggtcgggcagcgagacgggtggccgccggtatgcgccgttcaccatcaacatcgagaacctcaagccgttccacacgctgaccggacggatgcacttctacctggcgcacgactgggtcgaggaactcggcgagcatctgccggtgttccgaccgccgctggacatggcgcggttgttcggccagccgcggctgggcgcatgcgaggacggaatcgggctcaccgtgcggtatctgaccccgcactcgaagtggtcgttccactccacctaccaggacaacctgtacatgctgtcgctgtcccgcggcggcccaaccatgtggatgagcccgggagacgcggcgaaaatccaagtgcgcgacaatgattgggtcgaggcagtcaacgccaacggcatctacgtgtgccgggccatcgtcagccaccggatgcccgacggggtggtgtacgtctatcacgtccaggagcgcaccgtggacaccccgcgcaccgaaaccaacgacaagcgcggcggcaaccacaacgcgctgacccgggtgcggatcaagcccagccacctggccggcgggtacgcccagcacgcgttcgcgttcaactacctgggaccgaccggcaaccagcgcgacgaggtgacgatcgtccgtcgtcgcagccaagaggtggtgtac

SEQ ID NO: 25431 - DNA, 440 bp, Mycobacterium avium
atgaaggtcatggcgcagctggcgatggtgatgaacctcgacaagtgcatcggctgccacacctgctcggtgacctgcaagcaggcctggaccaaccggtcgggcaccgaatacgtgtggttcaacaacgtcgaaacccgtccgggacaaggctatccgcgcacctacgaggaccaggagcggtggcgtggcggctggatccgcgacaagcggggccggctgcgattgcgtgacggcggccgtttccaaaagctgctgcgcatcttcgccaatcccaagctgccggtgatcggcgactactacgagccgtggacctacgagtacgagaacctgaccaccgcacccgccggtgacaccttcccaacggccgcgccgaaaagcctgatcagcggcgagccgatgaaggtgtcctggggaccgaactgggacgacaacctggc

SEQ ID NO: 25432 - DNA, 1137 bp, Mycobacterium avium
atgacgctgtcggaagaacaagacgcccagggcgggctcgagcagacctctcgcgtcgaccgcgtcgcctcgctgaccggggtccgtgcggtcgccgcgctgctcgtcgtcggcacccacgcggcctacaccaccggcaagtacacgcacgggtattgggggttggtcggttcccgcatggagatcggggtgcccatcttcttcgtgctctccggctacctgctgttccggccgtgggtgaagtccgcggccaccggcggcccaccgccgtcgctgagtcgctatgtgtggcaccgggttcggcgcatcatgcccccctacgtcatcacggtgctgttcgcctacgtgctgtaccacttccgcgaggctggtcccaatcccgggcacagctggctgggtctggcgcgcaacctgacgctcacccagatctactgcaacggctacctgggcaagtatctgcatcaggggctgacccagatgtggagcctggccgtggaggcgtccttctacgtcatcctgccgctactggcctacctgctgctggtgctggtctgccggcggcagtggcagccgaagctggtgctgggcgcgctggcggggctggccttggtcagcccggcctggctggtgctggtgcacaccgatcactggtttcccgacggcgcccggctgtggctgcccacctacctggcctggttcctggccggcatgatgctgacggtgctgcaggaaatgggcgcgcgcgcctacggtttcgtggccatcccgctggcggtggtcagttatttcatcgtctccaccccgatcgccggcgcgcccacgacgtcaccggccacgctgagcgaggcgttgttcaaggcctgcttctacgccgtgatcgccgccctcgccgtggcgccgctggcgctgggcgatcacgggtggtattcgcggctgctggccagccgcccgatggtgtggctgggggagatctcctacgagatcttcctgatccatttgatcaccatggaattcgcgatggactacatcgtcggcgcccgcgtctacaccggctcgatgctgaacctgttcgtcgcgacgctggtcctgacgatcccgttggcgtggctgctgcaccggttcacccgggtgcgcgac

SEQ ID NO: 25433 - DNA, 1698 bp, Mycobacterium avium
atgaccctcccggacagctcgactgaggctgcctccccgacatttgccgacctgcagatccatccctcggttttgcgggcgatcgccgacgtcggctacgagacgcccaccggcatccaggccgcgaccatcccggcgttgatggccggttccgacgtcgtcgggctggcccagaccggcaccggcaagacggccgcgttcgcgatcccgatcctgtccaagatcgacgtcgccagcaccgccacccaggcgctggtgctggcgcccacccgggagctggcgttgcaggtggccgaggcgttcagccgctacggcgcgcatctgccgaagatcaacgtgctgccgatctacggcggctcctcctacgccgtgcagctggccggattgaaacgcggcgcccacgtggtggtcggcacgccgggccgggtgatcgaccacctcgagcgcggcacgctggacctgtcgcacgtcgactacctggtgctcgacgaggccgacgagatgctcaccatggggtttgccgaagaggtcgaccgcatcctgtccgagaccccggaatacaagcaggtcgcgctgttctcggcgaccatgccgcccgcgatccgcaagctcaccgccaagtatctgcacgatcccctcgaggtcagcaccaaagcgaaaaccacgaccgccgagaacatttcgcagcgctacatccaggtcgccggcccgcgcaaaatggacgcgctgacccgggtgctggaggtcgagccgttcgaggcgatgatcgtgttcgtccggaccaaacaggccaccgaggaggtcgccgaaaggctcagggcgcgcggcttctcggcggccgcgatcaacggggacatcccgcagggccagcgtgagcggaccgtcgccgccctcaaggacggcggcatcgacatcctggtcgccaccgacgtggccgcccgcggcctggacgtcgaacggatctcacacgtgctcaactacgacatcccgcacgacaccgagtcctacgtgcaccggatcgggcgcaccggccgggcgggacgctcgggaaccgcgctgctgttcgtctccccgcgagaacgccacctgctcaaggccattgagaaggcgacccgccagccgctcaccgaagccgagctgcccaccgtcgaggacgtcaacgcccagcgggtggccaagttcgccgactccatcaccgccgcgctcggcgctcccggcatcgatctgttccgcaagttggttcaggactacgaacgcgagcacgacgtcccgatggccgacatcgccgccgcgctggccgtgcagtcacgcgacggcgaggagttcctgatggcgcccgaaccgccgcgggagcgacgcgaacggcacaccgaacggcgcgagcgcaccgagaaacccaggagcacaaggccgttggccacctaccgcatcgcggtgggcaaacggcacaagatcggtccgggcgcgatcgtgggcgccatcgccaacgagggcgggctgcatcgcagcgatttcggccacatcgccatcggacccgacttctcgctggtggagttgccggccaagctgcccaagtcgacgctgaaaaggcttgagcagacccgaatctccggagtgctgatcaacctccagccggaccgggcggcggccaaggcgcgcggtcgggacggcgggaaaccacgcaggaaatacggcgga

SEQ ID NO: 25434 - DNA, 894 bp, Mycobacterium avium
atgagccctccgggcctggtcgtcgtcgacaagccggcgggaatgaccagtcacgacgtggtgggccggtgtcgccggatcttcgcgacccgacgggtggggcacgccggaacgctcgacccgatggccaccggcgtgctggtgctcggcgtggagcgcgccaccaagatcctgggcctgctgaccgcggccgccaagtcgtactcggccaccatccggctgggccaggccacctccaccgacgacgccgagggcgacgtggtgcgcagcgtcgacgcgcggcacctgacgagccaggcgatcgaggcggcggtgggcgggttgcgcggcgacatccaccaggtgccctcgaccgtcagcgcgatcaaggtggccggcaagcgggcctacaagctggtccgcgagggccaggccgtcgagctgccggcccgcccggtgcgcatcgaccggttcgaggtgcgcgacctgcgcgccgccggtgagtgcgtggacgtcgacgtcgaggtggactgctcgtcgggaacctacgttcgggcgctggcccgcgacctgggcgcggcgctcggggtgggcgggcatctgacggcgctgcggcgcacccgggtcgggcgcttcgggcttgagcaggcgtatgggctcgacgagctggccgagtgcccgcggctgagctacagcctggacgaggcatgcctgctgatcttcgggcgccgcgatttgtccgccgacgaggccgaggccgccggcaacggccgggccctggcggcggccgggatcgacggagtgtatgccgcctgcgcccccgacggccgggtgatcgcgctgctgcgcgacgagggcgcgcggactagatcggtcgtcgtcatccgcccggcgacgatgcaggacggtacgtcc

SEQ ID NO: 25435 - DNA, 1830 bp, Mycobacterium avium
atgcaggccccggtcgtcggcggcgtgcggttgccgcacggcaacggcgagaccatccggctggcccgcggcgcgtcgctgtccgacttcgccgagaagatcgacgccaacccggcgtcgctggtgcaggcgctgttcaacctcggcgagatggtgaccgccacccagtcggtcggcgacgagacgctcgagctgctgggcagcgagatgaactacaacgttcaggtcgtctcgcccgaggacgaggaccgcgagctgctggagtccttcgacctgacctacggcgaggacgagggcaccgaggaggacctgcagacgcggccgccggtggtgaccgtgatgggtcacgtcgaccacggtaagacgcggctgctggacacgatccgtaaggccaacgtccgcgaggccgaggccggcggcatcacccagcacatcggcgcctaccaggtgaccgtcgagcacgacggggtggagcgcccgatcaccttcatcgacaccccgggtcacgaggcgttcaccgccatgcgtgcccgcggcgccaaggccaccgacatcgcgatcctggtggtcgccgccgacgacggtgtcatgccgcagacggtggaggcgatcaaccacgcgcaggcggccgacgtgccgatcgtggtggcggtcaacaagattgacgtcgagggtgccgacccgcagaagatacgcgggcagctcaccgaatatggtttggtgccagaggaattcggcggcgacacgatgttcgtcgacatctccgcgaagcagggcaccaacatcgaccagctgctggaggcggtgctgctgaccgcggacgccgccctggacctgcgcgccaacccggacatggaggcccagggtgtggcgatcgaggcgcacctggaccgtggccgcgggccggtggcaacggtgttgatccagcgcggcacgctgcgggtcggcgactcgatcgtcgccggcgacgcctacggccgggtgcggcgcatggtcgacgagcacggcgacgacgtcgaggaggcgctgccgtcgcggccggtgcaggtcatcgggttcacctcggtgcccggcgccggggacaacctgctggtcgtcgacgaggaccggatcgcccggcagatcgccgacaagcgcagcgcccgcaagcgcaacgcgctggcggcacggtcgcgcaagcggatcagcctggaggacctggattcggcgctgaaggaaaccagccagctcaacctgatcctcaagggcgacaacgccggtacggtcgaggcgctggaagaggccctgatgggcatccagatcgacgacgaggtggcgctgcgggtcatcgaccgcggtgtcggtggcatcaccgaaaccaacgtcaacctggcgtcggcgtcggacgcggtgatcatcggcttcaacgtgcgcgccgagggcaaggccaccgagctggccaaccgcgagggcgtggagatccgctactactcggtgatctaccaggcgatcgacgagatcgagaaggccctgcgcggcatgctcaagccgatctacgaggagaaccagctgggccgcgccgagatccgggcgatcttccggtcctccaaggtgggcatcatcgccggctgcatgatcacctccggggtggtgcgccgcaacgccaaggcccggctgctgcgggacaacgtggtggtcagcgagaacctcacgatcaattcgctgcgccgggagaaggacgacgtgaccgaggtccgcgagggcttcgaatgcggtatgacgctgggctattccgacatcaaggaaggcgacgtcatcgagtcctacgagctggtccaaaaagagcgcacc

SEQ ID NO: 25436 - DNA, 1371 bp, Mycobacterium avium
atgccaccagctgacagcagaaggcgagcagctgactcatcgaccggcgccctgcgcgccggcaaggtcgtcgaggcgcaaccgcacccgcacgccgccctgcggcgcagcacgctgcccggcggcctgcgggtggtcaccgagtacctgcccgcggtgcggtccgcctcggtcggggtgtgggtcggcgtcggctcccgcgacgagggtgccaccgtggccggcgccgcgcacttcctcgagcacctgctgttcaagtccacgcccacccgcaccgcggtggacatcgcgcaggcgatggacgccgtcgggggagaactgaacgcgttcaccgccaaggaacacacctgctactacgcgcacgtgctggacgccgacctggaactggccgtcgacctggtcgcggacgtggtgctcaacggccgctgcgccgccgaggacgtcgaactcgagcgcgacgtggtgctggaagagatcgcgatgcgcgacgacgaccccgaggacgcgctgggggacatgttcctgggcgcgctgttcggcgaccacccggtgggccggccggtcatcggcaccgcgcggtcggtcgcgtcgatgacgcggacgcagctgcactcgtttcacgtccgccgctacacaccggaacggatggtggtggcggtggccggcaacgtcgaccacgacgaggtggtggcgatggtgcgcgagcacttcgggccgcacctggtccgcgggcggcaaccgatcgcgccgcgcaagggcgccggacgggtgaacggccggcccgggctgctgctgggcacccgggacgccgagcagacgcacgtgtcgctgggggtgcgcacgcccgggcgcggctggcagcatcgctgggcgctgtcggtgctgcacaccgcgctgggcgggggcctgagttcgcggctgttccaagagatccgggagctgcgcgggctggcctactcggtctactcgacggtggacatcttcgccgacagcggcgcgctgtcggtgtacgccgcctgccaaccggaacgcttcgccgaggtgatggcggtgaccggcggcgtgctcgagtcggtggcccgcgacggcatcaccgagtcggaatgccggatcgcgaagggctcgttgcgcggcggcctggtgctgggtctggaggactccggctcgcggatgagccggctgggccgcaacgaactcaactacggccggcaccgcagcatcgagcacaccctggcgcaaatcgaccgggtgagcgtcgacgaggtcaacgcgatcgcccgccggctgctcacgcagcgctacggtgccgcggtcctgggcccgtatagcaccaaacggtcactgccccaacaacttcgggcgatggtacgg

SEQ ID NO: 25437 - DNA, 2271 bp, Mycobacterium avium
atgtctgtcgctgaaattgaagaaggcgtgttcgaggcgaccgccaccatcgacaacgggagcttcggcacccgcaccatccgcttcgagaccggccggttggcccagcaggctgccggcgccgtcgtcgcctacctcgacgacgagaacatgctgttgtcggcgaccaccgccagcaagagccccaaggagcacttcgacttcttcccgctcaccgtcgacgtcgaggagcggatgtatgccgcgggccgcatccccggctcgttcttccgccgcgagggtcgcccctccaccgacgccatcctgacctgccggctcatcgaccgcccgctgcggccgtcgttcgtcgacggcctgcgcaacgaaatccaggtcgtcgtcacgattttgagcctggaccccaacgacctgtacgacgtgctggcgatcaacgccgcgtcggcctccacccagctgggcggtctgccgttctccggccccatcggcggggtgcgggtggcgctgatcgacggcacctgggtggcgttcccgacggtcgagcagctcgagcgcgcggtgttcgacatggtggtggccggccgcaaggtcgacggcgccgacgggcccgacgtcgccatcatgatggtcgaggccgaggccacctccaacgtcatcgaactcatcgacggcggcgcccaggcgcccacggaaaccgttgtggcccaaggccttgaggccgccaaaccgttcatcgaggtgctgtgcaccgcgcagcaggagctcgccgacaaggccgccaggcccaccagcgactacccgaccttccccgactacggcgacgacgtctactactcggtggcgtcggtggccaccgacgagctgtccaaggcgctgaccatcggcggcaaggccgaacgcgacgcgcgcaccgacgagctcaaggccgaggtgctggcccgactggccgaaacctatgagggccgcgagaaagaggtcagcgccgcgttccgctcgctgaccaaaaagctggtgcgccagcgcatcctgaccgaccacttccgcatcgacggccgcggcatcaccgacatccgcgcgctgtccgccgaggtcgccgtggttccgcgggcacacggcagcgcgctgttccagcgcggtgaaacccagatcctgggggtgaccacgctggacatggtcaagatggcccagcagatcgactcgctggggcccgagaccacgaaacgctatatgcaccactacaatttcccgccgttctccaccggcgagaccggccgggtgggctcacccaagcgccgcgagatcgggcacggcgcgctggccgagcgtgccctggtgccggtgctgccgagcctcgaggacttcccgtacgccatccggcaggtgtccgaggcgctgggctccaacggctcgacgtcgatgggctcggtctgcgcgtccacgctggcgctgctcaacgccggggtgccgctcaaggcgccggtggccggcatcgcgatgggcctggtgtccgacgacatagaagttgaggcgggagacggcacaaaatcgcttgagcgccgcttcgtcaccctgaccgacatcctgggcgccgaggacgcgttcggcgacatggacttcaaggtggccggcaccaaggacttcgtcaccgcgctgcagctggacaccaagctcgacggcatcccgtcgcaggtgctggccggggcgctgagccaggccaaggatgcccgcttgaccatcctcgaggtgatggccgaggccatcgacgagcccgacgagatgagcccgtacgcgccgcgggtgaccaccatccgggtcccggtggacaagatcggcgaggtgatcggccccaagggcaagatcatcaatgccatcaccgaggagaccggcgcccagatctccatcgaggacgacggcaccgtgttcgtcggggccaccgacggcccgtcggcgcaggccgcgatcgaccggatcaacgccatcgccaacccacagctgcccaccgtcggcgagcggttcctcggaaccgtggtcaagacaacggatttcggcgcgttcgtgtcgctgctgcccgggcgtgacggcctggtgcacatctccaaactcggcaagggcaagcgcatcgccaaggtcgaggacgtggtgaacgtcggcgacaagctgcgcgtggagatcgccgacatcgacaagcgcggcaagatctcgctggtcctggtggaggaagacaactcggcacccgccgacgccccggcggccgcccctgccgatgccaccagc

SEQ ID NO: 25438 - DNA, 267 bp, Mycobacterium avium
gtggcgctgacagccgagcagaagaaagaaatcctgggcacctacggcctgcatgacaccgacacgggctccccagaggcgcaggtcgcgctgctgaccaagcggatcgctgacctgaccgagcacctgaaggtgcacaagcacgaccaccactcgcggcgcggactgctgctgctggtcgggcggcgccggcggctgctcaagtacgtcgcccagatcgacgtcgagcggtaccgctcgctggtcgagcggctgggcctgcgccgc

SEQ ID NO: 25439 - DNA, 972 bp, Mycobacterium avium
gtgcagcggtggcgcggccaagacgagatacccacggactggggcaggtgtgtgctgaccatcggcgtgttcgacggtgtgcaccgcggccacgccgagctgatcgcgcacgcggtcaaggcggggcgggcccgcaacgtgccgacggtgttgatgacgttcgacccgcacccgatggaagtggtctacccgggcagccatcccgcccagttgacgacgctgacccggcgcgccgagctggtcgaggagctgggcatcgacgttttcctggtgatgccgttcaccaccgacttcatgaaactcaccccggaccgctacgtgcacgagctgctggtggagaacctgcacgtggtcgaggtggtggtgggggagaacttcaccttcggcaagaaggcgaccggcaatgtggagacgctgcggcgggcaggcgagcgattcgggttcgccgtggaggcgatgtcgctgctttccgagcaccacagcaaccagaccgtgacgttctcctcgacctacatccggtcctgtgtggacgccggcgacgtggtggcggccatggaggcgctgggtcgtccgcaccgggtggagggcgtcgtcgtccgcggcgaggggcgggggatccaactgggcttcccgaccgccaacgtggccccgccgatgtattcggcgatccccgccgacggggtctacgccgcctggttcaccgtgctgggccacgggccggtgaccggcaccgtcatcccgggtgagcgctaccaggcggcggtatcggtgggcaccaacccgaccttctccgggcgcacccgcaccgtcgaggcgttcgtcctggacacccaggccgacctgtacgggcagcacgtcgcgctggatttcgtcgcccgcatccgcggccagcacaagttcgactcggtcgacgacctcgtcgtcgcgatgggccaggacaccgagcgggcgcgtcagctgctgtccgccggc

SEQ ID NO: 25440 - DNA, 549 bp, Mycobacterium avium
ttgtcggatgtgcgccgtacggtcttgcctggaggtacggaagacatgctgatcaggtcactcccgccgtgcgagcggccccgggaacggctgctcacttgcggagtggacgcattgacggcgggcgagcttatcgcgcttgtgctccgcaacggcaccaagggcaagagcgccctagaactcgcgtccgagttgatcgcagagtacggctcagcccaggcactggctggcgcgcgaccggaggagctggcgatgcgtcccggcgtcggaccggctaaggcggctgcgcttgtggccgcctttcaactcagccggcgaagcgttcgcagtgatccgtcacagctgcggagcgctgaggacgtcgcaacaatcgcacgaggagaactcgccggcgctcgccgtgagcggctcattgtcgtgatctgcgactcggcaaatcacgttaagaaggttgtaaccgtctcagaaggtgcgcttgcccggtcgatcgtgggtcacgtcccgtggagtggtgtaagagcggtcgcgtgtccgcgtgtggctctgtgg

SEQ ID NO: 25441 - DNA, 879 bp, Mycobacterium avium
atggcaccgaccctgcgcccgcgccgatcggccctgtacctgcccggcaacaagccgcgggcgctggagaaaggcaaatcgctgccggccgacgtgctgatattcgacctcgaggacgccgtcgggcccgacgcgaaagccgaatccagagccgcggtgtgcgaggcgatctcgtcgccggactaccggccccgcgagatcgtggtgcgcatcaacggcctggacaccgagtggcacgacgacgatctggcggcggtggccgggtccgccgccgacggcgtgctggtgccgaaagtcgagacggcacaacaggttcaagccctggaccgggcgctggacacgttgggcgcctcggcgtcgctgcagctgtgggtgatgatggaaaccccgcgggccttcctgcgggccgaggaggtcgcgtcggccagcgaccgcctggccgggctggtggtcggcaccaatgacctggtcaacgagttgcacggccggcacgtcgcggggcgcggccccgtcgtgccggcgctgggcctggcgttgttgggggcgcgggcggccggaaaggtcgttttggacggcgtgttcaacgacatcaccgacgacgcgggtttccgggccgaggcggcccagggccgggagatgggattcgacggaaagacgctgatccacccgtcccagatcgccccggccaacgaggtgttcggcccgtcacagcacgagctggccgacgcccgcaaggtggtgtcggcctaccagcaggcgcaggccgcgggaaccagcgtcatcactgtcgacggccggatgatcgagagtttgcacgtgcgcgatgcgcaacggatcctcgccctcgccgatctgatctccgaacgggacgcggcgtcc

SEQ ID NO: 25442 - DNA, 264 bp, Mycobacterium avium
gtgctgctggccaagctcggtgcgagttgtgatgtggcggtgggttttccgattgccgggcgtggtgacccggctcttgatgacctggtcgggttcttcgtcaacaccctggtgctgcgcgtcgatttgtccggtgatcccaccgtcggcgaaatcctggcccgggtgcgccaacgcagcctggccgcctacgaacaccaggatcgtgcccttcgactagcccagcaaattggaattcgcccacccgacccccccgcacgggaa

SEQ ID NO: 25443 - DNA, 696 bp, Mycobacterium avium
atgcgtctcgcgtgggtgctgcgactgacgattgcggcgtcgttggtcgcggcgggcgggacgcgtaccgccgaggccagcccggatgtcccgccggtcagcgaggccgcgaaagcggccggcttcgtggacatccgcagcgtcattcccgatgcggtgctcgacctgcgctatgcgacgtccaacaatttcacccatacgcagctgtatccctccgacgccagatgccttgtgcaccaatcgatggctcccggccttgccgcggccgccggtgcgctgcgcccacagggtcacctgctggtgttctgggactgctatcgcccgcatgacgtccaggtaaagatgttcagcctggtccccaaccccgcctgggtggcccgcccgggcgcgtatgcccgcagccacgagtcggggcgttcggtggacgtgaccttcacgacggcacagcaggcttgctcgtccgggttgcacgccggcgggctgtgtctggccgacatgggcactgacttcgacgacttcacctcgagggcaacggctttcaacacgcagggcatcagtgccgacgcggtggcgaaccgggccgcgctgcgcaacgccatgaattacggcggattgacggtgtactcgggggagtggtggcatttcgacggcccgggggccggtgtggaccaaccgatcctcaacgtccccgtcgac

SEQ ID NO: 25444 - DNA, 1554 bp, Mycobacterium avium
atgagcccggctcgcaccgcgcagcaatggcataacccgttacgcgacaagcgcgacaagcggctcccgcgcatcgccgggccgtgcggaatggtgatcttcggcgtcaccggcgatctggcccgcaagaaggtcatgcccgccatctacgacctggccaaccgcgggctgctgccgcccagcttctcgctggtcggcttcgcccgaagggattggagcacccaggatttcggcaaggtggtatacgaggccgtcaaggagcactgccgcaccccgttccggcaggagaactgggatcggctggccgagggattccgtttcgtgccaggcgctttcgacgacgacgaggcgttcggccggctcgccgagacgctggacaaactcgacgccgagcggggcaccggcggtaatcacgccttctacctggccatcccgcccaagtccttccccgtcgtgtgcgaacaactgcacaagtccgggctggcccgcccgcagggcgaccgctggagccgagttgtcatcgagaagccgttcggccacgacttggagagcgcgcagagcctgaacaaggccgtcaacgccgtctttcccgaggagtcggtcttccgcatcgaccactacctgggcaaggagacggtccgcaacatcctggcgctgcggttcgccaaccagttgttcgacccgatctggaactcgcactacgtcgaccacgtgcagatcaccatggccgaggacatcggcttgggcgggcgggccggctactacgacggcatcggcgccgcgcgcgacgtcatccagaaccacctgatgcagctgctggcgctgaccgcgatggaagagccggtcagcttcagcccgttggcgctgcaggccgagaagatcaaggtgctctcggccacccacctcgcccacccgctcgacgagaccaccagccgcggccagtacaccgcgggctggcagggcggcgagaaggtggtcgggctgctcgacgaggagggcttcgccaaggactcgatcaccgagacgttcgccgccatcaccctcgaggtggacacccgccgctgggccggggtgccgttctacctgcggaccggaaaacgcttgggccgcagggtgaccgagatagccctggtgttcaaacgcgcgccgcatctgccgttcgacgcgacgatgaccgatgagctgggcgccaacgccatggtgatccgggtgcagcccgacgagggtgtcacgctgcggttcggttccaaggtgccgggcaccgcgatggaggtccgcgacgtcaacatggacttctcctacgggtcggcgttcgccgaggaatcaccggaggcctacgagcagttgatcctcgacgtgctgctgggtgagccgtccctgttcccggtcaacgccgaagtcgaattggcttggcacatcctcgatcccgtgctcgacaactgggcgagcggcggcaggcccgagccctacgaggccggcacctggggcccggattcggcgttcgagatgctgcaccggacgggccgcgaatggcgcggccatgatacgcagcga

SEQ ID NO: 25445 - DNA, 1674 bp, Mycobacterium avium
atggctgagttcatctacacgatgaagaaggtccgcaaggcgcacggcgacaaggtgatcctggacgacgtcacgttgagcttctatccaggcgccaagatcggtgtcgtcggccccaacggcgccggtaagtcgagcgtcttgcggatcatggcgggcctggacaagccgaacaacggtgaagccttcctggccaccgacgccaccgtcggcatcctgcaacaggagccgccgctgaacgaggagaaaaccgttcgcggcaacgtcgaggagggcctgggcgagatcaaggtcaagctcgaccgcttcaacgaggtcgccgagttgatggccaccgactactccgacgagttgatggaggagatgggccggctgcaggaggagctcgaccacgccgacgcctgggacctcgattcgcagctcgagcaggcgatggacgcgctgcgctgcccgccgcccgacgacccggtgacgaacctgtccggtggcgaacgccgccgggtggcgctgtgcaagctgctgctgtccaagcccgacctgctgttgctggacgagcccaccaaccacctggacgccgaaagcgtgcagtggctcgaacagcacctggcggcctacgcgggcgcggtgctggcggtcacccacgaccgctacttcctggacaacgtcgcgcaatggattctcgaactcgaccgcggccgcgcctacccctacgagggcaactattcgacctatctggagaagaaggccgaccgcctggcggtgcagggccgcaaggacgccaagctgcagaagcggctgagcgaggagctggcttgggtgcgttccggggccaaggcgcgtcaggccaagagcaaggctcgcctgcagcgctacgaggagatggcggccgaggcggagaagacgcgcaagctggacttcgaggagatccagataccggtcgggccccggctgggcaacgtggtggtcgaggtcgaacacctggacaagggctacgacgggcgcaccctgatcaaggacctgtccttcaccctgccgcgcaacggcatcgtcggcgtcatcggccccaacggggtcggcaagaccacgctgttcaagaccatcgtcgggctggaacaacccgacagcggcaccgtcaaggtcggcgaaacggtcaagctcagctacgtcgaccaggcccgcgccgggatcgacccgaaaaagacggtgtgggaggtcgtctcggacgggctggactacatcgaggtcggccagaacgaagtgccgtcgcgcgcctacgtgtcggcgttcgggttcaaggggccggatcagcagaagccggccggcgtgctgtccggcggcgaacggaaccggctcaacctggcgctcaccctcaagcagggcggcaacctgatcctgctggacgagccgaccaacgacctggacgtcgagaccctgggctcgctggagaatgcgctggtgaatttcccgggctgcgcggtggtcatctcgcacgaccgctggttcctggaccgcacctgcacgcacatcctggcctgggagggtgacgacgacaacgaggccaagtggttctggttcgagggcaacttcggagcgtacgaggagaacaagatcgaacggctcggcgccgaagcggcccggccgcaccgagtgacccaccggaagctgacgcgcgac

SEQ ID NO: 25446 - DNA, 1245 bp, Mycobacterium avium
gtggctgtccacaatctcaaagaccttctcgccgaaggtgtttccggacgcggtgtgctggtgcgttcggacctgaacgtgccgctggactccgatggtgagcaaggccggatcaccgaccccggccggatcaccgcgtcggtgccgacgttgagcgcactggtcgaggcgggcgccaaggtggtggtcgccgcgcacctcgggcgtcccaagaatgggccggacccggcgttgtcgctggccccggtggccgccgcgctcggcgagcagctgggccggcacgtgcagctggcctcggacgtggtgggcaccgacgccctggcccgcgccgaggggttgaccgacggcgacgtcctgctgctggaaaacatccggttcgacgcccgcgaaacgtccaaggacgacgccgagcggctcgcgctggcccggcagctggccgaattggtcggtcccacaggcgctttcgtctccgacggtttcggcgtggtgcaccgcaagcaggcctcggtgtacgacgtcgccacgctgctgccgcactacgccggcacgctggtggccgaggagatcgccgtgctggagcagctgaccggctcgaccaaacgcccctacgcggtggtgctcggcgggtccaaggtgtccgacaagctcggcgtcatcgagtcgctggccaccaaggccgacagcatcgtcatcggcggcggcatgtgcttcacctttcttgctgcgcaagggttttcggttggtaagtcgctgctagaaaccgagatggtggacacctgccgccggctgctggacacctacgtcgacgtgctgcggctgccggtggacatcgtggcggccgacaggttcgccgccgacgcggcgccgcagaccgtgccggccgacgccatccccgacgacctgatgggcctggacatcgggccgggatcggtcaagaggttcaccgcgctgctgtccaacgccgagacgatcttctggaacggcccgatgggcgtgttcgagttcccggcgttcgccgcgggcaccaagggcctggccgaagcgatcgccgcggcgaccggcaagggcgccttctccgtggtcggcggcggcgactcggcggccgcggtgcgcgcgctgggcatcccggagagcggcttctcgcacatttccaccggcggcggggcgtcgctggaataccttgagggcaaggcacttccgggcatcgaggtgctgggacgtccgcaaccgacgggaggcgccgcg

SEQ ID NO: 25447 - DNA, 31263 bp, Mycobacterium avium
gtgaaacgcggtgaccgggcatatccggtgacgcgaggccagctggacatctggctggcgcagcagaccggccacttcgatgtggcatggcagctgggcgtgctggtgcgcatcgacggcgccatcgaccccgcgctgctgcaccaggccatgcgacacgtggtcggcgaggccgagagcctgcgcgccagcttcttcgaggccgacggccaggtcttccagaaggcggtcgaatactccgacgtcgacctgaccttctacgacctgagcggctcgcccgatccggagcgggaagtccgcgagatggcggcgtcgatccagcgcaccccgatgccgctgaccggtccgatgatcaaattcgctttgttccgaaccggttccgccgagtactactggttcaccacctgccatcacatcgccatcgacgggatgggcatcgcgctggtgggccggcggatcgcggcggtctacacggcgcttgcgtccgccaaaccgattccgcccgccttcttcggttcgctgcaggacctggtcggcggcgagctggaatacgaggcatccgcgaaattccttgaggacaaggattattggcttgcgcaccgtcccggcgacggcacggccggccatccgccgcggccggccgacgacgggcgagacccgtattcgccctccccgccggtgcagttggacgagtcggtgatcggcagcgtcaaggagttgtccaaggcgttgggcgtccgtcggtcatcggtgctcaccgccgcctgcgcgttgttggtgcgcggatggtgcgccgacggctccgacgaggtggtgctcgacttcccggtcagccggcgggtcgatcccaagtcgaagacgcatcccggcatgctggccggggtggtgccgctggtgctgcacgccccggcgaccgccacgttcgccgacttctgtcggcatgtcgatcagcgctcgcgagaagcgttgcggcatcagcaattccccacccgcacgctggacggggaaggcgacttcagcgggccgaggcaggcgccgaaccgggtcgtcgtcaacttcgtcccggcgcgtctcaccctcagcctggccgacgtgcccgccaccgcgacgtacaccagcttcggcccggtgggccacttcgggctgttcttcctgggattcggtgaccagcaattcctgagcacggtcggcaccgggcagccgttggcgaacttcgacgcgactgacctggcggagcgattgcaacgcatcctggcggccatggccgccgacccggcccggctgctgtcgtcgttggacgtgctgcgcgaccccgagcacgcgcagctggaagcgctcggcaacacggcggtcctgacccggacgccgggcccggcggtgtcggtgccggagctcttcgcgacacaagtggcccgggcgccgcaggacgtggcgctggtgggcgaaggccgttcgctgacgtaccggcagctggatgaggcgtcgaacaggttggcgcatttgctggccggcctgggcgcgggcccgggacagtctgtggcgctgctgttttcgcggtccgccgaggcggttgcgtcgattctggcggtgctcaagaccggcgcggcctatctgccgatcgacccggccgcgccggagacccggatcgggttcatgctcgccgacgccaaacccgttgcggcgctgagcaccgcggagctggccggccggctcgaggcccacggcatgacggtgatcgacgtcaacgatccccgtatccaggaccggcccgccaccgcgttgccggtggccgcggccgacggtgtcgcctatgtcatctacacgtcgggtacgacgggtgtgcccaaaggtgttgcggtcacgcaccgcaacgtgacgcagttgttggggtcgctggatgcgggcttgccgtcggccggggtctggtcgcagtgccactcgtatgcgttcgatgtgtcggtgtgggagatcttcggcgcgctgctgcggggcgggcgtctggtggtggtgcccgaggcggtgacccgcgcgcccgaagagctgcacgacgtgctggtcaatgagcaggtctcggtgttgacgcagacgccgtcggcggtggcgatgctctcgccgcaggggttggagtcggtgtcgttggtggtggtgggggaggcctgcccggctgaggtggtggatcgctggtcgggcgggcgggtgatggtcaacgcctacggcccgacggagacgacgatgtgcgtggccattagcgcgccgctggccccgggtatggggtcaccgccgatcggtgtgccggtcgatggtgcggggttgtttgtgctggacgcgtggttgcggccggtgccgccgggggtggtcggcgagttgtatgtcggcggcgccggggtggccgcggggtatgtgggccggtcggggctgacggcgtcgcggtttgtggcgtgtccgttcggggcacccggtgcgcgcatgtatcgcaccggggacctggtgtgttggcgtcccgatggacagttggactatcggggtcgcgccgacgagcaggtcaaggttcgcgggtatcggatcgaactcggcgaggtccaggcggcgctggccgggctggacgatgtcgagcaggcggtggtgatcgcccgcgaggaccggcccggcggcaagcggctggtcggctacatcaccggtaccgccgaccccgccgaggcgcgcaccgcgctggcccaacggctgccggtgtacatggtgccggccgcggtggtggcgctggacgccatcccgttgacgcccaacggaaaactcgacacccgcgccctacccacacccgaatacagcaccggtgaataccgcgcccccgaatcgcccaccgaggagatcctggccggcatctacgccgaggtgctcggtgtcgaccgggtcggcgtcgacgagtcgttcttcgaactcggcggcgacagcatattgtcgctgcaggtggtggcccgcgcccgtgccgccgggctgacgtgccggcctcgagacgttttcgtcgagcagaccgtcgcccggctggcccgggtggtcggctccggcgacggggcggccgaggtggccgacgagggcgtcggcccggtgccgcccaccccgatcatgcggtggctgcaggccgccgaacgggccggcggggccactgaccagttcaaccagaccgtcctggtgcaagcgcccgcgggtgtgaccgagaccgaggtcgcaatcgtgttgcaggcgttggtagatcggcacgccatgctgcggttgcgggtcaccgacgacggcgccgacggctggtcgttcgaggtgcccgaggccgggtcggtgcaagcccgcgactgcctgcggtcggtggacgcgctgtccgacgaggcgctgctggcggcccgggcccggctgaacccggccgccgggacgatgctcgccgcgttgtgggtcgaggccaccggccagctggcggtgatcatccaccacctggccgtggacgcagtgtcgtggtggatcctgttggaggacctcaacattgcctgggcgctgcaccgcgccggccagccggtggagctggcgccggcgggcacgtcgttcgcccggtgggcccgactgctcgacgagcacgcacgcgaccccgaggtagtaggccagctcgaccgctggaagacggtcacctccacaccggccgcgctgccggcaccgcgacccgacgtggacacctacgccagcgccggtcgcctgtcggtggagctggacgccgagacgaccgcgatgctgctcggtgaggtgccggcggcgttccacgccggcatccacgacatcctgctgatcgcgttcggcctggcttggacggaattcctgggcgagcccggcgctccgatcggcatcgacgtggagggccacggccgccacgaggaactcggcgcgggcatcgacctgtcccgcaccgtcggctggttcaccaccaaatacccggtgtcgctggacgtcgccgggttgcgctggccgcaggtggccgccggcgacccggcgctgggccccgtcctcaaacgggccaaggagcagctgcgcaccctgccggaaccgctgacctacgggctgctgcgttatctcaacaccgacgtcgacctggccggggccgacccgtcgatcgcgttcaactacctgggacgccaaggcgccgcgtctgattcggcggccgacgggtggcggatcagccacgacatgtcggtgctcggcgccgccgcggcggtgcccatgccgctgatgcacgccgtcgagctcaacgccggcaccatcgacaccggcgccggcccgcacctgcacgccgaatggacttgggcgccttcggttctcggcgcggagcagatcacccgggtgagccggctgtggttcgaggcgctggccggtgtctgcgcgcacgtgcgctccggcggcggcggtctcaccccgtcggacatcgccccggcccggctgacccagcagcagatcgacgagctgcaaagccggcaccgcatcgccgacatcctgccgctgaccccgctgcagcagggactgctcttccactccagcaccgcgcagggcaacgacggcatggacgacatgtacgcggtgcaactggatttcaccctcaccggccccctcgacgccgaccggctgcgcgaggcggtgcgcaccgtcgtccaccgccatccccacctggcggccctgttctgcgaccagtacgacgaaccggtgcagatcatccccgccgaccccgccgtcgagtggcgctacgtcgagctcgaccgcacgggcgcggccgatgccgacgacccgatcgagcagctgtgcgccgccgaacgcgccgcggtgggcgatctggccggccagccggtattccgcaccgcgctggtgcgcaccggaggcgaccggcaccggttcgtgctgaccagccaccacatcctgctcgacggctggtcgctgccgatcctgctgcgcgagatcttcgccggctactacgggcagcggctgcccgccgccggctcctaccgggccttcctcacctggctggccgagcgcgacctcgacgccgcccgccgggcctggggcgaggtgctgtccggtttcgacacgcccaccctggtcgcgccggagggccggttggggcagggccgccgcggcttcgaaaagtcttgtgtccctgagcaaaccacccgggcgctgggcgagctggcacgctcctgccacaccacgctgagcaccgtgctgcaggcggcctgggcggtggtgctgacctcgctgaccggccggcacgacgtcgtcttcggcaccccgcgctcgcgggtcggccagctcgaggtcgacgacgccgaacagatggtgggcctgctgatcaacacggtgccggtgcgcgccgagatcaccgcgaccaccaccaccgcgcagctgctggcgcagctgcagaacagccacaacgacacgctcgagcaccagcacctggcgctcagcgagattcaccgcgtcaccgggcacgaccaactcttcgacacccttttcgtctacgagaactacccgatcgacagcggcatgacgttgggcgcggacgggctggccatcgccgagttcaccaaccgcgagtacaaccactacccgctgacggtggaagccctgcccggccccgaactcggcctgcacatcgagttcgacaccgacgtgttcgacacggcgagcatcgaatccctggtgcagcgactgcagcgggtgctggtcgcgatgagcaccgatccggcccgacggctgtcgtcgctcgacctgctcgatcgcggcgagcgggagctggtgctgtcgacgatgtccggcgccggggtgagcgcaccgatcggggtggccccgcagctgctggccgcggcggtggccgccgacccggacgcgccggcgatcgtcgacggggcgcgggagctgtcctaccgcgaactcgacgaatggtcaacacgcctggcgcgcaagctgatccagcacggggtgggccccgagcgcgcggtcggggtggcgatcgagcggtgcgccgagctggtggtcgcctggtgggcggtgaccaaggccggcggcgtgtacgcgccggtgaatctggaccacccggtcgagcgggtcgcctcggtgctgcacacggtggacgcggtgtgcgtattgacctgcggcaccgacgaagtcgccggcgcggggccgcggccgatcctgcggatcgacggtctcgacctgtccggccactccaccgagccgatcaccgacgccgaccggcgctccccgctgcgcgccgacgacaccgcgtatctgatcttcacgtcgggttccaccggtgtccccaagggcgtcgcggtcagccacaccggcctgctgggctgggccgcggcccagcgcgagctgttcggcctgggcgcggacgcgcgggtgctgatggtcgcctccccgaccttcgacgcatccgtcggggaattgttgctggccgcgggatccggggcggcgctgatcgtggcgccgccgcaggtgtacgccggtgaggcgctgaccgcgttgctgcacaaccagcgggtcggcacggccatcctgacccccaccgtgatctcgacgctggaccgtggccggctcgacgggctgcacaccctggtcgccgtcggggaggcctgcctgcccgagctggtcgacggctgggcgccgggccggcagatgttcaacggctacggccccagcgagaccaccatctgggtcacctgcgcacggctgacggcgggccagccggtgcgcatcggcgccccgatcccgggcgtgtgcgcccgggtgctggacggctggctgaagcccgtcccggtcggcgtggtgggcgagctgtatctgagcgggccggcgctgggccacggctatctcggccgggtggacctgaccgcggaacggttcgtggccaacccctttggcggcccgggtgagcgcatgtaccgcaccggcgacctggtgcgctggacgcccgaggggacgctggactacctcggccgcgccgacaatcagatcaagctgcgcgggcaacgcatcgagttgggcgaaatcgagaacaccctgctggcctgcccgcaggtcacccaggcggccgtcaccgtgcaggacagcgccgccggctcccaactggtcgcctacgtgacactcgatcacgggccgagcgacgcggacgtccgccacgacaccgacgacggcgatgacgtcgcgcagtggcagcacctctatgacgacctgtacggcgccgacctcgccgcgacgttcggcgaggacttccgcggctggaacagcagctacaccggcgagccgatcccgctgcaggagatggccgaatggcgttccgccacagtcgatcgcatcatgtcgctgcggccgcgacgcgtgctggagatcggcgcgggctcggggctgctgttgtcgcagatcgccccgcggtgcgaccgctatgtcgccaccgacttctccgcggtggcgatcgacaacctggcccgatcgatggaacagctgcagctgccctggcgtgaccgggtcgagctgctgacccagcccgcccacgtcaccgacgggctgccgccgggccgcttcgacaccatcgtcatcaactcggtcgtccagtacttccccaacgccgggtatctcgccgacgtcatcgacaacgccctggagctgctggcccccggcgggtcgctgttcatcggcgacgtccgcaaccacgccctgcagggcgccttccaaaccggcatcgccctggcccgcggcggcggcgccgatgcggccgagatccgccagcgcgtccgccacgccatgctcggcgaaaccgaattgcttttggcgcctgagtttttcaccaactgggccgactcccgtcccgcggcggccggactcgacatccagctcaagcgcggactgtccgacaacgagctgaaccgctaccgctacgacgtcgtcatccacaaggcgcccgcgccggtgcggtcggtggccgccgcgcccacctggtcgtggaccgactgcaccgactgcgccggactgcgcgaccaactggcggcgcggcgccccgccgttgtccgcgtcaccgacattccgcaggccggggtgatcgacgacgtccgggtcgaagccgcgctggccgcggggctgcccgtcgccgacgcgctcgccgcggccggatccgaccccgccgccgccgtcgccgaggagctgcatcgcgtcggtgaggccaccggttaccgcgtcgccgtcacctggggcgcccaacccggcattctcagcgcggttttcgtgcaggacggcgaccaggccgccgagccgctgaccgatctctacctgccgcccgccggggcccgacagcgcgcccggcacgccaacgacccgcgcgccaacaccaagatcgcccaggtgcgggagcggctgaacgcctggctgcccgaatacatggtgccgacacacatcgtggcgctcgacgaattcccgatgaccacctcgggcaagctcgaccgcaaggccctgccggcgccggactaccagcacgccgaccgctaccgcgccccgtccaccgccgtcgaggagatcctggtcggcatctacggccaggtgctcgggctggagcgggtcggcgtcgacgactcgttcttcgacctcggcggggattccctgtcggcgatgcggctggtcgccgccgtcaacgccagcctgaacaccgacctcggggtgcggaccgtcttcgaggcgcccaccgccgccgagttggcgctgcgcgtcggcagcgaggccgaccggcccgagccgctggtggcgggggagcgcccggcggtgatcccgctgtcgttcgcccaaacccggctgtggttcatcgaccagttccagggcccgtcaccgatgtacaacatcaccgtggcgttgcggctgtccgggcggctggacgccgacgcgctgcgcgcggcgctggccgacgtggtggcccggcacgaaagcctgcgcacggtcttcgcgaccgccgacggaaccccgcagcaggtggtcattcctgccgatcggatcggcttcgcctgcgacgtcgtcgacgcccgcggctggccggaagaccggctgcgcgaggcgatgtcggccgcggcccgctacaccttcgacctgtcggccgaaagtccgctgcacaccgagcttttcgcccgcggcgacgacgaacacgtgctggtcgtcgcggtgcaccacatcgccgccgacggctggtcgataaccccgttcgcccgggacctcggggtcgcctacgcgagccggtgcgtcggccgagaccccgactgggcgccgttgccggtgcagtacgccgactacacgctgtggcagcgcgcgcatctgggtgacgtcgacgatccgggcagccggatcgccgcccagctggacttctggaccgacgcgctggccgggctgccggagcggctgcagctgcccaccgatcggccctacccggcggtggccgaccaccgcggcgcgcggctggcggtggactggccggccgaactgcagcaacagcttcgccgggtggcccgcgagcacaacgcgaccagcttcatggtggtccaggccgcgttcgccgccctgctcgccaaggtcagcgccagttccgatgtggccgtgggctttccgatcgcgggccgccccgaacccgtgctcgacgagctgatcggtttcttcgtcaacacgctggtgctgcgggtcgacctcaacgaactgggcggcgacccgacgttcgccgagctgctggcccaggtgcgccggcgcagcctggccgcgttcgagcaccaggacgtgccgttcgagttgctggtggagcggctcaacccgacccgcagcatgtcccaccacccgctggtgcaggtgctgctcggctgggagaacttccccggcgaggtcaccgcgccggccgccgggctggccctgggcgacctgcaggtcaccccgatgccgttgcacaccaacaccgctcgcatggacctgaccttctcgctggccgaacgcttcaccgagtcgggccagcgcgccggcatcgcggtgaccgccgaatatcgcaccgacgtgttcgacggcagaaccgtcgagggcctgatcgagcggttgcagcggttgctgacggcggtcacggccgatccgcagcgccgcctgtcggcggtcgacctgctcgacgccaacgagcacgcccggctcgaaaagtggggcaacaccgcggtgttggcccggccggccaccccggtgtcggtgcccacccggttcgccgcgcaggcggcgcgcacccccgacgcggtcgcgctgacctgcgacggccggtccatgacctaccgcgaactcgacgaagcggctaaccgcttggcgcacttcatgattcaccatggcgctggcccgggtgagcgggtggcgctgctgttcccccggtcggccgaggcgatcgtggccatcctggccgcgctcaagtcgggggcggcctatctgccgatcgaccccgcgctgccggcggcccgcgtcgagttcatgctcaccgacgccgccccgatcgtcgcggtcaccaccgccgcgctggctgagcggctgcacggtttcgacctcaccgtcatcgacgtcgccgaccccgccgtcgccacccagcccgcgacggcgccaccggtgcccgaccccgatgacgtcgcccacatcatctacacctccggcaccaccggtgtgcccaaaggcgttgcggtgacgcaatacaacgtcgcccagctcttcgacgacctgcggatcggcatcgagttgtcgccgcggcaggtgtggacccagttccactcctacgccttcgacttctcggtgtgggagatctggggcgcgctgctgcacggcggccgcctggtggtggtgcccgaaacggtgtcgcgctccccgaacgagttccacgacctgctcgttcgcgaacacgtcaccgtcctgacccaaaccccgtcggccgtcgggctgctgcgcaccgacgggctggacggcaccgcgctggtgatcggcgccgaaccctgcccgcccgagctggtggaccgctgggcgccgggccgcaccatggtcaacgtctacggccccaccgaaaccaccatgtgggcctgcaagagcgcaccactgacggccgggtcgggcttcccgccgatcggcgccccggtgacccgggcggcgttcttcgtgctcgacgattggctgcgcccggtgccgcccggggtggtcggcgagctgtacctggccggcgacggcgtcggcgtcggctattggcgccgaccgggattgaccgccgcgcgcttcctggcctgcccgttcggcgaacccggaacccggatgtatcgcaccggcgacctggtgcgctggcgcgcggacgggcagctggactatctgggccgggccgacgagcaggtcaaggtccgcggttaccgcatcgagctgggcgagatccaggcggcgctgtcggcgctggacggggtggagcaggccgtcgtcgtcgcgcgcgaggacaatcccggggacaagcgcctggtcggctacgtcaccgggtcggtggccccggccaaggcgcgcgccgcgctggccgaacggctgcccgcctacatggtcccggccgcggtggtggtgctggattcgctgccgatgaccgtcaacggcaagctcgacacccgcgcccttcccgcgcccgactaccggcacaccggcgggtaccgcgcccccgaatcaccgaccgaggagatcctggccggcatctacgccgaggtgctcggcgtgcagcgggtcggcgtcgacgactcgttcttcgacctgggcggcgactcgctgaccacgatgcggctgatcaccgcgatcaactccgcgctggacaccgacctgccggtgcgcaccgtcttcgaggcgcccaccatcgcccagctggcgccgcgcatcgcgcagagcgccggtgggctggcgccgctggtggccgccgagcggccggacgtggtcccgctgtccttcgcgcagaaccggttgtggttcatcgaccaattccagggcccctcaccgctgtacaacatggccgcggcgctgcggctgcgcggcaggctcgacgccggggcgctgggcgcggcgctggccgacgtggtggcccggcacgagagcctgcgcaccgtgttcccgtcgcaccaggggacgccccgccagctggtggtgcccgccgagcgcgccgaattcggttgggacgtcatcgatgccaccgattggccggccgaccggctggatgacgccgtccaggacgtcacccgccacaccttcgacctggccgccgaaataccaatccgcgcaaagcttttcgcggtatccgaggacgagcacgtgctggtgatcgtggtccaccacatcgccgccgacggcatgtcgctgacgccgctgggcgtcgacctgagtcaggcgtacgccagccggtgcgccgggcatgccccgggatgggccgacttgccggtgcagtactgcgattacacgctgtggcagcgcgcccagttcggtgatctcgacgaccccgacagccgcatcggcacccagctggcctactggcaggacgcgctggccggcatgcccgagcggctggcgctgcccaccgaccggccctacccggcggtggccgaccagcgcggcgacagcgtggcggtcgactggcccgccgagctgcagcagcaggtgcgccgggtcgcgcgtgaacacaacgccaccagcttcatggtggtgcaggccgccctggcggtgctgctgtctaagatcggcgcgagttccgatgtggcggtgggcttcccgatcgccgggcggcgcgaccccgcgctcgaccggctggtcggcttcttcgtcaacacgctggtgctgcggatcgacctgaccggcgaccccagcttcgccgagctgctggcccgggttcaggcccgcagcctggccgccttcgagcatcaggacgttccgttcgaggtgctggtggagcggctcaacccgacccgcagcctgacgcatcacccgctggtgcaggtaatgctggcctggcagaacttcgccgggcacgacgaccccgcggccgctttggcattgggtgacctcgacgtgacgtcggtgccggtgcacgaccagtccgcccggatggacctggtgttctcgctggccgaacgctggaaccccgacggcgaattcgccggcatcggcgggcgggtggaattccgcaccgacgtgttcgacgcggccaccatcgagacactgatcgaacggctgcggcgggtgctggaggcgatgacgggcgatccgggccggccgctgtccgcggtggatctgctcgacgatgccgagcgcgcctacctggaagaggttggcaacacggcgattttgacccggccggcgagcgggcgggtgtcggtgcccgaactgttcgccacccaggtggcccgggtgccggagacggtggcgctggtctgcgacgacctgtcggtgacctaccggcagctcgacgaggcgtccaaccggctggcgcatcgcctggccgcggccggcgccggcccgggacagactgtggcactgctgttttcgcgatccgccgaggcggtcgccgccatcctcgcggtgctcaagacgggggcggcctacctgcccatcgacccgtcggccccgcagacccgcgtcgagttcatgctcggcgacgccgaaccgatcgccgccgtcaccaccgccgagctggcgcagcggctcgccggccgccccgtgaccgtcgtcgacgtcgacgatccgggcatcgataccctgccggacaccgcgctgccgctgcccgacccggacggcatcgcgtacctgatctacacctccggcaccaccggtgcgcccaaaggcgttgcggtcactcaccacaacgtgacccagctgctcggctcgctggacgccggcctgccgtcgccgggggtgtggtcgcaatgtcactcgctggccttcgacgtgtcggtgtgggagatcttcggcgcgctgctgcgcggcggacgcgtggtggtgatgcccgaggcggtggcccgctcaccgcacgacctgcacgacgccctgatcgcccggcacgtcaccgtgctgacccaaaccccgtccgcgctggcgatgctctccccgcaggggttggagtcggtgtcgctggtgctggccggcgaggcctgcccgcccgaggtggtggaccaatgggcgcccggacgggtgatggtcaacggctacggcccgaccgaaaccagcatgtgcgtgagcatcagcgccccgctgaccgcgggatctggcataccgccgatcgggtcgccggtcgatggggcggcgctgttcgtgctcgacgaatcgctgcggccggtgccgcccggcgtggtgggcgaactctacgtcgccggatccggtgtggccgcagggtatctcgggcggccgtccctgaccgcggcccgcttcgtcgcgtgcccgttcggggcgcccagcgcgcggatgtatcgcaccggggacctggtgcgctggcgtgccgacgggcagctggactacctgggccgggccgacgagcaggtcaaggtccgcggctaccgcatcgagctgggcgagatccaggcggcgctgtcggcgctggacggggtggagcaggccgtcgtcgtcgcccgcgaggacaatcccggggacaagcggctggtcggctacatcaccggcaccgccgacccggccgaggcccgcgcccggctgggcgagcggctgcccgcctacatggtccccgccgccgtgctggggctcgacgcaatcccgttgacccccaacggaaaactcgacgcccgcgccctgcccgcacccgactacgccgccggtgagtaccgcgccccacagacacccaccgaggagatcctggccggcatctacgccgaggtgctgggcgtgcagcgggtcggcgtcgacgactccttcttcgacctgggcggcgacagcatctcggcgatgcgcctgatcgcggccgtcaacgccgccctgaacgccgacctgccggtgcgcaccgtgttcgaggcgcccacggtcgccgcgctagcgccccggatcggggagggcggcagcggactcgagccgttgacggccggtgagcggcccgcggtggtgccgctgtcgttcgcgcagaaccggctgtggttcctggatcaattgcagggcccctcaccggtttacaacatggcggccgcgctgcggctggacggcccgctggacaccgaggcgctgggcgcggcgctgggcgacgtggtggcccggcacgagagcctgcgcaccctgttcgccgcccccgaggggcgaccccagcaggtggtgctgcccgccgagcgggccgacttcgggtgggaggtcgtcgacgccagcggctggtcggcagaccaactggacgaggcgatcggcgccaccgcccgctacaccttcgaccttgcggcccaaatcccgctgcgcgcagagcttttccgtctccacgacgaccggcacgtgttggtggccgtggtgcaccacatcgccgccgacggcatgtccatcaccccgctggtgcgtgatctcggtgcggcctatgcccggcggtgcgccggtcacgccccgggctgggagccgctgccggtgcagtacgtcgactacacgctgtggcagcgcgcgcaattcggtgatctcgacgatcccggcagccgcatcgccgcccagctggcctactggcaggacgcgctggccggcatgcccgagcggctggcgctgcccaccgaccggccctatccgctggtggccgaccagcgcggcgccacggtggaaatcgactggccggccgagctgcagcagcgaatcggcgacatggcccgccggcacaacgccaccagcttcatggtgatccagaccgccctgaccgtgctgctggccaagctcggcgccaatcccgatgtggcggtgggcttcccgatcgcggggcggcgcgacccggcgctggacgacctggtcgggttcttcgtcaacaccctggtgctgcgggtggacgcggccggcgatcccagcttcaccgagctgctggcccgggtccgcacccgcagcctggaggccttcgagcaccaggatgtgccgttcgaggtgctggtggagcggctcaacccgacccgcagcctcacccatcacccgctggtgcaggtgatgctggcctggcagaacttcgccgggcaggacaccggcccggccgcggggctgtccctcggcgatgtcgaaatcacgccgataccggtggacacccacaccgcgcggatggacctgaccttctccgtcggcgaacgctggagcgagagcggcgaaccgggcgggatcggcggcacagtggaattccgcaccgacgtgttcgacccggacagcatccagacgctgatcgggcggctgcggcgggtgctggaggcgatgaccgccgacccgacacaatccgtgtcgtcggtggacctgctcgacgagcgggagcacgcccgcctcgacaccctgggcaaccgggcggcgctgaccggacctccgccccggttcgattccctcccaacacttttcgccgagcaggccgcccgcaccccggacgccgtcgcgctggtctgcggcggccgccggatgacctaccgggagctggacgaggccgccaaccgggtggcgcacctgctgcgcgtgcggggggccggcccgggacacaccgtggcactgctgttttcccggtcggccgaggcgatcgtcgcgatcctgggggtgctcaagtcgggggcggcctacctgccgatcgacccggcgctgccgggcgagcggatcgggttcatgctggccgacgccgcgccgctggtcgcgatcagcaccgccgagctggcgccgcggctgcacggccagcacgacgtgccagtcgtcgacgtgcacgaccccgcgatcgaggccgcgccctcaagcgcgctgccgccgccgggtgcggacgacatcgcctacctgatctacacctcgggcaccaccggcgtgcccaaaggcgttgcggtgagccaccgtaacgtcgcccagttgctgacggccgagtcggggctgccgcgcgagggcgtgtggtcgcagtggcattcgctggccttcgacgtgtcggtgtgggagatcttcggcgcccagctgcacggcgggcggctggtggtgatccccgaatccgtggcccgttcaccggaagacctgcacgcgctgctgataaccgaacaggtcagcgtgctcagccagaccccgtcggcggccggcgccctgtcacccgagggcctcgaggacctcaccctggtggtggccggcgaggcctgcccgagcgagctggtcgaccgctgggcgccggggcggacgatgatcaacgcctacggccccaccgaggccacggtgtacgcggcgatcagcgcgccgctgcggccgggagcgctgggtggtgtgccgatcggctccccggtgccgggcggggcggtgttcgtgctggacgagtggctgcgcccggtgccgccgggtgtggtgggcgagctctatgtcgccggcgccggggtggcctgcggctattggcggcgcggcgggttgaccgcgtcgcggttcgtggcgtgtccgttcggggcgcccggggcgcggatgtatcgcaccggcgacctggtgcgctggcgcggcgacggccaactggactatctgggccgcgtcgacgaacaggtcaagatccgcggctaccgcatcgaactcggcgaggtgcgcgccgccctggcctgggtggacggtgtcgaccaggcggtcgtcgtcgcccgcgaggaccggccccgggacaagcggctggtcggctacatcaccggcaccgccgacccggccgcggtgcgcgccgcgctggccgaacggctgcccgcctacatggtcccggcggccgtcgtcacgctcgacgcaatcccgttgacgcccaacggaaaactcgacacccgcgccctgcccgcacccgaatactccgacgccgaccggtatcgcgcccccgacaacgccgtcgaggagatcctggccggcatctatgcccaggtgctgggcgtgcagcgggtcggggtcgacgactcgttcttcgacctgggcggcgacagcatctcctcgatgcaggtggtgacccgggcccgcgccgccggcctggtgtgcaagacccgcgacatcttcgtcgagcagacggtcgcccggctggcccgggtcgccgaggtggccgacgccgacgccgcggccgacgagggtgtcggcgagatcaccgccaccccgatcatccgctggctgcaggacgtggaaagcgccggcggccaagtcgatcagttcaaccaggccatgctggtgcgggcgcccgccggcgtcaccgaggccgacgtggtcacggtgttgcaggccctgctggaccggcacgccatgctgcggctgcgcgtcgagcgcgacgacgccaccggcgagtggtcgctgcaggtgcccgagcccgggtcggtggacgccggcgcctgcctgcatgcggtggacgagctgtccgacgcggccgtcatcgaggcgcggtcgcggctgaaccccgccgccggcgtgatgctcagcgcggtgtgggcgaacgccaccgggcagctggtggtgatcatccaccacctggccgtcgacggtgtctcatggcgaatcctgctgcaggacttgaacatcgcctgggcgcagcatcacggcgggcagccggtggcgttacccgcggcgggcacctcgttcgcccggtgggcgtcacggctggccgggcacgcccaccacccggacgtggcggaccgggccggcgcctggcaggcggtggcggcgaccccgccggcgctgcccgcggtgcgtcccgacgtggacaccttcgcctccgccggccacctctcgaccgagctggacaccgaaaccaccgccatgctgctcggtgaggtgccggcggcattccacgccggcgtgcaggacatcctgctgatcgcgttcgcgctggcgtgcgcggagttttgcggcacccgcggcacgccgatcggcatcgacgtcgagggccacggccggcgcgaggaactgggccgcgacatcgacctgtcccacaccgtgggctggttcaccaccaaatacccggtcgccctgaccgtcggcgccctggattgggcgcaggtcgtcgccggcgcgccgggactgggcgacatcctcaaggccgccaaggaacaactccgctcgctgcccgacccgctgagctacgggctgctgcgctacctaaatcccggcgtggacctggacggggacgacccgccgatcgggttcaactacctgggccgccagggcggggccaccgagttgaccgccgacatgtggcggcccgagccggacggctggacggccacccgcgcggccgccgccatccccatgccactgatgcacaccctggagctcaacgcggtcaccgtcgactccgcgtccggcccgcggctgcacgccaactggacctgggcgccctcggcgctcgacgatcagcagatcgcccggctgagccggctgtggtcgcaggcgctgaccggcatctgcgcgcacgtgcgcgccggcggcggcgggctgacgccgtccgacatcgcgccggcccggctcacccagcagcagctcgatcagcttgcgcggcaacaccgcatcgccgacgtgctggcgctgaccccggtgcagcagggtctgctgttccacgccaacaccgcgtcaggcagcgacgacctctatgccgggcagctcgacatcgccatcgccggcccgctcgacgccgcgcggctgcgcgacgcggtgcacgccgtggttcaccggcaccccaacctggtggcccggttctgcgaccgctacgaccaggcggtccagatcatcccggccgagccggcaccggcctggcaggtcgtcgagctgcacggcgaggagcagatccgccagctgggcgccgacgagcgcgccgccgtgtgcgccgatctcaccgagtctccggccctccgggtggcgctggtgcgcaccgcgaccgaccggcaccggctgctgctgaccaaccaccacatcgtgctggacggctggtcgatgccgatcctgttgggcgagatcttcgccgcctactacggtcagcggcttccggcgccggcgccctaccgcggcttcgtcgactggctggccgaacgggacctcgacgccgcccgcgcggcgtgggccgaggtgttcgccggcttcgacaccccgaccctggtcgggccccaggacccggtcgagctcgggccgcaacaggtcgagacgttcaccctgcccgccgacctgacccgggccgtcaccgacttggcccggtcctgccacaccaccgtcaacaccgtgctgcaggcggcgttcgcgcgcctgctgtgcgccctcaccgggcaacgcgacgtcgtcttcggcaccacggtgtcgggccggcccgcggaggtgcccggcgccgacacgatggtgggcctgctgatcaacaccgtgccggtgcgggcgaacatcaccgcgaccaccagcaccgtcgacctgctgcaccagctgcaaggcgcctacaaccacacgctcgaccaccagcacctggcgctcaacgagatccaccgaatcaccggccaggacaagcttttcgacacgctgttcgcctacgagaactacccgatcgacgccggcgcgctgtccggcgaccaggagctggccgtcaccgacatcaccagccgcgaatccacccactacccgctgaccgtgcaggcccagcccgggtcgcagctgcgcctccaaatcgaatacgccacacgggttttcgacgacgaggacatcgcgacgctgatcgagcggatgcggcgggtactggtcgccatgaccgccgacccggcacggccgctgtcgtcgatcgacgtgctcgacccggccgaacaccagcggctgcacgactggggcgcccgggcggtcctggaccggcccgccacccggacgtcgatcccggcgctgttcaccgcgcaggcacagcgcagcccgcaagcgccggcggtgaccttcgagggccgcaccacgacctaccgggagctcgacgaggcgtcgaaccggttggcgcacttgctgatcggccgcggggtgggcccggggcaagcggtggcgctgctgttgccgcggtccgccgacgcgatcgtggcgatcctggcggtgctcaagaccggggcggcctacctgccgatcgaccccgcgctgccggcggcccgcatcgagttcatgctcgacgacaccgcgccgaccgccgcggtcaccaccgccgcgctggccggcccgctgcgcggccgcgacctgaccgtcgtcgacatcggcgaccgcgcgctgtcccgccagccgcacaccgcgctgccggcgccggaccccgaccacgtcgcgcacatcatctacacctcgggcaccaccggtgtgcccaaaggcgttgcggtcagccaccacaacgtgacccggctgttcgacgcgcaggccgtcggcgtcgagttgtccgccgatcaggtgtggacgcagttccattcgtacgcgttcgactactcggtgtgggagatctggggcgcgctgctgcacggcggccggctggtggtggtgtccgacgcggtggcccgctcaccgatggacttccacgccctgctggtggccgagaacgtcaccgtgttgagccaaaccccgtcggcggtgcggatgctctccccgcagggcctggaatccgcggcgctggtgatcggcgccgagccctgcccgcccgagctgctggaccgctgggcgcccgggcgcaccatggtcaacgtctacggcccgaccgaagccaccatcttctcgacggccagcacaccgctggcggccggttcgggggcgccgccgatcggctcgccggtgcccgggacggcgctgttggtgctggacggctggctgcgcccggtgccggccggcgtggtcggcgagctgtacgtggccggccgcggcgtgggctacggctacctgcgccgggccgggctgaccgcgtcgcggttcgtggcgtgtccgttcggggcgcccggggcgcggatgtatcgcacgggcgatctggtgcgctggcgcgccgacgggcagctggactacctgggccgcgccgacgagcaggtcaagatccgcggctaccgcatcgaggtcggcgagatccgctccgccctggccgcgctcgacggcgtcgacgaggcggtcgtgatcgcccgcgaggaccggcccggggacaagcggctggtcggctacatcaccggggacgccgacccggccgaggcccgcgcccggctggccgagcggctgccggcctacatggtccccgtcgcggtggtggtgctggacgcgctgccgatgaccgtcaacggcaaactcgacctgcgcgccctgccggcgcccgaatacgccgcggccggctaccggtcgccgaccacccccgccgaggagatcctggccggcatctacgcccacgtgctcggcgtgcagcgggtcggggtcgacgactccttcttcgacctgggcggcgacagcatctcggcgatgcgggtgatcgcggccatcaacagcgccctggacgtcggtgtcccggtgcgggccatcttcgaggcgcccacggtcgcccagctggcgccgcgcatcggtgaggacgccggccggctggacccgctgacggcgggcgaacgtcccgcggtggtgccgctgtcgttcgcgcagagccggctgtggttcctcgaccagctgcaggggccgtccccggtgtacaacatggcggccgcgctgcggatgcacggccggctcgatgaccgggcgctgggcgcggcgctggccgacgtggtggcccggcacgagagcctgcgcacggtgttcgccgcgcccgacggaacgccgcaacaggtggtgctgccggccgagcgcgccgacctcggctggcgggtggtgaacgcccgcgactggtcggcgagccggctgcgcgaggccatcgacgccgcggcccgcgaaaccttcgacctggcaacccaaatcccgttgcgcgcaacacttttccgcatcggcgaggacgaacacgtgctggtggccgtggtgcatcacatcgccgccgacggctggtcgttgcggccgctggtgcgtgacctgggggtggcctacgccagccggtgcgccggtcacgccccgggctgggagccgctgccggtgcaatacgtcgactacacgctgtggcagcgcgcccagttcggcgagctggccgacagtggcagccgcatcgccgcccagctggcctactggcagcaggcgctggccggcatgcccgagcggctggcgctgcccaccgaccggccctacccgcagctcgccgatcagcgcggcgcggccgtcgacgtggactggccggccgatctgcagcagcaggtcgcggggctggcccgcgagtacaactccaccagcttcatggtggtgcaggccgcgctggcggtgctgctggccaagctcagcgccagcaccgacgtcgccgtcggcttcccgatcgccgggcggcgcgacccggccctcgacgacctggtcgggttcttcgtgaacaccctggtactgcgggtcgacctgtccggcgatcccagcttcaccgagctgctggcccgggtccgcacccgcagcctggaggccttcgagcaccaggatgtgccgttcgaggtgctggtggagcggctcaacccgacccgcagcctcacccatcacccgctggtgcaggtgatgctggcctggcagaacttcgccggccaggacgccgaccccggcgccgggctggccctgggcgacgacgtgcgggtcacctcgatgccgctggacacccaggtcgcccgcatggacctgacgttctcgttggccgaacgctggaccgaggacgacgagcccgccgggatcggcggacgggtggaattccgcaccgacgtgttcgacgcggacaccatcgagacgctgatccggcggctgcagcgggtgctggaggcgatgaccgccgacccgacacaatccgtgtcgtcggtggacctgctggacgccggcgagcacgcgcacctcgaccgcatcggcaaccgggccgcgctcagcgggccggcagcccaattccactccatcccaacggttttcgccgagcaggccgcccgcaccccggacgccgtcgcgctggtctacgaagaccgctcatggacctaccgcgagctcgacgaggccgccaaccggttggcgcaccggctggccggcttcggggtgggcgccggcgagcgggtggccctgctgttttccaggtcggccgaggccatcgtcgcgatcctggccgtgctcaaggctggcgccgcctacctgccgatcgacccggcgctgccggacgagcggatcgggttcatgctggccgacgccgcgccgatggtcgcgatcagcaccgccgagctggcaccgcggctgcacggccaccacgtcgtcgtcctcgacgtgcacgacccggccgtcgacactcagccgtcgaccccgctgccgccgccgggtgcggacgacatcgcctacctgatctacacctcgggcaccaccggtgtgcccaaaggcgttgcggtgagccaccgcaacgtgacgcagctgctcaccgccgattccgggctgccgcgcgagggcgtgtggtcgcagtggcattcgctggccttcgacgtgtcggtgtgggagatcttcggcgccctgctgcacggcggccggctggtggtgatccccgactcggtggtgcgctcgccggacgacttccacgccctgctggtcgacgaacaggtcagcgtgctcagccagaccccgtcggccgccggcaccctctcacccgagggcctcgaatcgaccgccctggtggtcgccggcgaggcgtgcccggccgagctggtcgaccggtgggccccgggccggacgatgatcaacgcctacggccccaccgaggccaccgtctacaccgcgatcagcgcgccgctgcagcccgggtcaccggccggggtgccgatcggcttcccggtccccggcaccggcctgttcgtgctcgacgaatcgctgcggccggtgccgccgggcgtggtgggcgagctctatgtcgccggcgccggggtggcctgcggctactggcggcgcggcgggctgaccgcatcgcggttcgtggcgtgtccgttcgggcggccgggggcgcggatgtatcgcacgggcgatctggtgcgctggcgcggcgacgggcagctggactacctgggtcgggccgacgagcaggtcaaggtccgcggctaccgcatcgaactcggcgaggtgcgctcggcgctggccgcgctggacggggtggaccaggccgccgtcgtcgcccgcgaggaccggccgggggacaagcggctggtcggctacatcaccggggacgccgacccggccgaggcccgcgcccggctgggcgagcggctgccggcctacatggtgccggcggccatcgtcgcgctcgacgcaatcccgttgacgcccaacggaaaactcgacacccgcgccctgcccgcacccgaatactccgacgccggccaataccgcgcccccgaaacccccgtcgagcagaccctggccgccatctacgcccaggtgctgggcgtgcagcgggtcggggtcgacgactccttcttcgacctgggcggcgacagcatctcctcgatgcaggtggtgacccgggccaaggccgccggcctggcggtgcgcacccgcgacatcttcaccgagcagaccgtggcccggctggcccgggtggcaggcgtggccgacgaggacggcgggccggccgacgagggcaccggcgaggtgacggccacgccgatcatcgaatggttgcgcggcgtgaacggcccggtcgatgagttcaaccagacgatggtgctgcaggcgcccgccggcgtcaccgaggccgacgtggtggcggtgctgcaggccctgctggaccggcacgccatgctgcggctgcgcgtcgacaccgcggcggacaccggcgagtggtcgctgcaggtgcccgagcccgggtcggtggacgccgcgcagcgggtgcacaccgtggacgagctgtccgacgcggcgatcatcgaggcgcggtcgcggctgaacccggccgccggcgtgatgctcagcgccctgtgggtgggctccaccggccggctggtgctgatcattcatcacctggccgtcgacggggtgtcctggcgggtgctgctggaagacctcaacatcgcctggggccagcatcacaacggccagccgatcgtgctgcccgcgggcggcacgtcattcgcccggtgggcgtcgctgctggccgagcacgcctcctcgccggcggtggtcgagcaggccgacgcctggcggcgggtcgccgcgacgccgcccgcgctcccgccggtgcgccccgaggcggacacctaccagagcgccgagaacctggcggccacgctggacaccgaaaccacccgcacgctgctcggcgaggcgcccgcggcgttccacgccggggtcaacgacatcctgctcatcgcgttcgcgctggcctgggccgagttcctggacagcgcggacgccccgatcggcatcgacgtcgagggccacggccggcacgaggaactggccgccggcgtggacctgtcgcgcaccgtcggctggttcaccaccaaatacccggtcgccctgaccgtcggcgccctggagtgggagcaggtgacctccggcgcgccggggctgggcgcactggtcaaagacgccaaggagcaactgcgcgccctgcccgacccgctgagctacgggctgctgcgctacgtcaacaccgacgtcgacctggacggcgccgacccgccgatcgggttcaactacctgggccggctgggcggcgcggccgccgagctctccgacgagctatggcggatcagccgcgacggctcctcggcgaccgccaccagcaccgcggtgcccatgccgttgatgcacaccgtggacctcaacgccggcaccatggacaccgagcacggcccgcagctacacgccaactggacctgggcgccctcggcgctgaaccgcgaccaggtgacccggttgagccggctgtggttcgacgccctggccggcatctgcgcgcacgtgcgcgccggcggcggcggactgaccccgtccgacatcgcgcccgcgcggctgactccgccgcagatcgaccagctcgagcgccaacaccggatcgccgacgtgctgccgctgaccccgctgcagcagggcctgctgttccacgccaacaccacccgcggcggcgacgaccatctctacgtggtgcagctggatctgacattgaccggcccgctcgaccgggaccggctgcgcgaggccatgcacaccgtgatcagccggcacccgcacctgggggcccgcttctgcgatcagttcgacgagccggttcaggtcatcccggcggatccgacgatggcgtggcggtacctcgagctgcatgccaacggcagcgagtccgacgcccagatccggcggctgtgcgccggcgaacgtgccgcggtctacgacctggccgaggcgcccgcggtccgggccgtgttgatccgcaccgggcccgaccggcaccggctggtgctcaccatccaccacatcgtgctcgacggctggtcggtgccgatcctgctcaacgagacgttcgcctgctacaccgggcagcggctgcccgcgcccgcgccctaccgcaggttcgtgacctggctggccgagcgcgacctcgacgccgcccgcgcggcgtggggcgaggcgctcgccggtttcgacaccccgacactggtcgggccgccgcattcgctggagccgggcgcccgaggcgtccaagcgtttgcggtgtccgcggagatcacccgggcgctcggcgagctggcccgcgcccaccacaccacggtcagcaccgtgctgcaggccgcgtgggcgcagctgctggtgtggcagaccgctcagcacgacgtcgcgttcggcaccaccgtgtcgggccggcccgccgaggtgcccggcgccgactcgatggtgggcctgatgatcaacaccgtcccggtgcgcgcccgcatctccgcggccaccaccacgaccgatctgctggccgagctgcaacgcggtcacgccgacacgctggaccaccagcacctggcattgagcgagatccaccgaatcgccggccaggacaagctgtttgacacgctgttcggctacgagaactacccgctggacacctcggcgctggccgtcgaccacgagctgaccatcagcgacgtcaacctgttcgagcgcaaccactacccgttgaccatgcaggccgccctgtccggcgaccggctggggctgcgggtggaatacgacgccggcatcttcgacgcggccaccatcgaggcgctgagccggcggttggagcgggtgctgatcgcgatgaccgccgacccggcccggccgctgtcgtcggtcgacctgctcgacccgtccgagcgtcagcgcttggacgacatcggtaaccgggcggcactggccgggccgccgcccgcgccgccgtcgatcccggtgttgttcgccgcgcgggcggcgcagaccccggatgcggtggcgatcagctgggatggcctgtcgatgacgtaccgggaactcgaccaggccgccaaccggctggcgcacctgctggccgatcacggtgccggcccgggacagtctgtggcgctgctgttttcgcggtcggcgcacgcgatcgtcgcgatcttggcggtgctcaagaccggggcggcctacctcccgatcgatgcggcggcgccggccgcccgggtcaggttcatgctcgccgactccgcggcggtcgccgcggtcaccaccgcgggtctgcggtcgcggctggacggctgcgacgtggcggccatcgacatcgaggacccccggatccagacccggccgagcacgccgttgccggcgcccgcaccccacgacatcgcctatgtcatctacacctcgggtaccacgggtgtgcccaaaggtgttgcggtcacgcaccgcaacgtgacgcagctgctggagcccctggatgcgggactgccgtcgcccggtgtgtggacgcaaagccactcgtatgccttcgatgtgtcggtgtgggagatcttcggcgcgctgctgcggggcggacgcctggtggtggtgcccgaggcggtgacccgctccccgaaggactttcacgccttactggtcgacgaagaggtcaccgtgctgacccagacgccgtcggcggtggcgatgctctcgcccgaggggctggagtcggtgtcgttggtggtggtgggggaggcctgcccggccgaggtggtggaccgctgggcgcccgggcgggtgatggtcaacgcctacggcccgacggagaccaccatgtgcgtggccatcagtgcgccgctggccccgggtatggggtcaccgccgatcggtgtgccggtcgatggtgcggggttgtttgtgctcgacgcgtggttgcggccggtggcccccggcgtggtcggcgagttgtatgttgccggcgccggggtggccgccgggtatgtcggacggtccgggctgaccgcctcgcggttcgtggcgtgccccttcggcgagcccggaacccgcatgtatcgcaccggggacctggtgtgttggcgtcccgatgggcagttggactatcggggtcgcgccgacgagcaggtcaaggttcgcgggtatcggatcgaactcggcgaggtgcaggcggcgctggccgggctggacgatgtcgagcaggcggtggtgatcgcccgcgaggaccggcccggcggcaagcggctggtcggctacatcaccggtaccgccgacccggccgaggcgcgcaccgcgctggcccaacggctgccggtgtacatggtgccgaccgcggtggtggcgctggacgccatcccgttgacgcccaacggaaaaatcgacacccgcgccctacccacacccgaatacacgggcagccgctaccgggccccgtccaacgccgtcgaggagaccgtggccggcatctacgcccatgtgctcggcgtggagcgggtcggcgccgacgactccttcttcgaactcggcggcgacagcatctcggcgatgcgggtgatcacggcgatcaacgccagcctgggcgtcgagctcgcggtccgcaccttgttcgaggcgcccaccgtcgcaagcctgagccggcgggcgcagacggataccgctcgcggcggacaagccgaagagatcgtgcccgtccagaccctgaaagaggggaccggcgcaccgctgttctgcatccatgccgccggcgggctcagttggtcatatcaggtgctcggcaatcatctggattgcccgatcatcggaattcaacaagccgaaccgcagcacgccgcgccgcggtcgattcgcgagatggcgcaaagctacgccgacagaatccaggaaacctatcccgacggcccctaccatctcgtcggctggtcgttcggcggcgtcgtcgcccacgaactcgcgatcgagctgcagcggcgcgggtgcgcaatcgcacgccttgtcctcctcgacgctcaacccggtctcgacggcagcgtcaccgcacccgacgctgccctggccgagcagcacatgatggaagaagccctgcggtcgcacctggccgccgccgatcacgaccaaccgcacgcgcatcggcagttcaaccaactcgtccgtgaagccggagccgaaggcatgtctcgacacaagcgccttttcgatgtgcttttcgggaatgcccgaaacaatatcgagcgcagcaagattcacgagcccggtgttttcctcggcgatgtgaccatcttctccgcggtgcgtgatcacgaggatcgcagtgcgttcctcgccgagaattggcgtccgtacgttgccggcgacatcgtcatccacgagatcgactgcacgcatgacgagatcctcaatgccgatgtggtggattcgtacgggcagcgcctcgggcaactgctgggcgcgcaacgtcgccgggaactgaccccaccgcaacgattcggggcggaccccggcgacgacgagccgcccgtccgg

SEQ ID NO: 25448 - DNA, 885 bp, Mycobacterium avium
atggctggccggacgggagtgatcgtcacgctggacggcgaggtgcatgcgccggacgcgccgctgctgcacgccgacgacctggcggcggtgcgcggcgacggtgtcttcgagacgctgttggtgcgcgacggccgggcctgcctgatcgaatcgcacctgcagcggctgacccagtcggccgcgctgaccgagctgccggagccggatctgccgcgctggcggagcgcgatcgaggcggccacccggcggtggtgtgcgggcggcgccgacgaaggcgcgatgcggttgatctacagccgcggtcgggagggcggttcggtgccgacggcctacgtcatggtcaccgccgtccccgaccgcgtcaccgcggtccggcgcgacgggttggccgcgatcaccctcgatcgcgggctgcccgccaccggtgtcgacgcaatgccgtggctgctggccggcgccaagacgctgtcgtacgcgatcaacatggcggccctccgtcacgccgcccgccacgacgccggcgacgtcgtcttcgtcagcaccgacggctacgtcctggaaggcccgcgctcgaccgtggtgatcgccaccgactccgaggcgcccggcggcggcccgtgcctgctgacgccgccgccgtggtatccgatcctgcgcggcaccacccagcaggcgctgttcgaggtggcccgggccaagggctacgactgcgactaccgggcgctgcgggtcgcggatttgtttgccgcccaaggtgtttggctgatctccagcatgacgttggccgcaagggtgcacaccctcgacgggcgcccgctgccgcgcgcgccgatggcggccgagttcgccgagttggtcgacgccgccatcgtcagcgatcgc

SEQ ID NO: 25449 - DNA, 1611 bp, Mycobacterium avium
aaggtcatggcgcagctggcgatggtgatgaacctcgacaagtgcatcggctgccacacctgctcggtgacctgcaagcaggcctggaccaaccggtcgggcaccgaatacgtgtggttcaacaacgtcgaaacccgtccgggacaaggctatccgcgcacctacgaggaccaggagcggtggcgtggcggctggatccgcgacaagcggggccggctgcgattgcgtgacggcggccgtttccaaaagctgctgcgcatcttcgccaatcccaagctgccggtgatcggcgactactacgagccgtggacctacgagtacgagaacctgaccaccgcacccgccggtgacaccttcccaacggccgcgccgaaaagcctgatcagcggcgagccgatgaaggtgtcctggggaccgaactgggacgacaacctggccgggtcgccggagatcctggccgaggacccgatcctgaagaaggtcagcgaagaggtgaaactctcgctcgagcagaccttcatgttctacctgccccggatctgcgagcactgcctcaacccgtcctgtgtggcctcgtgcccgtcgggcgcgatgtacaagcgcagcgaggacggcatcgtgctggtcgatcaggaccgctgccgcggctggcggatgtgtgtgtccggatgtccttacaagaaggtgtatttcaaccacaagacgggcaaggccgagaagtgcacgctgtgctatccgcggatggaggtggggctgcccaccatctgctcggagacctgcgtgggccggctgcgctatctgggtgtggtgctctacgacatggaccgggtactcgaggcggcgtcggtggaaaacgacaccgacctctaccgggcgcagtgcgatatcctgttggaccccaacgacactgacgtcatcgcgggcgcgcgggcgcagggcattcccgacgagtggatcgaggccgcgcagcgttccccggtgtacgcgctgatccacacctatcgggtggcgctgccgctgcacccggaataccggaccatgccgatggtgtggtacatcccgccgctgtcgccggtggtcgacgcggtcagccgcgacggccacgacggcgaggacctgggcaacctgttcggcgcgctggacgcgctgcgcatcccgatgcaatacctggccgagctgttcaccgccggtgacaccgcggtggtcgagggcgtgttgcggcggctggcggcgatgcgctcctacatgcgcgacatcaacctcggccgcgaaacccagccgcacatcccgcattcggtgggcatgaccgaggaacagatctacgagatgtaccggttgctggccatcgcgaaatacgaagagcgctatgtcatcccgacggcgttcgcgccgcaggcccgcgacctcgagcagatgggctgctcgttgaccggcgacggcgggccgggcatgtacgagtcggagccggtggccgtggagaccttccacgccctcaagcagcgcggcggccccaccgaggcagagcccggcagcacccggccgcgggtgaacctgctgaactgggacggcggccaggtgcccgccggcatgttccccgaggcgcagcggcga

SEQ ID NO: 25450 - DNA, 729 bp, Mycobacterium avium
gtgtttagcaacgtcctgttctgggacatctcgccctacgtcacgctgtcggtgctgatcgtgggcacctggtggcgctaccgctacgacaagttcggctggacgtcgcggtcgtcgcaaatctacgagtcgcggctgctgagcatcgccagcccgatcttccacttcggcatcctggccgtgttcgccggacacgtgatggggttgttcatcccgccgcgggtgacgcacatgctgaagatgagcgaccacctctaccacatgcaggccgtcatcgccgggtcggccgccggcttcgccaccctggccggcgtcgggctgctgatctaccgccgcttcacccgcccggcggtgtcggcggccaccacccgcagcgacaaggtgatgtacgtggtgctggtgctggccatcgtggtcggcctgtactgcgacctgatcggcaccggcccgcacggcggggagttccactaccgctacaccgtggggttgtggttccgccgcatctggatcctgcagccgcacggcgaggtgatggtcaacgcgccgctggactaccagttgcacgccctgatcggcatggtgctgttcacgctgtggccgttcactcggctggtgcacgtgttcagcgccccggtcgtctacctgttccggccctacatcgtctaccgcagccgcgaggtggcggccaaggaccaattggtgggcacggcgccgcgccgccgcggctgg

SEQ ID NO: 25451 - DNA, 906 bp, Mycobacterium avium
gtggctgagcagttgctgatcggcgacgtcacggccctgaccggaatcgcctcgggccgtattcgccactacgagaagatcgggctgctgcacgccgaccacctgtccaacggctaccgcgtcttcgacgtggaacaggtgctcgacctgttgcgcatcgacctgatgcgcagtctcggcgtcggcatcaacgacattcagcgattgctgcacggcgggcacagcacgctggcggatctgctcgacgagcaccgcgcactgctgatccagcagcgcgaccggttggaccaactgatccgcgccctggacgaatcctgcgcccagtcaagggcggccgccgacggcaccgacgtcagcgagcacctgctgcgccagctggcgaccacgcatcgcgacagcatcggggtgatcgggcggctcagcgccccgctgccggcgccggtcgccgcgatgtatgccgacctgttcgacgagtgggacctgccggtccccgccctgttcgggcagatgaggctgccgagcgcggccagcaccctgctggcccaactggccgagaccccggggcgccaggtgctgttcgaccggctgcgccggctggccgccgacgtcatcgcgctcggcgaaagcgtatcggcggcaaccgaactcgcgcacaattggatcgagcagcagctggccgacccgctgcccgacgacgtggtcacggtgctgcgaggcgtgcaaccgctgttggggcaggacccggtgatcgtgcaggggtttcgggcctgggcgggctcgatcagcccggcggccgcccggttcatcgaggagatcgcgcggcagaccgcgcgccggggcctggcggcggtgagcgtcatcgtgctgcccgcggcggaccgggcccaaaccgccgatgcgacgccg

SEQ ID NO: 25452 - DNA, 3480 bp, Mycobacterium avium
gtgtgccgggcatgcaccgggctgggctccgttgccggtgcagagtacgccgactacaccctgtggcagcgcgcgcagctgggcgacgtcaccgatagcgacagcccgatcgctgcgcagctggcgtattgggagcagcagttggccgggttgcccgagcggctggcgttgcccaccgaccgaccctatccgccgctggccgactaccgcggcgccagcgtgctcgtcgactggccggccgagctgcagcagcgggtacgcacggtggcccgcgagcacaacgccaccagcttcatggtgatccaggccgccctggccgtcctgctggccaaactcagcgccggcaatgacgtcgcgatcggattcgccatcgccgggcgcgacgatcccgccctcgatcagctggtcgggttcttcgtcaacaccctggtgctgcgagtcgacctggccggcgatcccagcttcaccgaatcgctggctcaggtgcgcgcgcgcagcctggccgcctacgaccaccaagacgtgcccttcgaggtactggtggaacggctcaaccccacccgcagcctggcccatcacccgctggtacaggtcgtgctggcctggcagaacttcgcccgagaagacggcgtccccgccgggttggcgttgggcgatctgcaggtcacaccgctggcagcggacacccaggtcgcccgcatggacctgacattcacgttgggcgaacgctggacttccgccggtgagcccgccgggatcggcggttcggtggagtttcgcaccgacgtgttcgacccggaaagcatccagacgctgatccagcggttggagcgggtgctggcggcgatgaccgccgatcccggtcagcggttgtcgtcggtggacctgatggataccgatgagcacatctacctcgacgagatcggaaaccgggaggcgttgacgcaaccagcggcgcgggtgtccatcccggcgatgttcgccgatcaggtcatccgcgccccgcaggccgtggcgacccgctgcgccggtcactcgatgacctaccggcagctcgacgaggcgtcgaaccggttggcgcacttgttgatcgaggcgggcgccggcccgggcgaatccgtggcgctgctgttcaaccgtcgcgcggaggccgtcgtcgctgtactggcggtgctcaaaaccggggcggcctatctgccgatcgacccggcccacccgaccgcgcgcatcgagttcatggttgccgatgccgcaccgatcgccgcgatcaccaccactgagctcgccgagcgactggacggatgcggcctcccgatcatcgacatcgcggatccccgtattgacagctacccgcacacggcgctgccggtgccggatccggacgatatcgcctacctgatctacacctccggcaccaccggtgtccccaaaggcgttgccatcacccacaacaacgtaaccgagctgctcggttcccttgccccggatttggcgcggcccgggcaggtgtggtcgcagtggcactcctacagcttcgacatctcgggctgggagatctacggcgcgctgctgcacggtgggcggctggtggtggtgcccgaggaggtggcggcatccccggacgacttgcacgccttgctgattgacgaaaaggtcaccgtcctctgccaaaccccctcggcagcggggacgctgtcgccgcaggggttggagtcggtgaccctgctggtcggcggcgaggcctgcccgtccgaactggtcgagaggtgggggcccggacgcgtgatgatcaatgaatacggccccaccgagacgacgatgtgggtggccttgagtgcgccgttaacgacggggtcgaccgggtcggacgccgtgccgatcggctcacccgtgcccggggcggccttcttcgtgctggatcagtggttgcgcccggtgccggccggcgtggtcggcgagttgtatgtggccggtaccggcgtcggggtcggatacgtgcgccgggcggggctgaccgcatctcgttttgtggcctgtcccttcggcgagtcggggacgcggatgtatcgcaccggggatttggtgcggtggggcgccgatgggcagctgcggtatctgggtcgggccgatgagcaggtcaagatccgcgggtaccgcatcgaactgggcgaaatccgttcggcgctagccggtttggacggtatcaagcaggcggcggtgatcgcccgcgaggaccgccccggcgacaaacgcctggtgggctatgtcaccgaatcagtcaccggagccgctgacccggccgatattcgggcccggctgggtcagcggctgccggcctacatggtgccggcggcggtggtggtgctcgacgcgttgccgttgacggtcaacggcaaactgaatgcccgggccctgccggcgcccgagtacatcgagcgcgaaaagtactgcgccccagctactcccaccgaggaggcagtggccgggatctacgcccaggtgctcgggctcgagcgggtcggggtcgacgactccttcttcgacctgggcggggattcgctctcggcgatgcgggtcatcgccgccatcaacaaaaccttggacgccggcctcgcggtccgcacgttgttccacgcaccgtccgtcagagggttgtgccggcagctgggccagggcgccaacgaggtggaaaaccaggtggaaatcgtccccgtcgagttcctcaaggagggcaccggcgctccgctgttctgcattcatcccgcgagcgggctgagctggccgtatcacgctctcggtaattacctgggctgccccatcatcgggattcagcaatccctgcagcgaggcgaggccgaaccggcgtcaatccgcgacatggcgaaaaactatgccgaccggatccagggcgttgatcccaccgggccctacaacctcctcggctggtccttcggcggcgtcgtcgcccatgagatcgccatcgagttgcagcgacgcggctgtccggtccggcatctcatcctgctcgacgccctactggtcatccccagcagcgacgccctgaacagcgatgtcttagtcgagcaggcactgaacgaagtcctgcggttctgtggcatacaggttcccgagggcgatgagccgcttacctacgagcgggccgaaaaactgcttcgcgaacgagggatcgaagagctaccgcgctacaagccgttgctcgattcgattgtccgcaacgacaatacgaacctcgcgttggccagagcgcacgaaccgggcgtcttcgatggtgatgtgaagttgttcgccgccgcgcgggaggagggcgaccagaactcgtcgtcgctgcgaagctggcgaccgtatgtcaccggcgaaatcagcagctacccggtcgactgtacgcatcagcaaatgatgagtactgagtcgctgatccagtacggccagcaactcaaggttgtcctcgagggtggcggt

SEQ ID NO: 25453 - DNA, 2427 bp, Mycobacterium avium
atgtcagaccgccccccggccgcgctcacggttttgaagctcgcggggttctgtttgttggccagtgtggtggccaccgcgctgctgtttcccgtcgccggcggaataggactggtgtccaaccgcgcctcggaagtggtcgccaacggctcggcgcagctgctcgagggcgaggtgccggcggtgtcgacgatggtcgacgccaagggcaacaccatcgcctggctgtattcgcagcgccgcttcgaggtgcccagcgacaagatcgccaacacgatgaagctggcgatcgtgtccatcgaggacaagcggttcgccgaccacaacggggtggactggaaaggcaccctgaccgggttggccggctacgcccgcggcgacgtcgacacccgcggcggctccaccatcgagcagcagtacatcaagaactaccagctgctggtgaccgcgaagaccgacgccgagaagcgggcggcggtggagaccaccccggcccgcaagctgcgcgagatccggatggcgctgacgctggacaagaccttcaccaagcccgagatcctgacccggtacctgaacctggtgtcgttcggcaacaactcgttcggggtgcaggacgccgcccagacctacttcggcatcaacgcctccgacctgaactggcagcaggcggcgctgctggcaggcatggtgcagtcgaccagcgcgctcaacccctacaccaaccccgaaggcgcgctggcccgccgaaacctggtgctggacaccatgatcgagaacatcccgcaggaggccgacgcgctgcgcgccgccaaggccgcgccgctgggcatcctgccgcagcccaacgagctgccccgcggctgcatcgcggccggtgaccgggcgtacttctgcgactacgtgcaggagtacctctcgcgcgccggaatcagcaaggagcaggtggcccggggcggctatctgatcaagacgacgctggaccccgacgtgcagatcccggtcaaggcggccatcgacaagttcgccagcccgacgctgcccggcatctcgagcgtgatgagcgtgatccagcccggcaagacgtcgcacaaggtgatggcgatggccagcaaccgcacctacggcctggacgtcgacgccgggcagaccatgcgcccgcagccgttctcgctggtcggcgacggcgcgggatcggtgttcaagatcttcaccacggccgcggcgctggacatgggcatgggcatcaacgccacgctggaggtgccgggccggttccaggccaagggcatggggagcggcggcgccaagggctgcccgaaggacacctggtgcgtggtcaacgccggcaactacaagggctcgatgaatgtcaccgaggcgctggccacctcgcccaacaccgcgttcgcgaaactgatccagcaggtcggggtgacgcgcacggtggacatggcgatcaagctggggttgcgctcctacgccgaccccggcaccgcccgcgactacaacccggacagcaacgagagcctggccgacttcgtcaaacgccagaacatcggctcgttcacgctgggcccgatcgaggtgaacgcgctggagctgtccaacgtcgcggccaccctggcctccggcggcacctggtgcccgcccaatccgatcgacaagctgatcgaccgcaagggcaacgaggtggcggtgaccaccgagacctgcgatcaggtggtgcccgagggcctggccaacaccatggccaacgcgatgagcaaggacgcggtgggcggcggcacggcggccggttcggccggcgcggcgggctgggacctgcccatgtccggcaagacgggcaccaccgaagcccaccggtcgtcgggcttcgtcggcttcaccaaccactacgcggcggccaactacatctacgacgactcgccgaatccgacggacctgtgttcggccccgctgcgccactgcggcgagggcgacctgtacggcggtaacgagccggcccgcacctggttcaccgcgatgaagccgatcgccaccaatttcggtccggtgcagttgccgcccaccgacccccgctacgtggacggcgcgccggggtcgcgggtgcccagcgtggcgggcctggacatcgacgcggcgcggcagcgcatcaaggaggcgggtttccaggtcgccgaccagaacaacttcgtcaacagcagcgccaagcagggcgaggtggtcggcacgacaccgagcggcgcgacgattcccgggtcgatcatcaccatccaggtcagcaacggcatcccgccggccccgccgccaccgccggagggcgcgcccccgccggtcggttcgcaggtggtcgagattccggggctgccgccgatcaccattccgctgctggcgccaccgccgccggcgcccgggcagccgccgccg

SEQ ID NO: 25454 - DNA, 687 bp, Mycobacterium avium
gtgacaaccacctaccccgagcccgctgtgttgcccgcccacaatgtctatcagccgcaagaggattcccggttgctggtggacgtgatgcacggcaccggtctgatcccgggacggcgcgtgctggacctgtgcaccggcagcgggttcgtcgcgatcgccgcggcggagatgggctgcgccagcgtcacggcgttcgacaaatgcccgcacgccgtgcggtgcgcccgggagaacgccgcgctggccggggtggacgtcgacgtccgggaggggtcgtggctcgccgcggtggattgcgcgccgttcgacgtcgtggtgtccaatccgccctacgtgcccaccccgcccggcgccgtgctggacgagctcggcccggtgaccgggccgtcgtgggcgtggaacgccggccgggacggccggctggtcctggatccgttgtgcgagtcggcgccgaagctgttgcgcgacggcggatcgctgctgctggtgcactcggcgctggccggtgtgcagcagtcgctggattccctgaagtgggccggaatggatgcgaaagtcattgcctccaaatggatcccgttcggtccggtgatgttgtctcgggcgcactggctggaggacgtcggcctgatcccgcgcgggcgccgcgaagaggagctgatcgtgatccgggcggaaaagcga

SEQ ID NO: 25455 - DNA, 630 bp, Mycobacterium avium
atgagcggctgcctgggcagcacgctgcaatggccgcgcccgccgcagagcacggccgaccgcaacccgatccgctacctcaatgacggcgtcagccagacacaactggtccgcgaggacggcaccgtgccgcggctggccttcccgacgccgagcggccgcgcggtgttcttcgcccgtccgcacctgcagcccgaggaaatgcccgacgacgactacccgttcctgttgaacaccgggcggctgccgcaccagtggcacaccatgaccaagaccggcaaggtcgccaaactcaacaagctcaaccccggcccgttcgtcgagatccatcccgacgacgccgcccggctgggcatcggcgaacacgaccgcgtcgaaatcgcttcccgccgcggccgggccgtgctgcccgccgtcgtcagcgaccgggtgcggcccggcaactgcttcgccccgttccactggaacgacgccttcggcgagtatctgtcgatcaacgcggtcaccaacgacgcggtcgacccgatctcgaaccagcccgaattcaaggcgtgcgccgtcaccctgacggatgcccttcggcttcatgctccgattcggccatcggaaccggcccttcggcgggccacg

SEQ ID NO: 25456 - DNA, 1608 bp, Mycobacterium avium
atgtccagcccgaaagctgtcgcggccgggttcgatcacagtgatctgcgcgaccgatggtaccgcgagggctggtactcccggcgcaccctcgtcgacgcgctggaacagggttcggccgaacatggtgataccccggtggttttcgtggtcgacggcgtcgaaacgaccagcacgccggcggagatcttccaacggtcgcgcgatgtcgctgccggtttgcaggcgttgggcgtcggccccggcgacgcagtggcggtgcagctgaccaaccggcttgagtgcgccgtcgcctacgaggcggtgctgatgtgtggggcgacgctggtgccgatcatccacatctacggtcccagcgaggtggcgttcatcctcgtcgagtcgggggcgaaggctctgatcatgccggcccggttccgctccatctcctatgtcgaccgcatcgccgagttctcggccattcccaccttgcagcacgtggtggtcgtggacgccccacctggagacggttatctcagctggccggatctgaccgcgggccgataccgtcgcacgtcaccgtcggcggatgacgtggcggtgttgatctatacctcaggcaccacatcggttccgaaaggtgttcagcaaagccataattcgatgctcgcagagcagcagacgctgcctgacctggtaacgggcgacgacgtggtccagctggtcaccttcccgccgggccacatcgcgggagtgggatcgctgctgcggccgctgatctcgggcgcccgctcggtgttcgtggacggctgggacccaccgaccgctgtggagctgattcaccggcatcgaataacagccaccgcgggaacgccgttccatctggaggggctgctcgatctcggtgacaccggccagaagttgaccacgctgcgggaattcctcgtcggggcggcgaccgtcaccgaggagctgggcaggcgcgcggccgcggcgggaatcaacacctatcgctgctacggctcaaccgagcaccccacgatcacctcggcccggtccaccgacgccgcgccggcgcgaatgggcaccgacggtctcccgatgcgcggcgtcacggtgcgcatcatcggccccgacggcgacgagcagccggtgggcgtggacggcgaggtcgtcacgcagggaccggaccaattcatcggctatcgagacccagtcctggacgccgatgcgttcaccgccgacggctggttccgcacaggcgatctcgggcatctggacactgacggcaggttgaccatcaccgaccgcatcaaggacgtcatcatccgcgccggcgaaaccatttcatccggacaggtcgaagatgtcctcaacgcgcatcccgcggtcgccgagggcgccgtggtggccgcgccacatcaccgctacggtgacgtggtcgccgcggttgtcgccctcaagccgggcgccgcattagatctcgacgagctgcgccggcatttcgctgcatccgggctcgccagacagaagactcccgagaggctggcgttcgtcgaatcgctgcctcgcaccccgatgggcaagatccggaaagccgaacttcgcaaggagcactttgaaaatccg

SEQ ID NO: 25457 - DNA, 1617 bp, Mycobacterium avium
atgcctcgcaccgcacacacgtcggtggtgctcctcgacggctccgcacagttgccacgcgagaccctcggcaacaagggctacggcctcaacattatgcggcgcaatggattgccggtgccacccgccttctgcatcaccaccgagatttgtgcgcagtggctcgacgacccgggcaccaccatcgacggcttgagcgagacgttgactcagatgatccactgcctcgaagaacagacgtcacgcacgttcgggcgcggtccacggccgctgctggtgagtgtccgcagcggtgccgcgttgtccatgcccggcatgatggacaccgtcctcaacctcggcatgaacgacaccgtcgagcaagccttggcccagacgttctccgcacgattcgccatggacacccgcgccagatttgctgacatgtaccgacggatcgtgctcgacggcgacgcgtccgccgcagtgcccgacgacccgttcctgcagctgctcggtgccatcgaagccgtgttcgcctcgtggaactcgccgcgcgccgtcgcctaccgcaagcatcacggccgcgacgatctgggtggcacggcggtcgtggtgcaggccatggtgttcggcaacatggagtccaactcgggaaccggtgtcttgttctcccgcaacccgattaccggtgccgacgagcccttcggcgaatggctgtcaagtggacagggcgaagacgtcgtatcgggtacattcgacgcacggccgatcagcgttctggccgaagaacagcctcacgtctatgacgagctggtcgccgcggccaggacactggaacggctcggctccgacgttcaggacatcgagtacacggtcgaagagggcaagctgtggctgttacagacgcgcgcggccaaacggtcggctcaggcggcggtccggctggcgctgaaacttcgcgacgaaggcctcatcgacgacatggagacgctgcgccgggtgactcccgcccacatcgagaccctgctgatgccctcgctgcagcccgaaacccggctggcagcaccactgttggccaaggggttgcccgcgtgcccgggggtggtgtcgggacgcgccgtcaccgacgtctacgatgcgatcgacgcggccgaggacgggcaggacgtcatcctggtacggcgatcaaccagcccagatgacgtgcagggcatgatcgccgcgctcggcatcgtgaccgggatcggtggcaccacttcgcatgccgcggtggtgtcgcgggagctgggccgcccgtccgtcgtcggttgcggcgccgacgtcacggatgctcttgcgggcaagctgatcaccgtcgacgggaccgagggcgaggtgcgggagggcattctcgagctgaccgcctggtccgaggacgactcgtccgacctggccgagttgacccggatcgcgttggccgtcagccctctccgggcacataccactggcgattatccgccgctggacgccggttccgacgacgcggtacgtgccgcgttggccgccgggcacaccgatgtgctgtcctccaccccgttgatcaccatgctgaccgcggtgcggctcgcgggcacagacacccgagagttgagtcga

SEQ ID NO: 25458 - DNA, 2247 bp, Mycobacterium avium
gtgctcgacgcggtgctggccgacctgtacgggccgcgcagcctgctcaccgagggcgtgctgcccccggagctgctgttcggccatcccggctacctgcgcgccgccaacggcatcgaaatcccgggccgtcaccagcttttcatgcacgcctgcgatgtcagccggcgcccggacggcggcttcgccgtcaacgccgaccgcacccaggcgccctcgggcgccggctacgcgctggccgatcggcgggtggtggcgcacgcgattcccgacctgtacgagcggatcgcgccgcggcccaccacaccgttcgcgcaggctctgcggctggcgctgatcgacgcggcgcccgacgtcgcccaggacccggtggtagtggtgctgtcgccgggcatctactccgagacggcgttcgaccaggcctatctggccaccctgctgggtttcccgctggtggagagcgccgacctggtggtgcgcgacggcatggtgtggatgcgttcgctgggcaccctgaaacgggtcgacgtggtgctgcgccgggtcgacgccgagtattgcgatccgctggacctgcgcgccgactcccggctcggggtggccggcctggtggaggcgcagcatcgcgggacggtgaccgtcgtcaacaccctgggcagcggaattctggaaaaccctgggctgcaacgttttctgccggcgatggcgcggcacctgctgtccgaaacgctgctactgcccagcgcgccggtctactggggcggcatcgacaccgaacgttcacacctgctggccaatctggcgtcgctgctggtgaagtccacggtgggcgggaaaacgcttgtcgggccggcgctttcgtcgcggcagctcgcccagctggcggcccggatcgagacggcgccgtggcagtggatcggccaggagctgccgcagttctcctcggcgccgaccgaccacgccggcgtgttgtcgtcggccggggtcggcatccggctgttcaccgtggcccagcgcggcggctacgcgccgatgatcggcggcatcggctacctgctggccgcaggaccggccgcgtacacgttgaaaagcgttgcggccaaggatgtctgggtgcgtccgaccgagcgggcccgggccgaggcggtcggcgtgcccgccgtggagccgccggcgaagacggccgcgggcacctgggccgtcagctttccgcgggtgctgtccgagctgttctggatcgggcggtacggcgagcgcgcggagagcatggcccggctgctcatcgtcacccgcgaccgcttccacgtctaccgccatcaccagcacagcgaggaaagcgagtgcgtgccggtgctgatggccgcgctgggccgcatcacgggcaccgacaccggcaccggcgccgcggccggtggcgatgcggccgagacgatcgccgtcgcgccctccacgctgtggtcgctgaccgtcgacccgcagcggcccggctcgctggtgcagtcggtggaggggctggcgctggccgcgcgggcggtgcgcgaccagatgtccaacgacacctggatggtgctggcgggggtggagcgggcgctggcgctggacagcgagccgccggactcgctggccgaggccgacgcgctgctcaccgcggcgcagacccagacgctggccgggatgctgaccctgtccggggtggccggcgagtcgatggtgcgcgacgtcggctggaccatgatggacatcggcaagcggatcgaacgcggcctgtggctgacggcgctgctgcgggccacgctcaccgtggtgcgcggcgcggccgccgaacagaccatcctcgagtcgacgctggtggcctgcgagtcctcggtcagctaccggcgccgcacggcgggcaaggtgagcgtggccgcgatggccgagctgatgctgttcgacgcgcagaacccgcggtcgctgctctaccaggtggagcggctgcgcgccgacctcaaggacctgcccggtgcatccgggtcgtcgcgcccggaacggctggtcgacgagatcggcacccggctgcgccggtcgcatcccgcggagctggaacgcatcagcgacgacgggcggcgcaccgagctcgccgagctgctcgattcggtgcacgccgagctgcgcagcctggccgaggtgctcaccaccacccagctggcgctgcccggcggcatgcagccgctgtggggtcccgacgtgcgccgcgtgatgccggcc

SEQ ID NO: 25459 - DNA, 657 bp, Mycobacterium avium
gtgaccggtccggctttcagtccgcaggagcgacgggcggtctatcgcgtcatctccgaacggcgcgacatgcgccgcttcgttgcgggcgcggtggtggacgagcaggtgctggcgcggctgctggcggccgcgcacgccgcgcccagcgtggggctgatgcagccgtggcgcttcatccggatcaccgacgccgcgctgcgccggcgcattcacgccctcgtcgagcaggaacggccgcgcaccgccgccgccctgggcgagcgggcgcaggagttcctggcgctcaaggtggagggcatcctggagtgcgccgagctgctcgtggtggccctgggcgacgaccgcgacaagcacgtcttcggccggcggacgttgccgcagatggacctggcgtcggtgtcgtgcgccatccagaatctgtggctggcggcccgggccgaaggcctgggcatgggctgggtgtcgctgttcgagccgcggccgctggcggagctgctcgggttgccggacggcgccgaaccggtggccatcctgtgcctggggccggtgcccgaattccccgatcgcccggcgctggagctggacggctgggccacgccgcggccgctggcggagttcgtctgcgaaaaccggtgggcgcaaccgcagctgccc

SEQ ID NO: 25460 - DNA, 1749 bp, Mycobacterium avium
gtgtacctcaagagtctgacgctgaagggcttcaagtcctttgcctcgccgacgactctgcgtttcgagccgggcatcaccgcggtcgtcgggcccaacggctcgggcaagtccaacgtcgtcgacgcgctggcctgggtgatgggcgagcagggggccaagacgctgcgcggcggcaagatggaagacgtcatcttcgccgggaccagctcgcgcgcgccgctgggccgcgccgaggtcaccgtcaccatcgacaactccgacaacgcgttgcccatcgagtactccgaggtgtcgatcacccggcggatgttccgcgacggcgccagcgagtacgaaatcaacggcagcagttgccgtttgatggacgtgcaggagctgctcagcgactccgggatcggccgggagatgcacgtcatcgtcgggcagggcaagctcgacgagatcctgcagtcgcggcccgaggaccgtcgcgcgttcatcgaggaagccgcgggggtgctcaagcaccgcaagcgcaaggaaaaggcgctgcgcaaactcgacgcgatgtcggccaacctggcccggctcaccgacctgaccaccgagctgcgccgccagctcaaaccgctgggccgtcaggccgaggtggcccgtcgcgcgcagaccatccaggccgatctgcgcgacgcccggctgcggctggccgccgacgacctggtcaaccggcggggcgagcgcgaggccatcttcgaggccgaggccgccatgcgccgcgagcacgacgaggcctcggcgcggctggcggtggcctccgaggagctcgccgcgcacgagaaggcgctcggcgagctgtccggccgggccgagtcggtccagcagacctggttcgcgctgtccgccctggccgaacgggtggcggcgacggtccgcatcgccagcgagcgggcccagcacctcgacctggggccggtgactgccggcgacaccgaccccgacgcgctggacgccgaggccgagcgggtcgcggccgccgagcagcagctgctggccgagctggccgcggcgcgcagccggctggaaaccgcgcgcgccgaactcgccgagcgggaacgcgaagccgccgaggccgatcgggcgcacatggcggcggtgcgggccgaggccgaccggcgcgagggactggcccggctggccggtcaggtcgagacgatgcgcgcccgcgtcgagtcgatcgacgacagcgtggcgcggctgtccgagcgcatcgaggcggccgccgcccgcgcgcagcaggccaaggcggagttcgaaaccgtgcagggccgggtcggcgagctcgaccagggcgaggtgggcctcgacgagcaccacgagcgcaccgtcgccgcgctgcgtctggccgacgagcgggtggccgaactgcaggccgccgagcgtgacgccgaacgcaaggtggcctcgctgcgggcccgcatcgacgcgctggcggtggggctcgagcgcaaggacggcaccgcctggctgaccgaaaaccattccggcgcagggattttgggaccgatggccaagctggtcaaggtccgctccggctacgaagccgcggtggccgcggtgctgggctcggcggccgacgcgctggccgccgacgggctgggcgcggcccgctcggcgctgggtgcgctcaagcaggccgacggtggacgggccgcgctggtgctgggcgactggcccgccgatccgcccgcaccgagccggccccggcgg

SEQ ID NO: 25461 - DNA, 723 bp, Mycobacterium avium
atggcccatggtagcaccgcgcacgaagtgctcgcggtcgtgttccaggttcgcgaagcaagcgaaccggttacgaaggggcgccatcgggcgaaaccgcagctgaacgtgctgttatggcagcgggccaaggagccgcagcgcggggcgtggtcgctgccgggcgggcggctgcgcaacgacgaggacatgaccacctcggtgcggcgccagctggccgagaaggtcgacctcaaggaactggcgcacctggaacagctcgcggtgttctccgacccgaaccgggtgccgggcacccggatgatcgcgtccactttcctgggcctggtgccctcccccgccagtccggagctgccgccggacacccgctggcacccggtgaactgcctgccgccgatggccttcgaccacggtcagatggtggacaacgcgcgggcccggctgatcgccaagctctcctacacgaacatcggattcgctttggcgccaagggaatttgccctgtccacgctgcgcgacatctacggcgccgcgctgggctatcaggtcgacgcgacgaacctgcagcgggtgctggcccggcgcggggtcatcaccgcgaccggcaccatcgcccagtccgggcgcagcggcgggcgtccggccgccctgtaccggttcaccgacgcggcgctgcgggtcaccgacgaattcgccgcactcaggccgcccggcctgccaggc

SEQ ID NO: 25462 - DNA, 1362 bp, Mycobacterium avium
gtgagccccgcccccgcggcggtggtgctcgcgcacgggctgggcgggtccggcgacctgccggtgccctacgcctatgcgatggtcggcgcggcgtgggcgctgaccttcaccttcgccctggtggccttcgcctggcggcggccgcggttcgatccgctcaagccgggccgggcgctgccggcggcgctgaccgcgttcgtcgacgcccgggccacccgatacaccgcggccgggctggccctggccgtggcggcgtgggcggtggccgccggtgtctgggggcccgagtccgacgccaacgcgctgctcggcgccttctacgtgctgctgtgggtggggctggtggcggtgtcgctggcgatcgggcccgtgtggcgggtgatctcgccgatccgcacgctgtatctgctggcgcggcgggtcgtcccggagcggctcgcccggccgcggctgtcctacccaaagcgctgggggtaccggcccgccgcgctgggcctgttcgcgttcgtgtggatggagctggccagcccgaacccggcggcaccatcctgggtgacgggctggctgctggtctacgccgtgctgatggccggcggggcgtggctgtgcgggcagcgctggctggcccgggccgacccgttcggggtgtacagcatggccgtctcccggctgtcgccgtttcgccgcaatccgcggaccggccggatcgtcgtcggcaacccgctcgaccacctgccgtcgctgccggtgcggcccggcgtcgtggtgctgctggcggtgctgctcggctccaccgcgttcgacagcttctcgtcgtcgccgacctggcggggcttctccgatcggctgacccgcgaattcgcggccccgcccgcgctggcgtcgtcggtgctgcgcaccctcggcctgatcgtgttcatttgcgttgtggccctgaccttttcactggcggcacgggccaccggcggggtcgacgcgcagcagcgccgcgcgttgcccggccagatggcgcattcgctgatcccgatcgtggtgggctacatcttcgcgcactacctgtcctatctggtggagcggggacagcaggcggtgttcgcgctggcggacccgttcggccggggctggaacccgctcggcctggcgcatctgcaggtcgcctacgtgctgtccatgcatccgccggtgctggccgcgatcaaggtgacctgcgtggtcaccggccacatcgtcgcggtgatcgccgcgcacgacaaagcgctgcggctgctgccggccggtcaccagctcaccgggcagctggcgatgatgctggtgatggtcggctacacgttcaccggtttgtatctgctcttcgggggg

SEQ ID NO: 25463 - DNA, 1167 bp, Mycobacterium avium
atggtcgtatacccaggggtggttggagttgctcggccgttaccctactttgaacaccttttcgttcaggctgccatcgatggcagacgtgcccgcacgcgcgggcacccgcaagaggcaggggagtacctggtgacgcaagcggcgacgcgaccgacggccgagaccggcaacgacgaggacatcctggcggtggcgcggcgccaggtactggagggcggccagggattgagccgcgaccaggtgctgcaggtgctgcggctgcccgacgaccggctcgacgacctgctggcgctggcccacgaggtgcggatgcgctggtgcggcccggaggtcgaggtcgagggcatcatcagcctgaagaccggcggctgccccgaggactgccacttctgctcgcagtcggggctgttcgcgtccccggtgcgcagcgcccggctcgacatccccagcctggtcgaggcggccaagcagaccgccaagtccggcgccaccgagttctgcatcgtggccgccgtgcgcggccccgacgagcggttgctggcccaggtcgcggccggcatcgaggccatccgcaacgaggtcgagatcaacatcgcctgctcgctgggcatgctgaccgccgagcaggtggagcagctcgccgagatgggcgtgcaccgctacaaccacaacctggagacggcccggtcgttcttccccaacgtggtgaccacccacacctgggaagagcgctgggacaccttgtcgatggtgcgcgacgccggcatggaggtctgctgcggcggcatcctcggcatgggcgaaaccctcgagcagcgtgcggaattcgccgccgaactggccgagctcggccccgacgaggtgccgctgaacttcctcaacccgcgcccgggcaccccgttcggcgacctggaggtgatgccggcgaccgaggcgctgaagtcggtggccgccttccggctggcgttgccgcgcaccatgctgcggttcgcgggcggccgcgagatcaccctcggcgacctgggcgccaagaagggcatcctgggcggcatcaacgccgtgatcgtcggcaactacctgaccacgctggggcgtccggccgaatccgacctggaattgctggacgatctgcaaatgcccctcaaggggctcaatgccagcctc

SEQ ID NO: 25464 - DNA, 744 bp, Mycobacterium avium
atgtttcacgtgaaacatgtcggtccggtcgagccggctgcgggcggtccggaggtgccacccgtcgcggcgctcggtgccgcacccgagtccgccgcggcgctgttcggcccccgcctcgcgaccgcgcagcggtacgcggaagtcctcggcaccgcgggtgtcgagcgtggcctgctcggcccgcgggaagtcgaccgcatctgggaccgccacatcctcaacagcgcggcggtcgccggactcctgggccgcggtgatcggatcatcgacatcggcagcggggcggggctgcccggcatcccgttggccatcgcgcgacccgatctcgaggtggtattgctggagccgctcttgcggcgcagcgagtttctcaccgaggtggtggacgaactagggttagccgtcgaggtggtccgcgggcgcgcggaagagcggcccgtgcggaaccggttcggggacagggacgcggcggtgtcgcgagcggttgcagcgttggacaagctgacgaagtggagtatgccgttgctacgccacgacggccggatgctcgccatcaagggggagcgggcggcggaggaagttgaccgataccggcgtgtgatgacagcatcgggcgccgctgatgtcagggtggtgacatgtggcgcgaactatttgcgtccccccgcaaccgtagtttcagcgcgacgcgcaaagccgccgcaccccaagtcggcacggaccgggaaggccggaacccga

SEQ ID NO: 25465 - DNA, 2031 bp, Mycobacterium avium
gtggctgcccagaagaagaaggcgcaagacgaatacggtgcttcagcgatcaccgtcctggaagggctggaggcggtccgcaaacgccccggtatgtacatcggctccaccggcgagcgaggtctgcaccacctcatctgggaggtggtcgacaactcggtcgacgaagcgatggccggctacgccgaccgggtcgacgtgcggatcctggacgacggcagcgtcgaggtcgccgacaacggccgcggcatccccgtcgcgatgcacgcgaccggcgcccccaccgtcgacgtggtgatgacgcagctgcacgccggcggcaagttcggcggcgaaaacagcggctacaacgtcagcggcggtctgcacggcgtcggcgtctcggtggtcaacgcactgtccacccggctcgaggtcaacatcgcccgcgatggctacgagtggtcgcagtactacgaccacgccgtgcccggcaccctcaagcagggcgaggccaccaagcgcaccggcaccaccatccggttctgggccgaccccgacatcttcgagaccaccgagtacgacttcgaaacggtggcccggcggctgcaggaaatggcgttcctcaacaagggcctgaccatcaacctcaccgacgagcgggtgaccaacgaagaggtcgtcgacgaggtggtcagcgacaccgccgacgcacccaagtcggcgcaggagaaggcggcggaatcggctgcgccgcataaggtcaagcaccgcaccttccactaccccggcggcctggtcgacttcgtcaaacacatcaatcgcaccaaaaaccccatccaccagagcatcatcgatttcggtgggaagggccccggccacgaggtcgagatcgcgatgcagtggaacggcggctattccgaatcggtgcacacgttcgccaacaccatcaacacgcacgagggcggcacccacgaggagggcttccgcagcgcgttgacctccgtggtcaacaagtacgccaaggacaagaagctgctcaaggacaaggaccccaacctcaccggcgacgacatccgcgagggtttggccgcggtgatctcggtcaaggtgagcgaaccgcagttcgagggccagaccaagaccaaactgggcaacaccgaggtgaagtcgttcgtgcagaaggtgtgcaacgaacagctcacccactggttcgaagccaaccccgcagacgccaaagtcattgtcaacaaggcggtttcgtcagcgcaggcgcgcattgccgcccgcaaggcgcgagagttggtgcgccgcaagagcgcaactgacctgggcgggctgcccggcaagctcgccgactgccgctcgaccgacccgcgcaagtcggaattgtatgtggtcgagggtgactcggccggcggctcggcgaaaagcggccgggactcgatgttccaggccatccttccgctgcgcggcaagatcatcaacgtcgaaaaggcccgcatcgaccgggttctgaagaacaccgaagtgcaggcgatcatcaccgcgctgggcaccgggattcacgacgagttcgacatcaccaagctgcgctaccacaagatcgtgttgatggccgacgccgacgtggacggccagcacatctcgacgctgttgttgacgctgctgttccggttcatgcggccgctgatcgaacacgggcacgtgttcttggcccagccaccgctgtacaagctgaaatggcagcgcagcgatcccgagttcgcctactccgaccgcgagcgggacgggctgctcgaggccggcctgaaggccggcaagaagatcaacaaggacgacggcatccagcgctacaaggggctgggcgagatggacgccaaggaattgtgggaaaccacaatggatcccaccgtgcgggtgctgcgccaggtcacgctggacgacgccgcggccgccgacgagctgttctccatcctgatgggcgaggacgtcgacgcgcgccgcagcttcatcacccgcaatgccaaagacgttcgcttcctagacgtt

SEQ ID NO: 25466 - DNA, 2517 bp, Mycobacterium avium
atgactgacaccacgctgccacccggcggtgacgccgccgaccgcgtcgaaccggtcgacatccagcaggagatgcagcgcagctacatcgattacgcgatgagcgtgatcgtcggccgcgcgctgcccgaggtgcgcgacggcctcaagccggtgcaccgccgggtgctctacgccatgtacgactcgggtttccgcccggaccgcagccacgccaaatcggcgcggtcggtcgccgaaacgatgggcaactaccacccgcacggcgacgcctcgatctacgacaccctggtgcggatggcccagccgtggtcgctgcgctatccgttggtcgacgggcagggcaattttggttcgccgggcaacgacccgccggccgcgatgcggtacaccgaggcgcggctgaccccgctggccatggagatgctgcgcgaaatcgacgaggagacagtcgatttcattcccaactacgacggccgggtgcaagagccgacggtgctgcccagccggttccccaacctgctggccaacgggtcggggggcatcgcggtcggcatggccaccaacatcccgccgcacaacctcggcgagctcgccgaggcggtgttctgggcgctggacaattacgaggccgacgaagaggccaccctggccgccgtgatggaacgggtgaaaggacccgacttcccgacttcgggcctgatcgtcggcacgcagggcatcgccgacgcctacaagaccggccgcggctccatccggatgcgcggagtcgttgaggtggaagaggattcgcgcggtcgcacctcgctggtcatcaccgagttgccgtatcaggtcaaccacgacaacttcatcacctcgatcgccgagcaggtgcgcgacggcaagctggccggcatctccaacatcgaggaccagtccagcgaccgggtcgggctgcgcatcgtcatcgagctcaagcgcgacgccgtcgccaaggtggtgctgaacaacctctacaagcacacccagctgcagaccagcttcggcgccaacatgctggccatcgtcgatggggtgccgcgcaccctgcggctcgaccagctgatccgccactacgtcgaccaccaactcgacgtcatcgtccggcgcaccacctaccggttgcgcaaggccaacgagcgggcccacatcctgcgcggtctggtcaaggcgctcgatgcgctcgacgaggtcatcgccctgatccgggcgtcggaaaccgtcgacatcgcgcggcagggcttgatcgagctgctcgacatcgacgagatccaggcccaggcgatcctggacatgcagctgcgccggctggccgccctggagcggcagcgcatcatcgacgacctggccaagatcgaggccgagatcgccgacctggaggacatcctggccaagccggaacggcaacgcggcattgtgcgcgacgagctcgccgagatcgtcgaaaagcacggcgacgcgcggcgcacccggatcgtggccgccgacggcgacgtcagcgacgaggatctgatcgcccgcgaggacgtcgtcgtcaccatcaccgagaccggctacgccaagcgcaccaagaccgacctgtaccgcagccagaagcggggcggcaagggcgtgcagggcgccggcctcaaacaggacgacatcgtgcggcacttcttcgtgtgctcgacgcacgactggatcctgttcttcaccacccagggccgggtctaccgcgccaaggcctacgaactgcccgaggcgtctcgcaccgcccgcggtcagcacgtggccaacctgctggcgttccagcccgaggagcggatcgcccaggtgatccagatccgcagctatgaggacgccccctacctggtgctggccacccgcaacggcctggtgaagaagaccaagctgaccgacttcgactcgaaccgttcgggcggcatcgtggcgatcaacctgcgcgacaacgacgaactcgtgggcgcggtgttgtgctcggccgaggacgatctgctgctggtgtcggccaacggccagtccatccggttctcggcgaccgacgaggcgctgcgcccgatgggccgcgccacctccggtgtgcagggcatgcgcttcaacgccgacgactacctgctgtcgctcaacgtggtccgcgagggcacctacctgctggtggcgacgtccggcgggtacgccaagcgcaccgcgatcgaggagtatccggtgcagggccgcggcggcaagggcgtgctgaccgtgatgtatgaccgccgccgtggcaggctggtgggtgcgctgattgtggacgaggacagcgagctgtacgcgatcacctccggcggcggtgtcatccgcaccgcggcgggccaggtccgtaaggcggcacggcagaccaagggcgtccggctgatgaatctgggtgagggcgacacgatgctggccatcgcccgcaacgccgaggaagccgcggacgagaccgtcgaggagagcgacggtgccgcggggtcggacggc

SEQ ID NO: 25467 - DNA, 1059 bp, Mycobacterium avium
gtggatctcttgtttgatttcttcagcctcgacttcgtctactacccggtgtcgtggatcatgtgggtctggtacaagttgttcgccgccatgctcgggccgtcgaacttcttcgcctgggcgctgtcggtgatgttcttggtgttcaccctgcgggcgctgctgtacaagccgttcgtgcggcagatccgcaccacccggcagatgcaggagctgcaaccgcagatcaaggcgctgcagaagaagtacggcaaggaccggcagcgcatggcgttggagatgcagaagctgcagcgcgagcacgggttcaatccgatcctgggctgcctgccgatgctggcccagatcccggtgttcctcggtctgtatcacgtgctgcggtcgttcaaccgaaccaccggcgggttcgggcaaccgcacctgtcggtggtgcagaaccggctgaccggaaactacgtcttcaccccgaccgatgtggggcacttcctggacgccaatttgttcggcgcaccgatcggcgcgttcatgacccagcgcaccgggctggacgcgttcacgtatttcagccgcccggcggtgatcgcggtcggcctgccggtgatgatcctggctggcgtcgcaacgtacttcaacagccgggcgtcggtggcacgccaaagcccggaggccgccgccaacccgcagacggcgatgatgaacaagcttgcgctgtacgtgtttccgctcggcgtggtggtcggtgggccgttcctgccgctggccatcatcctgtactggttcgccaacaacatctggacgttcggccagcagcactacgtgttcggcatgatcgaaaaggaagacgaagccaagaagcaggaagcgattcagcgccgcgcggccaatgccccggcgccgggcgccaagccgaagcggaacctgaaggcgggcgcgggcaacggtgtggatgcagacgcggcacagtcggacgccggcgccaccgagggccaagccggcgggggcagcgacgcgccgagccgcaccccgcgtcccggggcgcgaccgaagaagcgcaaacgc

SEQ ID NO: 25468 - DNA, 336 bp, Mycobacterium avium
atgacgcggtcaaccgagtttgacgcgacggtgaagcacggaacccgcatggcgcagcccgacatcgtcgtccacctccggcgcgactccgaacccgacgacgaatccgcgggcccacgggtcgggctggtcgtcgggaaggccgtcgggacggcggtgcaacgacaccgcgtggcccgccggctgcgtcacgtggcccgggccctgctcggcgaactcgaaccatccgaccggctggtgattcgcgcgctgcccggaagccggaccgcgtcgtcggcgcgcctggcgcaggaactgcagcggtgcctgcggcgcatgccggcgggaaccgggccg

SEQ ID NO: 25469 - DNA, 1527 bp, Mycobacterium avium
ttggccgatgaccccggttcaagcttcaccacggtgtggaatgcggtcgtttcggagctcaacggcgagcccgtcgccgacggcggagccgccaaccgcacgactctggtcactcccctcacccctcagcaaagagcgtggctcaatctggtccgcccgctgaccatcgtcgaggggtttgctctgctgtcagtgccgagcagtttcgtgcagaacgagatcgaacggcacctgcgcgccccgatcaccgacgcgctcagccgccgcctgggtcagcagatccagctgggggtccgcatcgctcccccacccgacgacgtcgaggacgcgctcatcccgccggccgagccgttccccgacaccgacgccgccctgtccgccgacgacggcgccgacggcgagccggtggagaacggggagccggtcaccgacacccagcccggctggcccaactacttcaccgagcggccgcacgccatcgatcccgccgtcgccgccggaacgagcctcaaccgccgctacaccttcgacacgttcgtgatcggggcgtccaaccggttcgcgcacgccgccgccctggccatcgccgaagcaccggcccgcgcctacaacccgttgttcatctggggcgagtccggtctgggcaagacgcacctgctgcacgccgccggcaattacgcgcagcggctcttccccggcatgcgggtcaagtacgtctccaccgaggaattcaccaacgacttcatcaactcgctgcgcgacgaccgcaaggtcgccttcaagcgcagctatcgcgacgtcgacgtgctgctggtcgatgacatccagttcatcgagggcaaggaaggcatccaggaggagttcttccacaccttcaacacgctgcacaacgccaacaagcagatcgtcatctcctccgaccggccgcccaaacagctggccaccctggaagaccggctgcgaacccggttcgagtggggcctgatcaccgacgtgcagccccccgaactcgaaacccgcatcgcgatcctgcgcaagaaggcacagatggagcgcctggcggtgcccgacgacgtgctggaactcatcgccagcagcatcgagcgcaacatccgcgaactcgagggcgccctgatccgggtcaccgcgttcgcctcgctgaacaagactccgatcgacaagtcgctggccgagatcgtgctgcgcgatttgatcgccgacgccagcaccatgcagatcagcgcggccaccatcatggccgccaccgccgaatacttcgacaccaccgtcgaggaactgcgcgggccgggcaagacccgggcgctggcccagtcccgtcaaatcgcgatgtacctgtgccgcgagctcacggatctgtcgctgcccaagatcgggcaggccttcggccgcgaccacaccacggtgatgtacgcccagcgcaagatcctgtccgagatggccgagcgacgcgaggtgttcgatcacgtcaaggagctcaccactcgcattcgtcagcgctccaagcgc

SEQ ID NO: 25470 - DNA, 1197 bp, Mycobacterium avium
atggacgcggcgacgacaacggctggcctcagcgacttgaagtttcgtttagtgcgggagtctttcgccgacgcggtgtcgtgggtggccaagagcctgccgtcgcgacccgcggtgccggtgctctccggggtgctgctgtccggcaccgatgaggggctcaccatctccggattcgactacgaggtttccgccgaagcacaggtggcggccgaaatcgcttctccgggaagtgttttggtatccgggcggttgttgtctgacatcgttcgggcgctgcccaacaagccgatcgacttctacgtcgacggcaatcgggtggcgttgaactgcggaagcgcccggttctcgctgccgacgatggccgtcgaggattacccgacgctgcccacgctgcccgaggagaccgggacgctgccggccgatctgttcgccgaggcgatcgggcaggtcgcgatcgcggccggccgcgacgacaccttgcccatgttgaccggaatccgggttgagatttccggggacacggtggttttggccgccaccgaccggttccggttggcggttcgcgagctgacctggtcggcggcctcccccgacatcgaagcggcggttctggtgccggccaagacgctggccgaggcggcgcggaccggcatcgacggctccgacgtgcggctgtcgctgggggcgggcgcaggtgtcggcaaggatggcctgctgggtatcagcggcaacggcaagcgcagcaccacccgcctgctggacgcggaattcccgaagttccgccagctgttgccggccgagcacacggcggtggccaccatcaacgtcgccgagctgaccgaggccatcaagctggtggcgctggtggccgaccggggtgcgcaggtgcggatggaattcagcgaggggtcgctgcggctgtccgccggcgccgacgatgtcggccgggccgaggaggatctggccgtggatttcgccggcgaaccgctgacgatcgcgttcaaccccacgtatctgaccgacggactgggatcggtgcgctccgaacgggtgtcgttcggcttcaccaccccgggcaagcccgcactgctgcgcccggcgtccgacgacgacagcccgccgagcggcagcgggccgttcagcgcgctgcccaccgattacgtctacctgctgatgcccgtgcggttgccaggc

SEQ ID NO: 25471 - DNA, 7617 bp, Mycobacterium avium
ccgcggggtcccgacgcgccagggcggcgcggggtcgcctcgttccggatggcggccaaaaccaccagcgcggtaagcgaactcgcacgctgccgccgcaccaccgtcaacaccgtgttgcaggccgcctgggcgcagctgctgatgatgctgaccggccagcacgacgtcgcgttcggcaccgccgtctccggccggccggccgagctgcccggcgccgagtcgatggtcgggctgttgatcaacaccgtcccggtgcgcgcccgcgccgccgcggcgaccaccatcgcggatctcctcgaccagctgcagtgcgcccacaacgacaccgtggagcatcagcatttgggactcaacgaaatccaccgcgtcaccggacaggaccaactcttcgacaccctgctggtctacgagaactatccgatcgacaccgccgcgctgtcggccgccgacgacctcaccgccaccgaattcagctgccacgactacaaccactacccgctgtcgctgcaggtggtgcccggcgacgaactgggccttcgcctcgaattcgacaccgacgtgttcgacccggcggccatcgacaccctggccgaccggttgcggaggctgctggccgccatgcccgccgacccggaccgcccgttgcgatcactggacctgctcgactccaccgagcacacccggctgcaacggtggggcaaccggccggcgctgagccggccggcaaccgggccgtcgctgccggagttgttcaccgcacaggtcgccaacgctccgcacgccgtcgcgctgcgctgcgccggccgctcgatgacctatcgcgaactcgacgaggcgtcgacccggctggcccacctgctggccggccacggcgccaccccgggttgctttgtggcactgctgttttcccggtcggccgaggcgatcgtcgcgatgctggcggtgctgaaaaccggcgcggcctacctgccgatcgacccggcgctgccggcgacccgcatcgagttcatgctcggcgacgccgcacccgtcgtcgcggtcagcaccgccggcctgcgcgcccggctggaggccttcggcctgccggtcgtcgacgtcgccgccaccggcgcccagcccggcggcccgttgccgccgcccgcgcccgacaacatcgcctatctgctctacacgtccgggaccaccggcgtccccaaaggcgttgcggtcacccaccgcaacgtcgcccagctgctcgagtccctgcacgcgtcgctgcccggcaccggggtgtggtcgcagtgccactcctacggcttcgacgtctcggtccaggagatctggggcgccctggccggcgggggccggctggtggtggtgcccgagtcggtgaccagctcacccgacgagctgcacgcgctgctgatcgccgagaacgtcaccgtgctcagccagacaccgtcggcgctggcggcgctgtcaccacgaaacctgcacgcggcgttggtgatcggcggcgagccctgcccggccgcgctcgccgaccggtgggcgcccggccgggtgatgatcaacgcctacggccccacggaaaccaccgtcgacgcggtgctcagcacaccgctggccgccggcgccggagcacccccactcggctccccggtagcaggtgcgacgctgttcgtgctggatggatggctgcggccggtgcctgccggtgtgaccggcgagctctatatcgccggcgccggggtggccgccggctatctgggccgcgccggtctgacggcggcgcggttcgtggcctgcccgttcggcggcgccggtgcgcgaatgtaccgcaccggcgatctggtgcgctgggatcgcgacggccggctgcactacgtcgcccgggccgatcagcaggtcaagatccgcggccaccgcatcgagctgggcgaaatccattctgcgctggccgaactggacggcgtcgagcaggcggcggtgatcgcccgcgaggaccgccccggcgagaaacggatcgtcggctacctcaccggcaccgccgacccggcggcgatccgcgcccggctggccgagcggttgccggcctacatggttcccgccgcggtgctggcgatcgaggcgctgccgttgactcccaacgggaaactggacgcccgggccctgccagcgccggaatacgcgggcggggcataccgggcgccatccactcccaccgaggagatcatcgccggcatctacacccaggtgcttggcctgcacagggttggtgtcgacgactcgttcttcgacctgggcggtgattcgctgtcggcgatgcgggtgatcgccgccgtcaacgccggcctcgacgcccggctgtcggtgcgagtgttgttcgaagcgcccaccattgcgcaactggcggcgcgcctcggcgaaggcgggcaccggttcgccgcggtggtggccgccgagcggccggcggtggtgccgttgtcgttcgcgcagtcgcggctgtggttcatcggccagctgcacgggccgtccccggtgtacaacatggtggccgcgctgcggctgcacgggccggtggacatcggcgcgctgggcgccgcactgcatgatgtcgtgacccggcacgagagcctgcgcacggtgttcgccgcgaccgacgggacgcccgcccaagtggtgctgccgcccgaccgtgccgacatcggctggcaggtcatcgacgccagtggctggtcgccggcccgagtggatgacgtcatccgcgacaccgcccggcatacctttgaccttgctgctgaaattcctttgcgtgcagtgcttttgcggtgtggtgacgaggagcatttgttggtggcggtggtgcatcatattgccgcggacgggtggtcgttgacgccgttggtgcgtgacttggcgcgggcgtatgcgagtcggtcggcggggcgggtcccggattgggtgccgttgccggtgcagtatgtcgattacacgttgtggcagcgcgcccagttcggtgacctcgacgacccgcacagcctgatcgccggtcagctgcgctactgggaaagcgcgttggcgggcatgcccgagcggttggaattgcccaccgatcggccgtatccggtggtggccgatttccgcggcgccagtgtcgcggtggagtggccggcgcagttgcagcagcaaatatcgcggttggccggcgcgcataatgccaccagtttcatggtggtgcaggccgcgttggcggtgctgctggccaaggtgagcgcgagttcggatgtggcggtgggctttccgatcgctgggcggcgcgacccggcgctggatgacgtggtgggttttttcgtcaacaccttggtgctgcgggtggacgtctccggtgatcccacggtggccgagctgctggcgcgggtgcggcaacgcagcctggctgcctatgagcatcaggatgtgccgttcgaggtgctggtggagcggctcaacccggcccgcagcctggcgcaccatccgctggtgcaggtgatgttggcctggcagaacatcgagcccaccgagctgagcctggggcaggtgcgggtgattccgctgccggtggatacccgcaccgcccggatggatctggcctggtcgctggccgaacgctggacacccgatggctcccccgccggtatcgggggagcggtcgaattccgcaccgacgtgttcgacaccgccacggtcgaggcgttgacccagcgactgcggcgggtgctggcggccatgaccgccgaccccggccgccggttgtcctcgatcgacctgctcgaccccgacgagcacgcccgcctcgatgccctcggcaaccgcgcagcactgacccgaccacaacacccgcccacctccatccccgcgatgttcgccgcccaggtggcgcgcaccccgcacgccgtggcgctgaccgccaacggtcgctcggtcacctatcgtcggcttgaggaacacgcaaaccaattggcgcaccaacttattcgttacggcgcagggccgggccgctgcgtggccgtgctgctggagcgttccgccgaggccgtcgcggccatcctgggggtgctcaaggccggggccgcctacctgcccatcgaccccagcctgcccagcgcacggatcgagttcatgctcaccgacgccgcacccgcggccgtgctcaccagcaccgaattccattgccgcctacaggagtacgaccagaccgtcatcgacgtcgacgacccgtcgatccgggaacaacccgtcaccgcaccacccgcacccgccccggacaatatcgcctacctcatctacacctcgggcaccaccggcgtccccaaaggcgtcgcggtcacccaccgcaacgccacccagctgttcgcgtcgctgggagccgccggcctgcccgccgcacccggaaaggtgtggggccagtgccattcgctggccttcgacttctcagtgtgggagatcttcggcgcgctcctgaacggcgggcgcgtgctggtggtgcccgacgacgtggtccgctccccggaagacctatgcgccttgctgatcgacgaacatgtcgacgtgctcagccaaacgccgtcggcattcgatgcgctgcagcgcgccgactccgcccggcggctcaacccgcagacggtgatcttcgggggcgaagcgctgatcccgcaccggctgggcggctggctggacgggcatcccgcacgcccgcggctgatcaacatgtacggcatcaccgagacgacggtgcacgcctcgttccgggagatcgtcgacggcgacatcgacggcaacgtcagcccgatcggaatgcccttggcgcacttgggattcttcgtgctggatggatggctgcggccggtgcctgccggtgtgaccggcgagctctatatcgccggcgccggggtggccgccggctatctgggccggcccggtctgacggcgtcacggttcgtggcctgcccgttcggcggcgccggcgagcgaatgtaccgcaccggggacctggcccggtggggcaccgacgggcagctgcactacctgggccgcgccgatcagcaggtcaagattcgcggctaccggatcgaactcggcgaaatccagtccgccctggccgaattggacggcgtcgagcaggcgacggtgatcgcccgcgaggaccgccccggcgacaagcggctggtcggctacgtcaccgggaccgccgacccggcgcagctccgcaccgcgctggccgaacggctgcccgcctacctggtccccgcggccgtggtcgcgatcgacgcaatgccgttgacgcccaacggaaaactcgacaccggcgccctgcccgcccccgactaccacggcgccgaccagtaccacgccccggcgagcgcggtcgagcagaccctggccgacatctatgcccacgtcctggacgtgcggccgccccggctggtcggcatcgacgactcgttcttcgacctgggcggtgattcgctgtcggccatgcggctggtcgcggaggtcaactcccgcctcgacgtccacctcggcgtccgggccctgttcgaggcgcccaccattcggcggctggccgcgcggctgggggccgacgggtcggcgcgtgcgccgctggtggccgccgagcggccggcggtggtgccgttgtcgttcgcccagtcgcggctgtggttcatcggccagctgcacgggccgtcgccggtgcacaacatggccatcgcgttgcagctgcacgggcgcctcgacgcggcggcgttcggcgcggcgctggccgacgtggtgggccgccacgagagcctgcgcaccctgttccccgcccacgagggcataccccagcagctggtgatcgaggtcgacgaggccgacatcggctggcaggtcatcgacgccagtggctggtcgccggcccgactggatgacgtcatccgcgacaccgcccggcatacctttgaccttgctgctgaaattcctttgcgtgcagtgcttttgcggtgtggtgacgaggagcatttgttggtggcggtggtgcatcatattgccgcggacgggtggtcgttgacgccgttggtgcgtgacttggcgcgggcgtatgcgagtcggtcggcggggcgggtcccggattgggtgccgttgccggtgcagtatgtcgattacacgttgtggcagcgcgcccagttcggtgacctcgacgacccgcacagcctgatcgccggtcagctgcgctactgggaaagcgcgttggcgggcatgcccgagcggttggaattgcccaccgatcggccgtatccggtggtggccgatttccgcggcgccagtgtcgcggtggagtggccggcgcagttgcagcagcaaatatcgcggttggccggcgcgcataatgccaccagtttcatggtggtgcaggccgcgttggcggtgctgctggccaaggtgagcgcgagttcggatgtggcggtgggctttccgatcgctgggcggcgcgacccggcgctggatgacgtggtgggttttttcgtcaacaccttggtgctgcgggtggacgtctccggtgatcccacggtggccgagctgctggcgcgggtgcggcaacgcagcctggctgcctatgagcatcaggatgtgccgttcgaggtgctggtggagcggctcaacccggcccgcagcctggcgcaccatccgctggtgcaggtgatgttggcctggcagaacatcgagcccaccgagctgagcctggggcaggtgcgggtgattccgctgccggtggatacccgcaccgcccggatggatctggcctggtcgctggccgaacgctggacacccgatggctcccccgccggtatcgggggagcggtcgaattccgcaccgacgtgttcgacaccgccacggtcgaggcgttgacccagcggttgcgccgggtgctggcggccatgaccgccgaccccggccgccggttgtcctcgatcgacctgctcgaccccgccgagcacgcccgcctcgatgccctcggcaaccgcgcagtactgacccgaccacaacacccgcccacctccatcccggaggtattcgccgcgcacgtcgcccgcaccccgcacgcggtggccgtcacttgcgggcggcgttcgtggacctaccgtgaactggactcctcggcaaaccggttggcgcacttgctcatccaccacggcgcagggccgggcgattgcgtggcactgctgctcgagcgttccgccgaggccgtcgcggccatcctgggggtgctcaaggccggggccgcctacctgcccatcgaccccagcctgcccagcgcacggatcgagttcatgctcaccgacgccgcacccgcggccgtgctcaccagcaccgaattccattgccgcctacaggagtacgaccagaccgtcatcgacgtcgacgacccgtcgatccgggaacaacccgtcaccgcaccacccgcacccgccccggacaatatcgcctacctcatctacacctcgggcaccaccggcgtccccaaaggcgtcgcggtcacccaccgcaacgccacccagctgttcgcgtcgctgggagccgccgggctgcccgccgcacccggaaaggtgtgg

SEQ ID NO: 25472 - DNA, 516 bp, Mycobacterium avium
atggatcgaccgggtgctctagaccggctgcgcaccgcggtcgaggcgttcagcacggcccacctcggtgcggtcgaacgctggtgcgtggcgctgtccggcggcccggattcgctggcgctcaccgccgtggcggcccggctgcggcccaccaccgcggtgatcgtcgaccacggccttcaaccggactcggccgccgtcgcgcaaaccgcccgggcccaggccattgcgttgggttgtgttgcggcgcaagtcatttcggttcacgtcgacggcgagggcggcccggaggcggcggcgcggcgggcccgctacgcggcgctggccgcgcaccgcgacgggccggtgctgttgggtcacaccctcgacgatcaggccgagacggtgctgttggggctcggccgcgggtcgggggtgcgctcgatcgcgggcatgcgtccccacgatccgccgtggtgccggccgctgctcgggcagcggcgcgcggtgacgcacgcggcatgcgcggagttgggc

SEQ ID NO: 25473 - DNA, 1383 bp, Mycobacterium avium
atggcccgtactcgctggcagaaatccaccccagtgttcatcgggttgggcgtgctggcgttcgtcgctgccgtggtggttgcggcaacgtttttcaccacgaccgggcacggcgcgggcaacgcgcacgccccgataccggctccgcatgcacccacggtcaagccgggcatgctgccggtcagcgacaccgccgagctacccaccggacccggggtgagcgccgcgctggcgccggtggctgccgatcccaacctgggccggctgggcggccggatcaccgacgccatcaccggcaaagagctgtggcaggtggccgacgacatgccgttggtgccggcgtccaccaacaaggtgctgaccgccgcggcggcgctgctgaccctggaccggcaggcccggatcagcacccgggtggtggccggcagccagaacgcgcaggggcccgtcgtgctggtgggtgcgggcgacccggtgctgtcggcggccccgcccgggcagccgacctggtatcggggcgcggcccggatcagcgacctggtcgagcagatccgccgcagcggggtgacgccgaccgcggtgcaggtggacacctcggcgttcagcgggccgacgatggcgcagggctgggatccctccgacgtggacaacggcgacatcgcgccgatcgagtcggtgatgatcgacgccggacgcatccagcccaccacggtcaactcccgccgcacccgcacaccggcgctggacgcgggccgggagctggccaaggcgctggggttggaccccaacgcggtgaccgtcgcgacggcgccgtccggggcgcggcagctggccgtcgtgcagtcggcgccgctggtgcagcggctgtcggagatgatggaccactccgacaacgtgctggccgagtgcatcgcccgggaggtcgcggcggccatcaaccggccgcgcagcttcgcgggtgcggccgacgcggtcaccaaccggctcagcaccgcccacgtcgacaccgccggcgcgacgctgatggattccagcgggctgtcggtcgacgaccggctgaccgccaagacgctcgacggcgtgctgcaggccgccgccgggccggaccagccggcgctgcgggcgctgctggatttgctgccgatcgccgccggcagcggcaccctgggcgaccggttcaccgacgcctcgaccaaccagggcccggccggctggctgcgcgccaagaccggctcgctgaccgccatcaacgcgctggccggcgtgctcaccgaccgcagcgggcgggtgctgacgttcgcgttcatctccaacgatgccggccccaacggccgcaacgcgatggacgcgctggccacccggctctggttctgcgggtgctca

SEQ ID NO: 25474 - DNA, 1077 bp, Mycobacterium avium
ttgcgcaccttcggggtctcgctgttggtcaccgcggcggccctggtcctcggatacgcctacggcggccccaagagtctgtacctgctgctggtgctggcggccctcgaggtgtcgctgtccttcgacaacgccgtcatcaacgccgcggtgctcaagcagatgagccggttctggcagcggatgttcctgacgatcgggatcctggtcgccgtgttcgggatgcggctgctgttcccgttgctgatcgtgtgggcgaccgcgggcctcgacccggtgcgcgcgctcgagttggcgctgcgcccgcccccgcacggcgcgctggaatttcccgacggctcgcccagctaccagaagctgctcaccgccgcccatccccagatcgccgcgttcggcggcatcttcttgctgatgctgttcttggacttcctgctaatcgatcgagatatcaagtggctcaagtggattgaggttccgttcgcccgcatcgggcggctgggtcaggtgtcggtggtgctgagcggcctgacgctggtgctggtcggcaccgggttgacgcactccagccaggaggcggtgacggtgctgaccgccggactgctgggcatggtcgcctacctggtggtcaacggtttgagccgggcgtttcggccgtccggggtggggcaaccgcaaccggcaggcccggcgaccggctgggccgggctgagtctgttcctctatctggaggtgctcgacgccgccttctcgttcgacggggtcaccggcgcgttcgcgatcacctcggacccggtcgtcatcgtgctggggctgggcgtggtgggcgcgatgttcgtccggtcgatcaccatctacctggtgcaccaggaaacgctggaccgctacgtgtacctggaacacggcgcgcactgggcgatcggcgcgctggcggtgatcatgctggcgtccatcgagccgcggctgaccgttcccgagccggtgaccgcgtcggtcggggtgttcttcatcggaacggcggtgggcttcagcgtgctgcggcgccgccgcgaatccgggcgggctagtgcccctgggcct

SEQ ID NO: 25475 - DNA, 1488 bp, Mycobacterium avium
gtgacggctggcaccatcgccgggctgctggacgagtgtgccgccggccggccggatcgtccgctgctgcgcgacgtcgacggcgagacactcaccgtgtcgcaggtcgccggactggcttcggctgccgcgggatggctgacagatgccggtgtacgtcccggcatgacggtcgcctggcagctaccctcacacgtcaacgcggcggtggcgatgctggcgctggcccgcatgcccgttgtgcaggccccggtgttacacctctatcggtgccgcgaggtgtgcgcggcggtcgacgtcgcgcgcgctgacatcctgctggttgatgagtcgacggccgccaatgccgcaccagggctaccgacaatcatggtgcctgccgaccttgtccgccgactccagacgtcaccggctacaagcgccgagtacgaagcgctcccctccgcagcggagccgcgctgggtgtacttcacgtcgggcaccaccggccgcccgaaagccgtccgccactccgacgccaccttgctcagcgccgcccgcggttatgtcgcgcatctcggcgtgggcagccatccgcgggaagtcggcacgatcgcctttcccatcgcacacatcggcggcatggtctacctcgccaccgctctgttcggcggctttcccgtagtgctcatccccaaagtttccgcagccgacctgccccgggtgctcgccgaacatcaggtgacggtgaccggagcgagcaccgcgttctaccagatgctgctggccgcccagatggccgcgccgacaaccgaattgctggtgccgtcgctgcggatgctgatcggcgggggtgccccgtgtccgcccgaggtgcacaagcaggtgcgtgaacacctacgcgtacccgtcgtgcatgcctacgggatgaccgaggcgccgatgatctgcgtcagcgaggccaccgacaccgacgagcaactggccaacagcgccggccggcctatccctggatcgcaggtgcggatcggggcgaacggcgagatcgagttgcgcggcgccaacctgacagcgggatacctgcagcacgaccagtgggccgacgcgctcaccgcggacgggtggttccgcagcggcgaccggggacaccttcgcccggacggccgcatcgtggtcaccggccgcaccaaggatttgatcattcgcaagggcgagaacgtcgcccccgacgagatcgagaacgaactgctggcccaccccctggtcgacgaaatcgccgtgctcggccagcccgacgaactgcgcggcgagctcgtgtgcgcggtcgtgcgtcgttcgccacgccatcgcgacgtcaccctcgacgagctctgcacgttcctcgaccaacgcgggctgatgaagcagaagtggcccgagcggctcgtcctcgtcgacgagttcccgctgacagggctcggcaaggtcgccaagtccgagctggcccggcagatcgcaggaggaacccga

SEQ ID NO: 25476 - DNA, 1353 bp, Mycobacterium avium
atgctcatggcgggcacttcgcaactgcgccaagggctgtcgcagcggcaactgagcatgatcgctctgggcggggtgatcggcgccggcttgttcgtcgggtccggcgtggtgatcaaggacaccgggccggccgcgttcctcacctacgccctgtgcggcctgctcatcgtgctggtgatgcggatgctcggcgagatggcggccgcgaacccgtccaccggatcgttcgccgactacgcggccgcggcgctgggccgctgggccggattctcggtcgcctggctgtattggtacttctgggtgatcgtggtcggcttcgaggcggtcgccggcggcaaggtgctcaactactggttccacgccccgctgtgggtgctgtcgctgggcctgatgctgttgatgaccgcgaccaacctgttctcggtgtcgtcgttcggcgagttcgaattctggttcgccggaatcaaagtcgccaccatcgtcatcttcctggtggtgggcgcggcctatgtcatcggattggtgccggggcatcacgacggcctgaccaacctggtgtcgcacggcgggttctttccccgcggggtgggcgcggtgttcgccgccatcgtggtggtgatcttctccatggtcggcgccgagatcgtcaccgtcgccgccgcggaaagccgcgacccgcggcgggcggtgcagaaggcgaccagatcggtcgtcacccggatcgggatcttcttcgtcggctcggtgtttctgctcgtggcgatcctgccgtgggactcggtggaactcggcgcctcgccgtatgtggccgcgctcaaacacctgggcctggcgggagccgatcaggtgatgaacgcggtcgtgctcaccgcggtgttgtcctgcctgaactccgggctgtacaccgcgtcacgcatgttgttcgtcctcgccgagcggggcgaggcacccgcccggttggtgcggctgagcgggcgcggcgttccccacatcgccatcctgtgctcctcggcggtcggcttcctgtgcgtcgtcatggcccgggtcgcacccaacaccgtgttcctgttcctgctcaactcctcgggcgccatcatcctgttcgtgtactggttgattgcgttgtcgcagatcgtccttcgccgccggacgccggccgagcggctgagcgtgaagatgtggttcttcccggtgctatcggttctcaccctggccggcatcaccgcggtgctggtgcagatggccttcgacgccacggcgcgcagccagttgtggctcagcctgttgtcctgggcggtggtggtggcgctgtacttcgtggcgcgctcgcgcggccgggtcgccgcgcgg

SEQ ID NO: 25477 - DNA, 657 bp, Mycobacterium avium
gtgaaccgactccgcggctgcgcggccgtcgccgcggcggttgcactggccgtggccaccgccggctgcgcaccgaaaccgcccgactaccaatcgatcctgtcgaagacgccgacgacgaccaccaccaccagcgccacggcgaagccggtcccgctgtcgcagtatctgcagagcatcggtgtcaccgggcagcaggtggccccggcgtcgctgccggatctgacggtgtcgatcccgaccccgccgggctgggcgccgttcagcagcccgaacatcagcccgcagacggtgatgatctccaagggcggcaagttccccacggcgcggctggtggtcttcaagctgagcggcgatttcgacccggcccaagtcatcaagcacggcaacgacgacgcgcagctgttcgagaacttcaagcagctggacgcgtccggcgccccgtacaacggctttccctcgtcgatgatccagggcagctacgacctggacggcatgcggctgcacagctggaaccggatcgtcatcgccaccggatcgccgccggcgcatcagcgctatctggtgcagctcacgatcaccagcctggccgatcaggccgccgcggagtcgaccgacatcgaggcgatcatccacggcttcgtggtggcggcgaag

SEQ ID NO: 25478 - DNA, 1005 bp, Mycobacterium avium
atgaagcagatttccgcgaccagcgggcccaccaacatcggcttgctcagcgtcgggtcgtaccggccgcagcgcgcggtgaccaacgacgagctgtgccagaacatcgactcctccgatgagtggatctattcgcgcaccggcatcaagacacgccgattcgccgcgcgcgacgagtccacggcctcgatggcgaccgaggccggacgtgaggcgatcgccaaggccggcctggaggcgtccgacatcgactgcgtcgtggtggccaccagcacccatttcctgcagaccccggcgtgcggcccggcggtcgcggcagcgctgggcgccaccggcgtgcccgccttcgacatctcggccggctgcgccggcttcggctacgcgctgggggtggcggccgacatggtgcgcggcggcacggccggcaaggtgctggtgctggggtcggagaagctgtcgcccacggtcgacatgaccgaccgcagtaactgcttcatcttcgccgacggcgccgcgggcgtggtggtgggcgagacgcccacccaggggatcgggccgacggtgtggggcagcgacggcacccaggccaccgcgattcgccaggacatcgactggatggactacctggaccggcccaccgggccgcgcccgttcctgcggctggagggcagcgcggtattccgttgggccgcattcgagatgggcaaggtcggccagcaggcgatggacgcggcgggggtgcggcccgacgagatcgacgtgttcctgccgcaccaggccaacagccggatcaacgagatcctggccaagagcctcgagctgcggccggacgcggtgatcgccaacgacatcgagcacaccggcaacacctcggcggcgtcgataccgctggccatggccgaggtgctggcgaccggggcggccaaggccggcgacctggcgctgctgatcggctacggcgcggggttgagctacgccgcgcaggtggtgcggctgccgccgggc

SEQ ID NO: 25479 - DNA, 2574 bp, Mycobacterium avium
atgatggttgacgtgaccgacgtccgcgaccaccatcccaagcgcggggaactacgcatctatctgggtgcggccccgggggtgggcaagacgtattcgatgctgggtgaggcacatcggcggctggagcgcggcacggatctggtggccggggtggtggagacccacgggcgcgcgaaaaccgctgagctgcttgagggcatcgagatcattccgccgcgctacatcgaataccggggcggccgcttccccgaactcgacgtgccggccgtgctggcccgtcacccccaggtggtgttggtcgacgaactcgcacacaccaacaccccgggcagcaagaaccccaagcggtggcaggacgtcgaggagcttctggacgccgggatcacggtgatctccaccgtcaacgtgcagcacctggaaagcctcaacgacgtcgtcgcccagatcaccggcatcgagcagaaagagaccgtgccggattcggtcgtccgccaggcctcgcaggtcgagctcatcgacatcacaccggaagcgttgcggcgcaggctgtctcatgggaatgtctatgcgccggatcggatcgatgcggcgctgtccaactacttccggcgtggaaacctcaccgcgctaagggaactggcgctgctgtggctggccgaccaggtcgacacggcgctggccaaataccgcgccgagaacaagatcaccgacacgtgggaggcccgcgagcgggtcgtggtggcggtcaccggcggtccggaatcggagacgttggtgcgacgggcgtcgcgcatcgcgtcgaagtccagcgccgaactgatggtggtgcacgtcatccggggcgacgggctggccggcctgtcggaatcgcggatggccaagatccgggagctggccagcagcctggacgcgtcgctgcacaccatcgtcggcgacgaggtgcccgcggccctgctcgagttcgcccgcgagatgaacgccacccagctggtgatcggcacctcgcggcggtcccgctgggcgcggctgttcgaggaggggatcggcccccggatcgtcgaattgtccggcaagatcgacgtgcacctggtcacccacgaggaatccaaacgcggcttccgggcgtcctcgctggcgccgcgggagcggcgggtggcgtcctggctggcggcgctgatcgtgccgtcggtcatctgcgcggtcaccgtcacgtggctggacccctacctggacaccggcggcgagagcgcgctgttcttcgtcggggtgctgctggtgggcctgctgggaggcattgcgccggcggcactttcggcggtgctgtccgggctgctgctgaactattacctgatcgccccgcggcacagcttcaccatcgccgaacccaacagtgccatcaccgaattggtgctgctgctgatcgcggtggcggtcgcggtgctggtcgacttcgcggccaagcgcacccgggaggcccggcgcgcttcccaggaggccgagctgctgacgctgttcgcgggttcggtgctgcgcggcgccgatctggagacgctgctggagcgggtgcgcgagacctacgcccagcggtcggtcagcatgctgcgcgagtcggaggacgcgcgggccggcggcaccaagacccaggtggttgcctgcgtgggccgggatccctgtgtcagcgtcgacgccgcggacaccgcgatcgaggtgggcggccccgattccagcgaatttcagatgttgctggcgggccgcaagctgtccgcgcgggaccgccgggtgctcagcgccgtggcccggcaggcggcggggctgatccggcagcgcgaactcgccgaggaggccagccgcaccgaggcgatcgtgcgggccgacgagctgcgccgctcgctgttgtcagcggtcagccacgacctgcgcaccccgctggcggcggccaaggtggcggtctccagcctgcgtgccgaggatgtcgccttctcccccaccgacaccgcggagttgctggccaccatcgaggagtcgatcgaccagctgaccgcgctggtgggcaacctgctcgattcgtcgcggctggccgccggggcgattcaccccgatctgcgccgggtgtatctggaggaggccgtgcaacgcgcgctggtcagcatcggcaagggcgccaccggcttcttccgctccgcgatcgatagggtcaaggtcgatgtgggcgatgccatggtgatggccgacgccgggctgctggagcgggtgctggccaacctgatcgacaacgcgctgcgctacgcgcccaactgtgtggtgcgggtcaacgccgggcaggtcggcgatcgggtgctgatcaacgtcatcgacgaagggcccgggataccgcatggcgccgaggaacagatcttcgaagcgtttcagcggctcggcgatcacgacaacaccaccggggtggggttgggcatgtcggtggcgcgcggcttcgtcgaggcgatgggggggacgatcacggccaccgacactcccggcggcgggctcacggtgatggtggatatggctgcgccgcaatccgaaggcgccgca

SEQ ID NO: 25480 - DNA, 477 bp, Mycobacterium avium
atgtcagcgaaggcggagtacgccgtgcgggcgatgatccagctcgccacggtgcccgacgggacgctggtcaagaccgacgatctggcccaggcgcagggcattccgccgcaattcctcgtcgacatcctgaccaatctgcgcaccgatcggctggtgcgcagtcatcgcggtcgcgagggcggctacgaattggcccgccccggcaaggacatcagcatcgccgacgtgctgcgctgcatcgatgggccgctggccagcgtccgcgacatcgggctgggcgacctgccctactcggggccgaccgccgcgctcaccgacgtctggcgggcgctgcgggccagcatgcggttggtgctggaggaaaccaccctggccgacgtcgccaccggaagcctgcccaagcatgtcgcgcagctggccgacgactaccgcaagcaggaaagccagcggcacggcaccgcgcgcaccggcgac

SEQ ID NO: 25481 - DNA, 1833 bp, Mycobacterium avium
atgagcccgctgctgcaggtgaccgacctggccgtcaccttcccggccggcgatgcgccggtgaccgcggtgcgcggcatcagctatcgcatcgaaccgggggaagtcgtcgccatggtcggcgaatcgggttcggggaagtctgtttcggcgatggccgtgatgggactgttgcccgagcacgccagggtacgcggctcggtccggttgcacgacaccgagttgctgggcctgggcgacgacgcgatgtcgcggttgcgcggccgggcggtcggcatggtgttccaggatccgatgtcggcgctgacgcccgtgtacaccgtcggcgatcagatcgccgaggcgatcacgatccaccagccacgggtgggcaggaaggccgcccgcgaccgcgcggtggaactgcttgagctggtgggcattgcgcagccgcagcgacgcgcccgggcgtttccgcacgagctgtccggcggggagcgacagcgcgtggtcatcgcgatcgcgatcgccaacgaccccgacctgctgatctgcgacgagcccaccaccgcgttggacgtcaccgtgcaggcgcagatcctcgaggtgctcaagacggcccgcgacatcaccggcgccggggtgctgatcatcacgcacgacctcggggtggtcgccgagctcgccgaccgggcgctggtgatgtacgccggtcgggtcgtcgaatcggctgcggtggcgagcctgtaccgggaccgccgaatgccctacaccgtgggcctgttgggctcggtgccgcgactggacgccgcccagggcacccggttggtgccgatcccgggcgcgccgccgtcgctggccggcctggatccggggtgcccgttcgccccgcgctgcccgctggcgatcgacgaatgccgttcacaggaaccggaattgctgcccgtcggccccgatcaccgggcggcgtgcatccgcaccgaccaggtcgacgggcgcagcgcggccgacatctacggggtgcgcacccaaccccacccgggcgagccggccaactcgcccgtcgtcgttcgggtgcgcgagctgtccaagacctatcggctgaccaagggcgtgttacgccgcagcgccggcgaagtgcgggcggtggaccggatcagtttccagctgcgacagggccgcaccctgggcatcgtcggcgagtccgggtcggggaaatcgaccaccctgcacgagatcctggaactcgttgcgccgcaatcggggtccatcgaggtgttgggcaccgacgtcgccgcgttgagcccggcgagccgacgctcgctgcgacgcgacatccaggtggtcttccaggacccggtcgcgtcgctggacccgcggctgccggtcttcgagctgctcgccgaaccgttgcgggccaacggcttcgacaaggaccacaccaacgcgcgcgtcgccgagctgctcgagactgtggggctgcgacgggccgacgcggcccgctaccccgcggagttctccggcgggcagaaacagcgcatcggtatcgcgcgagcgctggcgctgcaaccgaagatcctcgcgctcgacgaacccgtctccgcactcgacgtgtccatccaggccgggatcatcaacctgctgctggacctgcaagcgcaatttcaactgtcctatctgtttgtctcccatgatctttcggtggtcaagcatctcgcccacgacgtggcagtgatgtacgccggatccatcgtggagcagggcgacagcagtcaggtcttcggcaacccgcaacacgaatacacgcggcggctgctggacgcggtgccacaaccgaatccgggcagccgtggc

SEQ ID NO: 25482 - DNA, 1149 bp, Mycobacterium avium
atgcgattcctgcacaccgccgactggcaactgggcatgacgcggcacttcctcgccggtgatgcccagccccgctattcggcggcccgccgcgacgcggtcgccgggctgggcgcgctcgcggcggaggtcggcgccgagttcgtcgtcgtgtcgggcgacgtgttcgagcacaaccagcttccgccgaaggtggtcgggcagtcactggaagccatgcgcgccatcggaattccggtgtatttgctcccgggcaaccacgacccgctggacgcctcgtcggtgtacaccagtgcgctgttcaccgccgaacgtccccacaacgtgacggtgctcgatcaggccggcgttcacccggtccgccccgggctgcagctcgtcgcggcgccgtggcggtccaaggtgcccaccaccgacctggtcggcgaggttctcgacggcctgcccgagaccgacgacacccgaatcctcgtcgggcacggcggggttgacgtcctggaccccgatcgggacaaaccctcgctgatccggctcgccaagctcgaggacgcgctgacccgcggcgccgtgcactacgtggcgctgggcgacaagcactcgctgacccaggtcggccgcagcggccgggtgtggtactcgggctcgccggaagtcaccaacttcgacgacgtggaagccgacccgggccatgtgctgatcgtcgacatcgacgaggccgatccgcgccgccccgtctcggtgaccgcccggcgcgtcggatgctggcgattcgtcacgctgcaccggcaggtcgacagcagccgcgacatcgccgacctggacatgaatttggacctgatgaccaacaaggaccgaaccgtggtgcgcctggcgctgaccggttcgctgaccgtcaccgaccgcgccgcgctggacgcctgcctggacaagtatgcgcggctgttcgcccacctgcgcacctgggacagccacaccgagctggccgtgatcccggccgacggcgaattcagcgacctgggcatcggaggcttcgccgccgccgcggtcgaggagctggtggcgaccgcgcgccaacaggattccgacaccgccgccgacgcgcagggggcgctggcgctgctgttacggctcgccgatcggggcgcggcg

SEQ ID NO: 25483 - DNA, 462 bp, Mycobacterium avium
gtgttcaagctgatgttcgtctccccgcgcatcgcccccaacaccggcaacgccatccggacggcggcggcgaccggctgcgaattgcatctggtcgagccgatgggcttcgacctgtccgaacccaagctgcgccgggccgggctggactatcacgacctcgcctcggtcaccgtgcacgcctcgctggccgccgcgtgggacgcgttgacgccggcccgggtggtcgcgttcacctcgcacgcccccgcgtcgttcgccgagctgcgctaccggccgggcgacgtgctgatgttcggccccgaacccaccgggctggacgcggccacgctggccgacccgcacgtcaccacccaggtgcgcatcccgatgctggccgggcggcgctcactgaacctgtccaacgccgcggcgatcgccgtctacgaggcgtggcggcagcacggctacgccggggcgacc

SEQ ID NO: 25484 - DNA, 555 bp, Mycobacterium avium
ttgaccgcgtgggtcgaccgcgaattcgagcggcacgatttcaccgacgaggacctggtcgggctgtcgaccgagcgggtggtgttcaccgaatgcaatttcagcggcgccaacctggccgagtcgcggcaccgcgcgtcggccttccgcaactgcacctttcgtcgaacatcgttgtggcacagcactttcgagcagtgcaccatgctggggtcggtgttcgagcagtgtcggctgcggccggtgacgttcgatgaggtggacttcacgctcgcggtgctcggcggcaacgacctgcgcggcgtcgatttgagcgggtgccggctgcgggtgacctcgctggtggaggccgacctgcgcaaggcggtgctgcgtggcgcggacctgcgcggcgcgcgcaccaccggcacccggctggacgacgccgacctgtgcggcggcgccgcggacccggcgctgtggacgacggcgtcgctggccggggcccgcgtcgacgtcgaccaggccgtcgccttcgcgctggcgcacgggctgcggctggacggcggggacggc

SEQ ID NO: 25485 - DNA, 2337 bp, Mycobacterium avium
atggagcttgatgctcaagcacttccgcttacgcgcggacagctagacatctggcttgcgcaggcaacgggtcactccagcaccgagtggcagctcggcctgttcgtgcgcatcgacggccgcgtcgagcgcgacgcgttgcactgggcgatccggcaggcggtgcaggaggctgaacccgcccgtgtcgcgttcttcgaggtggacggcgcggtctaccagcgggcgatcgagcatccggacgtcgagctgaccttcgacgacctgagcggcctggacgacccggtggccgaggcccgccgccgggcgctggcgatccagcgcacgccgatgccgctgtccgggccgttgttccggttcgccctctttgcgacccggcgggaccagttctacttgttcgcctgctgccaccacatcgtcatcgacggcaccggcgtcgggctggtcggtcaccgcatcgcctccatctactccgcgatcgtcgccgccggacccatcccgacggccgtcttcggctcgctgcgggagctggtcgagtgcgagtcgcactacgaatcctcggccgactaccgcgacgacgaggcctactggctggcgaaccttccgcccgaaaccacccggctgccggccgccccggcgcagcgtgacccgtggccgtcggcgccggtgccgctggacgccgacgtcgtgcgccgggtgcgccggctgtcggaggtctggggcgtctcgcagacctcggtcatcaccgcggcctgcgccctgctggtgcgggcctgggacggcgacggctccggcgtcgtgctcgacttcccggtcagccggcgggtgcgcccggagctcaagacgctgcccgggatggtcgccggggtggtgccgctggtgttgagcctggcgccgcagtgcacggtcgccgccttctgccggcacgtcgagacccgcatcgacgaggcgatccagcaccagcgattcccggtgcacgcgctggagcgcaaggtccgcggcctggcccggccgcccgaacgggtgagcgtcaacttcatcccgtcggcattcaccctgccgttcggcggcgtcaccgcgtcggcgtcgtacaccaactccggccaggccgacgggttcgggctgatcttctccagcgacggcgacgagctgttcttcagcacggcgggtagctgggcaccgtggtcggggctggacgctgccgagttggccgaccggctgcaaggggtgctgacggcgatgaccgccgatcccacccggccgttgcggtcgctgcagctgctcgaccagagcgagcgcgaccgactcgatctgttcggccgccgcgccgcgctgtccgagccgctggcaccggtgtcggtggtggacctgttcgcggcgcaggtggcccgcacaccggacgcggtggcgctgacgtgccggggccggtcgatgacgtaccgcgagctcgacctggcggccaaccggctggcgcacgcgttgatcgatcgtggcgccggaccgggcgagcttgtggccctggtgttttcgcgctcggctgaggcgatcgtggcgattttggcggtgctgaaatccggtgcggcctacctgccgatcgacccggcactgccggcggcccgcatcgagttcatgctggccgacgccgccccgatcgccgcggtcggcaccgcggcgctggccggcacgttggacgggttcgagctgccggtcatcgacgtcgacgatccggcgctggccggccaacccggcacggcaccgccgacgccggccccggacgacctggcccacctcatctacacctcgggcaccaccggcgtgccgaaaggtgttgcggtgactcaccataacgttgcgcagttgttcgacgacctgcgcatcggcatcgagttgtcggcgcagcaggtgtggacccaattccattcctacgctttcgatttctcggtgtgggagatctggggtgcgctgctgcacggcggccgcctggtggtggtgcccgacgcggtgacccaggctcccgacgagttgcacgcgctgctggtcgacgagggcgtcaccgtgctgacgcagaccccgtcggcggtctcgaccctgtcgccgcacgggctggactcggtggcgctggtggtcggcgccgagccgtgcccggccgaactggtggatcggtgggcgccggaccgggtgatggtcaacgtctacggccccaccgaaaccaccatgtgggcctcccacagcgcgccgctgaccgcgggatccggcgtgccgcccatcggctcgccgctgcggggcgcggccttcttcgtgttggacggctggttgtgtccggtgccggtgggtgta

SEQ ID NO: 25486 - DNA, 654 bp, Mycobacterium avium
atgaaggtagctgtcgccggcgccggcgcggtcggccgctcggtcacccgggaacttctggccaatgggcacgacgtgaccctgatcgaacgcaaccccgatcacgtcgacgtcgacgccatcccggccgcgcactggcggctgggcgacgcctgcgagctgagcctgctggagtcggtgcagctgcaggagttcgacgtggtggtggccgccaccggcgacgacaaggccaacgtggtgctgagcctgctggccaaaaccgagttcgcggtgccgcgggtggtggcccgggtcaacgatccccgcaacgaatggctgttcaccgacgcctggggggtggacgtggcggtgtcgacgccgcgcatgctggcctcgctcatcgaggaggccgtcgccgtcggtgatctggtgcggctgatggaattccgcaaggggcaggcgaacctggtcgagatcacgctgcccgacgacaccccgtggggcggcaagccggtgcgccggctgcagctgccccgcgacgccgcgctggtgaccatcctgcgcgggccgcgcgtgatcgtgcccgaggaggacgagccgctggaaggcggcgacgagctgctgttcgtcgccgtggccgaggccgaagaggaactgcagaaactgctgctcggc

SEQ ID NO: 25487 - DNA, 10232 bp, Mycobacterium avium
gatcgggcgtttccgctgacgcgagggcagcttgatatctggttatcccaggaagccggtttcgccggcacccagtggcagctcggtctgctggtcaagatcgacggcaaggtccatcgcgacgcgctcgagcaggccatcacccaggccgtcgccgaagccgaacccggccgggtctcgttcttcgaggtcgacggccaggtggtgcagaagccgatcgactacccgcacgtcgagctggcttttcacgacctgaccgaccacgccgacccggtggccgaggcgcgggagatgtcgtccgccattcagcgcacgccgatgccgttgaacggccaaatgttcaaattcgtgcttttccaaacagggcacgacgaattctatttgtttggttgctgccaccacatagctatcgacggtctgggcatggctcttgtttgccgacgggtggccaccatttattcggcaatggtggccggtaagccgattccggacgcttacttcggcacggtgcaggacctgatcgacctggagtcgggctacgaggcctccccggactatgccgaggacaaggcgtactggagcgagcacctgccgccggagagcgggccggtcgaccggctgcccgacgccgaaggggagcgcgaccactactcgccgtccgcgtcggtacagctggacccgtccgtcgccaaccggatcaaggagctgtccaaaaagcttgccatccgccgcttttcggtcaccaccgccgcgtgcgcgctgttggtgcgcggctggtcgggtagcggatcggaggtggcgctggacttcccggtcagccggcgggtgcgtccggagtccaaaacgctgcccgcgatgctggccggcgtggtgccgctggtgctcagcaccgcgccggagtcgacggtcgccgacttctgcaagcacgtcgacaagcgcatccgcgagctgctggcgcaccagcgcttcccggtgcacaccctcgaaggcgacgggttgcggcaggcgcccaaccgggtcgggatcaacttcatcccgtcccggctgacgctggacctggccggttccccggcgacggcgtcgtacaccaaccacggcccggtggggcatttcgggttgttcttcctgggcgccggcgaccagctgttcctcagcaccgcgggcccgggccaaccgttcgccagcttcggcgtcgcggacctggccggtcggctgcagcagatcctggccgcgatgaccgaggacccggaccgcccgctgtcctcgatcgaactgctgaccggcgacgagcccgcgctgatcgaccggtggagcaaccgtccggcgctgaccgagcccgcacccgccccggtgtcgatcccccaggccttcgccgaacacgtgcagcgcacccccgacgcggtggcggtgacgttcggggcgacctcgctgacctacgcccagctcgacgaggcgtccaaccggctgggccatctgctcgccgaccacggcgtgggcccgggcgactgcgtggcggtgatgttcccccgctgcgccgacgccatcgtctcgatgctggcggtgctcaagaccggggcggcctacgtgccgatcgacccggcgcacgcgtcgtcgcggatggacttcgtgctcgccgacgccgcccccagcgcggtgatcaccacctccgacctgcgctcgcggctggacgatcacgacctcctcgtcatcgacgtgcacgacccggccgtcgaagcccagcccggcaccgcactgccgtggccggcgccggagaacaccgcctacatcatctacacctcgggaaccaccgggacccccaaaggtgttgccattcctcatctcaacgtcacctggctgatcgagtcgctggacgccggcctgccgcccggaaacgtgtggacgcaatgccactcgtcggcgttcgacttctcggtgtgggagatcttcggcgccctgctgcgcggccggcggctgctggtggtgcccgagtcggtggcgtcgtcgccggaagacttccacgccctgctggtcgcggagcaggtcagcgtgctcacccagacgccgtcggcggtggcgatgctctcacccgagggcctggagtccaccgcgctggtggtggccggcgaggcctgcccgaccgacgtggtcgaccggtgggcggcgcccggtcgggtgatgctggacgcctacggcccgaccgagaccacggtgtgcgcgtccatcagcacaccgctgacggccggcgaccccgtggtgccgatcggctcgccgatcgccggggcggcgatgttcgtgctcgacaagtggctgcagccggtgcccgccggcgtggtgggcgagctgtacctggccggccgcggcgtggggcacggctacgtgcgccggcccggcctgaccgcctcgcggttcgtgcccaacccgttcggggcccccggctcgcggatgtaccgcaccggcgacctggtgtgctggggccccgacgggcagctgcagtatctgggccgcgccgacgagcaggtcaagatccgcggcttccgcatcgagctcggcgaaatccagtcggtgctggccggtttggacggggtggagcaggcggcggtggtcgcccgcgaggaccggcccggcgacaagcggctggtcggctacatcaccggcaccgccgacccggccgagctgcgcgcgcagctggccgaccggctgccgccctacatggtcccgaccgcggtgatggtgctcgacgcgctgccgttgacaggcaacggcaagctggacaagcgcgcgctgccctcgccggaatacgccgccggcgaataccgggcgcccggcgacgcgatcgaggagatcctggccgacatctacgcccaggtgctgggcgtggagcgggtgggtgtggacgactcgttcttcgacctgggcggcgacagcatcctgtccatgcaggtggtggcccgcgcccgcgcggcgggggtgatctgtcggccgcgcgacgtgttcgtcgagcagacggtggcccggctggcgcgggtgtcccaagtggctgtcgacggcgagttgggcgcggccgacgaggggatcgggccggtgcggcccaccccgatcatgcgctggctgcaggacatcgacggcccgatcgacgagttcaaccagaccatggtgctggccgcgcccgccggggtcggtgtcgacgacgtcgcggtggtgctgcaggcactgctggaccgccacccgatgctgcggctgcgggtgcaggacgacggcgccggtggctggtcgctggaggcgcccgaggtcggctcggtgcgcgcggccgactgcctgcgcgcggtcgacagtttgtccgacgccgcgctcgtcgaggcgcggtcccggctcaacgtgtccgacggcgtcctgctgtccgcggtatgggcaagcgagacaagccaattggcgttggttgttcatcacctggcggttgatggggtgtcgtggcggacgttgatcgaggacatcaacatcgcctgggcgcagcatcagggtggtcaggagatcgcgttgccggtgccgggcacgtcgtttgcgcggtggtcgtcgattctggccgagtacgccaagagtccggcggtggtggctgcggcggcggcgtggcagcaggtggtggccacgccggcggtgttgccggcggtggggcccgatgacacgtatgcgtcggcggggcagttgtcggcgtcgctggatgtggagaccacccggttgttgttgggggaggtgccggcggcgtttcacgctggggtgcaggacattttgttgattgcgttcgggttggcctgcacggagttcgtgggtggtggcgcgccgatcggtatcgacgtggagggtcacgggcggcacgaggagatcgcctcgggggtggatctgtctcgtacggtgggctggttcaccacgaaatatcctgtggcactgaggatgggccggcgtctggattgggcgcgggtggtggcgggggaggccgcgctgggcgcggtgatcaaggatgccaaggagcagttgcgggcgctgcccgacggcctgagctacgggttgctgcgctatttgaaccccgagatcgaggtgcaggggccggatccggtgatcggattcaactacctgggccggctgggtgccggcgccgacctgtccgaggagatgtggcgggtcagcgccgacagcctgtcatcggccgcggtggcaacggccgtgccaatgccgttggcgcacaccgtcgaactcaacgccggcaccatggacaccgacgccggcccgcagttgcacgccaactggcgctgggcgcgctccgtgctcaccgacgagcagctaaaccggttgagccggttgtggttcgaggcgctgaccggcatctgcgcgcacgtgcaggccggcggcggcgggctgacgccgtccgacatcgcgcccgcccgcctcgaccagcagcagatcgacgaactctgccagcagcaccagatcgccgacgtgctgccgctgagcccggtccagcaggggctgctgttccacaccggcttcgcccaggaactcgaagacctctacgccgtgcagctcggcatcaccgtgagcggcaccctcgacccgcacaggctgcgcgacgcggtgcagaacgcggtcaaccgccaccccaacctggtcgcccgcttcttcgacgaattcggcgagccggtgcagatcattcccgccgaacccgaaatggcttggcgctacctcgaactcgacggtggcgacatcgacggacagctcgagcagctgtccgcggacgaacgcgccgccgtgtgcgatttggccggccagcccgccttccgggccgcgctgatccgcatcgccgacgaccggcaccggctgctgctcaccatccaccacatcgtgatcgacggctggtcgctgcccgtgcttctccaagaggtgttcgccggctactacggccagcggctgcccgcgccgccgtcgtaccgcagctacctgatgtggctgtccgcccaggaccgggccgccgcccaggacgcgtggcgcgaggccctggccgggttcgagaccccgaccctggtggccccgccgggcaagatcgggcggcgcgccgttgccacctatacggtttcggccgacaccaccaaggcgctcggcgagctggcccgctccagccgcaccaccgtcagcaccgtcctgcagggcgcctgggcgcagctgctcacctggctgaccggccagcacgacgtcgccttcggcaccgccgtctccggccggcccaccgagctgcccggcgccgacgccatggtcggcttgttgatcaacaccgtgccggtgcgcgccgacatcgccgccgcgaccaccgtcgtcgacctgctcgagcagctgcaacgcgcgcacgccgacacgctcgagcatgaacacttggcgctcaacgaaattcaccgcgtcaccgggcacgaccaactgttcgacaccctgttcctctacgagaactacccgatcgacgccagcgcgctgctcgacgtgcacgagctggccgtcaccgagttcagcagccgcgaattcaaccactacccgctgtcggtggtggccaccccgggccacgaactgagcctgcgggtcgagtacgacaccgaggtgttcgacgaggccggcatcgaaaccctgatcgagcggctgcgccaggtgctggcggccatgaccaccgatcccgggcagcggctgtcggcgatcgacctgctcgacgccgccgagcatgagcggctcgacgcctggggcaaccgggcggtgctgacccggcggcccgccgcgcaggcctcgatcccggcgctgttcgccgcgcaggttgcccgcgccgccgacgcggtggcgatcacctgcggcgagcggtcgttcacctaccgcgaggtcgaggagtcggcaaatcggttggcgcacttgctttccgggcagggcgcgggcccaggtcagcgggtggcggtggtcattccgcgctcggccgaggcagtggtggcgatcttcgcggtgctcaagaccggcgccgcctacgtgccgatcgaccccggcgtgccggcggcccggctgcagttcgtgctcgctgactccgcacccgtcgccgcggtcaccacggcggaggtgcgcgaccggctggacgggttcaccggccagatcatcgatttcgacgaccccgccgtcgccgagcagcccgccaccggcctgcccgtcccggccgccgacaacatcgcctacatcatctacacgtcgggcaccaccggaatccccaagggcgtggccatcccacaccgcaacgtgacgttgctgctggagacactcgacgctcagctggggttgggccaggtgtggacgcagtgtcactccctggcgtttgacttctcggtgtgggagatcttcggcgcactcctgcacggcgggcggctcgtcatcgtccccgacgacatcgtccggtcaccagaagacttgcacgcgttgttggttcgtgagcaggtcagtgtgttgagtcagacgccgtcggcgttttatgcgttgcagagtgctgatgcgttggcgccggagttgggtcagcagttgaagttgcagacggtggtgttcggtggtgaggcgctggaaccgcatcggttggcgacgtggctgcatcgtcatccggggttgccgcggatgatcaatatgtatggcattaccgagacgacggtgcatgcgtcgttccgggagatcgtcgatgccgatgtggatagcagcgtcagcccgatcggcgtgccgctggccaatctggccttctttgtgttggacgggtggttgcgcccggtcccggtcggtgtggtcggcgagctctacgtggccggtggcggcctggccaccggctacgtcggcaggcccggcctgtccgccacccgcttcgtggcgtgcccgttcggcgggcccggcgcgcggatgtaccgcaccggcgacctggtgcgctggggcgccgacgggcagctgcagtacatgggccgcgccgacgcgcaggtcaagatccgcggttaccgcatcgagctcggcgagatccaggccgccctggccggtttggacggcgtcgagcacgccgccgtgatcgcccgcgaggaccggcccggcgacaagcgcctggtcggctacatcaccggcaccgccgacccggccgaggtccgcgcgcagctgggcgagcggctgcccggctacatggtgccctcggcggtggtggtgctcgacgcgctgccgctgaccgtcaacggcaagctggacacccgggccctgcccgcgcccgaatactccgacgtcgaccggtaccgcgccccggtgaccgcgatcgaggagatcctggccgacatctatgcccaggtgctgggcgtggagcgggtcggggtggacgactcgttcttcgacctgggcggcgacagcatcctgtccatgcaggtggtggcccgcgcccgggccgccggcgtgatctgccggccccgcgacgtcttcaccgagcagacggtggcccggctggcccgggtcgccaccgtcgccaccggcgacgacgacgtcgtcgacgagggcaccggccgggtggtggccaccccgatcatgcgctggctgcagaacatggacggcccggtcgagcagttcaaccagaccatggtgctggccgcccccgccggcgtcacccccgacgacgtggccgcggtgctgcaggcgctgctggaccggcacgcgatgctgcggctgcgggtcgaggacgacggcgccggcggctggtcgctggaggtgcccgaggccggctcggtgcaggccgccgactgcctggagaccgtggacgcgttgtcgccggcggcgctggttgacgcccggtcgcggctgaacctcgccgacggcatcctggtgcgcgccgtatgggcaagcgagacaagccaattggcgttgatcatccaccacctggcggtcgacggggtgtcctggcggaccctgatcgaggacctcaacatcgcctgggcgcaacaccacagcggccagccggtggccctgccgaccggcggcatgtcgttcgcccgctggtcggcgctgctcgaggaccacgcccgccggcccgaggtggtcgagcgcgccgaggactggcggcaggtggccgccgtcccggcggtgctgcccggggcgcaacccggggacacctacgcgacggccgggcagttgtcggcgtcgctggacgtggagaccacccggctgctgctgggcgaggtgcccgcggcgtttcacgccggggtgcaagacattctgctgatcgcgttcgggctggcctggacacagttcatcggcaccggcgcgccgatcggcatcgacgtggagggccacggccgcagcgaggagctgggcccgcaggtcgacctgtcccgtacggtgggctggttcacggccaagtacccggtggcgctgcgcctcggcgggctgtcctggggtcaggtggtcggcggcgacgaggcgttgggcgcggtggtcaaggaggccaaggagcaactgcgggccctgcccgacggcctgacctacgggttgctgcgctacctgaatccccaagcggggctggatgtttcggatccggcgatcgcgttcaactacctgggccggctcggcggcggggccgccgagctctcacccgagctgtggcggctgagcccggacagcttcgcgctggccggcgcggccggggcggtggagctgccgctgccgcacaccgtggagctcaacgccggcaccatggacaccgaggacggcccgcacctgcaggccaactggacgtgggcccgctccgcgctggacgacaagcagatcggccggctttccgagctgtggttcgacgccctggccggcatctgcacgcacgtgcgggccggcggcggcgggctgacgccctcggacgtcgccgccgcccggctgacccagcgggacctcgacgagctggctcagcggtaccgggtcgccgacgtgttgccgctgaccccgctgcaacaggggctgctgttccacgccggcaccgcgcagggcagccaggaacccgaagacctctacgccgtccagctggacatctccgtgaccggcgccgtcgaccccgaccggctgcgcgaggcggtgcggaccgtcatcacccggcaccccaacgtggtggcccacttcagcgaggacttcggcgagccggttcagattctgtccgccgagcccgagctggcctggcagtacgtcgagctggacgccggcgccgacctcgacgagcaggtggagcggctgtcgtcggccgaacgcgtcgccgtcggcgacctggcccagccgccgttccggggcgcgctgatccgcaccgcggaggacgcctaccggttcgtgctcaccaaccaccacatcgtgctggacggctggtccaagccgctgctgctgcaagagatcttcgccgcctatttcggggtgcggctgcccgcgccggtgccttaccgcaacttcatcacctggctgtcggcgcaggaccgggccgcggcgcaggcggcctggcgcgaggtgctggccggtttcgacacccccaccctggtgggcccgtcgggccggatggccctcgggccgcgcggcgtggccgagttccacgttcccgccgacaccagcaggctgctcggcgagctggcccgctcctgccgcaccaccgtgagcacggtgctgcaggcggcctgggcgcagctgctgatgtggctgaccgggcagcacgacgtggtgttcggcaccgcggtgtcgggccgtccgaccgaattggccggatccgagtcgatggtgggcctgctgatcaacaccgtgccggtgcgcgccacgatcggcgccgaaaccaccatcgccgacctgcttgaccagctacaacgggcttacacccacacgctggagcatcagcacctggcgctgaacgatatccatcgtgtaacggggcacgaccagattttcgacacaatgttcgtgtacgagaactatcccatcgatactgccgcgctatcggctgtggacgagttaactattactggatttacgaaccgggaatacaaccactatccactttcggtgcaagccgtgccgggccatgagatcggtcttcgcgtcgagttcgataccgacgtgttcggcgaggcaaggatcgaaaagctgatcgaacgattccggcgcgtgctggaagccatgaccgtggacttggaggaacagtc

SEQ ID NO: 25488 - DNA, 7656 bp, Mycobacterium avium
atgaccgtcggtgcgggacggcgattgttgtcgatcgatctgctggatggcggcgagcacgaccggctggacgagtggggtaaccgggcgatcctgaccaagccggtcaaggctccggcgtcgatcccggggatgttcgcggcccaggtggcgcgctccgcggaggccgtggcgctgtccttcgagggtcgctcgatgacgtaccgcgagctcgacgaggcgtcgaaccggctggcgcacctgctggccgagcagggcgcggcccccggcgagtgcgtggctttgctgttctcccggtccgacgaggcgatcgtgtcgatcctggcggtgctcaagaccggcgcggcctacctgccgatcgacccggcgctgcccgcggcgcggatggaattcatgctcggcgacgccaccccgatcgccgccgtcaccaccgccggcctgcgcgaccggctggagggcttcgacctgccggtgatcgacgtcgacgaggccgccgcggagatcgagcgcacccagcccagcagcgcgctgcccgggccgtcgcccgacgacatcgcctacatgatctacacctcgggcaccaccggcacccccaagggcgtggcggtcacccaccgcaacgtgaccgagttcctgaagaccctgcaccccaagctgccgtcgggcccgggacaggtgtggtcgcagtggcactcgctggtcttcgacgtctcggtgtgggagacctggggtgcgctgctgcacggcgggcgcctggtggtggtgcccgaatcggtggccggttcgcccgatgacctgcacgacctgctggtggccgagggcgtcaccgtgctcagccagaccccgtcggcggtgggcatgctctcgccggagggcctggactcgacggcgctggtcgtcgccggtgaggcctgcccggccgaggtggtcgaccggtgggcgccgggccgggtgatgatcaacgcctacggcccgaccgaggccaccgtgtacgccgcgatgagcgccccgctgaccgcggagtccggcgccccgccgatcggctcgccggttcccggcgcggcgctgttcgtgctcgacaagtggttgcggcccgcgcccgagggcgtggtcggcgagctgtacatcgccggccgcggcgtcgccaccggatacgcacgccgggcgggcctgaccgcctcgcggttcgtggcctgcccgttcggcgggccgggcgcgcggatgtaccgcaccggtgacctggtccggtggggcgccgacgggcaactgcaatacctcggccgcgccgacgaacaggtcaagatccgcggctaccgcatcgaactcggcgagatccagtccgccctggccgcgctcgacggcgtggaccaggccgccgtcatcgcccgcgaggaccgccccggcgacaagcgcctggtcggctacatcaccggcaccgccgacccggccgagctgcgcacccagctgggcaagcggctgcccgcctacatggtcccggccgcggtggtggtgctcgagtcgctgccgttgaccgtcaacggcaagctggacaagcgcgccctgcccgcgccggaataccacaagcgcgccggccagtaccgcgccccgtccaaccacaccgaggagatcctggccgacatctacgcccaggtcctcggcgtggagcgggtcggtgtcgacgactccttcttcgacctgggcggcgacagcatcctgtccatgcaggtggtcgcccgcgcccgggcggcgggggtgatctgccggccgcgcgacgtgttcgtcgagcagacggtggcccggctggcccgggtggccagcgacggcgccgacgaggagcaggtggtcgacgagggcatcgggccggtgcaggccaccccgatcatgcgctggctgcaaaccgtgcagggcccgatcgacgacttcaaccagaccatggtgctggccgcgccgtcgggcgtcaccgccgacgacgtcgcggtggtgctgcaggcgctgctggaccgccacccgatgctgcggctgcgggtcgaggacgacggcgccggcggctggaacctgcaggcgcccgagccgggctcggtgcgcgccgccgactgcctgcagtcggtcgacaccctgtccgacgcggtgctcgtcgcggcacggtcccggctgaacccgggcgccggcgtcatggtgagcgcggtatgggcaagtgagacaagccaattggcgttgatcatccaccacgtggccgtcgacggggtgtcctggcggaccctgatcgaggacctcaacatcgcctgggcgcaacaccacagcggccagccggtggcactgccggccggcggcacctcgttcgcccggtggtcgtcgctgctggccgaacacgcgctgaccccggcggtggtcgagcaggccgacgcctggcgcgaggtggtggccaccccggccgtgctgccggcggtacagcccgaggtggacacctaccagagcgccgagcagctgtcggtctcgctggacgtcgacaccacccggctgctgctgggcgaggtgcccgccgcgttccacgccggcgtgcaggacatcctgctgatcgccttcgcgatggcctggacgcaggtcgtcggcgccggcaccccgatcggcatcgacgtcgagggccacgggcgccacgaggagctgggcccgcacgtggacctgtcgcgcaccgtgggttggttcaccaccaaatacccggtggcgctggcgatcgacggcctggactgggccagcgtggtggccggcgacgacgcgctgggcgcggcggtcaaggccgccaaggagcagctgcgcgccctgcccgacggcctgacctacgggctgctgcgctacctcaacccggacgtcgacctcggcgggtccgacccggtcatcgggttcaactacctgggccggctgggcgcggccgcggacctgcccggcgagctgtggcggctgagcccggacagcctgtcgctgagcggcgcggccgccgcggtggcgatgccgctgatgcacaccgtggacctcaacgccggcaccatggacaccgaggacggcccgcacctgcacgccaactggacgtgggcgccctcggcggtggaccgcgaccagatcagccggttgagccagctgtggttcgaggcgctggccgggatctgcgcgcacgtgcgggccggcggcggcgggctgaccccgtccgacatcctgcccgcgcggctgaaccagcgccagatcgacgagctgagcaagcagcaccagatcgccgacatcctgccgctgaccccgctgcagcagggtctgctcttccacgccagcttcgcccaggacccgggcgacgacgtctacgcggtgcagctgggcatcacggtgaccggcgccctggattcgcaccgcctgcacgacgccgtgcacaccgtcgtcaaccgccaccccaacctggccgcccggttctgcccgcagtacggcgaacccgtgcaggtcgtcccggccgacccggtgatggcctggcggtacatccagctgggccccgaagacgtcgacccggaacaaaaggtggaggagctgtgcgccgccgaacgcgccgccgtcagcgacctggccaaccggccggcgttccgggccgcgctgatccgcaccgcggacaaccggcaccggttcgtgctgaccaaccaccacatcgtgatggacggctggtcgctgcccatcctgctgcgcgagatcctggccatctactacggcgaccagctgcccgcgcccgccacctaccgcagctacctgacctggctggccggccaggaccgcagcgcggcgcaggcggcctggcgtcaggtgctggacggattcgacacgcccaccctggtgggcccggccggccggatgcggctcggccggcgcgccgtggagtcctaccggctgtccgccgacaccacccgcgcgctgggcgagctggcccgcgcctgccacaccaccgtcaacacggtgctgcaggccggctgggcgcagctgctgatgcgactgaccggtcagcatgacgtggcgttcggcaccgcggtgtcgggccggccggccgacctggccggcgccgagtccatggtgggcctgctgatcaacaccgtgccggtgcgggccaacacccacgccgaaaccaccgtcgccgacctgctggaccagctgcagcagcaccacaacgacaccctggaacacgagcacctggcgctcagcgagatccaccgggtgaccgggcacgacgcgctgttcgacaccctgtttctgtacgagaactatccgatcgacaccagcgtgccgctgggattccacgagttggccatcaccgatgtcaccaaccgcgagtacaaccactacccgctgtcggtgatggcgctgccgggtcgcgagctcggcctgcgcgtcgaattcgacaccgacgtgttcgacgcggccggcatcgagaagctgaccgagcggttccagcgggtgctgtcggagatgacggccgacccgactcgacggctgacatcgctggaggtgatggacgaggccgagcacgagctgctcgacgcgtggggcaaccggccggtgctgagccagccggccaccggcacctcgatcccggcgctgttcgccgcgcaggtggcccgcaccccggacgcggcggcgctgaccttccagggtcgctcgatgagctatcgggaactcgacgaggcgtcaaaccggttggcgcacttgctgatcgaggagggcgccggcccgggcgagtgcgtggcgctgctgttctcccgctcggccgaggcgatcgtgtccatcctggcggtgctcaagaccggggcggcgtacctgccgatcgacccggcgctgcccgccgcgcgcatcgagttcctgctcggcgacgccgagccggtcgccgtggtcaccacggccgcgctgcggtcgcggctggacggctgcaagccgtcggtcgtcgacgtcgacgaccccgcgctggacggccagcccagcgccgcgctgcccgtcccgtcgtcggacaacattgcctacctgatctacacctcgggcaccaccggcgtgcccaagggggtggcggtcagccacgacaacgtcgcccagctggtggagtcgctgcacgccgacctgcccgagggcggggtgtgggcgcagtggcactcgctggtgttcgacgtgtcggtgcacgagatctggggtgcgctgctgcacggcgggcgcctggtggtggtgcccgagtcggtcgccgcctccccggacgagttgcacgacctgttggtcgccgagggcgtcaccgtgctcagccagaccccgtcggcggtgggcatgctctcgccggagggcctggactcgacggcgctggtcgtcgccggtgaggcctgcccggtcgagatcgtggaccggtgggcgccgggccgggtgatgatcaacgcctacggcccgaccgaggcgacggtgtacgccgcgatgagcacgccgctgcagcccggcaccgggtcggcgccgatcgggtcgccggtgccgcgcgccgcgctgttcgtgctggaccggtggctgcgcccggcacccccgggtgtggtcggcgagctgtacatcgccggtcacggcgtggccaccgggtacgcgcgccgatcgggcttgacggcgtcgcggttcgtggcctgccccttcggcggccccggcgcgcggatgtaccgcaccggcgacctggtccggtggaaccaggacggtcagctcgaatacctgggccgcgccgacgaacaggtcaagctgcgcggctaccgcatcgagctcggcgaggtgcaggcggcgctggccggcctggacggcgtggagcaggcggcggtgatcgcccgcgaggaccggcccggcgacaagcgcctcgtcggctacatcaccggcaccgccgacccggtcggcatccgcatccagttggccgagcggctgcccgcctacatggtgccggcggcggtggtggtgctggacgcgctgccgctgaccgtcaacggcaagctggacaagcgcgccctgcccgcccccgagtaccggaagcggggcggcgaatacatcgccccgacgaatccgaccgaggagaccgtggccggcatcttcgcccgggtgctcgggatggagcgggtctcgatcgacgactccttcttcgagctgggcggcgactcgctgtccgcgatgcgggtgatcgccgagatcaacaccgccgtcgacggcgcgctgtcggtgcgcaccctgttcgactcgcagtcggtgcgggcgctgagccagcggatcaccagcggcgccgacgccgagaacgccgcgggccccggcttcgcggcggtgcacggcgccgacgccaaggaggtgtacgcccgggacctgaccctggacaagttcctcgacgcgacgacgctgtcgaccgcgccgacgctgcccggtcccagccccgaggtgcgtaccgtcctgctgaccggggcgaccggctttttgggccgctacctggtgctggaatggctcgagcagctggagcaggtcgacggcaagctgatctgcctggtgcgggcccgctccgacgaggaggcctggggccggctggagaagaccttcaacaccggcgacccggagctgttgcggcacttccaggaactggccgaggaacacctgcaggtggtggccggcgacaagggccaggccaacctcggtctggacgagcagacctggcagcagctggccgacaccgtcgacctgatcgtcgactccgcggccgtggtcaacggcgtgctgccctacagcgagctgttcacccccaacgtgggcggcacggccgagctgatccggctggcgctgaccacgaggaagaagccgttcgcgtacgtgtcgacgtcggacgtgggacgccagatcgagccgtcggcgttcaccgaggacgccgacatccgggtcatcagcgccacccgcgtcatcgacggcagctacgccaacgggtacggcaacagcaagtgggccggcgaggtgttgctgcgcgaggcccacgacctgtgcgggctgccggtctcggtgttccgctccgacatgatcctggccgacaccagctacgccggccagctcaacgtgacggacatcttcacccggatgatcctgagcatcgtggccaccggcaccgcgcccaagtcgttctaccggctcgacgccgacggcaaccggcagcgctcgcacttcgacgccctgcccgtcgagttcgtcgccgaggcgatcgccaagctcggcgcccaggtgatggacgggttcgagacctaccacgtgatgaacccgcacgacgacgggatcgggctcgacgagtacgtcgactggctgatcgaggcgggctacccgatcgagcgggtcgacgacttcggcgagtggctgcaacgcttcgaaaccggtctgcgcgggctgccggaacggcagcggcagaactcggtgctgcagatgttgctgttgctgctgcgcgacccgaagaacctgcagctcgccgagccggcccgcggcgccttcgcgccgaccgaccggttccgggccgcggtgcaggaagccaaagtcggctccgacaatgacatcccgcacatcagcgcgccggtgatcgtcaagtacgtcaccgacctgcaactgctcggtttgctc

SEQ ID NO: 25489 - DNA, 4851 bp, Mycobacterium avium
atgacgatcgatcccagagctcagcaggatctcaagccgtggacgaccttcacccgacagcaggacatccccgagtggatctcgaaagcctatgtggagagctatcgcggtccgcatagcgacgaatccgggggcgccgaggccgggcccatcgacctgacggtcccgacggcgatcgtcaccccggccatgctcagcgcgcactaccggctcgggctgcatcgccccgacggcgaaagccgggtcgccgtctacccggccgacgatcccgccgggttcgggccggcgctgcaggtcgtcaccgaccacggcggcatgctgatggactcggtcacggtgctgctgcaccgcctcggcgtgccctacacggccatcatgacgccggtgttcgacgtgcaccgcagtcccgacggcgacctgctcagtctcgaacccaagccgcagggcgccccgcaatacgccggcgaggcctggatccacgtgcagctgctgccgtccgtcgacagcaagggcctcaccgaggcggagcggctgctgcccaaggtgctggccgacgtccagcaggtggccagcgacgcctcggccctgatcgccgtgctcgacgagctggccgccgcggtggaagccaaccgtgacaaccacttctcggcgccggaccgcgacgacgtcgccgcgctgctgcgctggctgggcaacggcaatttcctgctgctgggttatcagcgctgccgggtgcacgacggcctggtctccggcgacggctcaccggggttgggcgtgctgcgcacccgcaccgggtcacggccccggctcaccgacgacgaccggctgctggtgttggcgcaatccgtggtgggcagctacctgcgctacggcgcctacccgtatgcgatcgcggtccgcgagtatgtcgacggcgcggtgatcgagcaccgcttcgtcgggctgttcaccgttgccgccatgaacgccgacgtgctggagatccccaccatctcccgccgcgtccgcgaggcgctggccatggccgacagcgacccgatccatcccggccagctgctgctcgacgtcatccaaaccgtgccccgctcggaactgttcacgctgagctccgagcggctgctggcgatggccaaagcggtggtggacctcgggccgcaacgaaacgcgttgctgttcctgcgcgccgacagcctgcagtacttcgtctcctgcctggtctacctgccccgcgaccgctacaccaccgcggtgcggctgcagatcgaagacatcctggtccgcgaattcggcggcacccgactggaattcaccgcccgggtcagcgaatccccttgggcgctcatgcatttcatggttcgcctgcccaccgacgatcccgccgccaagcccgtggacgtctccgaggacaaccgggtccgcatccagggcctgctgagcgaagcggcccgcacctggaccgaccggctggtcgcggccgccgccgagggcgcggtggggcacgccgacgcggagtactacgcggacgccttccccgaggtctacaagcaagccatcagcccggccgatgcgatcggtcacatcgccatcatcaaagagctgcaagacaattcggtcaagctggtgttcaccgacggcgaggacggatccgcgcagctgacctggttcctgggcgggcgcaccgcctcgctgagccagctgctgccgatgctgcaaagcatgggtgtggtggtgctcgaagaacgcccgttcaccgtcacccgctccgacgggctgccggtgtggatctaccagttcaggatctcaccgcacccgaccatcgagctggcgtccaccccggacgagcgcgacgcgatggccgagcgattcgccgacgccgtcaccgcgatctggcagggccgcctcgaggtcgaccgcttcaacgaactggtgatgcgcgccggcctgcgctggcagcaggtggtgctgctgcgcgcctacgcaaagtacttgcggcaggccaactttccctacagccagtcctacatcgaggcggtgctcaacgagcatccgtccaccgcccgctccttggtggcgctgttcgaggcgctgttcgaccccgaccccgactcctcggcgggtcgcgacgcgcaggcggccgccgcggcggtggccgccgacatcgacgcgctggtcagcctggacaccgaccgcatcctgcgggcgttcgcgtcgctggtgcaggccacgctgcggaccaattactttgtcacccgcgagggttcggcccgtgcccgcaacgtgttggtgatcaagctggacgcccagctgatcgacgagctgcccctgccgcgccccaagtacgagatcttcgtctactcgccccgggtcgagggcgtgcacctacggttcgggccggtggcccgcggcgggctgcgctggtcggaccgccgcgacgacttccgcaccgaaatcctgggcctggtcaaggcgcaagccgtcaagaacgccgtcatcgtgccggtcggggccaagggcggcttcgtcgtcaagcggccgccgctgcccagcggggacggcgccgccgaccgcgacgccacccgcgccgagggggtggcctgctatcagctgttcatctcgggcctgctcgacgtcaccgacaacgtcgaccacgcgactggaaaggtcagcccgccaccggaagtggtgcgccgcgacggcgacgacgcctacctggtggtggcggccgacaagggcaccgccaccttctccgacatcgccaacgacgtcgccaagtcgtacggattctggctgggtgacgcgttcgcctccggcgggtcggtcggctacgaccacaaggccatgggcatcaccgcccggggcgcctgggaggcggtcaaacggcacttccgggagatgggcgtcgacacccagaccgaggacttcaccgtggtgggaatcggcgacatgagcggcgacgtgttcggcaacggcatgctgctgtccaagcacatccggctcctggccgccttcgaccaccgacacatcttcctcgacccgaaccccgacgccgcggcgtcctgggaggaacgccgccgcatgttcgagctgccccggtccagctgggacgactacgacaagtccctgatcagcgagggcggcggggtgtacagccgcgagcacaaatccattccggtcagcccccaggtccgcgacgcgctgggcttggacggctcaggcggcggcgtcgtcaccgagatgaccccgcccaacctgatcaaggcgatcctgcaggcgccggtggacctgctgttcaacggcggcatcggcacctacatcaaggccgagtccgagtcggacgccgacgtcggcgaccgcgccaacgatccggtgcgggtcaacggatcctcggtgcgcgccaaggtgatcggcgaaggcggcaacctcggggtgacggcgctgggccgcgtcgagttcgacctgtccggcggccggatcaacaccgacgcgatggacaactccgccggcgtggactgctccgaccacgaggtcaacatcaagatcctgatcgactcgctggtcaccgcgggcaaggtcaagccgcaggagcgcaaaccgctgctggagtcgatgaccgacgaggtcgccgcgctggtgctcaccgacaacgaggaccagaacgacctgatcggcaccagccgggccaacgcgcccagcctgctgccggtgcacgcccggcagatccagtacctggtcgacgagcgcggcctcaaccgcgagctggaagcgctgccgtcggagaaggagattcagcgccgcgccgaggccgggatcggcctcacctcacccgaactgtgcacgctgatggcgcacgtgaaactggacctcaaagaacagatgctgcagaccgagctcaccgagcaggatgtgttcgcgtcccggttgccgctgtacttcccgacgccgctgcggcaccggttcaccccggagatccgcgcgcatcagctgcgccgcgagatcgtggccaccatgctgatcaacgagctggtggacgccgccggcatcagctacgccttccggatcgtcgaggacgtcggcgtatcggcggtggacgcggtgcgcacctacgtggccaccgatgccatcttcggtgtgggggagatctggcgccgcatccgcgccgcgaatctgcctgtggcgctgtcggatcggctcaccctggatacccggcggctgatcgaccgggccggccgctggctgctcaactaccgtccccagccgttggcggtgggcgccgagatcaaccgattcgccgccaaggtcaaggcgctgacaccgcgcatgtcggaatggctgcgcggggacgacaaggccatcgtcgaaaaggaagccgccgagttcgagtcccagggcgccccccgtgacctggcctacctggtggccgccggtctctaccggttcagcctgctcgacatcatcgacatcggcgacatcaacgacatcgacgccgccgaggtcgccgacacctatttcgcgctgatggaccggctcggcaccgacggcctgctgaccgcggtgtccgagctgccgcgcaacgaccggtggcactctttggcgcgtttggcgatttgcgacgacatctacgcctcgctgcgctcgctgtgcttcgacgtgctggcggtgggcgagcccgacgagagcggcgaagagaagatcgccgagtgggaacacctgtccgcctcccgggtcgagcgggcccgccgcacactgatcgagatccaggaaagcggggccaaggatctcgcgacgctgtctgtcgccgcgcgacaaatccgtcgcatgacccgcaccagcggaagaggttcatcgagt

SEQ ID NO: 25490 - DNA, 1278 bp, Mycobacterium avium
atgtcggcgccgctcgccgacatcgaccccgacatcgccgggttgctgggtcaggagctgggccgccagcgcgacacgctggagatgatcgcctcggagaacttcgtcccgcgcgcggtgctgcaggcccagggcagcgtgctgacgaacaagtacgccgaggggctgcccggccgccgctactacggcggctgcgagtacgtcgacgtggtggagaacatcgcccgggatcgggccaaggccctcttcggcgccgacttcgccaacgtgcagccgcattcgggtgcccaggccaacgcggccgtgctgcacgcgctgatgacgccgggggagcggctgctgggtctggacctggccaacggcgggcacctgacgcacggcatgaagctgaacttctccggcaagctctacgacgtcggcttctacggcgtcgacccgaccacgcacctgatcgacatggacgcggtgcgggccaaggccctcgagttccgtcccaaggtcatcatcgccggctggtcggcctacccgcgggtgctggacttcgcggcgttcgcgtcgatcgccgacgaggtcggcgccaagctgtgggtcgacatggcacacttcgcgggcctggtcgccgccgggctgcacccgtccccggttccgcacgccgacgtggtgtccaccaccgtgcacaagacgctcggcggcccgcgctccggcctgatcctgggcaagcaggagtacgccaagtcgatcaactccgcggtgttccccggccagcagggcgggccgctcatgcacgtcatcgccgccaaggccgtcgcgctcaagatcgccggcacggaagagttcgccgaccggcagcggcgcaccctgtccggggcgcgcatcctcgccgagcggctgtcgggcgccgacgtggcggccgccggcgtgtcggtcgtcagcggcggcaccgacgtccacctggtgctggtcgacctgcgcaactcggagctcgacggccaggccgccgaggacctgctgcacgagatcggcatcaccgtcaaccgcaacgccgtgcccaacgatccccggccgccgatggtcacctccgggttgcgggtgggcacgccggccctggccacccggggcttcggggacgccgagttcagtgaggtcgccgacgtcatcgccaccgcgctggcgggcggccgcggggccgatctggcggcgctgcgggaccgggtcacccggctggccagggatttcccgctgtacgagggcctcgaagactgggcgctggtcggccgg

SEQ ID NO: 25491 - DNA, 993 bp, Mycobacterium avium
atgcggtacaacggctccttgagtcgcggcggaatgatttccacgaacacacaccctactgccagcggcgatcgtttcaccggtgctgatttcggccgcgtcgtgcgggccgtcgccgcacagctcgcgacggcgccgcggccgttcctggctactctgactggtgagcagccgccggccgcatcccttgcatccctatccggcagaccacccccaggagacatgagcagccagaccagcaccgcccccaacccggagcccgatcacgaggcgatcgtcccgggcaacaccgtcgagcagctcgtcgaaggcgccgcccaggttctgggcaagccgcggatgcgcggctggatccacttctactcggcgtggctggccgtcatcaccggcgccacgctggtgtcggtgtcgtgggcggccgcctcgccgcgcgccgggcattcgacgctgatctacgccgcggccacggtcgcgctgttcgcggtcagcgccacctatcaccgggtgaagtggaagaccgaggccgcccgcacccggatgaagcggctggaccactcgatgatcttcgtgttcatcgccggcagctacaccccgttcgcccggctggtgatgccgcagaacaccggggtggtggtgctgtgcatcgtgtggggcggcgcgctggcgggcatcgcgctcaaggtctgctggccgaccgcgccgcgctggctgggggtgccgctgtacctgctgctgggctgggtggccatctggtatgcgccgacgatcctgcaccaggccggggtggccgcgatggtgctgctggcggtgggcggggtgctctacagcgtgggcggcatcttctacgcgctgcgctggccggatccgtggcctagcacgttcggctaccacgagttcttccacgccctcaccgcgatcgcggcgatcctgcactacatcgccatgtggttcgccgtgttctacaccggcgaccatgcgtggctggccacggca

SEQ ID NO: 25492 - DNA, 471 bp, Mycobacterium avium
gtggcagattcactcgtcgtcgcccaatccgtcgtcgcccccgtcgccgcgccggacgcgttcggacgcacgctgccgatgccgctgccgacgctgttcaaccggtggtacggccccttcccgccgatcagggaggtgcgcggacagaccggggactgggacgcggcgggccggcagcgcatcgtgcacctggccggcggtgccagcatgcgcgaggaactgaccagcgtcgacccgccgcggtcgttcggctaccggctcagcggcatcaccggcccgatggcgctgctggtgaatcatgtgctgggcgaatgggttttcaccccggcggccggcggaaccgagatcacctggcgttgggacattcatcccaggtcgccgctgaccgcctgggcgcttccactgctgggcaggatgtggcagggctacgcgcgacgcgcgctggacaacctggtggccttgctcacccgc

SEQ ID NO: 25493 - DNA, 1245 bp, Mycobacterium avium
gtgacccgggccgctacctccgaaccgaactccgccgagaacccatttccggtgcgcgcggtggcaattcgggtcgcgagctggatcgacaggctgggcacggtatgggtggagggtcagctggcccaggtgtcgctgcggccggactccaaaaccgtgttcatggtgctgcgtgacccggccgccgacatgtcgctgaccgtgacctgcccgcgcgacctggtgctcaacgccccggtgaaactggccgaaggcacccaggtggtggtgtgcggcaagccctcgttctacaccggccggggcacgttttcgctgcggctgtccgagatccgcgccgtcggggtgggcgaactgctggcccgcatcgagcggctacgccgactgctggacgccgaagggcttttcgaccctcgcctcaagcggccaattcccttcctgcccaacatgatcgggctgatcaccggccgggcgagcgccgccgagcgggacgtgaaaaccgtcgcggcggggcgctggcccgcggtgcgtttcgccgtgcgcaacaccgcggtgcagggacccaacgcggtcgcgcagatcgtggaggccctgcgcgaactcgaccgggaccccgaggtcgacgtcatcgtgctcgcccgcggcggcggcagcgtggaggacctgttgccgttctccgacgagacgctgtgccgcgccatcgccgcctgccgcaccccggtgatcagcgcggtcggtcacgaacccgacaacccgctgtgcgatctggtcgccgacgtgcgcgcggccacccccaccgacgccgcgaagaaggtggtgcccgacaccgcggccgaacagcggctgatcgacgacctgcggcggcgcagcgcacaggcgttgcgcaactgggtatctcgcgagcaacgcgcgctggcccagatccgcagccgcccggtgctggccgagccgctgcgcgcgttgaccgcacgcgccgaggaggtgcaccgcgcccggtcggcgattcggcgcgacgtcacccggttgaccgccgccgaaaccgagcggatcggccacctgcgcgcccggctggcgacattgggcccggcggccaccctggcccgcggttacgccgtggtgcagaccgtcggcgccggcggcccccacgtgctgcgtacggtcggcgacgcgccggcgggcacccggctgcgggtccgggtcgccgacggcgccgtggcggcgctgagcgagggaccgaccgatggcgaa

SEQ ID NO: 25494 - DNA, 1098 bp, Mycobacterium avium
atgatcggccccatgggtgatccatcgctgacggccgaactgggtcgcgttctggtcaccgggggctccgggttcgtcggcgccaacctggtgaccaccctgctcgagcgcggatatcaggttcgctccttcgaccgcgccccctcgccgctgccggcgcacccacacctggaggtgctgcagggcgacatcaccgacgccggtgtgtgcgccgccgcggtcgagggcatcgacacgatctttcacaccgcggcgatcatcgacctgatgggcggcgcctcggtcaccgaggagtaccggcagcgcagcttcgcggtgaacgtcggcggcaccgagaatctggtccgtgccgggcaggcggccggcgtgcagcgcttcgtctacacctcgtcgaacagcgtcgtcatgggcggccagaacatcgtcggcggcgacgagaccttgccctacaccgaccggttcaacgacctctacaccgagaccaaggtgctcgccgagcgattcgtcttgggccagaacggcgttgacggcatgctgacgtgtgcgatccggcccagtggcatctggggccggggcgaccaaaccatgttccgcaagctgttcgaaagcgtgatcgccggccacgtcaaggtgctgatcggccgcaaatccgcccgattggacaactcttacgtgcacaacctgattcacggtttcatcctggcggcccagcacctgacgcccggcggcaccgcgcccggtcaggcgtacttcatcaacgacgccgagccgatcaacatgttcgagttcgcccggccggtggtcgaggcctgcggcgtgaactggccccgggtccgggtcaacggccccatcgtgcgcgcggcgatgacgggttggcagcggctgcatttcaggttcgggatcccggcgccgctgctcgagccgctcgcggtcgagcggctgtatctggacaacttcttctccatcgccaaggcctcgcgcgacctcggctatcagccgctgttcaccaccgagcaggcgatgtcggaatgcctgccgtactacgtcggcatgttcgaacagatgaagcgacaagccttggcgggcaaggcatccgcc

SEQ ID NO: 25495 - DNA, 1077 bp, Mycobacterium avium
atgacagttgagggcgaccgctcgtccgccgccaccggccgggccccggcgcagggccggccgcgcggcgaggcaccagaccgcaacctggcgttggaactggtccgcgtcaccgaggccggcgccatggccgccggccgctgggtcggccgcggcgacaaagagggcggcgacggggcggcggtcgacgcgatgcgtgagctggtcaacacggtgtcgatgcgcggtgtggtggtcatcggcgagggcgagaaggaccacgcgccgatgctctacaacggcgaggaggtcggcaacggcgacggcccggaatgcgacttcgccgtcgacccgatcgacggcaccacgctgatgagcaagggcatgcccaacgccatctccgtgctggcggtggccgaccgcggcgccatgttcgacccgtcggcggtgttctacatgaacaagatcgccgtcgggcccgaggccgcgcacgtgctggacatcaccgcgccgatcgccgagaacatcaaggccgtcgccaaggtcaaggccctgtcggtgcgcgacatgaccgtgtgcatcctggaccggccgcggcacgcgaagctcatcgacgaggtccgcgagaccggggcccggatccggctgatcaccgacggcgacgtggccggcgcgatctcggcctgccgcccgcactccggcaccgacatgctggccggcatcggcggcaccccggagggcatcatcgccgccgccgccatccgctgcatgggcggcgccatccaggcgcagctggccccccgcgacgacgaggaacgccagaaggccatcgacgccggctacgacctggaccagatcctgacgaccgaggacctggtctccggtgagaacgtcttcttctgcgccaccggggtcaccaacggtgacctgctcaagggtgtgcagtactaccccggcggctgcaccacccagtcgatcgtcatgcgatcgaagtcgggcaccgtccggatgatcgaggcctaccaccggctgtcgaagctcaacgagtactccgccatcgacttcaccggcgacagctctgccgcctatcccctgccc

SEQ ID NO: 25496 - DNA, 597 bp, Mycobacterium avium
atgtttaccggaattgtcgaggagctcggcgaggtgaccgcccgcgacgtgctcgccgatgcggcgcggctgaccatccgcggggccgtggtgaccgccgacgccgggcacggcgattcgatcgccgtcaacggtgtctgcctgaccgtcgccgagctgctgcccgacggccggttcagcgccgacgtgatgggcgagacgttgaaccgatccaacctgggcgcgctgcaggtcggcagccgggtgaacctggaacgcgcggccgccgtcaacagccggctgggcgggcacatcgtgcagggccacgtcgacggcaccgggcggatcgtggcgcgcaccccgtccgagcactgggaggtggtgcgcatcgaggtgccgccggaggtggcccgctacgtggtggagaaggggtcgatcacggtcgacggcatctcgctgacggtgtccgggctaggcggcgagccccgcgactggttcgaggtgtcgctgatccccaccacccgggagctgaccacgctgggtggcgccccggtggggacgcaggtcaatctcgaggtcgacgtgatcgccaagtacgtcgagcggctgatgtcccgc

SEQ ID NO: 25497 - DNA, 1314 bp, Mycobacterium avium
gtgttcccgcggccaagcggggacggcgaggtagcagagatgacgaggttggactccgtcgaaagggcggttgccgacattgcggccggcaaggccgtcatcgtcatcgacgacgaagaccgggagaacgagggcgatctgatcttcgccgccgagaaggcgacgccggagatggtggcgttcatggtgcgctacacctcgggctacctgtgtgtgccgctggacggggcgatctgcgaccgcctgggcctgctgccgatgtatgcggtcaaccaggacaagcacgggaccgcttacacggtcacggtcgacgcgagaaacggtgtgggcacagggatttcggcctcggaccgggccaccaccatgcgcctgctggccgatcccaccagcatcgccgaggatttcacccggcccggtcatgtggttccgttgcgcgccaaggacggtggcgtgctgcgccggcccggtcacaccgaggccgccgtggacctggcccggatggccggcctgcagccggccggcgccatctgcgagatcgtcagccagaaggacgaaggctcgatggcgcagaccgacgagctgcgggtgttcgccgacgaacacgacctcgccatgatcaccatcgccgacctgatcgagtggcgccgcaagcacgagaagcacatcgagcgcatcgcggaggcccggatcccgactcggcacggcgagtttcgcgccatcggttacaccagcatctacgaggaggtcgaacacgtcgcgctggttcgcggcgagatcgccggccccaactccgacggcgacgacgtgctggtgcgggtgcactcggagtgcctgaccggtgacgtgttcggttcgcgccgttgcgattgcggaccccagctcgacgccgccatggccatggtggcccgcgaggggcgcggcatcgtgctgtacatgcgcgggcacgagggccgcggcatcgggctgatgcacaagctgcaggcctaccagctgcaggacgccggcgaggacaccgtcgacgccaacctcaaactcggatttcctgctgacgcaagggattacggaatcggcgctcagatcctggtcgatctgggggtgcgttcgatgcggctgctgaccaacaaccccgccaagcgggtggggctggacggctacggtctgcacatcatcgagcgggtgccgctgccggtgcgcgccaacgccgagaacattcgttacctgatgaccaagcgcgataagatgggccacgatctggccgggctggatgattttcatgaatcggtccatctgccaggcgaattcggcggcgccctg

SEQ ID NO: 25498 - DNA, 489 bp, Mycobacterium avium
gtggcgcccatgagcccagccgccggcgtgccggagatgccggcgctcgacgcgtccggcgtgcggctgggcatcgtggcgagcacctggcacagtcggatctgtgacgcgctgctggccggtgcccgcaaagtcgccgccgactcgggagtcgagaaccccacggtggtccgcgtgctcggtgccatcgaaatcccggtggtcgcacaggaactcgcccgcaaccacgacgccgtcgtcgcgttgggcgtcgtgatccgcgggcagacaccgcatttcgagtacgtctgcgacgccgtcacccagggcatcacccgggtttcgctggacgcgtcgacgccggtcgccaacggcgtgctgaccaccgacaacgagcagcaggcgctggaccgggccgggctgccggactcggccgaggacaagggggcccaggcggccggggcggcgctgtccgccgcgctcaccctgcgtgagttgcgcgctcggtcg

SEQ ID NO: 25499 - DNA, 930 bp, Mycobacterium avium
gtgacgggcccgggtgagctcgcggggagccggccggtggacgcgcacctggaaaacggggcgggcatcgacgtcgtgctggtgaccggattgtccggcgccggacggggtaccgcggccaaggtgctcgaggacctcggctggtatgtggccgacaacctgcccccgcagctgatcacccggatggtcgacctgggcatggacgccggctcgcggatcacccagctggcggtggtgatggacgtgcgctcgcgcggtttcaccggcgatctggactcggtgcgcaccgaactggccacccgcaacatcgctccgcgggtggtgttcatggaagcatccgacgacatgttggtgcgccgctacgagcagaaccgccgcagccatccgctgcagggcgatcagacgctggccgagggcatcgccgccgagcggcggatgctggcgccggtgcgggccaccgcggatctgatcatcgacacctcgacgctgtcggtgcgggccctgcgcgagaccatcgagcgggcgttcggcggcggcgccagcgcgaccatcagcgtcaccgtcgagtcgttcggcttcaagtacggcctgccgatggacgccgacatggtgatggacgtgcgcttcctgccgaacccgcactgggtcgacgaattgcggccccgcaccgggcaggatcccgccgtgcgcgactacgtgttgggccagcccggcgcggccgagtttctcgacgcctaccatcggttgctgtctctggtcgtcgacggctaccgccgggagggcaagcgctacatgacgatcgccatcggctgcaccggcggcaagcatcgcagcgtcgcgatcgccgaggcgctgatgcaacggctgcaggcccagcacggtgaggcccaactgtcggtgcgggtgttgcaccgggatctgggccgcgaa

SEQ ID NO: 25500 - DNA, 1074 bp, Mycobacterium avium
atgagcgagccgatcaaccggggcatcgtcgcgctgggcggcggacacggcctgtacgcgacgctctcggcggcccgccggctcaccccctatgtcaccgccgtggtgaccgtcgccgacgacggcgggtcttcgggccggctgcgcagcgagctgggcgtggtgccgccgggcgatctgcgaatggcgttggcggccttggcttctgacagcccgcacggccgactgtgggcgaccatcctgcagcaccggttcggcggcagcggcgcgcttgccgggcacccgatcggcaacctgatgctggccgggctctcggaggtgctggccgacccggtggccgccctcgacgagctgggccgcatcctcggcgtcaagggccgggtgttgccgatgtgcccgatcgcgctgcagatcgaggccgacgtgtcgggcctggaggccgatccgcggatgttccgggtcatccgcgggcaggtggcaatcgcgaccacgcccggcaaggtgcgtcgggtgcggctgctgccggacaacccgccggcgacccggcaggccgtcgacgccatcatggccgccgacctggtggtgctcggcccgggctcgtggttcaccagcgtcattccgcacgtgatggtgcccgggctggcggcggcgctacgggcgaccaccgcccgccgcgcgctggtgctcaacctggtggccgagccgggggagacggcgggcttctccgtcgagcgtcatctgcacgtactcgcccagcacgcaccgggattcaccgtgcacgacatcatcatcgacgccggacgggtgcccagcgagcgggaacgcgagcaattgcgccgcaccgccacactgctttcggccgaggtccacttcgccgacgtggccagacctggtacacctttacatgatccaggcaagctcgcggcggccctggacggggtccgggcggcccgcaaggccccgggcgcatccccggtcacggccaccgcggatattcgggttgacggtgcaagcccaccggcaggtggcaacggaccggccggcagcggaccaaggggtgacgacgcgtggcga

SEQ ID NO: 25501 - DNA, 981 bp, Mycobacterium avium
gtggcgatgacgaccgaagtcaaggacgaactgagccgcctggtcgtgaaatcggtcagtgcgcgccgggcggaggtcacgtccctgctgcggttcgccggcggcctacacatcgtcggcggtcgcgtcgtggtcgaggccgaggtggatctgggcaacgtggcgcggcggctgcgcaaggacattttcgagctctacggctacaacgcggtcgtgcatgtgttgtccgccagcgggattcgcaagagcacccggtacgtgctccgggtggccaacgacggtgaggcgctggcccgccagaccggcctgttggacaaccggggccgcccggtgcgcgggctgcccgcccaggtggtgggcggcagcatcgccgacgccgaagccgcctggcgcggagcgttcttggcgcacgggtcgctgaccgagccgggccgctcgtcggcgctggaggtcagctgccccgggccggaggccgcgctggcgttggtgggcgcggcgcgccggctgggggtcagcgccaaggcccgcgaggtgcgcggcgccgaccgggtggtggtgcgcgacggcgaggctatcggcgcgctgctgacccggatgggcgcccaggacacccggctcatctgggaggagcgccggatgcggcgcgaggtgcgcgcgacggccaaccggttggccaacttcgacgacgccaacctgcgccgctcggcgcgggcggcggtggcggcggcggctcgggtggagcgggcgctggagatcctcggcgacaccgtgcccgaccatctggcctcggccggcaagctgcgcgtcgagcaccggcaggcctcgctggaggagctgggacgcctcgccgacccgccgatgacgaaagacgctgtggcgggccgtattcggcggttgttgtcgatggccgaccgcaaggccaagatcgagggcattcccgacaccgagtcggcggtgacgccggacctgctcgaggacgcc

SEQ ID NO: 25502 - DNA, 1392 bp, Mycobacterium avium
atgagccggccacagcagcgggggcgcggcaagaggcgccggccgctggacccggcccggggtgcggccttcgaggtgttgagggcggtcagcgagcgcgacgcgtatgcgaacctggcgctgcccgcactgctgcgcgagcgcggaatcaccggccgtgacgccgcattcgccaccgagctgacctacggcacctgccgcacccggggcctgctggacgcggtcatcggcgcggcggccgggcgcccgccggaagccatcgacccggtgctgctcgacctgctgcgcctgggcacctaccagttgctgcgcaccagggtggatgcccacgccgcggtgtccaccaccgtcgagcaggccgccatcgaattcgactcggcgcgagcaggtttcgtcaacggggtgctgcgcaggatcgccggccgcgacgagcggtcctgggtgcaggagctagccccggacccggcccgcgatccgatcggacacgccgcgttcgtgcacgcccatccccggtggatcgcccaggccttcgccgacgcgctgggcgccgccgcggccgaactcgacgcggtgctggccagcgacgacgaacgaccgcaggtgcatctggcggcgcgaccgggcgcgctgaccgccgccgagctggccgacgcggtgggcggcacggtcggccgccactcgcccttcgcggtgtatctggccggcggcgaccccggccggctggcgccggtgcgcgacgggctggccctggtccaggacgagggcagccaactggtggcccgggcgctgacgctggccccggtggacggcgactgcggacggtggctggacctgtgcgccgggccgggcggcaagacggctctgctggcttcccttggcgcccaaaggttttcggggccacagttccgggtcaccgcggtcgagccggcgccgcgtcgcgcggacctggtggtcgagaacacccgcggattgccggtcgaggtgctgcgggtggacgggcggcacaccggcctgcagccggcgttcgaccgggtgctcgtcgacgcgccgtgcaccgggctgggggcgctgcgccgccggccggaggcccggtggcggcggcagcccggcgacgtgccgacgctgaccaagctgcagcgcgagttgctgggcgccgcgatcgcgctgacccggccgggcggggtggtgctctatgcgacctgctcgccgcacctggccgagacggtcggcgtggtcgccgacgcgttgcgccgccacccggtcagcgcgctggacgcccggccgctgttcgagccggtcgccgacctgggcgacgggccgcatgttcagctctggccgcaccggcacggcaccgacgcaatgttcgcggccgcgctacgccgcgaagcgggg

SEQ ID NO: 25503 - DNA, 1023 bp, Mycobacterium avium
atgaccgcgtcgctgggcgaccgcctggacgccgcgatgcgcctggcgatcgaacagtccaatcaggtcaagggcaacacctatcccaacccgccggtgggcgcggtcgtcctggacggccgcggcgaggtggtcggcgtcggcggcaccgaaccggccggtggcgaccacgccgagatcctggcgctgcgccgcgccggcgacctggccgccggcggaaccgtcgtcgtcaccctcgagccgtgcaaccaccacggcaagacgccgccgtgcgtggacgcgctgctggaggccggggtgagcacggtggtctacgccgtcgccgacccgaacccgcaggccgccggcggcgccggtcggctccaggaggcgggcgtgacggtgcgctccgggctgctggccgacgaggtgtccggcggcccgctgcgggagtggctgcacaagcagcgcaccgggctgccgcatctgacctggaaatacgccagcagcgtcgacgggcgcagcgcggccgccgacgggtccagccgatggatttccagcgaagcctcgcggctggacctgcatcgccgccgcgcggccgccgacgcgatcgtggtggggaccggcacggtgctggccgacgacccggcgttgaccgcccggctgcccgacggcacgctggccgaccggcagccgctgcgggtggtcgtcgggatgcgcgaaataccttcggaggcaaaggttctcaacgacgattcgcggaccatggtgatccgcacgcatgatcccgccgaggtgctcaaggcggtgtcggaccgcaccgacgtgctgctggagggcggccccaccctggccggcgcgttcgtgcgggccgggctggtgaaccggatcctggtctacctcgcgcccaccctgctgggtggcccggtcaccgcggtcgacgacgtcggggtgccgacgatcgcgaaggcgctgcgctggcagttcgacggggtcgaccgggtgggccccgacctgctgctcagcctggtaccgcgcagcggc

SEQ ID NO: 25504 - DNA, 786 bp, Mycobacterium avium
atgacgaacgtcttgaccagcaacgacggtcccgtccgcatcgtcacattgaaccggcccggggtacgcaacgcgattgacatcccgttgcggatcgaactcgccgaggtgctggaagcagccgacgcagatgaatcggtccgctccatcgtcctcactggggcggggagggtgttctgttcgggcggtgacatctccaccatgcagcgcatggagtccgaggacgccaagcaccgcgcagacctggcgcagcgggtgatccgagccatctggaacaccgcgaagccggtcgtcgccgccgtcgagggcgcggccttcggcgccggcgccgcgctcgccctggcatgtgaccgagtcgtggccgcccgcgacgcacgctttgccaccaccttcaccaacgtcggattagccggcgacatggggacattcgtgtccttgccgcgccgcgtgggcatcgcgcgggcccgccagatgctgctgttgccccagccgattggcgccgaggaggccgcagcgttgggcatggtcgacgcgctcaccgatccggggcacacgcttgaagcggccacgcgcgacgcccaaaaccttgccgcgggccccgccgaagcgttcggagtcatcaaggcgctgctagccatcgcccccaccctgcatccgctcgacgccctcgaagaagaggcgtcttatcaggcccggctcttcggcaccgacgatttcgtcgagggcgtcgccgcctttcgcgacaagcggcgacccagtttcggccagcgacaaggagtgcgccca

SEQ ID NO: 25505 - DNA, 747 bp, Mycobacterium avium
atgccggtcgcaacgaacgccccgaagtgtgtccgctcagcgatcgcggcggccgccgccgggctggccgtcgtcgcgatctcggcgtgcgacaagcacggtccgccgccgtccggcgccgcgccccggcaggtgacagtggtgggttccggccaggtccagggcgttccggacaccctgaccgccgacgtcggcatcgagttcaccgcgcccgatgtcaccaccgcgatgaaccagaccaacgagcgtcagcaggccgtcatcaacgcgctggtcggcgcgggcatcgaccacaaggacatcagcaccaccgaggtcgcgctgacaccccagtacagcaaccccgaggccggcggcagcgccgcgatcaccggctatcgcgccagcaacgccgtcgccgtcaagatccacccgcccgacgccgcgtcgcggctgctggcgctcatcctcggcaccggcggcgacgccacccggatccggtcggtcagctactccatcgccgacgattcgcagctggtcaaggacgcccgcacccgcgcgttcaacgacgccaaaagccgcgccgagcagtacgcccagctgtccggtctgcacctgggcaaggtgctgtccatctcggaggcgacgggcaacgccccgccacccggcggcccgccaccgtcgccgcgcgcgatgccgatggcggtgccgctggaaccgggccagcagacggtgaagttcaccgtcaccgcgtcctgggagctggac

SEQ ID NO: 25506 - DNA, 2397 bp, Mycobacterium avium
atgaaccggaaaaacgttattcgcaccatcacggcgattgctgtcgtggtgctgctcggctggtcgttcttctacttcagtgacgacacccgcggctataagcccgtcgacacctcggtggcgatggcccagatcaatggcgacaacgtcaagagcgcgcaaatcgacgaccgcgaacagcaactgcgcctgaccctgaagaagggcaacggcgacaccgacaactccgacaaggtcatcaccaaatatcccagcggctacgcggtcgacctgttcaacgcgctgagcgccaagaacgcgaaggtcagcacggtcgtcaaccagggcagcatcctgggcgagctgctggtgtacgtgctgcccctgctgctgctggtcgggttgttcgtgatgttctcgcgcatgcagggcggcgcccggatgggcttcgggttcggcaagtcgcgggccaaacagctgtccaaggacatgcccaagaccaccttcgccgacgtcgccggggtcgacgaggcggtcgaggagctctacgagatcaaggacttcctgcagaacccgggccgctatcaggcgctgggcgccaagatccccaagggcgtgctgctctacgggccacccggcaccggtaagacgctgctggcccgggcggtggccggcgaggccggggttccgttcttcaccatctccggatccgacttcgtcgagatgttcgtcggggtgggcgcgtcccgggttcgtgacctgttcgaccaggccaaacagaacaacccgtgcatcatcttcgtcgacgagatcgacgcggtgggacgccagcgcggcgccggcctgggcggcggtcacgacgagcgcgagcagacgctgaaccagttgctggtcgagatggacgggttcgacccgcgggccggcgtgatcctgatcgccgccaccaaccggcccgacatcctggacccggcgctgttgcggcccggccgcttcgaccgccagatcccggtgtccaacccggacctggccggccgtcgcgcggtgctggcggtgcattccaagggcaagccgatcgcccccgacgccgacctcgacggcctggccaagcgcaccgtcggcatgaccggcgccgacctggccaacgtgatcaacgaggcggcgctgctgaccgcccgggagaacggcaccgtcatcaccagcgccgctttggaggaagcggtcgaccgggtgatcggcgggccgcgccgcaagggccgcatcatcagcgagcaggaaaagaagatcaccgcctaccacgagggcggccacacgctggcggcctgggcgatgcccgacatcgaacccatctacaaggtgacgatcctggcgcgcggccgcaccggcgggcacgcggtcgcggtgcccgaggaggacaagggcctgcggacccgctcggagatgatcgcgcaactggtgttcgcgatgggtggccgcgccgccgaggagctggtcttccgcgagccgaccaccggcgcggtgtccgacatcgagcaggccaccaagatcgcccgcgcgatggtcaccgagttcggcatgagctccaaactcggtgcggtcaaatacggttcggaacacggcgacccgttcctcggccgcaccatgggcacccaggccgactactcgcacgaggtcgcccgtgacatcgacgacgagatccgcaagctgatcgaggccgcccacaccgaggcctgggagatcctcaccgaataccgcgacatcctcgacacgctggcgggccagctgctggagaaggaaacgctgcaccgcgccgagctggagagcatcttcgccggcgtcgaaaagcggccccggctcacgatgttcgacgatttcggtggccgcatcccgtcggacaagccgccgatcaagacacccggcgaactggccatcgagcgcggcgagccgtggcccccgcccgcccccgagccggccttcaaggcggccatcgccaaggccagcgaggccgccgcggccgcccggctggaggccgaccgaaacgccaacggcggcaacggttctcacgccaaccagggcggtaatcggcagggtcccacccaaccggactacggtgcgccggccggctggcgggcgccgggctggccgccgcagcagtcgcagcagcccaactactggcacccgcccgcccagccgccctactggcagcaaccggcgcacggctacccgggccagcagccttacccgggccagcagccctatcccggccagccgggcggaccggctcagtccggcccaccccaggcgcgtccgccgtacccgccgtacccgccgtaccccccgcccggtcagcccgcccccgagggtgggtcgccggaccggcaggatgacgacgtgagccggtccaacccgccggcccacggc

SEQ ID NO: 25507 - DNA, 228 bp, Mycobacterium avium
gtggagaatcagcccggcttcctcggcttccagttgctgcgtccggtccagggcaaggaccgctacttcgtggtgacacactgggagtccgacgaggcgttccaggcgtgggcgaagggtcccgccatcgaagcgcacgccggccatcgggccaacccggtggcgaccggggcgtctctgctggaattcgaggttgtgctggacgttgccgcaaacaagcaggctggc

SEQ ID NO: 25508 - DNA, 2529 bp, Mycobacterium avium
atgtttgaacgatttaccgaccgtgcccgcagggtcgtcgtcttggcgcaagaagaggcccggatgctcaaccacaactacatcggcaccgagcacatcctgctgggtttgatccacgagggcgagggcgtggcggccaagtcgctggagtcgctgggcatctcgctggagggcgtccgcagccaggtcgaggagatcatcggccagggccagcaggcgccgtccggacacatcccgttcaccccgcgcgccaagaaggtgctcgagctgagcctgcgcgaggcgctgcagctcggccacaactacatcggcaccgagcacattctgctgggcctgatccgcgagggtgagggcgtggccgcccaggtgctggtcaagctgggcgccgagctgacccgggtgcgccagcaggtgatccagctgctctccggctaccagggtaaggaggccgccgaggccggcaccggtgggcgcggcggcgagtccggcagcccatccacgtcgttggtgctcgaccagttcggccgcaacctgaccgccgccgcgatggagggcaagctggacccggtcatcggccgcgagaaggaaatcgagcgggtgatgcaggtgctgagccggcgcaccaagaacaacccggtgctgatcggcgagcccggcgtcggcaagacggccgtcgtcgagggcctggcgcaggccatcgtgcacggccaggtgcccgagacgctgaaggacaagcagctctacaccctggacctgggttcgctggtggcgggctcgcgctaccgcggtgacttcgaggagcgcctgaagaaggtgctcaaggagatcaacacccgcggcgacatcatcctgttcatcgacgagctgcacacgctggtcggtgcgggtgccgccgagggcgcgatcgacgcggccagcatcctcaagccgaagctggctcgcggcgagctgcagaccatcggcgccaccacgctcgacgagtaccgcaagtacatcgagaaggacgccgcgctggagcgtcggttccagccggtgcaggtgggtgagccgacggtggagcacaccatcgagatcctcaaggggctgcgcgaccgctacgaggcgcaccaccgggtgtccatcaccgactcggcgatggtggcggccgcgacgctggcggaccgctacatcaatgaccgctacctgccggacaaggcgatcgacctgatcgatgaggcgggggcgcggatgcggatccgccggatgaccgcgccgccggacctgcgcgagttcgacgagaagatcgccgaggcgcgccgggagaaggaatcggcgatagacgcccaggacttcgagaaggcggccagcctgcgcgaccgggagaagcagctcgtcgcgcagcgcgccgagcgcgaaaagcagtggcgctccggcgacctcgacgtggtcgccgaggtggacgacgagcagatcgccgaggtgctgggcaactggaccggcatcccggtgttcaagctgaccgaggccgagaccacgcgcctgctgcgcatggaggacgagctgcacaagcggatcatcggccaggaggacgccgtcaaagcggtctccaaggcgatccgccgcacccgcgccgggttgaaggaccccaagcggccgtcgggctcgttcatcttcgccggcccgtccggtgtcggtaagaccgagctgtccaaggcgctggccaacttcctgttcggcgacgacgacgcgctcatccagatcgacatgggcgagttccacgaccggttcaccgcctcgcggctgttcggcgccccgccgggatacgtcggctacgaggagggcggccagctcaccgagaaggtgcggcgcaagccgttctcggtggtgctgttcgacgagatcgagaaggctcaccaggagatctacaacagcctgttgcaggtcctcgaggacggccggctcaccgacggccagggccgcacggtcgacttcaagaacaccgtgctgatcttcacctcgaacctcggcacgtccgacatctccaagccggtcggcctgggcttcacccagggtggcggtgagaacaactacgagcggatgaagcagaaggtcaacgacgagctgaagaagcacttccgcccggagttcctcaaccgcatcgacgacatcatcgtcttccaccagctgactcgcgacgagatcatccggatggtcgacctgatgatcacccgggtcgccggccagctcaagagcaaggacatggacctggtgctcaccgacaaggccaaggccctgctggccaagcgcggcttcgacccggtgctgggtgcccgcccgctgcggcgcaccatccagcgcgagatcgaggaccagctctccgagaagatcctcttcgaggaggtcgggcccggtcagatcgtcacggtcgacgtcgacaactgggacggcgaaagcgccggcgaggacgcggtgttcaccttcaccggtacccgcaagccgccggccgagccggacctggccaaggccggggcgcacagcgccgacccgcag

SEQ ID NO: 25509 - DNA, 1497 bp, Mycobacterium avium
gtgagtcccgccccagacgccgacattcccgagcagtaccggatccgccgggacaagcgcgcgcggctgctcgccgaggggcacgacccgtacccggtcgccgtcgaacgcacccacacgctggcgcaggtgcgcgccgcccaccccgacctgcccgtcgacaccgcgaccgacgacgtggtcggcgtcgccggccgggtgatcttcgcgcgcaactccggcaagctgtgcttcgccacgctgcaggagggcgacggcaccaccctgcaggtgatggtcagcctggacaaggtgggccgcgaagccctggacgcgtggaaggccgacgtcgacctgggcgacatcgtctccgtgcacggcaccctgatcagctcccggcgcggcgaactgtccgtgctcgccgactcgtggcggatggcgtccaagtcgttgcgtccgctgcccgtcgcgcacaaggagatgagcgaagaggcgcgggtgcggcagcgctacgtcgacctgatcgtgcgcccgcaggcgcgcacggtcgcccggcagcggatcgcggtgatccgggcgatccgcaacgccttggaacggcgcgggtttctcgaagtcgaaaccccaatgttgcagacgctggccgggggcgcggctgcacggccgttcgtcacccattccaacgcgctcgacatcgatctctacctgcggatcgccccggaactgttcctcaagcgctgcgtcgtcggtggtttcgataaggttttcgaactaaatcgcgtgttccgaaacgaaggtgcggattccacccattctccggaattctccatgctggagacctaccaggcctacggaacgtatgacgattcggcggtggtgacgcgcgagcttattcaagaggtggccgacgaggccatcggaacccgacaactaccgctgcccgacggcagcgtctacgacatagacggagaatgggcttctatagaaatgtacccgtcgctgtcggcggcgctcggtgaggagatcaccccgcagaccacggtggaaaagctgctcggcatcgccgagcggctgggcgtcgagatcccccgcgaccgcggctacgggcacggcaagatcgtcgaggagctgtgggagcacaccgtgggcgacacgctcaccgcgcccacgttcgtgcgggatttcccggtcgagacaacgcctttgacgcgtcagcaccgcagcatcgacggcgtcaccgagaaatgggacctgtacgtgcgtggggtcgagctggccaccggctactcggagttgaccgatcccgtggtgcagcgcgagcggttcgccgcccaggcgcgtgcggcggccgccggcgacgacgaggccatggtgctcgacgaagactttctcgccgcgctcgagtatgggatgccgccctgcaccggaacgggaatgggtatcgaccggttgttgatgacattgaccgggctgtcaattcgggagacagttttgttccccatcgttcggccgcattcg

SEQ ID NO: 25510 - DNA, 363 bp, Mycobacterium avium
gtggagctgggtgactggttgcgggtcgacatgaaggcgggcaagccgcttttcgaccagctcaggacgcaggtgatcgagggggtgcgcgagggcgcgctgccacccggcacccggctgcccaccgtgcgggagctggccggccagctcggcgtcgccgtcaacaccgtggcccgcgcctaccgcgagctggaatcggccgccatcatcgaaacccggggccgcttcggcactttcgtcgcccgctacgaccccaccgacgccgcgatggcggccgcggcccgcgagtacgtccgggtggcacgcggcctggggttggacaaggccgacgccgtgcgctacatcgaatcggtgcccgacgag

SEQ ID NO: 25511 - DNA, 1653 bp, Mycobacterium avium
atgagccccaacaccacgccgccggccggagtcctcgacgggttcgtgccgtttcccgccgagcgcgccgccgcctaccgggcggccggtttgtggacggggcgagccctggacacgatcctgaccgacgcggcccggcggtggcccgaccgaaccgccgtcctcgacgcctccggcggcaccggtttcagctacgcgggcctcgacgagcaggctaaccgcgccgccgcgggtttggcggacgcgggtatcgcccccggcgaccgggtgctgctgcagctgccgaacggctgccagttcgcggtggcgctgttcgcgctgttacgggcgggggcgatcccggtgatgtgcctgcccggccaccgcgccgccgagcttgggcatttcgccgcgctcagccaggccaccgcactgctgatcgccgacaccgcagcgggtttcgattatcgaacgatggccgcggggctcgtcgaggagcatgaagcgctcgcccacgtgatcgtcgacggcgacccggggccgtttctgtcctgggcgcagctgtgcgagcgtgcgcccgcggggcggccggcgacgccggtcgatccgggatcgcctgcgctgcttctggtttccggtggcaccaccggcacaccaaagctcatcccgcgcacccacgacgattacgtcttcaacgccaacgccagcgccgaactgtgcgggctcacccgcgacgacgtctatctggcggtgctctcggccggccacaatttcccgctcgcctgccccggcctgctcggcgcgatgacggtgggcgcgaccacggtgttcggcaccgaccccagccccgaggcggcctttgccaccatcgcgcgccacggcgtcacggtgaccgccctggtcccggccctggccaaactatgggcgcacgcctgcgaatgggaggacaatccaccgaagtccttgcggctcttgcaagtcggcggcgccaagttggaggccgacgacgcccgtgtgatccgcagcgcgttgacgccgggcctgcagcaggtgttcgggatggccgagggcctgctgaactacacccggctcgacgatccaccggagatcaccgagcacacccagggacggccgttgtcgaccgccgacgaggtgcgggtggtcgacgcggcgggcaatcccgttgccccggggcaggaaggcgaactgctggtccgcggaccgtacacgttcaacggttatttccgggccgaacgcgacaatcaacgctgcttcgacgcgcagggctttttccgcagcggcgatttggtccgggtccgcgatgatggctacctggtggtgaccggacgggtcaaggacgtgatctgccgtggcggcgagacgatttccgcggccgacctcgaggagcagatgctgagccacccggcgatcttctcggccgccgcagtacccctccccgacccctacctcggcgaaaagatctgtgccgctgtcgttttcgagggcccggcgctgtcactcgcggagttgaacggctacctggacgagcgcggtgtggccgcgcacgcccgtcccgacgtcctggccgcgatgccgtcattgcccaccacgccgatcggcaagatcgacaaaaaggcgatcgcgaaccaggtatcggcgcggaatcggcgtccc

SEQ ID NO: 25512 - DNA, 1464 bp, Mycobacterium avium
atgtccagcccggcaggttcacgcgctccgggcgatggccgtgcccggggccggggccggattcccgaccgcgacatcgccgccatccgcgaacgggtgcgcatcgatgaagtggtcggcgattacgtccaattgcggcgtgccggtgcggattcgctcaagggcctgtgcccgtttcacgacgagaagtcgccgtcgtttcacgtccgccccaaccacgggcacttccactgcttcggctgcggcgagggcggcgacgtgtacgcgttcctccagaagatcgagcacgtcagcttcgtcgaggcagtcgaactgctcgccgaccggatcggccacaccatcacctactccggcccggctaccagcgtgcagcgcgaccgcggcagccgcagccggctcatcgcggccaacgcggccgcggcggagttctacgcggcggcgctcgagtccgacgaggcggcgccggcccgccagtacctgaccgaacgcaacttcgatgccgaggcggcccgtcacttcgggtgcggattcgcgccgtcgggctgggatacgctgacaaaacacctgcagcgcaagggttttgagttcaaggagctggaggcggccggcctgtcgcggcagggccggcgtggcccgatggaccggttccaccggcggctgctgtggcccatccgcagctcggccggtgaggtgatcgggttcggcgcccgccggctgttcgacgacgatccgatggaagccaagtacatcaacacgcccgagacgctgctgtacaagaagtcgaacgtgatgttcggcatcgatctggccaaacgcgacatcgccaagggccaccaggccgtggtcgtcgagggctacaccgacgtgatggcgatgcatctggccggggtcaccaccgcggtggcctcctgcggcaccgccttcggcgacgagcatctggcgatgctgcgccgactcatgatggacgacagcttctttcgcggtgaactgatctacgtcttcgacggcgacgcggcggggcgggccgcggcgctcaaggcgttcggcggcgagcagaacctggccgggcagtccttcgtcgcggtcgcgccggacggcatggatccctgcgacctgcggctgcgctccggcgacgccgcgctgcgcgacctggtggcccggcgaacaccgttgttcgagttcgcaatccggtcggcgctcgccgagctggacctggacagcgccgagggccgggtggccgcgctgcgccgctgcgtgccgatggtggcccagatcaaggaccccacgctgcgcgacgagtacgcccgccagctcgccggctgggtcggctggagcgacgtcgcgcaggtcatcgaccgggtgcgcasccagtccaagcactccgccggcgcggggcgcggcggctccmgcggcagggtctcgcgccgcgccgagcagtccgccgccccggccggtcccgccgcc

SEQ ID NO: 25513 - DNA, 2136 bp, Mycobacterium avium
atggaagaccctgcgctgcaagtcatttcggatgcagccggacggatgcgggtgtcggtcgggtgggtgcgcgccgactcgcggcgcgccgtggcggtcgaagaggcggtggccaagtgcgacggcgtgcgggtggtgcacgcctacccgcgcaccggctcggtggtcatctggtattcaccgcggcgctgcgaccggtccgcggtgctggccgccatcggcgaggcggcccacgtcgccgccgagctgatcccggcccgcgcgccgcactcctcggagatccgcaacgccgacgtgctgcgcatggtgatcggcggcgcggcgctggccctgctcggcgtgcgccgctacgtgttcgcccgcccgccgctgctgggccccagcggccggctgttcgccaccggcgtcaccgtgttcaccggctaccccttcctgcgcggcgcgctgcgctcgctgcggtcggggcgggccggcaccgacgcgctggtctcggcggcgaccgtggccagcctggtgttgcgcgagaacgtggtcgcgctgaccgtgctgtggctgctcaacatcggcgagtacctgcaggacctgacgctgcgccggacccggcgcgccatctccgagctgctgcgcggcagccaggatacggcgtggattcgcctggagcacaacgagattcaggtggccaccgacaccctgcagatcggtgacgaggtggtggtgcacgaccacgtcgccatcccggtggacggcgaggtgatcgacggcgaggcgatcgtcgaccagtccgcgatcaccggggagaacctgccggtcagcgtggtggtcggaatgccggtgcatgccggctcggtggtggtgcgcggccgcctggtggtgcgcgcccgcgccgtcggcaaccagaccaccatcgggcgcatcatcacccgggtcgaagaggcgcagcacgaccgggcgccgatccagaccgtcggcgaaaacttctcgcgccgtttcgttcccacctcgttcatcgtgtcggccatcaccctggcggtcaccggcgacgtccgccgggccatgacgatgctgctgatcgcctgcccgtgcgcggtcgggctggccaccccgacggcgatcagcgcggcgatcggcaacggcgcccggcgcggcattctgatcaagggcggctcacacctcgagcaggccggccaggtcgacgcgatcgtcttcgacaaaaccggcacgctcaccgtcggccggccggtggtcaccaatatcgttgccatgcacaaggattgggagcctgagcaggtgctggcgtatgccgccagctccgagatccactcccggcacccgctggccgaggcggtgatccgctccaccgaggaacgccacatcaccattcctccgcacgaggagtgcgaggtactggtcgggctgggcatgcgcacctgggccgacggccggaccctgctgctgggcagcccgtcgctgctgcaggccgagaaggtcaaggtgtccaagaaggccaaggagtgggtggacaagctgcgccgccaggccgagaccccgctgctgctcgccgtggacggcaccctggtcgggctgatcagcctgcgcgacgaggtccgtcccgaggccgccggtgtgttgaagaagttgcgcgccaacggtattcgccgaatcgtgatgctcaccggcgatcaccccgacatcgccgcggtggtggccgacgagctcggcatcgacgagtggcgcgccgaggtgatgccggaggacaagctcgccgcggtgcgcgatctgcaggaggagggcttcgtcgtcggcatggtgggcgacggcatcaacgacgcgccggcgctggccgccgccgacatcggcatcgcgatgggcctggccggcaccgacgtcgccgtggagaccgccgacgtggcgctgtccaacgacgacctgcaccggctgctcgacgtgcgggacctgggctcgcgcgccgtcgacgtcatccgggagaactacggcatgtctatcgccgtcaacgccgcggggctgatcatcggcgccggcggcgcgctgtccccggtgctggccgccatcctgcacaacgcgtcgtcggtggcggtggtggccaacagctcccggctgatccgctaccggctgaac

SEQ ID NO: 25514 - DNA, 438 bp, Mycobacterium avium
atgcccaagcccaccaaggggcctcgcctcggcgggtcgtcttcgcaccagaaggcccttctggccaacctggccacctcgctgttcgagcacggccggatcaagacgaccgagcccaaggcgcgtgcgctgcgtccgtatgcggagaagctgatcacgcacgcgaaaaagggtgcgctgcacaaccgccgcgaggtgctcaagaagatccgcgacaaggacgtggtgcacgtcctgttcgaggagatcggcccgttcttcgccgaccgcaacggcggctacacccgcatcatcaaggtcgagccgcgcaagggcgacaacgctccgatggccgtgatcgagctggtgcgggagaagacggtcacctcggaggccgaccgggcgcgccgggtgaaggcctcgaagaaggccccggaggccgcggcggcggcgccgcaa

SEQ ID NO: 25515 - DNA, 1041 bp, Mycobacterium avium
atgctgatctctcagcgacccaccctgtcggaggaagtcctcaccgacaaccgctcccagttcgtcatcgagccgctggagccgggattcggctacaccctgggcaattcgttgcgccgcacgctgctgtcctcgatcccgggggcggccgtcaccagcatccgcatcgacggcgtgctgcacgagttcaccaccgtgcccggcgtcaaggaagacgtcaccgcgatcatcctgaacctcaagagcctggtggtgtcctcggaggaggacgagccggtcaccatgtatctgcgcaagcagggtcccggcgaggtcaccgcgggtgacatcgtgccgcccgccggcgtcaccgtgcacaaccccgagctgcacatcgccacgctgaacgacaagggcaagctcgaggtggagctggtcgtcgagcgcggccgcggctacgtgccggccgtgcagaaccgcgcctcgggcgccgaaatcggccgtatcccagtcgattccatctactcgccggtgctcaaggtcacctacaaggtggacgccacccgtgtcgagcagcgcaccgacttcgacaagctgatcctggacgtggagaccaagagctcgatcacgccgcgcgacgcgctggcgtcggcgggtaagaccctggtcgaattgttcggcctggcacgcgaactcaacgtcgaggccgagggcatcgagatcgggccgtcgccggccgaggccgaccacatcgcgtcgttcgcgctgccgatcgacgacctggacctgacggtgcggtcctacaactgcctcaagcgcgagggtgtgcacaccgtcggcgagctggtcagccgcaccgagtccgacctgctcgacatccgcaacttcggccagaagtccatcgacgaggtgaaggtcaagctgcaccagctgggcctgtcgctcaaggacagcccgccgagcttcgacccgtcgcaggtcgcgggttacgacgtcgccaccggcacctggtccaccgaggccgcctacgacgaccaggactacgcggaaaccgaacagctg

SEQ ID NO: 25516 - DNA, 603 bp, Mycobacterium avium
atggctcgttacaccggacccgtcacccgcaagtcgcgccggctgcgcaccgacctcgtcggtggcgaccaggcgttcgagaagcgcccctacccgcccggccagcacggccgcgcgcggatcaaggagagcgaatacctgctgcagctgcaggagaagcagaaggcccgcttcacctacggcgtgatggaaaagcagttccgccgctactacgaggaggccgtccgccagcccggcaagacgggtgaggagttgctgcggatcctggaaagccgcctggacaacgtcgtctaccgggccggcctggcccgcacccgccggatggcgcgccagctggtcacccacggccacttcacggtcaacggcgtgcgcgtcgacgtgcccagctatcgggtgtcgcagtacgacatcatcgacgttcgcgagcagtcgctgaactcggtgccgttccagatcgcgcgggagaccgcgggcgaccggcccgtcccgagctggctgcaggtggtgggggagcggcagcgcatcctcatccaccagctgcccgagcgggcgcagatcgacgtgccgctcaccgagcagctgatcgtcgagttctactcgaag

SEQ ID NO: 25517 - DNA, 414 bp, Mycobacterium avium
atgccaccagccaagaaggcagccgctgcccccaagaaggggcagaagacccgccgccgggagaagaagaacgtcccgcacggcgcggcccacatcaagagcacgttcaacaacacgatcgtgacgatcaccgacccgcagggcaacgtcatcgcctgggcgtcgtccggccacgtcgggttcaagggctcgcggaagtcgaccccgttcgccgcccagctggccgccgagaacgcggcccgcaaggcgcaggaacacggcgtgcgcaaggtcgacgtgttcgtcaagggcccgggctcgggccgggagacggcgatccggtcgctgcaggccgccgggctggaggtcggcgcgatctccgacgtcaccccccagccgcacaacggcgtccgccccccgaagcgcagaagggtc

SEQ ID NO: 25518 - DNA, 372 bp, Mycobacterium avium
atggctcgactagtcggcgtcgatctgccgcgcgataagcggatggagatcgccctgacctacatctacggtgtcggccgcacccggtcgaacgagatcctggcggccaccggcatcgaccgggacctgcgcacccgcgatctcaccgatgaccagctgacccacctgcgcgattacatcgaggccaacctcaaggtcgagggtgacctgcgccgcgaggtccaggccgacatccggcgcaagatcgagatcggctgctaccagggcctgcggcaccgccgcggcctgccggtgcgcggccagcggaccaagaccaacgcgcgcacccgcaagggccccaagcgcaccatcgccggcaagaagaaggccagg

SEQ ID NO: 25519 - DNA, 219 bp, Mycobacterium avium
atggccaagaaggacggcgccatagaggtcgagggccgcgtggtcgagcccctgcccaatgcgatgtttcgcattgagctggagaacggtcacaaggtgcttgcccacatcagcggcaagatgcggcagcattacatccgcatcctgcccgaggaccgggtggtcgtggagttgtctccgtacgacctgtcccggggccgcatcgtgtaccgctacaag

SEQ ID NO: 25520 - DNA, 852 bp, Mycobacterium avium
atgctgcgcgtcgcggttcccaacaagggcacgctgagcgagccggccaccgagatcctcgcggaggccggctatcggcgccgcaccgattccaaggacctgaccgtcatcgatccggtcaaccaggtcgagttcttcttcctgcggcccaaagacattgccatctacgtgggttcgggcgagttggacttcggcatcaccggacgggacctggtgggtgattccgacgccccggtgcgggaacgcctggcgctgggattcgggtcgtcgagctttcgctacgccgggccggccgggcgggactggaagatcgccgatctggccggcaagcggatcgccaccgcatatcccaacctggtccgaaaagacttggcagagcgcggtattgaggccaccgtcatcagactcgacggcgcggtggagatttcggtgcagctcggcgtggccgatgccatcgccgacgtggtcgggtcggggcgcaccctgagcttgcacaacctggtggccttcggtgagccgctgtgcgattccgaagcggtgctcatcgagagcgaccggggtggccaggacgacacacaggccgcacgcgatcagttggtggcgcggatccagggtgtggtgttcgggcagcaatacctgatgctcgattacgactgcccccgggcggtgctggacaaagccacggcgatcacgccggggctggagtcgcccaccatcgcgccgctggccgacgcggactgggtcgccatccgggcgctggtgccgcgccgcggcgtcaacgagatcatggacgaactggccgccatcggcgccaaggcgatcctggcgtccgacatcaggttttgccggttc

SEQ ID NO: 25521 - DNA, 900 bp, Mycobacterium avium
gtgaccccgcccgacggcccaccctatggcgcacccagtggccaggccgctctgcccgaactgcaccacaccgtcgtcgtggctgcgttcgagggctggaacgacgccggcgatgcggccagcgacgccctcgagcacctcgaggccatctgggaggccgacccgatcctggagatcgacgacgaggcctactacgactaccaggtgaaccgtccggtgatccggcaggtggacggggtgacccgcgagctggtgtggccggcgatgcggatctcgcactgccggccgccgggcagcgaccgcgacgtggtgttgatgcacggcgtggaacccaacatgcgctggcgcaccttctgcgccgaactggtggccatcgccgacaagctcaacgtggacaccgtggtgatcctgggcgccctgctggccgacaccccgcacacccggccggtgccggtgtccggcgcggcgtactcgcccgagtcggccaaacgcttcgggctcgaggagagccgctacgagggccccaccggcatcgccggggtgttccaggacgcgtgcgtggccgccgggatcccggcggtgacgttctgggcggcggtgccgcactacgtgtcccagccgcccaacccgaaggcgacggtggcgttgctgcgccgcgtcgaggacgtgctcgacatcgaggtgccgctggccgatcttccgaccgacgccgaggaatgggagcaggcggtcaccgagatgaccgccgaggacgaggatctcgccgaatacgtgcagtcgctggaacagcgcggcgacgccgaggtcgacatgaacgacgcgctgggcaagatcgacggcgacgcgctggccgccgagttcgagcggtatctgcgccgccgccggcccggcttcgggcgg

SEQ ID NO: 25522 - DNA, 3786 bp, Mycobacterium avium
atggaaggagtgcacgtgaccgcccccgtgaccaccccggcgtcggacagcttcgcgccgaacatccgccccgactgcaccgacgaactgacggcggcgctgcgccagcggatcatggtgatcgacggcgccatgggcaccgcgatccagcgggaccgccccgacgaggccggctaccgcggcgagcggttcaaggactggccgagcgatctggtcggcaacaacgacctgctcaacctgacgcagccgcagatcatcgagggcattcaccgcgagtacctcgaggcgggcgccgacatcctcgagaccaacaccttcaacgcgaacgcgatctcgctgtccgactacggcatggaggagctgagctacgagctgaactacgccggcgccgccctggcccgtaaggccgccgacgagttcagcaccccggacaagccccgctacgtcgccggggcgctggggccgacgtcgcggaccgcgtcgatctcgccggacgtcaacgatcccggggcccgcaacgtcacctacgacgagctggtcgccgcctacctcgaggcggccaacggcctggtcgacggcggtgtcgacctcctgatcgtcgagacgatcttcgacacgttgaacgccaaggctgcggtgttcgccctcgagacgctgttcgaacagcgcgggcgccgctggccggtcatcatctcgggcaccatcaccgatgcctccgggcgaacgctgtccgggcaggtcaccgaggcgttctggaactcgatccggcacgccaagccgatcgcggtcgggctcaactgcgccctgggcgcaccggagatgcggccctacatcgccgaggtgtcgcgcatcgcggacaccttcgtctcctgctacccgaacgccggcctgcccaacgccttcggcgagtacgacgagtccccggagcgtcaggcctcctacatcgccgacttcgccgaggccggcctggtcaacatcgtcggcggttgctgcggaaccgcgccgccgcacatcgccgagatcgccaaggtcgtcgagggcaagccgccgcgcgaggtgccgcagattccggtggccacccggctctcgggcctcgagccgctcaacatcaccgacgactcgctgttcgtgaacatcggcgagcgcaccaacatcaccggctcggcccggttccgcaacctgatcaaggccgaggactacgacaccgcgctgtcggtcgccctgcagcaggtggaggtcggtgcccaggtcatcgacatcaacatggacgagggcatgatcgacggcgtcgccgcgatggaccggttcaccaggctgatcgccgccgagccggacatcagccgggtcccggtgatgatcgactcctccaagtgggaggtcatcgaggccggcctgaagaacgtgcagggcaagccgatcgtcaactcgatctctttgaaggagggcgaggagaagttcgtccgcgaggcgcggctgtgccgcaagtacggcgcggccgtcgtcgtgatggccttcgacgaacagggtcaggccgacaacctggagcgccgcaaacagatctgcgcacgcgcctaccgcgtgctgaccgaagaggtcggcttcccgcccgaggacatcatcttcgaccccaactgcttcgcgctggcgaccggcatcgaggagcacgcaacctacggcatcgacttcatcgaggcctgcgcctggatcaaggagaacctgccgggggtgcacctctccggcggcatctcgaacgtgtcgttctcgttccggggaaacaaccccgtccgcgaggcgatccactcggtgttcctgttccacgccatcaaggccggcctggacatgggcatcgtcaacgccggcgcgctggtgccctacgactcgatcgaccccgagctgcgggaccgcatcgaggacgtcgtgctgaaccgccgcgaggacgcggccgagaggctgctggagatcgccgagcggttcaacaagtccgcagatgcttcggaggattcggcggcggccgagtggcgcggcctgccggtccgcgagcggatcacgcacgccctggtcaagggcatcgacgcccacgtcgacgaggacaccgaggagttgcgggccgagattgccgccgcgggtggccggccgatcgaggtgatcgagggcccgctgatggacggcatgaacgtcgtcggcgacctgttcggctccggcaagatgtttttgccccaggtggtgaagtcggcccgggtgatgaagaaggccgtcgcctacctgctgccgttcatcgaggcggagaaggaagagtccggcgtgtccggttccaaggacaccaacggcaccatcgtgatggcgaccgtcaagggcgacgtccacgacatcggcaagaacatcgtcggagttgtcttgcagtgcaacaacttcgaggtgatcgacctcggtgtgatggtgccggcccagaagatcctcgatgctgcgaaagagcacgacgccgacatcatcgggctgtccggcctgatcaccccgtccctggacgagatgtccaacttcgccgccgagatggaacgcgagggcctgcagatcccgctgctgatcggcggcgcgaccacctcgcgcgcccacacggccgtgaagatctcgccgcggcgttccggcccggtggtctgggtcaaggacgcctcccgctcggtgccggtcgccgccgcgctgctggacgacaagcagcggcccgccctgctggaggccaccgagaaggactacgcgtcgctgcgggaacggcacgcccagaagaacgagcggccgatggtgacgctggaaaaggcccgcgccaaccggacgccgatcgactgggacggctacacgccgccggtgcccgcgatcggtgcgggaatacgggaatttcaggactacgacctcgccgagctgcgcgagtacatcgactggcagccgttcttcaacgcctgggagatgaagggtcgcttccccgacatcctcaacaacccggccaccggcgaggcggcccgcaagctctacgacgacgcccaggagatgctcgacaccctgatcaaggagaagtggctgacggccaacgcggtgatcgggttcttcccggcgaacgcgatcggcccgggtttcgaagacatcgagctgtacaccgacgacacccgcaccgaggtgctgaccacgctgcacaacctgcgccagcagggcgagcaccgcgacggaatcccgaaccggtcgctgggcgactacgtcgcccccaaagaaacggggcaccgggactacatcggcgccttcgcggtgaccgcggggctgggcagccaggagaagatcgcggagttcaaggcggccctggacgactacagcgcgatcctgctggagtcgatcgccgaccggctggcggaggcgttcgccgaacggatgcaccagcgggtccgcaaggagttctggggctaccagcccgacgagcaactggacaacgacgcactcatcgacgagaagtaccggggaatccggcccgcgccgggctacccggcctgcccggagcacaccgagaaggtgacgctgtggaagttgatggacgtcaaggagcgcaccggcatcgagctgacggagtcgatggccatgtggcccggcgccgccgtcagcggttggtatttctcgcacccgcagtcgcagtacttcgtggtcgggcggttggcccaggaccaggtcgccgactacgcgaagcgcaagggctggacgctggccgaggccgagcgctggctggcccccaacctcggctacaaccccgaggac

SEQ ID NO: 25523 - DNA, 327 bp, Mycobacterium avium
atgtccgagccagtgtgctgcgcgccggtcgccgccggacccgccgacgatgcggcggcgttggacgttgcgatgcgactcaaggcgctcgccgacccggtgcgggtgaaactgatgtcgctgctgttcaccgccgacggcacctgcacgaccggatcgctcgccgctgccgttgggctgtcggaatccacggtcagccatcacctcggccaacttcgcaccgccggttttgtcgcgtccgaccggcagggaatgagcgttcatcacaccgcccgccgcgaggcgcttacggcgctgtgccgggtgctcgatccaagctgctgcacc

SEQ ID NO: 25524 - DNA, 2250 bp, Mycobacterium avium
atgacgaccactgcacctgctgtcggcagcttcgccgacgtgccactgcgcagcgagcggcccgtcgcgccggccaccgaggctgccgtcgaggaacacgtcgcggcgatcgcggccgcgcacctgtacacgcccgaccaactgcactggcacacaccggaagacatcgccgtcaaaccggtctacatcggcgccgaccgggccgccgtcgaggccgacgggtacccgctgcacaccttccccggcgagccgccgttcgtgcgcggcccctacccgacgatgtacgtcaaccagccgtggaccattcggcagtacgccgggttctccaccgccgcggagtccaacgccttctaccggcgcaacctggcggcggggcagaagggcctgtcggtggccttcgacctggccacccaccgcggctacgactcggatcatccgcgtgtgcagggcgatgtcggaatggccggtgtggcaatcgattccattctcgacatgcggcagctgttcgacggcatcgacctgtcgacggtgagcgtgtcgatgaccatgaacggcgcggtgctgcccatcctggcgttgtacgtggtggccgccgaggagcagggggtgccgccggagaagctggccggcaccatccagaacgacatcctcaaagagttcatggtgcgcaacacctacatctatccgcccaagccgtcgatgcggatcatctccgacatcttcgcctacaccagcgcgaagatgcccaagttcaactcgatctcgatctccggctaccacatccaagaagccggggccacagccgatttggagctggcctatacgctggccgacggggtggactacatcaaggccggcctggacgccgagctggacatcgacaagttcgcgccgcggctgtccttcttctggggcatcgggatgaacttcttcatggaggtcgccaagctgcgcgcgggccggctgctgtggagcgagctggtctcccagttcaacccgaagaaccccaaatcgctgtcgctgcgcacacattcgcagacctcgggctggtcgctgaccgcgcaggacgcgttcaacaacgtcgcccgcacctgcatcgaggcgatggccgccacccaggggcacacccagtcgctgcacaccaacgcgctcgacgaggcgctggcgctgcccaccgacttctcggcccgcatcgcccgcaacacccagctggtgttgcagcaggagtcgggcaccactcggcccatcgacccgtggggcggctcctactacgtggaatggctgacccaccacctggcccgcaaggcccgcgcgcacatcgccgaggtggccgagcacggcggcatggcccaggccatcagcgacggcatccccaagctgcgcatcgaggaggcggccgcgcgcacccaggcccgcatcgactcgggcatccagccggtgatcggggtgaacaagtaccaggtcgaggaggaccaggaggtcgaggtcctcaaggtggagaacagccgggtgcgcgccgagcagctggccaagctcaaggaactgcgggacagccgcgaccagtcggccgtcgacgccgcgctggccgagctgtcccgcgcggcggcggcacagggccgcgccggtgaggacgggctgggtaataatctgctggcgctggcgatcaacgccgcccgggccaaggccacggtcggggagatctccgacgcgctggaaaaggtatacgggcgccatcaggcggagatccgcaccatcgccggcgtctaccgtgacgaagccggaaaggccaccaacatcgccaccgctacggaactggtcgagaagttcgccgaggccgacggccgccggccccggatcctggtggccaagatgggccaggacggccacgaccgcggccagaaggtgatcgcgacggccttcgccgacatcggcttcgacgtcgacgtcggctcgctgttctccacccccgaggaggtggcccgccaggccgccgacaacgacgtgcacgtggtcggagtgtcctcgctggccgccggccacctgaccctggtgccggcgctgcgcgacgcgctcaaagaggtggggcggcccgacatcatgatcgtggtcggcggggtcatcccgcccggcgacttcgacgagctgtacgccgccggggccgccgccatcttcccgcccgggacggtaatcgccgacgccgcaatcggtttgctgcacaagctggccgagcggctcgggtacgacctcggc

SEQ ID NO: 25525 - DNA, 507 bp, Mycobacterium avium
gtggccaagggttccggccgggccaaagcggcgggcggcaaaggtggcagcaaacagatcattgccaccaatcgcaaagcgcggcacaactattcgatcatcgaaacgtacgaggccggggtggcgttgcaaggaaccgaggtcaaaagcctgcgggagggccaagcgtcgttagctgacgcgttcgcaacgatcgacgacggtgaagtctggttgcgcaacttgtacatcccggagtatcaacacggtagctggaccaatcacgacccacgccggaaccgaaagttgttgttacataggcaacaaatcgacagactggtcggcaagatccgggatggtaacctcgccttgatgccgctgtcgctgtacttctccgagggcaaagtgaaggtagagctcgctctcgcgcgcggcaagaaggcttacgacaaacgccaggacctggcccagcgcgacgcacagcgcgaagtcgttcgtcaactgggacgccgaacaaaggggatgatc

SEQ ID NO: 25526 - DNA, 951 bp, Mycobacterium avium
atgatcgtggtcatcggtgcgggggtgtgcggcctcgcggccgcccacgagctctcgcgccgcggacacgacgacgtggttgtgctggaaaaagggcagccgttcggcgagcagtccgccgggctggcccggatcttccggatcgcccaccagcgagaggcgttgtgccggttggcttttgccgcgcgggcgggctggcagcggtgggaggccgagttcggggtggggcggctgctgggttcggagggcttcatcgccgccggcgccgcagcggatggggtcgcgcaggccatgaagcgggcgggcgccgcgttctcccggctggatcgggatggcatcgccgagcggatcccgttcgccgacgtgccctgggagacaggaattttcgatccgctgggcggcagcctgcggatccgccgcgcgctgaccgcgttggcacgccgcgtcgtcatccggtgcggtgaggtggtgtcggtggccgacgacggccgcacggtgctcgctgacggcaccgtgctgcgcgccgatcgggtgctgatctgcgcgggggtggcgacgccgaagctgttcggcccgctcggcgtcggcttcgtgccgcacacccggttcacctaccggggcgcggatgcgaccggagcggcgtgcctgtcggcgcccgagggctacgggttgccgctcggcggcaccgggcggtgggcgttcgggcaggaggtcgccgaccccgcgacggtgcgcgccctgttcccgtcgctggtggcggtggaccgggtggactgcgtcagtgtccgcgcgccgtggctggattcgggtggcgacggctggaccgtggcgcggcggggccgggtgctggcgttcgtcggcgccaacctgatgaagttcggtccgctgctcggcgaactgctggcgcgggccgcgctgtccgacgacatacccgcggagctgctgctcgat

SEQ ID NO: 25527 - DNA, 1194 bp, Mycobacterium avium
atgggcccgttgtccggcgtgaccgtcgtcagccttgagcaggccgtggcggcgccgtacgccacccggcagctggcggacctcggcgccagggtgatcaaagtggagcggccggacggtggtgatttcgcccgcggctacgaccacagtgtgcacggcgattccagttatttcgtctggctcaaccgaggcaaggagtctttgactctcgacctgaaaacattggagggccaacggatcctgcgccaattgctggccaattcggacgtgctggtgcaaaatctcggaccgggcgcgacgactcggttgagtttggatgcgacgacgctgacccccgagtacccgcggctcatcgtctgcgatatcaccgggtacggcgggaccggtccgtggcgggaccgcaaggcttacgaccttctggtgcaagccgaagccggcctgctgtcggtcaccgggagcggcgacgaggtggcgcgcaccggcgtctcgatcgccgacatcgcggcggggatgttcgcgttttcaggcattctcaccgcgctgtacgtgcgcgccacgacgggcgacgtgcgaccggtgtcggtgtcgttgttcgagtctctcgtggaattggtcagccagcccgcctattacgcgcactacggcggcaccgcgccgccgcgcacaggtgccaggcacgcgacaatcgctccgtacggtccgttcaccgccggcgatggcggcacggtgctgctcgctgttcagaaccagcgggagtggcgccggctgtgcgacgaggttttagcgaccccgggtctgtgtgaggatccgcggttcgtgacgaacccggaccgggtaacccaccgcgacgagctggaggcgatcatccacgccgcgatcgcatcgatgaccgcagacgagttggcgcaccggctcgaggcggcgggcatcgcaaacgcccggatgaacgacgttgagacgctctggtcacacccggttcttgccggcagagaccgatggcgggaggtccgcgcgcccgggggtgcgatcgaagcgctgctaccaccggcgacattgcgggacgtcgagcctcagttgggtgacgttccggggttggccgctcacagccgaatgatcctgcgcgagttgggctataccaatgaggcgattgcggatctcgtccgctcgggggtcaccacggtcgcctcggaccac

SEQ ID NO: 25528 - DNA, 756 bp, Mycobacterium avium
gtgaatcccggtatctcgatcgagcgtgagggcgggatcctgcgactgacgttggaccgccccgacaagctgaacgccgtcgacacgccgatgctcaacgaactcctggggcgcctcgacgagtcggcggatgacgcatcggtgcgcgccgtgctgctgaccggcgccgggcgcgcgttctgttccggcggcgacctgaccggaggcgacacagagggcgctgcacaggcggccaacgacgtcgtacgggcgatcacggaactgcccaaacccgtggtggcgggtgtgcatggaccggcggtcggcgtcggctgcgcgctcgcgctggcctgtgacttggtggttgccacgagagcagcttatttccaactggctttcagtaagctcgggctgatgctcgatggcggagcgtcggtgctgttgcctgccgcaatagggcgggcgcgggcggcgcgggtggcgatgacagccgagaagatcacggcagcaaccgcattcgagtggggcttgatctcgtatgtcgtcgacgacgacgcgtatgagactgacctggcagagttgacgagcacgttggcgaacggtccgactcactcctatcgatggatcaagcgggcactgtcggccgcaaccttgtccgacctcgagtcggtgcaatctctcgaggccgacggtcaacgactattggtcagaacctcggacttcgccgaaggcgtacgcgcgttccgcgagcggcgtcctactgaatttcgaggtgag

SEQ ID NO: 25529 - DNA, 919 bp, Mycobacterium avium
gtgcagatgagcagggaaggaacccgcatgagaatcgcgatgatctccgaacacgccagcccgctggcacatttgggcggcgtggacgcgggcggacagaacgtccacgtcgccgagctgtcctgcgcgctggcgcggcgcggccacgacgtggtggtctacacgcgccgcgacgacccgcggcttcccgactcggtcgagaccccgcacggctacagcgtggtgcacgtgccggcgggaccggcgcgggtgctgcccaaagacgagttgctgcaatacatgtacggcttcgcgcagttcctgcgccagcagtggtgctcggacgggcccgatgtggcccatgcgcacttctggatgtcgggggtggccacccagcaggccgcccgcgcgcattcgataccgaccgtgcagaccttccacgcgctcgggctgaccaagcggctgcaccagggcagcgacgacaccagcccggactgccggatcgacgtcgaagcccgggtcgcccgggaagccgactgggtggcggccaccagcaccgacgaggtcttcgagctggtgcgcatgggccgggcccgatcccgcacctcggtggtgccgtgcggagtggacctcgacgcgttcacccccgacggcccggtcgctgcccgcggtgcgcggccgcgcattgtcacggtgggacggctggtgccgcgcaagggttttgacaccatcgtgcgcgccctgccccgcatcccggacgccgagttggtgatcgtgggcgggccgccggcggccgaactggccggcgacgagcaggcgcggcggctgcagcgactggcgggcgagctcggggtcgccgaccgggtgcggctgctgggcggggtcacccgcgcgcagatgccggcgttgctgcgctcggccgacgtggtggcctgcacgc

SEQ ID NO: 25530 - DNA, 1113 bp, Mycobacterium avium
atgaccagtggctccctcgagttcacggtttcgcgctcgacacgtccggcgaccgacgccgaacgcgaaaccatcctggccgagccgggtttcggcaaatacttcaccgaccacatggtgtcgatcgagtacgacgagaccgaggccggacggggctggcatgacgcgcgcgtcatcccgtacggcccgatcgagctggacccgtcggcgatcgtgttgcactacgcgcaggagatcttcgaagggctcaaggcctaccgctgggcggacggctccatcgtgtcgtttcgcgcccaggccaacgccgcccggttgcggtcctcggcgcggcggctggcgattcccgagctgcccgaggagctgttcctggaatcgctgcgccagctgatcgccgtcgacaacgcctgggtaccggccgccggcggcgaagaggcgctgtatctgcggccgttcgtcatcgccaccgagcccgggctcggggtgcggccctccaagcaataccgctacctgctgatcgcctccccggccggcgcctacttcaagggcggcatcagtccggtcaccgtctgggtgtcgacggagtacgtgcgggccagcccgggcggcaccggtgcggccaagttcggcggcaactacgcggcctcgctgtccgcgcaggccgaggccgcggccaacggctgcgaccaggtggtgtggctggacgccgtcgagcggcgcttcgtcgaggagatgggcgggatgaacatcttcttcgtgttcggcagcggcggctcggcgcggctggtcacccccgagctgtccggctcgctgctgcccggtatcacgcgagactcgttgctgcagttggcaattgacgccggcttcgccgtcgaggaacgcaagatcgacatcgacgagtggcagaagaaggccgccgccggtgagatcaccgaggtgttcgcctgcggcaccgccgccgtcatcacgccggtgtcgcaagtcaagtacggcgagacggagttcaccatcgccgacggccagcccggcgaagtgacgatggcattgcgcgacacgctcaccgggattcagcggggcaccttcgccgacacccacggctggatgacccggctcggc

SEQ ID NO: 25531 - DNA, 1101 bp, Mycobacterium avium
gtgagcaacgaagccgacctgctgcacggaccgctggaagaccgccaccgcgacctgggcgccagtttcgccgagttcgggggttggctgatgccggtgtcgtatgcgggcaccgtcagcgagcacaacgccacgcgcaacgccgtcggcctgttcgacgtcagccatctgggcaaggcgctggtccgcgggacgggcgcggcgcggttcgtcaactcggcgctcaccaacgacctgaaccggatcgggccgggcaaggcgcaatacacgttgtgctgcaacgaatccgggggagtcatcgacgacctgatcgcctactacgtcgacgacgacgagatctttttggtgcccaacgccgccaacaccgccgccgtggtcgaggcgctgcagggcgccgccccggccggggtgaccgtcagtaacctgcatcgctcgtatgccgtgctggccgtgcaggggccgcgctcggccgacgtgctcgccgagctggggctgccgagcgacatggattacatggcctacgccgacacctccttccggcaggtgccggtgcgcgtctgccgcaccggctacaccggcgagcacggctacgagctgctgccgccgtgggagtccgccggcgtggtgttcgacgccctggccgcggcggtgtcgcaggccggcggccaaccggccggcctgggtgcccgcgacacgctgcgcaccgagatgggttacccgctgcacggccatgagctgtcaccggacatttcgccgctacaggcccgatgcggctgggcgatcggctggaaaaaggaggcgttcttcggccgcgacgcgctgctggccgagaaggaggccgggccgcgacggctgctgcgcgggctgcggatggtgggccgcggcgtgctgcgggccgggctgacggtactcgtcggtgacacgccggtcggggtgaccacctcgggcacgttctccccgacgctgcaggccgggatcgcgctggcgctgatcgacaccgacgccgacgtgcgggacggtcagaaagtcaccgtcgacgtccgcggccgcgccgccacgtgcgaggtggtgcggcccccgttcgtcgcggtgaaaacccgg

SEQ ID NO: 25532 - DNA, 1554 bp, Mycobacterium avium
gtgatgcggatgagcacagaacccggttacgcctcccccgtcgtcaacgtcgcctcctcgctgccccgccgcgccgccgcgtccaccgtgctgatcgtgcccgtcgtctccaccggcgacgacgacaagccgggcgccgtcgtcgcgccggccgggtcgttcctgtcctccgacgcggtcgccgagatcgaatccggcctgcgggcgctggcggccaccggcggcgccgaacaactgcaccggctggtggtgggatcgctgccggtgtccagcgtgctgaccgtcggcctgggcaagccgcgatccgagtggccggccgacaccgtccgccgtgccgcgggggtggccgcgcggtcgctgtccaacaccgagacggtgttcaccacgctggcggcgctgcccggcgagggcgtggcctcggccgccgtcgagggcctgatcctgggcagctaccggttcaccgaattccgcagcgccaagaccgccccgaaagacaaagggctgcaaaagatcacggtgctggccaccgccaaggacgccaagcaggaggtcgcgcacggtgcggccgtcgcgaccgcggtcgccaccgcccgcgatctggtcaacaccccgcccagccacctgtttcccgacgaattcgccaagcgggcaagggctttgggtgagtccgtcggcctcgaggtggaggtgatcgacgagaaggcgctgcaaaagggcggctacggagggattctgggcgtcggccagggttcgtcgcgcccgccgcggctggtgcggctgatccaccgcggttcgcggctggccaagaaatccaagcaggcgaaaaaagtggcgctagtcggcaagggtgtcaccttcgacaccggcggcatctcgatcaagccggcggcctcgatgcatcacatgacctcggacatgggcggggccgccgccgtcatcgccaccgtggcgctggccgcgcggctgcagctgccgatcgacgtgatcgccaccgtgccgatggcggagaacatgccgtcgggcaccgcgcagcggcccggcgacgtgctgacgcagtacggcggcaccaccgtcgaggtgcagaacaccgacgccgagggccggctgatcctggccgacgccatcgtgcgggcctgcgaggacaacccggactacctgatcgagacctccacgctgaccggcgcgcagaccgtcgcgctgggcgcccggatccccggcgtgatgggcagcgacgagttccgcgaccgggtcgcggcgatctcgcagcgggtcggtgagaacggctggccgatgccgctgcccgacgagctcaaggaggacctgaagtccacggtggccgacctgtcgaacatcagcgggcagcgcttcgccggcatgctggtggccggcgtgttcctgcgcgagttcgtcgccgacggggtgggctgggcgcacatcgacgtggccggcccggcctacaacaccggcagcccgtggggttattcgcccaagggcgccaccggggtgccgacgcgcaccatgttcgcggtgctcgaagacatcgccgcgaacggc

SEQ ID NO: 25533 - DNA, 735 bp, Mycobacterium avium
atgcgcgtaggagtgctgggagccaagggaaaagtcgggtcgacgatggtggcggcggtgcaggccgccgaggacctgacgctgtccgccgaggtggacgccggcgatccgctgagtctgctgaccgacggcggcaccgaggcggtgatcgacttcacccatcccgacgtcgtgatgggcaacctggagttcttggtgcgcaacggaattcacgccgtcgtcggcaccaccggcttcaccgccgaacggctggcgcaggttcgggagtggctggtcgacagccccggcacgtcggtgctcatcgcgccgaacttcgccatcggggccgtgttgtcgatgcacttcgccaagcaggcggcgcgcttcttcgactcggcggaggtgatcgaactgcatcatccgcacaaggccgacgctccgtcgggcaccgcgacccgcaccgccaaactgatcgccgaagcgcgaaaaggcttgccccccaaccccgatgccaccagcaccagcctgccgggagcgcgcggcgccgacgtggacggcatccccgtgcacgcggtgcggctggccgggctggtcgcccatcaggagatcctgttcggcaccgagggcgagacgctgagcatccgccacgacagcctggaccggacctccttcgtgcccggtgtgctgctggcggtgcggcgcatcagggaacacccgggcctgaccgtgggcctcgaaccgctgctcgacctgggc

SEQ ID NO: 25534 - DNA, 2601 bp, Mycobacterium avium
ttgacggcgttgaacaacccgacaagcatttttgccactacccgaacggaggtcgtcgtggactctttcaacccgaccaccaagacgcaagcggcgttgaccgcggcgctgcaggcggcctcggccgccggcaaccccgagatccggcccgcccacctgctgatggccctgctgacgcaggcggacgggatcgccgcgccgttattggaggccgtgggtgtcgagcccgccaccattcgcgccgaggccgagcgcatgctggcccggctgccgcaggccagcggcgccagttcgcaaccgcagctgtcccgcgagtcgctggccgccatcaccaccgcccagcacctggccaccgagctggacgacgaatacgtctccaccgaacacctgatggtgggcctggccaccggcgactccgacgtcgccaagctgctcaccgggcacggcgcgtccccgcaggccctgcgggaggccttcgtcaaagtgcgcggcagcgcccgggtcaccagccccgaccccgaggccacttaccaggcgctggagaagtactccaccgacctcaccgcgcgggcccgcgagggcaagctcgacccggtcatcggccgcgacaacgagatccgccgcgtcgtgcaggtgctgtcccgtcgcaccaagaacaacccggtgctcatcggtgagcccggcgtcggcaagaccgcgatcgtcgagggcctggcccagcgcatcgtggccggcgacgtgccggaaagcctgcgcgacaagaccgtcatcgcgctggacctcggctcgatggtggccggcgccaaataccgcggcgagttcgaggagcggctcaaggccgtcctcgacgacatcaagaactccgccgggcagatcatcacgttcatcgacgagctgcacaccatcgtcggcgccggcgcgaccggcgagggcgcgatggacgccggcaacatgatcaagccgatgctggcccgcggggagctgcgcctggtcggcgccaccacgctcgacgagtaccgcaaatacatcgagaaggacgccgcgctggagcgccgcttccagcaggtgttcgtcggcgagccgtcggtggaggacaccgtcggcatcctgcgcgggctcaaggaccgctacgaggtgcaccacggggtgcgcatcaccgactccgcgctggtcgccgccgccacgctgtcggaccgctacatcaccgcccgcttcctgcccgacaaggccatcgacctggtcgacgaggccgccagccggctgaagatggagatcgactcgcggcccgtcgagatcgacgaggtcgagcggctggtgcgccgcctcgagatcgaggagatggccctggccaaggaggaggacgaggcgtccaaggagcggctggagaaactgcgctccgagctggccgaccagaaggaaaagctggccgaactgaccacccgctggcagaacgagaagaacgccatcgacgtcgtccgcgagctcaaggagcagctggaaacgctgcgcggcgagtccgaccgcgccgagcgcgacggcgacctggccaaggccgccgagctgcgctacggccggatcccggaggtggagaagaagctcgaggccgcgctgccccaggccgaggcccgcgagaacgtgatgctcaaggaggaggtcgggcccgacgacatcgccgaggtggtgtcggcgtggaccgggatcccggccgggcggatgctcgagggcgagaccgcgaagctgctgcgcatggaggacgagctgggcaagcgcgtcgtcgggcagaagcgggccgtgcaggcggtgtccgacgcggtgcggcgcgcccgggccggcgtggccgacccgaaccggccgaccgggtcgttcatgttcctgggacccaccggtgtcggtaagaccgagctggccaaggcgctggccgacttcctgttcgacgacgagcgggcgatggtccgcatcgacatgagcgaatacggcgagaagcactcggtggcccgcctggtcggcgcgccgccgggctacatcggctacgaccagggcggtcagctgaccgaggcggtgcgccggcgtccctacacggtgatcctgttcgacgagatcgagaaggcgcacccggacgtgttcgacgtgctgctgcaggtgctcgacgagggccggctcaccgacgggcagggccgcaccgtcgacttccgcaacaccatcctgatcctgacctccaacctggggtcgggtggcagcgaggagcaggtgatggccgcggtgcgctcggcgttcaagcccgagttcatcaaccggctcgacgacgtcatcatcttccacggcctcgagcccggcgagctggtgcagatcgtcgacatccagctggcccagctgcagaagcggctggcgcagcgccggctcacgctggaggtgtcgctgccggccaaacagtggctggcccaccgcggcttcgacccggtctacggcgcccggccgctgcgccggctggtgcagcaggccatcggcgaccagctggccaagcagttgctggccggtcaggtgcacgacggcgacaccgtcccggtcaacgtcagcccggacggcgactcgctgatcctgggc

SEQ ID NO: 25535 - DNA, 1182 bp, Mycobacterium avium
atgacgtcgaccctgcctgacgcgcggcccgccgtcgccgcgctgaacccgctcgaggactacctcgccgcgtgcaaacaagcctgcgaccgggagatcgtccggctgtacggttcgggtgagcgcgggtcgaacgggctgtaccagctcatcctcgactacccgctgcgcggcgggaaggcgctccggccggcgctgagcatcgccacctgcctcgggctcggcggccacctcgaggcgatactgccgaccgccgcaacgctcgagctctaccacaacgcgtttctcatccacgacgacatcgaggacgaatcatggtggcggcgaggcaaacccacgctgcacatcgaccacggcgtgccggtcgcggtcaacgtcggcgacgccatgctctcgctttcgttgcaacccctgctcgacaacgtcgagcgggtcgggctcgggcccgcgctgcgcatcctgcgtgccgtggccacgatgacccgcaagaccgtcgacggccaggcgctcgagctggactgggtgcactccaacacctggcggctcgatgacgccgactacctcgagatggtggaactcaagaccagctggtactccttcatcacaccgttgcaggccggcgccgtcgcggccgggtcaacacccgaccggatggccccgttggagtcgctcgggcggcatctcggggcggccttccagatcaccgacgacctgctcaacctgcgcgccgacccgcaggagtacggcaaggagatcggcggcgacctgtgggagggcaagcgcaccctgatgctgctgcacaccctgcggcatgccgaacccggcgaccagcagcgcgcggtgcagatcctgtcccggcgccgcccgagccccgacgccgagttcgacctgaccgagctgctggaccggctcaccgccggcgggcaactgtccgtctcgggccgcaccgagatcgaagcccggctgcggcggcaccaccactcggaagtcaagagcctcaacgacattcgctggctctacgaattgatgcaccgggtgggctcgctcaaccacgcccgcgacgtcgccgtccggcaggcccgccaggccgccgccgtgctcgccggcctggactggtttccccgcagccggcaccgcgacatgctggccgccctggtcgattacgtgcacgggcgggcgcga

SEQ ID NO: 25536 - DNA, 2739 bp, Mycobacterium avium
gtgagcacccgcgccgagccccggccgtccgacccgctgggccggttcagcgcgatcacccgggagtggttcaccagcaccttcgccgccccgaccacggcgcaggcgcaggcctggagcgccatcgccgacggccacaacacgctggtgatcgcgccgaccgggtcgggcaagacgctggccgcgttcctgtgggccctggacagcctggccggccaggccgagcgtgcgcccggcacccgggtgctctacgtgtcgccgctcaaagcgctggccgtcgacgtcgagcgcaacctgcgcacgccgctggccgggctcacccgcatcgccgagcgcgccggcctgccggcccccgacatcagcgtcggggtgcgctccggtgacaccccgccggcggtgcgtcgccagctgatcaaccggccgcccgacgtgctgatcaccacgccggagtcgctgtttctgatgctcacctcggcggcccgcgagacgctggccggggtgcagacggtgatcgtcgacgagatccacgccatcgcgggcggcaagcgcggcgcgcacctggcgctgtcgctggagcgcctggacgcgctgcgcgagggccggcccgcccagcgcatcgggttgtcggcgacggtgcggccgcccgacgagctggcccgtttcctgtccggggcggcgccgggcacccggaccaccgtggtggccccgccgtcggccaagaccgtcgagctgagcgtgcaggtaccggtgcccgacatggccaacctggcgaacaacaccatctggcccgacgtggagaaccgcctggtcgacctgatcgaggcgcacggttcgaccatcgtgttcgccaattcgcggcggctggccgagcgactcaccgcccggctcaacgagattcacgccgagcgcagcggcgtcgagctctccgcgaccgccaatccgaaggtggccggcggcgccccggcgcacatcatggcctcgggtcagacctacggcgtggagccgatactggctcgggcccaccatggttcggtcagcaaggaacagcgcgcgctggtcgaggaggacctcaaacgcggcctgctcaaggcggtggtggccacctccagcctggagttgggcatcgacatgggcgccgtcgatctggtcatccaggtggaggcgccgccgtcggtggccagcgggctgcagcgcatcgggcgggccggccaccaggtcggcgaggtgtcgcgcggggtgctgttccccaagcaccgcaccgacctgatcggctgcgcggtgaccgtgcagcgcatgctggccggccagatcgagaccatgcgggtgccggccaacccgctggacatcctggcccagcagaccgtggcggcggccgccctcgaaccgctggacgccgaccggtggttcgacacggtgcgccgggccgccccgttcgcgacgctgccgcgcagcatctacgaggccaccctggacctgctctccggcaagtatccgtccaccgaattcgccgagctgcgaccgcgattggtctacgaccgcaacaccggcacgctgaccgcgcgccccggcgcccagcggctggcggtcacctccggcggcgccatcccggaccgcgggctattcaccgtctacctcgcctcggaagccgaaaagccctctcgggtaggcgaactcgaagaggagatggtgtacgagtcgcggcccggcgacgtcatctcgctgggcgccaccagctggcggatcaccgagatcacccatgaccgggtgctggtgatcccggcgcccgggcagccggcccggttgccgttctggcgcggtgacggcgtgggccgcccggccgagctgggtgccgcgctcggcgcgttcaccggcgaactcgccggcctgagccgagaggaattcgattcccggtgtgccgcattgggtttcgacgcgtacgccgtcgacaatctgtacggcctgttcgacgagcagcgcaccgccgccggggtggtgcccaccgacaccacgttgctggtcgagcggttccgcgacgagctcggcgactggcgggtgatcctgcactcgccgtacgggctcggcgtgaacgggccgctggccctggcagtgggccgccggctgcgggagcgctacggcatcgacgagaagcccaccgcgtccgacgacggcgtggtggtgcggctgccggacacggtttccgatttcgcgtccgacggtggcgacaccccgcccggcgcagagcttttcgtcttcgacgccgacgagatcgacccgatcgtcaccgccgaggtgggcggttcggcgctgttcgcgtcgcggttccgcgagtgcgcggcgcgcgcgctgctgttgccgcgccggcaccccggccgccgctcgccgctgtggcagcagcgccagcgcgccgcccagctgctggaggtggcccgcaaataccccgacttcccggtggtgctcgagaccgtccgggaatgcctgcaggacgtctacgacgtgcccgccctggtcgcgctgatggccggcatcgcgcagcggcgggtgcgggtgctggaggtggagacgcagcggccctcgccgttcgcggcctcgctgctgttcggctacgtcggcgcgttcatgtacgagggcgacagcccgctggccgagcggcgggccgccgcgctgtcgctggacagcacgctgctggccgagctgctgggccgggtggagctgcgcgaattgctcgaccccgaggtggtc

SEQ ID NO: 25537 - DNA, 1323 bp, Mycobacterium avium
atgcgatgcaccgtgttcggcacgggttacctgggcgccacccacgcggtgggaatggcggagctgggacacgacgtgctcggggtcgacatcgacccgggcaaggtggccaagctcgccgggggtgacatccccttctacgagcccggcctgcgaaagctgttgaacgagaacctcgccgcgggccggctgcgcttcaccaccgactacgacatggcggccggcttcgccgacgtgcacttcctgggtgtgggcaccccgcagaagaagggcgaatacggcgccgatctgcgccacgtgtacgcggtcatcgacgaattggtgccccggttgacgacgtcggcggtgctggtcggcaaatcgaccgtcccggtgggcaccgcggccgagctgaaccagcgggcggcggcgctggcgccgcgcggcgtcaacgtcgaaatcgcttggaaccctgagtttctgcgcgagggctacgccgtgcaggacaccctgcggccggaccggattgtgctgggcatcaaacaggattcaccgcgcgccgaggccgccgtccgagagctgtacgggccgctgttggacgccggggtgccgttcctggtgacggatctgcagaccgcggagttggtcaaggtatccgccaatgcctttctggcgaccaagatttcgttcatcaacgcgatctccgaggtgtgcgaggccgccggcgccgacgtcagcctgctggccgatgcgctgggctacgacccgcggatcgggcgccaattcctcaacgccggtttgggtttcggcgggggctgcctgcccaaggacatccgggcgttcatggcgcgcgccggcgagctgggcgccgatcaggcgctgacgttcctgcgcgaggtggacagcatcaacatgcgccgccgcacccggatggtggaactggccagcgcggcctgcggcggctcgctgctgggagccaacgtcgcggtgctcggcgcggcgttcaagcccgaatccgacgacgtgcgcgactcgccggcgctcaatgtcgccggccagctgcagctcaacggcgccgcggtcaacgtgtacgacccgaaggccctggacaacgcgcagcggctgttccccacgctgaactacgccgtctcggtcgaggaggcctgcgagcgcgcggacgcggtgctggtgctcaccgagtggcgccagttcgtcgagatggaccccgacgacctggccgaccgggtgcgggcccgcgtcgtcgtcgacggccgcaactgcctggacgtcacccgttggcagcgggccggctggcgggtctaccgcctgggcgcgccgcgaccc

SEQ ID NO: 25538 - DNA, 1407 bp, Mycobacterium avium
atggctcgtgcggtcggtatcgacctcgggaccaccaactccgtcgtcgcagtcctcgagggcggtgaccccgtcgtcgtcgccaactccgaaggctcgcggaccaccccgtccatcgtcgcgttcgcccgcaacggcgaggtgctcgtcggccagcccgccaagaaccaggcggtgaccaacgtcgaccgcaccatccgttcggtcaagcggcacatgggcaccgactggtccatcgagatcgacggcaagaaatacaccgctcaggagatcagcgcccgcgtgctgatgaagctcaagcgcgacgccgaggcctatctgggtgaggacatcaccgacgcggtcatcaccgtaccggcgtacttcaacgacgcccagcgtcaggcgaccaaggaagccggccagatcgccggcctcaacgtgctgcgcatcgtcaacgagccgaccgcggccgcgctggcctacggcctggacaagggcgagaaggagcagaccatcctggtcttcgacctcggcggcggcacgttcgacgtctcgctgctcgagatcggcgagggtgtggtcgaggtccgcgccaccagcggtgacaaccacctcggtggcgacgactgggacgaccggatcgtcaactggctggtcgacaagttcaagggcaccagcggcatcgacctgaccaaggacaagatggccatgcagcggctacgtgaggccgccgagaaggccaagatcgagctgtccagctcgcagagcacctcgatcaacctgccctacatcaccgtcgacgcggacaagaacccgctgttcctcgacgagcagctgacccgcgccgaattccagcgcatcacccaggatctgctggaccgcacccgtcagccgttcaagtcggtgatcgccgacgccggcatctcggtgtccgacatcgaccacgtggtgctggtgggtggttccacccggatgcccgcggtgaccgacctggtcaaggaactcaccggcggcaaggagcccaacaagggcgtcaaccccgacgaggttgtcgcggtgggtgccgccctgcaggccggtgtgcttaagggcgaggtgaaagacgttctgctgcttgacgttacgccgctgagcctgggtatcgagaccaagggtggcgtgatgaccaagctgatcgaacgcaacaccaccatcccgaccaagcggtccgagacgttcaccacggccgacgacaaccagccgtcggtgcagatccaggtgtaccagggtgagcgcgaaatcgccgcgcacaacaagctgctcggctccttcgagctgaccggaatcccgccggcgccccgcggcgtgccgcagatcgaggtcaccttcgacatcgacgccaacggcatcgtgcacgtcaccgccaaggacaagggcaccggtaag

SEQ ID NO: 25539 - DNA, 1563 bp, Mycobacterium avium
gtggtgttgctggacggcacatcgagccacccccgcgagctgctgggtaacaagggccacggcatcgaggtgatgcgccgccaccacctgccggtgccgcccgcgttctgcctcaccaccgcggtgggcctgcggtatctggccgaccccgcggcgacgatggacgccgtctgggacgacgtgctggaccggatcggctggctgcaggcgcaaacctcgcgcgcgttcgggcggggcccgcacccgctgctggtcagcgtgcgctccggggccacccagtcgatgcccgggatgatggacaccctgttgaacctcggcatcaacgactccgtggagcaggcgctggccgccgagcacggcccggcgttcgcccgcgacacccaccggcggttccgcgagatgtaccggcgcatcgtgggtgtcgagcggccggtgccgtccgacccgtacacgcaattgcgcgccggcatcgaggcggtgttcgcgtcgtggaactccccgcgcgcccgcgcctaccgcgcccattacggtttcgccgaccggcacggcaccgccgtcgtcgtgcaggccatggtgttcggcaatcacggccccaattccggtgcgggagcattcttttcgcgcaacccgatcaccggggacgacgagccgttcggcgagtggctgcccgggggccagggcgacgacgtggtgtcgggatcggtcgacgtggaaccgatcgccgcgctgcgcgacgagcagccggccgtctacgaccagctgatggccgccgcccggacgctggagcggttggaccgtgacgtccaggagatcgagttcaccgtcgaggacggcgccctgtggttgctgcagaccagggcggcggaacgctcggcgcaggcggcggtgcgctcggcgctgcagctgcgacgcgaggggctgatcgacgacgccgagacgctgcggcgggtcaccccggcgcacgtgcggtcgctgctgatgcccgccctgcaacccgaaatacgtttgacggcaccacttctggccaagggcctacctgcctgccccggcgtggtatccggcacggcctacgccgacgtcgacgaggcgctgcacgccgccgagcggggcgaaccggtgatcctggtgcgcgaccacacccggcccgaagacgtgtcgggcatgctggccgcgcggggcatcgtcaccgaggtgggcggcgcggccagccatgcggcggtggtcagccgggaactgggccgggtggccgtggtgggttgcggcgccggggtggccgcgatgctggcgggccggcggatcaccgtcgacggcgccgaaggcgaagtgcgcgaaggcgaattgtccctgtccgcgtggtccgagaacgacacgccggagctgcgggagctggccgagatcgcgcggctgatcagcccgctgcgcgcccattccggcggcgaccatccgcggctggacgacgactccgagagcgccgtgcgcgcggccctggccgccgggcagaccgacgtggtctcgcccaccccgctgctggtcatgctgaccgcgctgcgccagggcgcgccg

SEQ ID NO: 25540 - DNA, 891 bp, Mycobacterium avium
gtgcacgacaagacgattggcggagaaacagtgagtgacgcagcgattcagcgagtaggagtggtcggggccggccagatgggatccggcatcgccgaggtctcggtccgcgccgacgtcgacgtgacggtgttcgagaccaccgaggccctcatcacggcgggacgcaaccgcatcgtgaagtcgctggagcggggcgtgagcgccggcaaggtcaccgagcgggagcgtgaccgcgcgctgagcaagctcaccttcaccaccgacctgaaagacctcgccgatcgccaactggtcatcgaggccatcatcgaggacgacgccgtcaaggcccaggtcttcgccgaactcgaccgggtggtcaccgaccccgatgcggtgttggcctccaacacctccagcatcccgatcatgaagctcgccgcggcgaccaagaacccccaacgcgtgctgggcctgcacttcttcaatcccgtgccggtgctgccgctggtcgagctggtcagcacgctggtcaccgacgaggccgccgccgcgcgcaccgaggagttcgccagcgcggtgctgggcaagcaggtggtgcgctgcagcgaccggtccggcttcgtggtcaacgcgctgctggtgccctacctgctgtcggcgatccggatggtggaggccggcttcgccaccgtcgaggacgtggacaaggccgtggtggccgggctgtcgcatccgatgggcccgctgcggctttccgacctggtgggcctggacaccctgaagctgatcgcggacaagatgttcgaggagttcaaggagccgcagtacggcgccccgccgctgttgctgcgcatggtggaggccggccggctcggcaagaagacgggccagggtttctacacgtat

SEQ ID NO: 25541 - DNA, 900 bp, Mycobacterium avium
atgtcgatctttttgaacaaggactccaaggtcatcgtccagggcatcaccggcggcgagggcaccaagcacaccgcgctgatgctcaaggccggcacccaggtggtgggcggggtgaacgcccgcaaggccgggaccacggtttcgcacgtggacccggtcggcaaggacgtcgagctgccggtgttcggcacggtgtccgaggcgatgaaggagaccggcgccaacgtgtcggtggtgttcgtgccgccgaagttcgccaaggacgcgatcatcgaggccatcgacgccgagatcccgctgctggtcgtcatcaccgagggaattccggtgcaggacagcgcatatgcgtgggcctacaacgtggacaagggtcagaagacccgcatcatcggacccaactgcccgggcatcatcacgcccggcgaggcgctggccggcatcaccccggccaacatcagcggtcccggaccggtcgggctggtgtccaagtccggcaccctgacctaccagatgatgtacgagctgcgcgatttcgggttctccacctcgatcggcatcggcggtgacccgatcatcggcaccacccacatcgacgccatcgaggcgttcgagaaggaccccgacaccaagatcatcgtgatgatcggcgagatcggcggcgacgccgaggagcgcgcggccgactacatcaaggcccacgtgtccaagccggtcgtcggctatgtcgcgggattcactgcgccggaaggcaagacgatgggtcacgccggcgccatcgtgtccggctcgtcgggcaccgcggccgccaagaaggaggccctggaggccgccggcgtcaaggtcggcaagacgccgtcggagacggccgcgctggcccgagagatcctgcagagcctg

SEQ ID NO: 25542 - DNA, 1059 bp, Mycobacterium avium
gtggcggccaccaacaccgccccgacgagccccgacccccgcagccacgacacggtcacgccgccctcctccgcttgcgcccggcagatagtagcagcgccgccgggccgaaagaggccggcgcccagcccttcccatggttcattcgacgtcgaggtggcgggccaggaaatccagcacggcgtcggcgaaaacgtcgttgcggtcgccggcgaccatgtgccccgccccgcgcacgtcggtgaattcgacttgggggaagcgcgccaggaactcgtcggcgcgctcctggctgaccaggtcgctcatctggccgcggatcatcaggatgggcacgccgtcgcgcaggatcgcctcgacggccgcgtgcatccgatcggggtcggtgacctcgaacggcgggaaagccgctgtgccgctgatgaattgcggatcccagtgccaataccagcgatcgccgcggcgacgcaggttggtggtcaggccctccagatcggttggccgcggccggtgcgggttgtattcggcgatcgcgtcggcgacctcgtcgagcgaggcgaatcccgagtccacccggtcggccatgaaggcgtgaatccggttggccccggattgatccatgttcggcacgatgtccaccagcacgaccgcgctcgcgatgccaggggacagttcgccggcgagcagcatcgaggtgaaaccgccgagagaggcgccgaccagcaccggcttcgggggcagcgtgcccagcaccgcctgcacgtcggcggcgaagctgacgacccggtagtcgccgtcgccggaccagtccgattcgccgtgcccgcgcaggtcgacggtgaccgcctgccacccgcgggcggcgacggcggcggccgccttgccccacgaccgccgcgtctgcccgccgccgtgcaggaacaccacggcgcgcgcgcgaggatccccgagacggtcggcgacgatctgaacgccgccggggccgcggatcgtgaagggttcggctgccatgggcaccaggtgatactaaggcggcccccggccgggcccgcggtggct

SEQ ID NO: 25543 - DNA, 681 bp, Mycobacterium avium
atgcagccgaggagccggcggccgctgcgccgggcccagttgtccgacgaggtcgcggggcacctgcgggccgcgatcatgtccggcgcgctgcggccgggcaccttcatccggctcgacgagaccgcggccgagctcggcgtcagcgtcaccccggtgcgcgaggccctgctgaagctgcgcggcgagggcatggtgcagctggaaccgcaccgcggtcacgtggtgctgccgctcacccgccaagacatcgaggacatcttctggctgcaggcgaccatcgccaaggagctggccgccgcggccaccgaccacatcaccgacaccgagatcgacgagctggatcgcatcaacgacgcgctcgccgcggccgtcgggtccggcgacgccgagaccatcgcgggcctcgagttcggcttccaccgggtcttcaaccaggccagcggccggatcaagctggcctggttcctgctcaacgccgcccgctacatgccggtgctggtgtacgccgccgacccgcagtgggggcgggccgccgtcgacaaccaccggcaactgatcgccgcgctgcgccgccgcgacaccgccgcggtgatcgagcacacggtctggcagttcaccgacgcggcggcgcggctgaccgcgatgcgcgaccgcaccggcacgccgagcaaccggggt

SEQ ID NO: 25544 - DNA, 1032 bp, Mycobacterium avium
atggacgcgatgacacaccggaaacgacggcacatcgacgtgtgtctgagcgacccggtggaattcgacggcgtcacaaccgggttggaccgctaccgattgccctaccacgcactgacacagaccagcctgggcgacatcgacgtgtccacctcgttcttcggggcgaacctgcgggcgccgatcctcatcggcgccatgaccgggggcgccgagatgtcgaagacgatcaaccggaatctggccgcagccgctcagcagctgggaatcggcatgatgctggggtcgcaacggatcatgctcgacagcgcgctgggcgaacgcgccgcggacagcttcgcggttcgcgatgtggccccggatgtcttgctgttcggcaacatcggtttgtcgcagctggcgaagacggcggttcctcatctggtgaaggcgctcgatcgggtgggtgcggacgccttggccgtgcacaccaatccgttgcaggaggcgatgcagcacaacggggacaccgacttctccggctcgctgagcaggctgcgcgaagccgccgccgcgctcgattatccggtgctgctcaaagaggtcggccacggcatcggcggtgcggccgcagcggaacttgttgggggagaaggacaaccgccggtcgccggtattgacgtggcgggtgccggaggcacttcctggtcgcgcgtcgaacagttcgtgcggtacggcgagctacgctatccggacctggcggactggggtgtgcccaccgcgcgcgcgatcgtcgaggtgcgccggctgctgccggagatccccttggtggcctccggtggtattcggacgggcatggacgcggccaaggcgatcgcgttgggtgccgacgtggtggcggtagcgcggccactgttgccggcggcgatcgaatcctctgcggccgtggtcgattggctgcggccgttcatcgacgagttgcgggtgtgtctgcacggctgcggtgtcgccgacctggcgggcttgcgtgctgtcgagctgatccgcctcgcc

SEQ ID NO: 25545 - DNA, 1353 bp, Mycobacterium avium
atggggctgcactacgcaagcgtcgtggacgccgccatcaccgaggtcttcgactggcacgccaggccgggcgcgttcgagcggctctcgccgccgtggtcgccgatacggctgctcaccgaggccgcctcgctcaaagacgggcgcgccaccctggcgctgcccggcggtctgcgttgggtggcggtgcaccggccggacggctacgacccgccgcgacgtttcgtcgacagcatcggcggcgacggcctggccgcgcttccggcgcgaatcgcggtgcgctggcggcacatccacgaattcgaggacgtcggcggcgaccgcacccgggtgatcgaccgggtcgagacgccggtgcccgcgtcgctgctgcgacccatgttcgactaccggcaccgccaactcgccggcgacctggccgcccaccggctggccgcccagcacgggttgcggccactgacggtcgcggtcaccggatcgtcgggtctggtcggttcggcgttgaccgcgttcctgcggaccggcgggcaccgggtcatccggctggtgcggcgcgccgcgcgcggggacgacgagcggcggtgggaccccgaggatcccgacccggggctgtgcgacggtgtcgacgcggtgatacacctggccggcgcctcgatcgccgggcggttcaccgaccggcatcgagaagccgtccgggacagcaggatcgggcccacccggcggctggccgaactgctgggccgcggccggccccggcccgccgcgctgatctcggcgtcggcgatcggctactacgggtacgaccggggcgacgaaacgctcaccgaggacagcgaccgcggcgacgggttcctggccgatgtggtggccgactgggaacaggcgaccacgccggcgctggatgcgggcgtgcgggtgatgcaggtgcgcaccggcatcgtgcagtcaccgcgcggcggcacgctgaagctgatgcgcccgttgttcagcgccggtctcggcggccgactgggcgacgggcggcaatggctgtcctggatcggcatcgacgatctgatcgacgtctaccaccgggcgttgtgggacagcagactcaacggtccggtcaatgccgttgcgccgcaaccggtccgaaacagggagtacacgaccgcgctggccgcggtgttgcaccggcccgcggtgctgccggtgccgtcgctggggccgcggctgttgctgggcggtcagggcgcccgcgaactcgcgggcgcgagtcagcgggtagccccggccaagctcgccgcggccgggcaccggtttcgccaccccgacatcgagcgggcgctgcgtcacctgttgggccgcggcggc

SEQ ID NO: 25546 - DNA, 1629 bp, Mycobacterium avium
atgatcggcatcatgtacaccgtcacctgcttcgccttcttcttcatcggcgggctgatggcgttgctgatgcgcaccgagctggccgcgcccgggctgcagttcctgtcgaacgagcagttcaaccagctgttcaccatgcacggcacgatcatgctgctgctgtacgccaccccggtggtgttcggtttcgccaacctggtgctgccgctgcagatcggcgcgcccgacgtggccttcccgcggctcaacgccttctcgttctggctgttcctgttcggcgggctgatcgcggcgtccggcttcatcgtgccgggcggggccgccgacttcggctggaccgcctacaccccgctgtctgacgccgtgcactcgcccggcgccgggggagacctgtggatcaccggcctgatcgtcgccggtctgggcaccatcctgggtgcggtcaacatgatcaccaccgtggtctgcatgcgcgcgcccggcatgacgatgttccggatgccgatcttcacctggaacatcctggtgacctcgatcctgatcctgatcgccttcccgatcctgaccgcggcgctgttcgggctggccgccgaccgccatctgggcgcccatgtctacgacgccgccaacggcggagttctgttgtggcagcacctgttctggttcttcggccatcccgaggtgtacatcatcgcgttgccgttcttcgggatcatcaccgagatcatcccggtgttcgcgcgcaagccggtgttcggctacaccacgctggtgtacgcgacgctgtcgatcgcggcgctgtcggtcgcggtgtgggcgcaccacatgttcgccaccggagccgttctgctgccgttcttttcgttcatgacgtacctgatcgcggtgccgaccgggatcaagttcttcaactggatcggcacgatgtggaaggggcagttgacatttgagacgccgatgctgttctgcgtcggcttcctgctcaccttcctgctgggtggtctgaccggcgtgatgctggccagcccgccgctggacttccacgtcaccgacacctatttcgtggtcgcgcacttccactacgtgctgttcggcaccatcgtgttcgccaccttcgcgggggtctacttctggttcccgaagatgaccggccgcctgctcgacgagcggctgggcaagctgcacttctggttgacgttcatcgggttccacaccaccttcctggtgcagcactggctgggcgatttgggcatgccgcgccgctacgccgactacctgcccagcgacggcttccagccctacaacgtcgcctccacggtcggggcgttcatcctgggcgcctcgatgttcccgttcgtctggaacgtcttcaagagctggcgctacggcgaggtcgtcaccgtcgacgacccgtggggttacggcaactcgctggagtgggcgaccagctgcccgccgccgcggcacaacttcaccgagctgccccgaatccgttcggagcggccggcattcgagttgcactacccgcacatggtggaacggctgcgcgccgaggcgcacgtgggtcgcgcgcacggcccggcggacaaggacgtcacccggctggacgacgtccaggttcgcagc

SEQ ID NO: 25547 - DNA, 762 bp, Mycobacterium avium
gtggctgcttcgataggctgtccggccatgacgaccatgtggggcgctccactccatcgccgttggcgtggatcgaatctgcgcgacccgcgccaggccaaattcctcaccctggcctcgctgaaatgggtgctgcgcaaccgcgcctacaccccctggtacctggtgcggtattggcggctgctgaagttcaagctggccaacccgcacatcattacccgcggcatggtgtttctgggcaagggcgtggagatccatgccacgcccgagctcgcgcagctcgagatcggccgctgggtgcacatcggcgacaagaacaccatccgcgcgcacgagggctcgctgcggttcggtgacaaggtggtgctgggccgcgacaacgtgatcaacgcctacctggacatcgagctcggcgattcggtgttgatggccgactggtgctacgtctgcgatttcgaccaccgcatggacgacatcaacgtcccgatcaaggaccaggggatcgtcaagtccccggtccgcatcgggccggacacctgggtgggggtgaaggtgacggtgctgcgcggcacctccatcgggcgcggctgcgtgctcggctcgcacgcggtggtccgcggtgtcatcccggactactcgatcgcggtcggcgcaccggccaaggtggtcaagaatcgtcagctgtcctgggagagttcggccgcgcagcgggccgagctggccgccgcgctggccgacatcgaacgaaagaaggcctcccgc

SEQ ID NO: 25548 - DNA, 1515 bp, Mycobacterium avium
atggccagtcgatggcggacgaagtcggtggaacagtcgatcgccgacaccgacgagccggacacccggctgcgcaaggacctgacctggtgggacctggtcgtgttcggcgtcgcggtggtgatcggcgccggcatcttcaccgtcaccgcgtcgacgaccggcgacatcaccggcccagccatctgggtgtcgttcgtgatcgcggcgggcacctgcgcgctggcggcgctgtgctacgccgagttcgcctccaccctgccggtggccggcagcgcctacaccttctcctacgccaccttcggggagttcctggcctggatcatcggctggaatctgctgctggagttggccatcggcgccgcggtggtggccaagggctggtccagctatctgggcacggtgttcggattctccggcggcacagtcaaattcggggccgcccagctcgactggggtgcgctggtgatcgtcggtggggtggccaccctgatcgcgctgggcaccaagctgtcgtcgaggttctccgcggtgatcaccgggatcaaggtgtcggtggtggtgttcgtcgtggtggtcggcgtcttctacatcaagcgcgccaactactcgccgttcatccccaagccggaggccggcggccaggccaagggcatcgaccagtcggtgctgtcgctgctgaccggggcgcacaccagccactacggctggtacggcgtgctggccggggcgtccatcgtgttcttcgcgttcatcgggttcgacatcgtggccaccatggccgaggagaccaagcatccgcagcgcgacgtcccccggggcatcctggcgtcgctgggcatcgtcacgctgctctacgtggcggtcgccgtcgtgctgtccggcatggtgtcctacacccaactcaagacgatgccgggccgcgggcaggccaacctggccaccgccttcaccgccaacggcatccactgggcgagcaagatcatctccatcggcgcactggccgggctgaccacggtcgtgatggtgctgatgctcggtcagtgccgggtgctgttcgcgatggcgcgcgacgggctgttgccgcgggcgctggccaagaccgggtcgcggggcacgccggtgcgcatcaccgtgctggtcgccctggtggtggcggtgacagcctcggtgttcccgatcaccaagctcgaggagatggtcaacgtcggaacgctgttcgccttcgtcctggtctccgccggggtgatggtgctgcgccgcacccggccggacctggagcggggcttcaaggcgccgtgggtgccggtgctgccgatcgcctcgatcggcgcctgcgtgtggctgatgctcaacctcaccgcgcttacctgggtccggttcggcatctggctggtggtgggcacggcgatctacgccggctacggctactggcactcggtgcagggccgtcgcgacgccggcgaacccgaccgcagcgacgcgctggcggccgaccccaacagcccggttccg

SEQ ID NO: 25549 - DNA, 1224 bp, Mycobacterium avium
gtggagctgcttcgcggggctttgagaacatacgcatggggttcgcgtaccgccatcgccgaattcaccgaacgaccggtgccggcggcgcatccggaggccgaactctggttcggcgcccacccgggcgacccggcctggctggagaccgacaacggcgagatcacgttgctcgatgcgctgcgcgccgacccggagggacagctcggtccggggtcgcgggcgcggttcggtgacgtgctgccgtttttggtcaaggtgctggccgccgacgagccactgtcgctgcaggcacacccgagcgccgagcaggcggccgagggctacctgcgcgaggagcggctcggcatcccgctgaactcgccggtgcgcaactaccgcgacacctcgcacaagccggagttgctggtcgcgctgtatccgttcgaggcgctggccgggttccgcccggcgtcgcgcaccgtcgagctgctgcgggcgctggccgtctccgatctcgatcccttcatcgagttgctgggcgaccagtccgacgccgacggcctgcgcgcgctgttcaccacctggatcaccgccccgcagcccgacatcgacgtgctggtgcccgccgtgctggacggcgcaatcgcctacctcagttcgggcgcaacggaattcgcggccgaggccaagaccgtgctcgagctgggcgagcgctatcccggcgacgccggggtgctggcggcgttgctgctcaaccgggtcagcctcgccccgggcgaggccatcttcgtctcggccggcaacctgcacacctatctgcggggcttcgccgtggaggtgatggccaactccgacaacgtgttacgcggcggcctgacccccaagcacgtcgacgtgcccgagctgctgcgggtgctcgacttcgcgcccaccaccgaggaccagctgcgcccgcgcgtgcggcgcgagggcttcgggcggatctatgagaccccgaccgacgagttcgccgtcgcgctgttggagctggaggacgagtacgtcggccacgaggtggacgccacctgcagccacgacggcccgcagatcctgctgtgcatccagggctgcacgaccgtgcacggcaaatccggctcgctgcggctcaagcgcggcatggccgcctgggtggccgccgacgatgccccgatccggctggtcgcccacgaacccaccaagctgttcagggcgacggtcgggctg

SEQ ID NO: 25550 - DNA, 630 bp, Mycobacterium avium
gtgctgatcgcgatcgagggcgtcgacggcgccggcaagcggacactggccgagggtctgcgcaaggccttcgaggcggcgggacagtcggtggccacgctggccttcccgcggtacgggcgctcggtgaccgccgacatcgcggccgaggcgctgcacggcgagcacggcgacctggcgtcgtcggtgtacgcgatggcgatgctcttcgcgctggaccgggccgcggccgtcggcgacatcgagggcctgcgccgcgaccacgacgtggtgatcatggaccgctacgtcgcctccaacgcggcctacaccgccgcgcgcctgcaccaggacgccgacgggccggcggtcgcctgggtgcacaccctggagtacgggcggctgaaactgcccgcacccgaccggcaggtgctgctggcggtctcggccgagctggccgcggagcgcgcacgcagccgggcggagtccgatccgggccgcgcgcgggacagctacgaacgcgacgacgggctgcagcaacgcaccggcgcggtgtacgcgcagctggccgccgcgggctggggcggtgcctggcgggtcgtcgacgcggacgtcgacccggcccggctggccgccgatttggcggccgaa

SEQ ID NO: 25551 - DNA, 636 bp, Mycobacterium avium
atgaacaaggcagagctcattgatgtgctcacacagaaattgaacacggaccgtcggcaggcgaccgcagcggtcgagaatgtcgtcgacaccattgtgcgtgcggtacacaagggcgacagcgtcacgatcaccgggttcggtgtattcgaacagcggcggcgcgccgcacgggtggcccgcaacccgcgtaccggtgagacggtgaaggtgaagccgacgtccgtcccggcgttccgccccggcgctcaattcaaagcggttgtctctggggcacagcgtctcccgtccgagggcccggccgtcaagcgcggcgtggtcggcggcgcggccaagaagaccgccgccaagaaggcgcccgccaagaaggctgcggcgaagaaggctccggccaagaaggccgccgccaagaaggccccggcgaagaaggctgcggtcaagaaggctccggcccgcaaggccgcgaccaaggctccggtgcgcaaggccgcgaccaaggctccggccaagaaggttgcggcgaagaaggctccggccaagaaggccgcgaccaaggccccggccaagaaggccgccagcaaggcgccggctcgcaaggccgcggccaagaagacgaccgcgcgtcgcggccgcaag

SEQ ID NO: 25552 - DNA, 1029 bp, Mycobacterium avium
atgcggatcggagtgctcaccggaggcggcgactgccccgggctcaacgccgtcatccgggcggtggtgcggacctgcgactcccggtacggctcgtcggtggtcggattccaggacggctggcgcgggttgctggagaaccggcgcatccagttgcacaacgacgaccgcaacgaccggctgctggccaagggcgggaccatgctgggcaccgcccgcgtgcacccggacaaattgcgggccgggctgaaccagatcaagcagaccctcgacgacaacgggatcgacgtcctcatcccgatcggcggcgaagggacgctgacggccgcgcactggctctccgaggagaacgttcccgtggtcggggtgccgaagaccatcgacaacgacatcgattgcactgacgtgactttcggccacgacaccgccttgaccgtcgccaccgacgcgatcgaccgcctgcacagcacggccgaatcgcatcaacgcgtgatgctggtggaggtgatgggccggcacgccggctggatcgcgctcaacgccggactggcctccggcgcacacatgaccctgatccccgagcagcccttcgacgtcgaagaagtctgccggctcgtcaaacgtcgcttccagcgcggggattcgcatttcatctgcgtcgtcgccgagggtgccaaacccatccccggttcgatttccttgcgggaaggcgggattgacgaattcggccatgagcgcttcaccggggtggccgcgcagctgggtgccgaggtggagaagcggatcaacaaggaggtccgggtgacggtgctgggccacgtgcagcgcggcggcaccccgaccgcctacgaccgggtgctggccacccggttcggtgtgaacgcggccgacgccgcgcacgccggggagtacggccagatggtgtcgctgcgcgggcaggacatcggacgggtgccgctggccgacgcggtgcgtcagctcaagctggtgcccgaaagccgctacgacgacgccgccgcgttcttcggt

SEQ ID NO: 25553 - DNA, 1479 bp, Mycobacterium avium
gtgaacgagatcatccggtcggacgccgcgacgctggccgcccgcatcgccgccaaggagctgtcctcggtcgaggccacccaggcctgtttggaccagatcgcggcgaccgacgagcgctaccacgcctttttgcacgtcgccgccgatgaggcgctgggcgcggccgcggtcgtcgacgaggcggtggcggcgggcgagcggctgccctcgccgctggccggggtgccgctggcgctcaaggacgtcttcaccaccgtcgacatgcccaccacctgcgggtccaagattctgcagggctggcgttcgccgtacgacgccaccgtcaccacgaagctgcgggccgcgggcatcccgatcctgggcaagaccaacatggacgagttcgcgatgggctcctcgaccgagaactcggcctacggcccgacccgcaacccgtggaatgtcgagcgggtgcccggcggttccggcggcggcagcgcggccgcgctggcggcgttccaggcgccgctggcgatcggctccgacaccggcggctcgatccggcagcccgccgcgctgaccgcgaccgtcggggtcaagcccacctacggcacggtgtcccggtacggcctggtggcctgcgcgtcatcgctggatcagggcggcccgtgcgcgcgcaccgtgctcgacaccgcgctgctgcaccaggtgatcgccggccacgacatccgcgactccacctccgtcgacgcgccggtgcccgacgtcgtcggcgccgcccgggccggcgcggccggtgacctcaagggtgttcgggtcggggtggtcaagcagctgcgcggcgagggatatcagcccggcgtgctggcctccttcgaggccgccgtcgagcagttgaccgcgctgggcgccgaggtcagcgaggtcgactgcccgcacttcgagtacgcgctggccgcctactacctgattttgccctcggaggtgtccagcaacctggcccgcttcgacgcgatgcgctacgggctgcgcatcggcgacgacggcagccacagcgccgaggaggtgatggcgctgacccgggccgccgggttcggcccggaggtcaagcggcgcatcatgatcggcacctacgcgctgtccgcgggctactacgacgcctactacaaccaggcccagaaggtgcgcaccctgatcgcccgcgatctcgacgccgcgtacgagtccgtcgacgtggtggtctcgccggccaccccgaccaccgcgttcgggctgggggagaaggtcgacgacccgctggccatgtatctgttcgacctgtgcacgctgccgctgaacctggccgggcactgcggcatgtcggtgccatccggattgtcgcccgacgacgacctgccggtggggttgcagatcatggcgcccgcgctggccgacgaccggttgtaccgggtcggcgccgcctacgaggccgcgcgcggcccgctgcgcagcgcgatc

SEQ ID NO: 25554 - DNA, 294 bp, Mycobacterium avium
gtgtcccagatctcccgcgatgaggtggcgcacctggcccggctgtcccggctggcgctgacggacgccgagctcgacagcttcgccggccagctcgacgccatcctcacccacgtcagccaggtgcaggcggtcgacgtcaccggcgtcgaaccgaccgacaacccgctgaaggacctcaacgtcacccgcccggacgagccgatgccctgcctgacgcaggccgaagcgctggccgaagcgcccgaagccgtcgacggccggttcgccgtcccgcagatcctgggggacgag

SEQ ID NO: 25555 - DNA, 1410 bp, Mycobacterium avium
atggtccgcacggcgctgttcaactgggcatacgcccgacacaccggcggcaccttcgtgtttcgcatcgaggacaccgacgcggcgcgcgacagcgaggaaagctacttggcgctgctggacgcgctgcgctggctcggcctggactgggacgaggggccggaggtgggcggcccgtacggcccctaccggcagtcacagcgcggcgagatctaccgcgacgtggtggccaaactggtcgaggcgggcgaggcgtattacgccttctccaccccggaggaggtcgaggcgcggcacatcgccgccggccgtaatcccaagctgggctacgacaacttcgatcgccacctcaccgattcgcagcgcgccgccttcctggcggagggccgccaaccggtggtgcggctgcggatgcccgacgaagatctcggctgggacgacctggtccgcggcagcaccgtcttcgccgccggctccgtgcccgacttcgcgttgacccgcgccaacggagatcccttgtacacgttggtcaacccgtgcgacgacgcgctgatgaagatcacccacgtgctgcgcggcgaggacctgctgccctcgacaccgcgtcagctcgcgctgtatcaggcgctgatccggatcggagtggccgagcgcatcccgcagttcgcccacctgccaacggtattgggggagggcaccaaaaagctctccaagcgcgacccacagtccaacctgttcgcccaccgcgaccgcggcttcatccccgaagggctgctcaattaccttgcgctgctgggctgggccatcgccgacgaccgcgacgtgttcagcctggacgagatggtggccgccttcgacgtcgtcgacgtcaactccaatccggcccgcttcgaccagaagaaggccgacgcgctcaacgccgagcacatccggatgctgaccgccgcggacttcgccgccaggctgcgcgactacctcgacgtccacgggcatcgcctcgcgctcgacgacgcggcgttcgccaccgccgccgagttggtgcagacccgcatcgtggtgctcggcgacgcgtgggacctgttgaagttcctcaacgacgacgagtacgcgatcgacccgaaggccgccgccaaggagctggggcccgacggcgccgcggtgctggacgcggcgctgcccgcgctggacgccgtgacggactgggcggcgccgcagatcgaggccgcgctgaagaccgcgctcatcgacggcctgggcctcaaaccgcgcaaggcgttcgggccgatccgggtgggcgccaccgggacgacgatcagcccgccgctgttcgaatcgctgcagctgctgggccgcgaccgcagcttgcggaggttgcgcgcggcgcgggagcgggccggtcagcacagcgcc

SEQ ID NO: 25556 - DNA, 1302 bp, Mycobacterium avium
atgcagaccgaccccgtcgccacgcccgacgtcggcgccggcacccgctggtcgatcatggtcgtttcgctgctggcgacggcgagttcctttctgttcatcaacggcgtcgcattcttgatcccgtcgctgcaaggcgcgcgcgggattcggctcgacgaagccggtctgctggcctcgatgcccagctggggaatggtggtcacgctcgtggcgtggggctacgtgctggaccgggtcggcgagcgggtggtgatgaccaccggctcggcgctgaccgcactggccgcctacgccgcgtcgtcggcacactccatggtactgatcgcggtgtacctgtttctcggcggcatggcggcggccagctgcaacacggccggcggccgactggtgtcggcctggttccccccgcaccagcgcgggctggcgatgggcatccgccaaaccgcgcaaccgttgggaatcgcgttgggcgccatggtcattcccgagctggccgaacacggtccgcaggcgggactgcgcttcaccgcgctggcatgcgtgttcggcgcggtcgccagcgtgatcggtatcgtcgacccgccgcgcaagccccgcgccagcgccagcgatcaggaactcgccagcccgtatcgagggtcgttgacgctgtggcgaattcacgcggtggcgggcctgatgatgatgccgcagacggtgacggtgacgttcatgctggtgtggttgatccggaacctgcactggtccgtcgcggccgccggcgcattggtgacgctctcccagctgctcggtgcgctcggccgggtcgcggtgggtcgctggtcggaccggctcggctcgcggatgcggcccgtccgctacatcgcggccgcggcggtgctggttctgctgctgttggcctgggccgactacctcaattcgcggtggcaggccggcctgatggtggccatctcggtgatcgcggtgctcgacaacgggctggaggccaccgcgatcaccgaattcgccgggccgtattggagtggacgcgccctgggcatccagaacaccacccagcggatgatggcggccgccggtccgccgttgttcggcgcgttgatttcggccgcgaaatatccaccggcatggctgttgtgcgcgttgttccccttggcggcgatgccgctggtgccgacgcggctgctgccgcccggcttggaaactagagcgcggcggcaatccgttcgccgacttcggtggtggcgggccgttcgttcccacgcgttgccagatatcgttcgacggcccggtcaacccggg

SEQ ID NO: 25557 - DNA, 2079 bp, Mycobacterium avium
gtgagctcggcagaggctgattcggtaccgcccgaggtgcggcggcagtggcaggagctggccgaaacggtccgcgaacaccagttccgctactacatcaaggacgcgccgatcatctcggacgccgagttcgacgcgctgttcaacgagctgctcgccctggaggagcgtcaccccgagctgcgggtggccgattcgcccacgcagctggtcggcggggcgggtttcgccaccgacttcgccgaggcggcgcacctggagcggatgctgagcctcgacgacgtcttcgacaccgacgagctaatcgcctggagcaatcgcgtcgagaacgagatcggcaaggacccgcactacctgtgcgagctcaagatcgacggggtggccctgtcgctggtctaccgcgacggccggctggaacgcgccgccacccggggcgacggccgggtcggcgaggacgtgacgctcaacgcccgcaccatcgacgacgtgcccgaacgcctctcgcccagcgacgacttcccggttccggcgctgctcgaggtgcgcggtgaggtgttcttcctgctcgccgacttcgaggcgctcaacgccagcctggtcgaagacggcaaggcgccgttcgccaatccgcgcaacagcgcggccgggtcgctgcgccagaagaacccggccgtcaccgcgcggcgcaagctgcggatgatctgccacggcatcggccgcaccgaggggttttcgccgaaaacccagcacgaggcctacaccgcgctgagcgtgtgggggctgccggtggccgaacagaccgcgcgggtgcgcgggctggccgcggtgcaggagcggatcggctactggggcgagcaccgctacgaactgcaacacgagatcgacggtgtggtggtcaaagtcgacgacgtcgcgttgcagcgccggctcggcgccacctcgcgcgcgccgcgctgggcggtcgcctacaagtacccgccccaggaggcgcagaccaagctcctcgacatccgcgtcaacgtcgggcgcaccgggcgcgtcaccccgtttgcgttcatgaccccggtcaaggtggccgggtcgacggtggggctggccaccctgcacaacgccgccgaggtcaagcgcaagggcgtgctgatcggcgacaccgtgatgatccgcaaggccggcgacgtgatccccgaggtgctgggcccggtcgtcgacctgcgcgacggcaccgaacgcgaattcgtcatgcccacaacgtgtcccgagtgcggcaccccgctggcgccggccaaggagggcgacgccgacatccgctgccccaacgctcggtcctgcccggcgcagctgcgagagcgggtgtttcacgtcgccggccgcggcgcactcgacatcgaggggctgggctacgaggcggccaccgcgctgctcaaggccggggtgatcgccgacgagggcgacttgttcgcgctcaccgaggacgacctgctgcgcaccgagctgttccggaccaaggccggcacgttgtccgcgaacggcacacggctgctgcagaacctgcagaaggcgaaaaaggttgcgctgtggcgtgttttggtggcgttgtcgatccggcacgtggggccgacggcggcgcgcgccctggcgaccgagttcggcgatctggactcgatcatgtcggcgtccaccgagcggctcgccgcggtggagggggtcggcccgacgatcgcggcggcgctcaccgaatggttcaccgtcgactggcaccgcgcgatcgtggacaagtggcggggcgccggcgtgcggatggccgacgagcgcgacgccagcgtgccgcgcacgctggaggggctgacggtggtggtcaccgggtcgctggccggtttctcccgcgacgacgccaaggaggcgatcctggcgcgcggcggcaaggccgccggttcggtgtcgaagaagaccgactacgtggtggccggcgattcgccgggctccaagtacgacaaggcggtcgagctcggcgtgcccatcctggacgaggacggcttccgcaagctgctggccgagggcccgcccgaaaccccggcggac

SEQ ID NO: 25558 - DNA, 999 bp, Mycobacterium avium
atgttctacgacgacgatgcggacctgaccatcatccagggtcgcaaggtcggcgtcatcggatacggcagccaggggcatgcgcactcgctgagcctgcgcgactccggcgtgcaggtgaaggtgggcctgaaggagggttcgaagtcgcgcgccaaggtttccgagcagggcctcgacgtcgacaccccggccgcggtggccaagtgggccgacgtcatcatgctgctggcccccgacaccgcgcaggccgacatcttcaaaaacgacatcgagccgaacctgtcggacggcgacgcattgtttttcggtcacgggctcaacatccacttcggcctgatcaagccgcccgccgaggtcaccgtcgcgatggtcgcccccaaggggcccggccacctggtgcgccgccagttcgtcgacggcaagggcgtgccctgcctgatcgccgtcgaccaggacccgaccggcaagggcgaggcgctggcgctgtcctacgccaaggccatcggcggcacccgggccggcgtcatcaagaccaccttcaaggacgagaccgagaccgacctgttcggtgagcaggccgtgttgtgcggtggcacagaggaattggtgaaggccggtttcgacgtgatggtcgaggcgggctacccgccggagatggcgtacttcgaggtgctgcacgagctcaagctgatcgtcgacctgatgtacgagggcggcatcgcgcggatgaactactcggtgtccgacaccgcggagttcggtggctatctgtccgggccccgcgtcatcgacgccgggaccaaggaccggatgcgggagatcctgcgcgacatccagaacggcgacttcgtcaagaagctggtcgccaacgtcgagggcggcaacaagcaactcgagcagctgcgcaaggagaacgccgagcacccgatcgaggtggtcggcaagcggctgcgcgacctgatgagctgggtcgaccggccgatcaccgagacggcc

SEQ ID NO: 25559 - DNA, 504 bp, Mycobacterium avium
atgagtccgcagacgcacacgctgtcggtgctggtcgaagacaaaccgggtgtgctcgcccgggtggcggcgctgttcagccggcgcggtttcaacatcgaatcgcttgcggtcggtgccaccgagcagaaggacatgtcgcggatgacgatcgtggtgtccgccgaggagaccccgctcgagcagatcaccaagcagctcaacaagctgatcaacgtcatcaagatcgttgagctggaggacggcaactcggtgtcgcgggaattggcgttgatcaaggtgcgcgccgacgccggcacccgcagtcaggtcatcgaggcggtgaacctgttccgcgccaaggtgattgacgtttcgccggaggcgctgacgatcgaggccaccggtgaccgcggcaagatcgaggcgctgctgcgggtgctggagcccttcggtatccgtgagatcgtccaatcgggagtggtgtcgttgtcccgcggtccgcgcggaatcggcacggccaag

SEQ ID NO: 25560 - DNA, 1866 bp, Mycobacterium avium
gtgagcgctcccaccaggcggcccgcccccgacgcacccggcgctgccggcatcgccccggccccgccggccccggccgcgaagcctgccgccggcaagccgaaacgcattgggcccgaacaagttactggtgcacaatcggtgatccgatcgctggaggagctcggcgtcgaggtgatcttcggcattcccggcggcgcggtgctgccggtctatgacccgctgttcgactccaagaagctgcggcacgtgctggtccgccacgagcagggtgccggtcacgccgccagcggctacgcgcacgccaccggcaaggtcggtgtctgcatggccacctccggtccgggcgccaccaacctggtcaccgcgctggccgacgcccagatggactcgatccccgtcgtcgccgtcaccggccaggtgggacgcacgctgatcggcaccgacgccttccaggaggccgacatctccggcatcaccatgccgatcaccaagcacaacttcctggtccgctccggcaacgaaatcccgcaggtgcttgccgaggcgttccacatcgccgcctccggccgccccggcgcggtgctcgtcgacatccccaaggacgtgctgcagggccagtgcacgttcagctggccgccgcgcatccacctgcccgggtacaagccgaccaccaaaccgcacagccggcagatccgcgaagccgccaagctgatcgcggccgcgcgcaaaccggtgctgtacgtaggcggcggtgtcatccgcggggaggccagcgagcagctgcgcgaactggccgagctgaccggcatcccggtggtgaccacgctgatggcccgcggcgcgttcccggacagccaccgccagcacctgggcatgcccgggatgcacggcaccgtcgcggcggtggcggccctgcagcgcagcgacctgctgatcgcgctgggtacgcggttcgatgaccgggtgaccggcaagctggacaccttcgccccggaagccaaggtcatccacgccgacatcgacccggccgagatcggcaagaaccggcatgccgacgtgccgatcgtcggcgacgtcaaggccgtcatcgccgaactggtcgagatgctgcgccacgacggggcgcccggcaatctcgacatcgccgactggtgggcctacctcgacgacgtccagtccacctatccgctgagctacgggccgcagagcgacggcagcctcgggcccgagtacgtcatcgagaagctgggccagatcgccgggccggacgccctgtacgtggcgggcgtgggtcagcatcagatgtgggcggcccaattcatctcctacgagaagccgcgcacctggctcaattccggcggcctgggcaccatggggttcgccattccggccgcgatgggcgccaagatgggccgtccggaggccgaggtgtgggcgatcgacggcgacggttgtttccagatgaccaaccaggagctggccacctgcgccgtcgagggcatcccgatcaaggtggcgctgatcaacaacggcaacctgggcatggtgcgccagtggcagaccctgttctacgaagagcggtattcgcaaacggatctggccacccactcgcaccgcatcccggacttcgtcaagctcgccgaggcgctgggctgcgtcggattgcgttgcgagcgtgaggaagacgtcgtcgacgtgatcaacgctgcccgggcgatcaacgaccggccggtggtgatcgacttcatcgtcggcgccgacgcgcaggtgtggccgatggtggccgccggcaccagcaacgacgagatccaggccgcccgcgggatccgcccgctgttcgacgacgagaccgaagggcacgcc

SEQ ID NO: 25561 - DNA, 987 bp, Mycobacterium avium
ttggcggtcggcccgcccgggcgacagccctatggtggtggcgtgcgggacgaatcgacgctgcggcaactcggcgaattcggcgtcatcgaccggctggtggccgggcgccggcagccggccgcggtgaccctcgggcccggcgacgacgccgcgctggtgacgaccggcgacggccgcgtggtggtgtcgaccgacatgctggtgcaggaccggcatttccggctcgactggtcgacgccgcacgacatcggccgcaaggcgatcgcgcagaacgccgcggacatcgaggcgatgggcgcgcggcccacggcgttcgtggtgggcttcggcgctcccggccagaccgcggcggcgcaggtggacgcgctagtggacggcatgtgggacgaggcgcagcgggtgggggccggcatcgccggcggcgatctggtcagctgcccgcagtgggtcatctcggtcaccgcgctcggcgagctggacgggcgctccccggtgtgccgcgccggcgccgaacccggcgcgctgatcgccgtggccggcgacctgggccgatccgcggcgggatttgacctgtggcgcaatcagattggcgggttcgacgagctgcgccgccggcatgcggtgccgcagccgccctacggccagggtgcggtggccgcggccgggggagcgcaggcgatgatcgacgtctccgacggcctgatcgccgacctgcggcacgtcgccgaggcgtccggggtgggcatggacgtgtccaccgcggcgctggccgccgaccgtgacgcggtggcggccgcggcggccgcggtgggcgtcgacgcctggccgtgggtgctgaccggcggtgaggaccacgccctggtggcctgtttccccgggcccgcgccggccggctggcgcatcatcgggcgggttctcgacggcccggcccgggtgctggtcgacgagcgggagtggagcggccccgccggctggcagtcgtac

SEQ ID NO: 25562 - DNA, 1107 bp, Mycobacterium avium
gtgaatgccagccagcgggtccgcgtcgccgtcgtcttcggcgggcgcagcaacgagcacgccatctcgtgcgtctcggccggcagcatcctgcgcaacctcgacccgcggcggttcgaggtcgtcgcgatcggcatcaccccgcaaggctcgtgggtgctcaccgacggcgacccggccgcgctggcgatcagcgaccggcaactgcccgaggtgacgtccgcgtcggggaccgagctggcgctgccggcggatccggggcgcagcggccaactggtttcccttccccccggcgccagtgaggtgttggcctccgtcgacgtggtgttcccggtgctgcacggcccgtacggggaggacggcacgatccaggggctgctcgaactcgccggggtgccctacgtgggggccggcgtgttcgccagcgccgcgggcatggacaaggaattcaccaagaagctgttcgccgccgagggattgccgatcggcgactacgcggtgctgcgtccgtcgcagtccacgctgtcgctgcaggaccgcgagcggctgggcttgccggtgttcgtcaaacccgcccggggcggctcctcgatcggcgtcagccgggtctcgagctgggacgagctggacgccgccgtggccgccgcccgcgaccacgatcccaaggtcatcgtcgaggcggccatcgccggccgggagctggagtgcggggtgctcgaaatgcccgacggcacagtgcaagccagcacggtcggtgagatccgggtggccggggtgcgcgggcgtgaggactcgttctacgacttcgcaaccaaatacctcgacgacacagccgaattggacgtgcccgccaaggtcgacgacgaaatcgccgacgcggtgcgcgaattggcgatccgcgcattcaaggccgttgactgccaagggctggcccgggtggacttcttcctcaccgagaccgggccggtgctcaacgagatcaacacgatgccgggcttcaccaccatctcgatgtacccgcggatgtgggcggccagcggcgtggactacccgagtctgctggccaccatggtggagacggccctgacccgcggcgtcgggctgcgc

SEQ ID NO: 25563 - DNA, 930 bp, Mycobacterium avium
gtgacgtccccggctgcacggctgcgccggtacgagatcggcaaggtgatcgcgctgaccaacccggcctccgggcacggcgccgcggtggccgccgcgcagcgggcgatcgcccggctgcaccggcgcggagtggaggtcgtcgaaatcatcggcgacgacgcgcaagacgcccggcacctggtcggtgcggcactggacaagggtgccgacgcggtcatggtgaccgggggcgacggggtgttctccaacgcgctacaagtgttggcgggcaccgacattcccgccggcatcgtcccggcgggcaccggcaacgaccacgcccgtgaattcgggatccccaccaaggatcccgaggccgccgccgacatcatcgtcgacggctgggccgaaaccgttgacctgggccggattcgggccgacaacggattcgacaaatggttcggcaccgtggcggccaccggcttcgactcgctggtcaccgatcgcgccaaccggatgcgctggccgcacggccggctgcgctattacgtggccatgctcgccgagctgtcccagttgcggctcttaccttttcgcctggtgctcgacggcgcccgcgagatcgacgccgacatcacgctggccgccttcggcaacacccgcagctacgggggcggaatgcggatctgcccggccgccgaccacgccgacggcctgctcgacatcaccatggtgcacgaggcatcgcgcgccaagctggtccgcctgttcccgaccgtgatgaagggcacgcacgtcgaactcgagcaggtgagcacggcgcgggccaaatccatccacgtcgagtgtccggggatcaacgtctacgccgacggcgacttcgcctgcccgctgccggcggagatctccgccgttccgggcgcgctgcggatcctgcgggccggtccc

SEQ ID NO: 25564 - DNA, 2784 bp, Mycobacterium avium
atgctcaagcgtctcaagcgggtggctgactacgtcaacaccttgtccgacgaggtcgaaaagctcaccgacgccgagttgcgggccaagaccgacgagttcaagaagcggcacgccgacggcgagagcctcgacgacctgctgcccgaggcgttcgcggtggcccgggaggcggcctggcgggtgctcgaccagcgcccgttcgacgtgcaggtgatgggcgcggcggcgctgcacttcggcaacgtcgccgagatgaagaccggtgagggcaagacgctgacctcggtgctgcccgcctacctcaacggcatcggcggcaagggcgtgcacgtcgtcaccgtcaacgactacctggccaaacgcgacagcgagtggatgggccgggtgcaccgcttcctgggtctggacgtcggggtgattctcgcccagatgacgcccgacgagcgccgggtcgcctacaacgccgacatcacctacggcaccaacaacgagttcggcttcgactacctgcgcgacaacatggcgcactcgctcgacgacctggtgcagcgcgggcacaacttcgccatcgtcgacgaggtcgactcgatcctgatcgacgaggcccgcaccccgctgatcatctccgggccggccgacggcgcctccaactggtacctcgagttcgcccggctggccccgctgatggaaaaggacgtccactacgaggtggatctgcgcaagcgcaccgtcggcgtgcacgagctgggtgtggagttcgtcgaggaccagctcggcatcgacaacctgtacgaggcggccaactcgccgctggtcagctacctcaacaacgcgctgaaggccaaggagctgttccaccgcgacaaggactacatcgtgcgcgacggcgaggtgctcatcgtcgacgagttcaccggtcgcgtgctctacggtcgccgctacaacgagggcatgcaccaggccatcgaggccaaggagcacgtcgagatcaaggccgagaaccagacgctggccaccatcacgctgcagaactacttccggctctacgacaagctgtccggcatgaccggcaccgcccagaccgaggcggccgagctgcacgagatctacaagctcggcgtggtgccgatcccgaccaacaagccgatgatccgcaccgaccagtccgacctgatctacaagaccgaggaagccaagtacatcgcggtggtcgacgacgtggtcgagcgctaccagaagggccagccggtgctgatcggcaccaccagcgtcgagcgctcggagtacctgtcgcgccagttccagaagcggcgcatcccgcacaacgtgctcaacgccaagtaccacgagcaggaggccggaatcgtcgcggtggccgggcggcgcggcggcgtcacggtggccaccaacatggccggccgcggcaccgacatcgtgctgggcggcaacgtcgacttcctcaccgaccagcggctgcgcgagcgcggcctggacccggtcgagacgcccgacgagtacgaggcggcctggcacgaggaactgcccaaggtcaaggccgaggccgccgccgaggccaaggaagtgatcgaggccggcggcctgtacgtgctgggcaccgagcggcacgagtcgcgccgcatcgacaaccagctgcgcggccgctccgggcgtcagggcgacccgggcgagtcgcggttctacctgtcgctgggcgacgagctgatgcgccggttcaacggcgccgcgctggaggcgatgctcaaccggctcaacctgcccgacgacgtccccatcgaggccaagatggtgacccgggcgatcaagagcgcccagacccaggtcgagcagcagaacttcgaggtcagaaagaacgtcctcaagtacgacgaggtgatgaaccagcagcgcaaggtgatctacgccgagcgccgccgcatcctggaaggcgagaacctcaaggagcaggccctcgagatggtccgcgacgtggtcaccgcctatgtcaacggcgcgacggccgagggctacgccgaggattgggacctggacgcgttgtggacggcgttgaagacgctgtatccggtcggcatcgaccatgccacgctcacccgccgggacgccgacggcggcttcgacgacctcacccgcgaggagctgctggaggcgctgctcaaagacgccgaacgtgcttatgccgcaagggaagccgagctggaggagatcgcgggcgagggcgcgatgcgccagctggagcgcaacgtgctgctcaacgtcatcgaccgcaagtggcgcgagcacctctacgagatggactacctcaaggagggcatcggcctgcgcgccatggcgcagcgcgacccgctggtggagtaccagcgcgagggctacgacatgttcatggccatgctcgacggcatgaaggaggagtcggtcggcttcctgttcaatgtcaccgtcgaggcggtgcccgccccgcaagtggcgccggtgcagacgcccgaggggctggccgagctgggggcgccggccgaacagggcggcaccgcgacggccgcacgtgacgaagccccaacgcagttgcgcgccaagggaattgacaacgaagcgccggcgatgacctactccggcccgtccgaggacggctcggcgcaggtgcagcgcaacggcggcgacgccaagacgccggccggggtgcccgccggcgccagccgtcgtgagcggcgcgccgccgcgcgccagcagggccgcggcgccaagccccccaaatcggtgaagcgccgc

SEQ ID NO: 25565 - DNA, 615 bp, Mycobacterium avium
atggcaggcatgacggggcccgatgtggtgccgccgagcgtggagttggtgcagcggcgactggccgagaccatcgcggtcaagcagcagatgcagaacggcgtcgtcgccgcccaggccgtcgaggtggcgcgcgcgatgatcgactgcctgcgggccggcggaaaggtgatcctgttcggcaatggcggatccgcgcaggacgccggacatctggccgcagaactcatgggccgcttcgctttcgaccgcccgggcctggcggccatcagccttcccgacgccaccgcggcgatcaccgcgatcggtaacgactactcctacgacgaggtgttcgcccgccaggtgctggccgccgggcgggccggggacgtggtggtcggactgaccacatcgggcaactccgccaacgtcgttcgcgcgctcgaggccgcccgccaggccgggatgacgaccgtcaccctcaccggtgcgggcggcggcaaggtggccgacgtcgcgcagatctgcatccgaatccccagcgacgacaccggccggatccaggaagcgagcctgcacctggggcattcgatttgcgaaatggtcgaagcggcactgtttccccggccgtcc

SEQ ID NO: 25566 - DNA, 834 bp, Mycobacterium avium
atgaccaccggccgcctgttgctgggggcaacgccgttggggcagccctcggacgcctcgccccggctgctggatgccctggcccgcgccgacgtggtggccgccgaggacacccggcgggtgcgcaccctggccaaagcgctcgatgtcgccatcaccggccgggtgatcagcatgttcgaccgggtcgaggccgccagggtggactcgctgctcgaggcgatccggtcgggggcgacggtgctggtggtcagcgacgccgggatgccggtgatcagcgaccccggcttccggctggtgacggcctgtgtgcaggcggggctgccggtgggatgcctgcccgggccctcggcggtgatgacggcgctggccgtgtccggactgccggcggagaagttctgcttcgagggcttcgcgccgcgcaagaaggcggcgcggcgcggctggctggactcgctggccgacgagcggcgcacctgcgtgttcttcgaatcaccgcgccggctgccggcctgcctgcaggacgcggtggagcggctcggcggtgagcggcgggccgcgatctgccgggagctgaccaaggtgcacgaagaggtggtgcgcggcacgctggacgagctggcggcctgggcgggcgacggtgtgctcggcgagatcaccgtggtgctggccggcgccaccccgcgcaccgacctgccgtcgctggtcgccgaggtcgagcagcgggtggcggatggcgcccggatcaaggacgcctgcggcgaggtggccgccgcccaacccggcgtgcggtcccgtcagctctacgacgcggtgctcaaggcccgccgcgac

SEQ ID NO: 25567 - DNA, 588 bp, Mycobacterium avium
atggccaccaccggcaaggccgccctgcgcgaacggctgctcgccgcccggcgccgcgttgccgacgacgttcgcgccgctgaggcgcggatgctgcgcgaacagctggagttcatggtgaccagcggcagcaccgtgtgcgcctacgtgccggtgggcgccgagccgggctccgtcgagatgctggacatgttgctgcggcgggccgggcgggtgctgctgccggttgcccgcaccgccgccgacgacaccccgctgccgctgtgctggggcgaataccggcccggcaccctgaccaccgggcggtgggggctgctcgagccggcgcagccgtggctgcccgcatcggcgctggccgacgcggccctggtgctggtgccggcgctggccgtggaccgccgcggggtgcgcctgggccggggccgggggttctacgaccgctcgctgggcgaccgcgatccgcgggcgcggctggtcgcgctggtgcgcgacgcggaactgctcgacgagctaccggccgagccgcacgacgtcccgatgacccacgcgctgacgccgcagcgcgggttggtcaccctcggcgcccgc

SEQ ID NO: 25568 - DNA, 906 bp, Mycobacterium avium
atgtcatgcccaaacgtggtggtgccacgcacggcgattgtgcccgccgccggcctcggtacccgattcctgcccgcgaccaagacggtccccaaagagctgctgcccgtggtcgatacccccgggatcgagctcgtcgccgccgaggcggccgaggccggcgccgaacgcctggtgatcgtcacctcggagggcaaggacggtgtcgtcgcgcacttcgtcgaggacctggtgctcgagagcacgctggaggagcgcggcaaaaccgcgatgctggacaaggttcggcgggcgccacggctgatcaaggtcgagtcggtggtgcagagcgagccgctgggactgggccacgcgatcgggtgtgtggaaccgcggctggccgacgacgaggacgcggtcgcggtgctgctgcccgacgacctggtgctgccgaccggtgtgctggggaccatgtcgaaggtgcgggcgcactacggcggcacggtgttgtgcgccatcgaggtgacgcccgaggagatcagtgcctacggcgtcttcgacgtcgagccggtgcccgacgacgatccggacgtgctgcgggtcaagggcatggtcgagaagccgaaggccgaggacgcgccgtcgatgttcgccgcggcgggccgctacgtgctcgaccgcgccatcttcgacgcgttgcgccgcatcgaccgcggcgccggcggcgaggtccagctgaccgacgggatcgcgctgctgatctccgagggccacccggtgcacgtggtcgtgcaccgcggatctcgacacgacttgggaaatcctggcggctacctcaaggctgcggttgactttgcattggaccgtgacgactacggcccggacttgcggcagtggttggtggcgcggttaggcctgtccgagcag

SEQ ID NO: 25569 - DNA, 1530 bp, Mycobacterium avium
gtgacgttctggtcgctgattgccgaggccgcacgacgcggctcaccccggccacttctcgccgacgagcacggtcgcagcatgaccgcacgtcagctctacgacgccgcatgcgtcgccgcggccgcgctggccgagcggggagtccgcccgggcgccgtcgtgtcctggcagttgcccaccacgctggagaccatggtgctgatggccgcgctggcccggctcggtgcggtgcagaacccgatcatcccggtcctgcgggaaagcgaagtccgcttcatcaccggccagctgaacaccgaatactttgtggcgcctgggctttggcgcggcttcgatcacggtgggctggctcgggcgctgtcggccgaacggggcttcgaggtcatcaccgtcgacctggcggcgccgccggccgccggtgcgctgcgcctgcccggcgccgatcccgattccctgccggcgccgccgcaatccgccgacgaggcgcgctggatctactactcgtcggggaccaccgccgctcccaaggggattcgccataccgacagctcggtcatcgccggctcggcgggggtggtcggcatggtgggggccaccagcagcgacgtcgatccgatcgcctttccggtcgcacacatcggcggggccgcgatgctggccaccgcactgctgaccggcatgcggttagcgctgttcgaggcgttcgacccggccgccactccgctggccatcgccgcacataatccgacgttcctgggcaccgcgacgcccttcttcgtcgcctacctcgaagcccaacgggcccaagggaatcggccactattcccgtcgctgcggggatgcctggccggaggcgcacccatcaccgccgagttgagtcgacgggtccgcgacaccttcggggtggccggcatcgccaacgcctggggaatgaccgagttcccctgcgcgacatccccgtcgctgaccgcggcgcccgaggtcctcgaccacaccgtggggccgccggtgcccggcgtcgaagtccgcgtggtcgacggcgcagagaatgaactggctgccgggcaggagggcgagctgcggctcaagggaccccagtgcttcctcggctacgccgacccgacgctggacgccgacgccttcgacgaccagggctggctgcgcaccggcgatctcggcctgatcgacgccgacggcaacgtccgcgtcacgggccgcaccaaagacgcgatcatccgcaatgcggagaacatctcggccctcgagatcgagaacgcactcgcggcgcatcccgccgtcgccgacgtcgccgtcatcgggatccccgacccgcgcaccggcgaacgggtctgcgccgtcgtggtacccgcgacggccgacggcgtcacgctggaatcccttgtgcaacactgccgatcacgcgggctgagccgctacaaacaccccgagcacctggtcgtcgtcgacaccctcccgcgcaaccagttcggcaaggtgatcaagaaggacctgcgcgacgccttcggg

SEQ ID NO: 25570 - DNA, 1932 bp, Mycobacterium avium
atgaacgcgcgcgtcgagcagttggagtttcaagccgaggctcggcaactgctggatctgatggtccactccgtctactccaacaaggactcgttcctgcgggagttgatctcgaacgcttccgacgcactggacaagctgcggctggaagccttccgcaacaaggacctcgacgtcgacacctccgacctgcacatccagatcgaggtggacaaggatgcgcgcaccctgaccatccgcgacaacggcatcggcatgacccgcgccgaggtggtcgacctgatcggcaccctggccaagtcgggcaccgccgaactgcgccaacaactccgcgaagccaagaacgcccagaacgaagccgcctcagaggaactcatcggccagttcggcatcggcttctactccagcttcatggtggccgacaaggtcgaactgctcacccgcaaggccggcgagagcgaggccaccaagtgggagtcgagcggcgagggcacctacaccatcgaatcggtcgagaacgccccgcagggaacctcggtcaccctgcatctgaagcccgaggacaccgaggacgagctgcacgactacacctcggagttcaagatcaagagcctggtcaagaagtactccgacttcatcgcctggcccatccggatggaggtggagcggcgcacgccggccaccgaagagggcggcgaggagaccgtcacccgggaggtcgagaccctcaactcgatgaaggccctgtgggcccggcccaaggacgaggtctccgaggaggagtacaaggagttctacaagcacatcgcgcacgcctgggacgacccgctcgaggtcatcgcgatgaaggccgagggcaccttcgagtaccaggcgctgctgttcatcccgtcccacgccccgttcgacctgttcaaccgggacgcgcacaccggcatccagctctacgtcaagcgggtgttcatcatgggtgactgcgaccagctgatgcccgaatacctgcgtttcgtcaagggtgttgttgacgcacaggacatgtcgctcaacgtgtcccgcgagatcctgcaacaggaccggcagatcaaggccatccggcggcggctgaccaagaaggttctgtccaccatcaaggagttgcaatccgagcggcccgacgactaccggaccttctggacccagttcggccgggtggtcaaggagggtctgctgtcggacttcgacaaccaggagacgctgctgcagctctgctccttcgcctcgacgcacagcgaggaggaggccaccacgctggcccagtacgtcgagcggatgaaggaagggcagacgcagatcttctacgccaccggcgagacgcgccagcagatcctcaagtcgccgcatctggaggcgttcaaggccaagggctacgaggtgttgctgctcaccgacccggtcgacgaggtctgggtgggaaccgtcaccgagttcgacggcaagccgctgcagtcaatcgccaagggcgaggtggacctgagcgccgagggcgaggagagccaggccgagcgggaagagcagcagaaggaattcgccgatctgctcgcctggctgaaggacaccctgtccgaccacgtcaaggaggtccggctgtccaaccggctgaccgactcgccggcctgcctgatcaccgacgccttcggcatcacaccggcgctggcccggctctaccgcgcctccgggcaggacattccggtgggcaagcgaatactggaactcaatcccaagcacccactggtcaccggcctgcgccaagcccaccaggaccgcgccgacgatccgtccgtcgccgagaccgcggaattgctttacggcacagcgcttctggccgagggaggcgccctcgacgacccggcccggttcgccgagatactggccgaccggttggcccgcaccctg

SEQ ID NO: 25571 - DNA, 1839 bp, Mycobacterium avium
gtgaacaacaacctgttcggcaacggggatctgcagggcgggtcgacgatcacccagcagtatgtgaagaacgcactggtcggttcggcgcagcacggggtcagcggcctgatgcgcaaggccaaggaattggtcatcgccaccaagatgtccggcgagtggtccaaagacgaagtgctgcagtcttatctgaacatcatctatttcggccggggcgcctacggcatctcggccgccgccaaggcgtatttcgacaaacccgtcgagcagctcaccgtgtccgagggtgcgctgctggcggcgctgatccgccggccctccaccctggacccggccgtcgatcccaagggcgcgctggcgcgctggaactgggtgctcgacggcatggtggagaccaaggcgctgcccgccaaggaccgtgccgcgcaggtcttcccgcagaccgtgccgcccgaccaggcgcgcgcgcagaaccagacgaccgggcccaacggcctgatcgagcgtcaggtgaccaaggagctgatggagctcttcaacatcgacgagcggacgctgaacacgcagggcctgcaggtcaccaccaccatcgaccccaaggcccagcaggccgccgagaaggcggtgtcgaaataccttgacgggcaagaccccgacatgcgcgcggcggtggtgtcggtggatccgcacgacggcgccatccgcgcctactacggcggtagcgacgccaacggtttcgacttcgcccaggcgggattgcagaccggctcgtcgttcaaggtgttctgcctgatcgccgcgctcgagcagggcatcggcctgggctaccaggtggacagctcgccgctgacggtcgacggcatcaagatcaccaacgtcgagggcgagagctgcgggacgtgcaacatcgcgcaggcgctcaagatgtcgttgaacacctcctattaccggctgatgctcaaactcaagggcgggccgcaggccgtcgccgatgccgcgcatcaggcaggggtggccacgagtttccccggcgtggaccacacgctgtccgaggacggcaagggcgggccgccgaacaacggaattgtgttgggccagtaccaaacccgggtgatcgacatggcttcggcgtatgccacgctggccgcctcgggcgtctaccaccggccgcatttcgtgcagaaggtggtcaactcggacggccaggtgctcttcgacgccggcaagtccgacaacaacggcgagcagcggatcccgaaggccgtcgcggacaacgtcaccgcggccatggaaccgatcgccggctactcgcggggtcacgcgttggccggcggccggccgtcggcggccaagaccggcaccacgcagctcggtgacaccacctccaacaaggacgcctggatggtcggctacacgccgtcgctgtcgacggcggtgtggctgggcacggccaagggcgaccagccgctggtaaccgcttccggcggaccggtttacgggtccgggctgccctcggatatctggaaggccaccatggacggggcgctgaagggcacccccaacgaatcgttcccgaagccggccgaggtcggcggctacgccggtgtgcccgcgccgccgcccccgccgaaggcgccgccctcggagaccgtcatccagcccaccatcgaagtggcgcccggcatcacgatcccggtcggcccgccgacgacggtcacgctggcgcctgccccgcccgcgggcggcccgccggggggacccgagccgggtggcggtgttccgccgggcccgggcggcggtgttccgccgggtggtccccaagcaccgcctccgccgccg

SEQ ID NO: 25572 - DNA, 288 bp, Mycobacterium avium
atgcgtccatacgaaatcatggtcattcttgaccccacgctcgacgagcgcaccgttgccccgtccttggagacgttcctcaacgtcgtccgcaaggacggtggatccgtcgaaaaggtcgacatctggggccggcgccggctggcctacgagatcgccaagcacgccgaaggcatctacgtcgtcatcgacctgaaggccgagcccgcgacagtgtccgagctcgaccgccagctcagcctcaacgagtcggtgctgcgcaccaaggtgatgcgcaccgacaagcac

SEQ ID NO: 25573 - DNA, 504 bp, Mycobacterium avium
gtggctggtgacaccactatcaccgttgtcggaaacctgaccgctgaccccgagctgcggttcacgccgtcgggtgctgccgtcgcgaatttcaccgtggcgtcgacgccgcgcatctacgaccgccagagcggggagtggaaggacggcgaggcgctgttcctgcggtgcaacatctggcgggaggccgccgagaacgtcgcggagagcctcacccggggatcccgcgtcattgtcaccggccggctcaagcagcgttcgttcgagacccgggagggcgagaagcgcaccgtggtcgaggtcgaggtcgacgagatcggcccgtcgttgcggtatgccaccgccaaggtcaacaaggcctcccgcagcggcggcggcggtggcggcttcggcgggggatcccgccagcagtccgcgccggccagcagcgcacccgccgacgacccgtggggcagtgcgtcggcgtcgggctcgttcggtggcggcgatgacgaaccgccgttc

SEQ ID NO: 25574 - DNA, 252 bp, Mycobacterium avium
atggccaagtccaacaagcggcgcccggctccggaaaagccggtgaaggcacggaagtgtgtcttctgcgcgaagaaggatcaagcgatcgattacaaggacaccgcgctgctgcgcacttacatcagtgagcgcggcaagatccgtgcgcgtcgcgtcaccggcaattgcgtgcagcaccaacgcgacatcgccatcgcggtgaagaacgcccgcgaggtggcgctgctgcccttcacctcctcggcgcgt

SEQ ID NO: 25575 - DNA, 456 bp, Mycobacterium avium
atgaagctgattctgacggctgacgtcgaccatcttggcgccgtcggcgacactgtcgaggtcaaggacggctacggccgcaacttcctgctgccgcggggcttggcgatcgtggcctcgcgcggcgcgcagaagcaggccgacgacattcgccgggcccgcgagacgaaggcggtgcgcgacctcgaccacgccaacgagctcaagaccgcgatcgaggcgctggggccggtgacgctgccggtgaagacggccggggattccgggaagctgttcggctcggtgaccgccggcgacgtcgtcgcggcgatcaagaaggccggcggccccaacctggacaaacggatcgtgcggctgcccaaggcgcacatcaaggctcttggtacccacccggtggccgtgcacctgcaccccgaggtcgacgtcgaggtcgcgctcgaggtcgtcccgcagagc

SEQ ID NO: 25576 - DNA, 2481 bp, Mycobacterium avium
gtgcgatacggccaagatgtcagcaccttgacctacgctcaatgtcaactgtcgaatgtatgttcggattgcgtggatcaggggaggagggaatccgtggcggtcgtcgatgacttgacgtcgggcatggattcgtcgtcgcccagtgaggatttcgggcgacagccaccgcaggacctggcggccgagcaggccgtgctgggcggcatgctgctgagcaaggacgccatcgccgacgtgctggaacggctgcggcccggcgacttctaccgtcccgcgcaccagaacgtctacgacgcgatcctggacctgtacgggcggggtgagccggccgacgccgtgaccgtcgccgcggagctggaccgccgtaatctgctgcgccgcatcggcggtgcgccgtatctgcacacgctgatctcgacggtgccgaccgcggcgaacgcgggctactacgcgacgatcgtggccgagaaggcgctgttgcgccgcctggtggaggccggcacccgggtggtgcagtacggctacgcgggcgccgagggcgccgatgtggccgaggtggtcgatcgcgcacaggccgagatctacgaggtggccgagcgccggacgacggaggatttcgttccgctcgaggatctgctgcagccgacgatggacgagatcgacgccatcgcctccaacggtggtgtggcgcgcggcgtgccgaccggtttcaccgaactcgacgaggtgaccaacggcctgcacgccggtcagatgatcatcgtggcggccaggcctggagtgggcaaggcgctggcgttggatacgccgctgccgacgccgaccgggtggacgacgatgggcgatgtcgcggtcggtgacgagttgctcggcgacgacgggcggccgacgcgggtggtagcggcgaccgacgtgatgctgggacggccatgctacgaggtcgagttttctgatgggacggtgatcgtcgccgacgctgcgcatcagtggctgaccgaaacacgcgtatcccgaaagtcggcgcaggcagcggccgttggctacaaccggtacaagaatcagcgcacctttgcggcggtgcgaacgactgccgagatcgccgaaaccctgcgctgccccgcccaagaccggcggttgaaccacagcgtggtcaatgcgcgcgcgctcgagctcccggaccgcgaattcctggtgcccccttacacactcggcgcctggctcggggatggcaccagcgccgccgcgcagatcaccgctgccgatcccgaaatcatcatgcggattgaagcggaagactcaggcgctggcgtggggacgttgcaggcgcggctgcgcaccatcggcgtgctcggcaacaagcacattccgacggaatacctgcgggggtccgaggcgcagcggcgtgccttgctcgccggcttgctcgacaccgacggaaccgtgacggtcggcggtgccgtccaattttcggttaccaaccaacggctggcgcgtgatgtcaacgagcttattgtcagcctcggctatcgctgccagacctcgaccaaacgtgtccagggccgctccgaaacgtcgagcatcgcctacaccctgaccttttccaccgcagacaaagtgttcgcgttggagcgaaaggccatcgcgcacaaggagcgccgggccgtaacaggcacctcacgcggtgggtcgcgcttcatcgtggacgtccgcccgatcgagccggtggccgtgcgctgcgtcgaggtggacaacgacagccacatgtatctggcgagcagggcgatggtgcccacacacaactccaccctcggtctcgactttttgcggtcgtgttcgatcaagcaccggatggccagcgtcatcttctcgctggagatgagcaagtccgagatcgtgatgcggctgttgtcggcggaggcgaaaatcaaactctccgatatgcgttcgggtcgcatgagcgacgaggactggacccggttggcgcggcggatgagcgaaatcagcgaggcgccactgtatatcgacgattcgccgaacttgacgatgatggagatccgcgccaaggcgcgccggctgcggcagaaagccgatctgcggctggtggtggtcgattacctgcagctgatgtcgtcgggaaagaaggtcgagtcccggcagctcgaggtctccgaattctcccgtcagctcaagcttttggccaaggaactcgaggttcccgtcgtggcgatcagccagctgaaccgcggtcccgagcaacgcaccgacaagaagccgatgctgtccgaccttcgcgagtcgggatcgctggagcaggatgcggacatggtgatcctgctgaatcggcccgacgcgttcgagcgggacgatccgcgtgggggagaggcggatttcattctggccaaacaccgtaacggtccgaccaagacggtgaccgtcgcgcatcagctgcatctatcacgcttcgccaacatggcgcgc

SEQ ID NO: 25577 - DNA, 639 bp, Mycobacterium avium
atgaccgctcagaaccctaacctcgcggcactgagcgccgcgggggtttccgtgtggctggacgacctgtcccgggaccggctgcggtcgggcaacctgcaagagctgatcgacaccaaatgcgttgtcggcgtgaccaccaacccgtcgatcttccagaaggcgttcgccgagggccacgcctacgacagccagatcgccgaactggccgcgcggggcgccgacgtcgacgccaccatccgcacggtcaccacggacgacgtgcgcaacgcctgcgacgtgttgacccgcgagtgggagaactccgacggtgtcgacggccgggtgtccatcgaggtggacccgcggctggccggcgacaccgacaagaccatcgcccaggccgtcgagttgtggaagatcgtcgaccggcccaacctgttcatcaagatcccggcgacccaggccgggctgccggccatcaccgccgttctggccgaagggatttcggtcaacgtcacgctgatcttctccgtcgagcggtaccgcgccgtgatggacgcctaccttgccggcatggagaaggcgcgcgaagccggccacgacctgttcaagatgcattcggtggctacgattttcgcgtggcgcgtggacaccgac

SEQ ID NO: 25578 - DNA, 2097 bp, Mycobacterium avium
gtgacgacacttgaagagatctctgcgctgacccaaccgcaccttcccgacgactggtccgagctggactcggccgccgtcgacaccattcgggtgctggccgccgacgcggtgcaaaaggtgggcaacggacatcccgggacggcgatgagcctggctcccctggcctacacgctgtttcagcgggtgatgcggcacgaccccagcgacacccactggctgggccgggaccggttcgtgctgtcagccgggcacagcagcctgacgctgtacctgcagctgtacctgggtggcttcggtctggagctgtccgacatcgagtcgctgcgcacctggggctccaagacgcccgggcacccggagttccggcacaccaagggtgtggagatcaccaccggcccgctgggccagggcctggcctccgcggtgggcatggcgatggcctcccgctacgagcgcgggctgttcgacccggacgccgccgccggcaccagcccgttcgaccacttcatctacgtgatcgcctccgacggcgacatcgaggagggcgtcacgtcggaggcctcgtcgctggcggccgtgcagcaactgggcaatctgatcgtgttctacgaccacaaccagatctccatcgaggacgacaccaacatcgccctgtgcgaggacaccgccgcccgctacgaggcctacggctggcacgtgcagcgcgtcgagggtggcgagaacgtcgtcgccatcgaggaggccatcgccgccgccaaggccgtcaccgaccggccgtcgttcatcgagctgcgcaccatcatcggctatccggcgcccaacgcgatgaacaccggcaaggcgcacggcgcggcgctgggcgaggaggaggtggccgcggtcaagaagatcctcggcttcgacccggacaagacgttccaggtgcgcgacaaggtgatcgcccacacccgcaagctggtcgaccgcggccgggaggcacaccagaagtggcagaccgatttcgacgcctgggcgcagcgcgagcccgagcgcaaggcgctgctggagcggttgacggccgagaagctgcccgacgggtgggacgccgacctgccgcactgggagccgggctccgacgcgatcgccacccgcaaggcctccggcgcggtgctcaacgccgtggcgccgaaactgcccgagctctggggcggctcggccgacctggccgagagcaacctcaccaccatcaacaacgcggattcctttgggcccccgtcgatttccaccaaggagttcaccgcctcctggtatggccgggtgctgcatttcggtgtccgcgaacacgccatgggggcgatcctgtccggcatcgtgctgcacggcccgacccgcgcctacggcggcaccttcctgcagttctcggactacatgcgtccggcggtgcggctggcctcgctgatggacatcgacaccatctacgtgtggacgcacgattccatcgggctgggtgaggacgggccgacgcaccagccgatcgagcacctggcggcgttgcgcgccatccccaagctgtcggtggtgcgtccggccgacgccaacgagaccgcctacgcctggcgcaccatcctggcccgcggcaacggcagcggcccggtcggattggtcctgacccgccagggcctgccggtgctcgagggcaccgacgccgacggtgtcgcccggggcggctacatcctgggctcggacggcgaggaggccggccaggagcccgacgtcatcctgatcgccaccggctcggaggtacagctggccgtcgaggcgcagaagttgttggcggacaaggacattgtggcgcgggtggtgtccatgccgtgcgtggaatggttcgagtcccagcccgacgactaccgcgacagtgtgctgccgccgtcggtgtcggcccgggtggccgtcgaggccggggtggcgcagagctggcacaagctggtcggcgacaccgggaagatcatctcgatcgagcactacggcgaatccgccgactacaaaacgttgttccgtgaattcggcttcactgccgaagccgtcgctgccgccgcggaagaagtcgtggacaac

SEQ ID NO: 25579 - DNA, 972 bp, Mycobacterium avium
atgcacgcaatcgaagtcagcgaaaccggcggccccgaggtgctgcgctacgtcgaaacccccacacccacggccgggccggggcaggtgctgatcaaggccgaggccatcggcgtcaactacatcgacacctatttccgctccgggcagtacccgcgcgagctgccgttcatcatcggccaggaactgtgcggtaccgtcgccgccgccggtgacggcgtcgacggcttcaaggtcggggaccgggtggtcagtgccgcggcaaccggaggctacgccgaatatgcaacggccccagcatctttgaccgcacacgtgccggacggggtggccgccgacgtggcggcctcggcgctgctgaaggggctgaccgcgcactacctgctgacgtcggtgtatccggtgcaggccggcgacacggtgctggtgcacgccggcgccggcggggtcgggctgatcctgacgcagtgggcgcacctgctgggcgcgcgggtgatcaccacggtgtcgacgccggagaaggcgcgccggtcggcgcaggcgggtgccaacgaggtgctctcctaccccgacgacgccgacgaattcggcaaccggatccgcgcgttgaccgacggcgccggggtggccgcggtgtacgacggcgtgggcgcgagcacgttcgacgccagcctggccagcctggcggtgcggggcaccctggcgctgttcggggcggccagcggcccggttccgccgttcgatccgcaacgcctcaacgccgccggctcggtgttcctgacccggccgtcgctggcgcacttcatccgcaccggccaggaattcagttggcgcgcagaggaattgttcgcggcgatcgccgccggcgacatcaccgtcgaagtgggcggacgctatccgttggccgacgcggcccgcgcccaccgcgacctgcagggccgcaaaaccaccggctcgatcgtgctgctcccc

SEQ ID NO: 25580 - DNA, 669 bp, Mycobacterium avium
gtgcatcaacgtctggcaactctggccgccgcgcggctctacctgtgcaccgacgcccgccgggagcgcggcgatctggccgagttcgccgacgccgccctggccggcggcgtggacgtcatccaactgcgcgacaaggggtcgcccggggagcagcggttcggcccgctggaggcgcgcgacgagctggccgcctgcgagatcctggccgacgcggcccgccggcacggcgccctgttcgccgtcaacgaccgcgccgacatcgcccgcgcggccggcgccgacgtgctgcacctcgggcagggtgacctgccgctggacgtggcgcgcgcattcgtcgggcccgacgtgctgctcgggctgtccagccacgaccgcgaccagatgaccgcggcggcggcgggaccggccgactacttctgcgtcgggccctgctggcccacgcccaccaaaccgggccgcgcggcgccgggcttggcgctggtgcgggcggccgccgagctgcgcaccggcaagccgtggttcgcgatcggcgggatcgacgcgcagcggctgcccgaggtgctcgacgccggggcccgccgggtcgtggtggtgcgggcgatcaccgcggcggacgaccccgccgcggcggcccggcggctcagctcggcgctggcagcagcgcgc

SEQ ID NO: 25581 - DNA, 324 bp, Mycobacterium avium
gtggcctacgtgatcgccgagccctgcgtcgacatcaaagacaaggcatgcatcgaggagtgcccggtcgactgcatctacgagggtgcccggatgctctacatccatcccgacgagtgcgtcgactgcggcgcctgcgagccggtgtgcccggtggagtccatctactacgaggacgacctgccgcccgagcacagccaatacctgcagatcaacgccgatttcttcaccgaactcggctcacccggcggggccgcgaaggtggggctgaccgaaaacgacccggccccggtgaagaacctggaaagccgcgtcgacgcgtcg

SEQ ID NO: 25582 - DNA, 714 bp, Mycobacterium avium
atgagcacgctggtactcacggcacacggcagccgcgatccgcggtcggccgccaatgccgaggccgtcgccgatcggcttcggaggatgcggcccggcctcgacgtgcggctggccttcctcgagctcaacgccccgaacttcgtcgacgtgctggccgggttgccggacagccggcgcgccgtggtcgccccgctgctgctggccagcgcctaccacgcgcggctcgacatccccgaacagatcgcccgcgccggtgcgcacggcatccggcaggccgacgtgttgggcgaggacgaccggttggtggcggtgctgcgcgggcgtctggccgagatcggggtttccccgctcgacgacgatctcggggtgatggtggtggcgatcggttcgtcgaacaccgccgccaacgcacgcaccgccaaggttgcgtcccggttggccgccggaacccgatgggcttgcgcaacaacggccttcgcgaccaggcccgaggcgtcggtggcccgcgccgccgaccagttgcgccgtcgcggcgcgcgccggctggtgatcgcaccgtggtttctggcgccgggattcatcaccgacggggtgtcaaccttcgcccgggacaacgggattcgcatggccgccccgttgggggcgcaccggttggtggccgagacggtgctggatcgttacgacgaggcgctgtcggccgacgccgcagcc

SEQ ID NO: 25583 - DNA, 1422 bp, Mycobacterium avium
atgaactacttggtgatcggcctctacatcgtttccttcgcgctgttcatctacggcctgatggggctcaccgggcccaagacggcggtgcgcggcaacctgatcgccgcggtgggcatggccatcgcggtggccgcgacgctgatcaagattcgccacaccgaccaatgggtgctgatcatcgccggcctggtggtgggggtggtgctcggcgtcccgccggcccgctacaccaagatgacggccatgccgcagctggtggccttcttcaacggcgtcggaggtggcaccgtcgcgctgatcgccctgtcggaattcattgagacatccggcttttcggcgttccagcacggcgagtcaccgacggtgcacatcgtggtggcgtcgttgttcgccgcgatcatcggatcgatctcgttctggggctcgatcatcgcgttcggcaagctgcaggaggtcatctccggcgccccgatcggcttcggcaaggcccagcagccgatcaacctgctgctgctggccggcgccgtggccgccgcggtggtgatcggtctgcacgcccatcccggcagcggcggggtgtcgctgtggtggatgatcgggctgctggccgccgccggcgtgctgggcctgatggtggtgctgcccatcggcggcgctgacatgccggtggtcatctcgctgctcaacgcgatgaccgggctctcggccgcggccgcggggctggcgctgaacaacaccgcgatgatcgtggccggcatgatcgtcggcgcctcgggttcgatcctgaccaacctgatggccaaggcgatgaaccgctccatcccggcgatcgtcgccggcggcttcggcggtgggggcgtggcaccgggcggcggtgacggcggcgacaagcacgtcaagtccacctcggcggccgacgccgcgatccagatggcctacgccaaccaggtgatcgtggtgcccggttacggcctggccgtcgcgcaggcccagcacgccgtcaaggacatggccgcgctgctggaggagaagggcgtgccggtgaagtacgccatccacccggtggccggccggatgcccgggcacatgaacgtgctgctggccgaggccgaggtcgactacgacgcgatgaaggacatggacgacatcaacgacgagttcgcccgcaccgacgtcgcgatcgtgatcggcgccaacgacgtcaccaacccggccgcccgcaacgaggcgtccagcccgatctacggcatgccgattctcaacgtggacaaggccaagtcggtgatcgtgctcaagcggtcgatgaactccggcttcgccggcatcgacaacccgctgttctacgccgaggggacgacgatgctgttcggcgacgcgaagaagtcggtgaccgaggttgccgaggagctgaaggcgctc

SEQ ID NO: 25584 - DNA, 1095 bp, Mycobacterium avium
atgacaaatgcgcaggccaacgcggtcaaggttggggtggtcgccgaatccggggccgacgagcggcgggtcgcgctggtgcccaaggcggtggcgtcgctggtgggcagcggcctggcggtggtggtcgagtccggcgcgggcgagcgggccctgctgcccgacgcgctctacaccgaggccggcgccgacatcggggacgcgtgggccgccgacatcgtggtcaaggtcgcgccgccgacggccgacgaggtcgccaagctgcacagcggtcagacgctgatcggcttcctggcgccgcgcaacgccgacaactcgatcggcgctttgaagcaggcgggcgtgcaggccttcgcgctggaggccattccgcggatctcgcgggcccaggcgatggacgcgctgtcgtcgcagggcaacgtggccggctacaaggcggtgctgctggccgcctcggagtcgacccggttcttcccgatgctgacgacggccgcgggcacggtgaaaccggccagcgtgctggtgctcggcgtcggggtggccggattgcaggcgctggcgacggccaagcggctgggcgcgcgcacgtcgggctacgacgtgcgtcccgaggtcgcggaccaggtgcgctcggtgggcgcgcagtggctcgacctgggcatcgatgcggccggtgagggcggatacgcccgcgagctcaccgaggaagagcgggcccagcagcagaaggccctggaggaggccatcgccgggttcgacgtggtgatcaccacggccttggtgcccggccgcccggcgccgcgactggtgaccgccgcggcggtcgagtcgatgaagccgggcagcgtggtggtggacctggccggcgagaccggcggcaactgcgagctgaccgagccgggcaagacggtggtcaagcacgacgtcaccatcgccgccccgctgaacctgccggcgaccatgcccgagcacgccagcgagctctacagcaagaacatcaccgcgctgctggacctgctgatcaaagacggcaagctggcccccgacttcgacgacgaagtcgtggcggcggcgtgtgtgacacgggagagtgca

SEQ ID NO: 25585 - DNA, 1770 bp, Mycobacterium avium
atgaacgacgcaagagaagctgtcgaacaccatcccgaggaaggcagtcacgtccaggacggtgtcgtcgagcaccccgaggccgaggacttcgacaacgccgccgcgctgcccaccgacccgacgtggttcaagcacgccgtgttctacgaggtgctggtccgcgcgttcttcgacgccaacgccgacggcgccggcgacctgcgcggtctgctggcgcagctggactacctgcagtggctgggcatcgactgcatctggctgcccccgttctacgactcgccgctgcgcgacggcggttacgacatccgggatttctacaaggtgctgccggagttcggcaccgtcgaggatttcgtggcgctgctcaacgccgcgcacgagcggggcatccgggtgatcaccgacctggtgatgaatcacacatcggagtcgcacccctggttccaggagtcccggcacgaccccgacggaccgtatggcgacttctacgtgtggagcgacaccagcgaccgctacgccgatgcccgcatcatcttcgtcgacaccgaggagtccaactggacgttcgacccggtgcgccgccagttctactggcaccggttcttctcccaccagcccgacctgaactacgacaacccggccgtgcaggaagccatgatcgacgtgatccggttctggctcgggctgggaatcgacgggttccggctggacgcggtgccctacctgttcgagcgggagggcaccaactgcgagaacctgccggagacgcacgccttcctcaagcgggtccgcaaggtcgtcgacgacgagttcccgggccgggtgttgctggccgaggccaaccagtggccggccgacgtggtcgagtatttcggcgaccccagcaccggcggcgacgaatgccacatggcgttccacttcccgctgatgccgcgcatcttcatggccgtgcgccgcgagtcgcgattcccgatctcggagatcctggcccagacgccgcagatccccgagatggcgcagtgggggatcttcctgcgcaaccacgacgagttgacgctggagatggtcaccgacgaagagcgcgactacatgtacgccgagtacgccaaggatccgcggatgaaggccaacgtcggcatccgccgccggctggcgccgctgctggacaacgaccgcaaccagatcgagctgttcaccgccctgctgctgtccctgcccggctcgccggtgctctactacggcgacgagatcggcatgggcgacgtgatctggctgggggatcgcgacggggtgcgcacgccgatgcagtggacgccggaccgcaacgccggcttctccaaggccaaccccggccggctgtatctgccacccagccaggacccggtgtacggctaccaggcggtcaacgtggaggcgcagcgcgacacctcgacgtcgctgctcaacttcacccgcaccatgctggccgtgcggcgccggcacgaggccttcgcgatcggcacgttcgaggagctcggcgggtccaacccgtcggtgctggcgttcgtgcggcaggtgtccaacgacggggacaccgtgctgtgcgtcaacaacctgtcgcggttcccgcagccgatcgagctgaatctgcagcactggagcgggtgcatcccggtcgagctgaccgggcacgtggaattcccccgcatcgggcacctgccctacctgctgaccctgccggggcacggtttctattggttccagctgaccgcatgcgaggaggacaca

SEQ ID NO: 25586 - DNA, 546 bp, Mycobacterium avium
atgagtgagttcacaattccgggattgaccgacaagcaggcggcgcggctcaccgaactgctgcaaaagcaactgagcacctacaacgatcttcacctgacgctcaagcacattcactggaacgtggtgggccccaacttcatcggcgtgcacgagatgatcgacccgcaagtggaggcggtccgcggtttcgccgacgacgtcgcggaacgcattgcggcgcttggtgcttcgccgcagggcacgcccggggccatcatcaaggaccggtcgtgggacgactactcggtgggccgcgacaccgtccaggcgcacttggccgcccttgatctcgtctacaacggggtgatcgaagacatccgccaatacatcgacgagacggacgaactcgaccaggtgacccaggacctgttgatcgggcaggcggcgcagctggagaagttccagtggttcgtccgggcgcacctggaaagcgccggcgggcagttggcgcacaagggtaaaagcaccgaacgcgccgccgcgcagagcgcgcgcggcaaatcc

SEQ ID NO: 25587 - DNA, 1098 bp, Mycobacterium avium
atgacacacaacaagataaccctgacccccgaacaggcggaggaattcggccgtgagctcgacgccctcaaggaacgggtgatggccgacctcggcgaaaaggatgccgactacattcgccgcgtcatcaaggcgcagcgcgcgctggaagtcggtggccgcgccctgctcttcctgcccccggcatggctgctgggcaccaccatgctgggcctgtcgaagatcttggacaacatggagatcggccacaacgtcatgcacggccagtacgactggatgcgcgacccggcgatcagcggccggtcctttgaatgggacaccgcctgcccggccgaccagtggcggcactcgcacaactacatgcaccacacccacaccaacatcgtcggcatggaccgcgacatcgggtacgggatcctgcggatgagcgaagaccagccgtggcagccgtatttcctcggcaacccgctctacgcgttcctgctgatggtgctgttccagtacggggtggcgctgcacgagctggaaaccgaacgcatccgctccggagagatccggctggcggacaagcgcgaggtgctgcgcgaaatctggcagaagacccgccgccagacgctcaaggactatgtcgcgttcccgctgctggccgggcccttcgcgccgttcgtgttcaccggcaacctcaccgccaacctgatccgcaacgtgtggtcgtacatgatcatcttctgcggccacttcccggacggcacacaggaattcaccgtcgaagagacgcaggacgagtcgcgcggcatgtggtacttccgccagatcctcggctcggcaaacctgaccggcggcaagctgtttcatctgctctccggcaacctgtcgcaccagatcgagcaccacctgttccccgacatgccggcccggcgctacgccgagatcgcaccggaggtacaggcgatctgccaacgctacggcgtcgcgtacaaccgcgggccgctgctgcgccagttcggcaccgtcgtgcgcaagatcgtcaagctgtcgttcccgaacgcgtggatccccggcgccgccaagcccgccgaccgcgagccggtggccgcc

SEQ ID NO: 25588 - DNA, 1092 bp, Mycobacterium avium
atgttcactcaaaccgttcaggcttccggccgggtcctcgcgcggaccgtgcggcagcgggtgctgggttcggagctgctcgacctgctgaccggtccgcacggcgtcgatcgttacaccgagctggtggcaccgacgtggacgctgggcgaggcccgcgccaaagtgaccgacgtgcgccgcaccacgccgcgcagcgtcacgctcaccctggatcccaacgacaccttcctgtccagccataccgtcacagccggccagtacgtcaacctcaccgtggagatcgacgggcgccggcacacccggtgctattcgccggccaaccgcgaaggggcggccaccctcgagttgaccatcggtcgacacgacggcgggctggtctcgaaccatctgtacgaccacgcccgacgcggcatggtggtcggactggccggcgtcggcggcgatttcgtgttgccggacccgcgcccgcggcgcgtcctgttcgtctccgggggcagcggtatcaccccggtgatggcgatggtgcgcaccctggtttcccagcggcatcgcggcgagatcgccttcatccactacgcgccgaccccggccgaggcctgctaccgcgacgaattggccgcgctgccgtcggtgcgggtgctgcacgggtacacccgatccgcgggcggcgacctttccggacgcttcgggcccgaccacctggccgccgcgatgcccgcaccggatgcggtgttcgtctgcggcccaacatctttggtcgatgccgtccgagagcactgcgacaacgtctacaccgaaagcttcactccgccggtactcgaggcgtcggccgacccgtccggcggacgagtcacgttctccgacagcggcgtcgacgtcgtcgacgacgggcggtcgttgctggagcaggccgaggccgccggactgtccccgcaaaacgggtgccggatgggcatctgtcacacctgcacgcggcgcaaaaccgccggcaccgtgcgcaacctggtcaccggtgcggtctcgaccgctcccgatgaggacgtgcagatctgcgtgtccgttccggtcggtgacgtggacctgtccctc

SEQ ID NO: 25589 - DNA, 210 bp, Mycobacterium avium
atgcccaccagcgaataccaggtgagcgggatgagctgcggccactgcgaggccgccgtgcacagcgaggtggcccgcatccccggcgtcgacggcgtctcggtcagcgcggacaccggccggctcgtcgtcaccagcgcggtgcccatcgacgccgacgccgtcctcggcgcggtcgacgaagccggcttccaggccgtcttggtcgca

SEQ ID NO: 25590 - DNA, 1029 bp, Mycobacterium avium
atgagcaccgccaccggatcccgccggattttctccggcgtccagcccacgtccgattcgctgcacctgggcaacgcgttgggcgccatctcgcagtgggtgaccctgcaggacgactggggcgacgattgggacgcgttcttctgcgtggtcgacctgcacgccatcaccatcgcccaggaccccgcggcgctgcgccggcggaccctggtcaccgccgcccagtacctggcgctgggcatcgatccggcccgcagcaccgtgttcgtgcaaagccacgtgcccgcccacacccagctggcctgggtgctgggctgcttcaccggcttcggccaggcctcgcggatgacgcagttcaaggacaagtcgctgcgccagggcgcggactccaccacggtgggcctgttcacctatccggtgctgcaggccgccgacgtgctggcctacgacaccggcctggtgcccgtcggcgaggaccagcgccagcacctggagttggcgcgcgacgtggcgcagcggttcaacgcccgcttcccggacacgttcgtggtgccggagatgctcatccccaaggtcaccgccaagatctacgacttggccgacccgacgtcgaagatgagcaagtcggcgtccaccgatgccgggctggtcaacctgctcgacgatccggcgttgtccgccaagaagattcgctccgcggtcaccgacagcgagcgggagatccgattcgacaccgacgccaagccgggcgtgtccaacctgctgagcatccagtccgcggtcagcggggtcgacatcgacaagctcgtgcagggctacgccggaaggggttacggcgatctgaagaaggacaccgcggacgcggtggtcgagttcgtcaccccgatcaaggcccgcgtcgacgaattgatggccgacccggccgaattggaggccgttctggcggccggggcgcaacgggcccaggatgtcgccgggaaaaccgtcgaacgggtttacgatcggcttgggttccttccgcgacggggg

SEQ ID NO: 25591 - DNA, 1752 bp, Mycobacterium avium
atgatccaacaacatcgatacgacgtggtgatcgtcggcgccggcggtgccgggatgcgcgcggccgtggaagccggcccgcgggtgcgcaccgcggtgctgaccaagctctaccccacccgcagccacaccggggcggcccagggcggcatgtgcgcggcgctggccaacgtcgaggaagacaactgggaatggcacaccttcgacaccgtcaagggcggcgactacctcgccgaccaggacgcggtggagatcatgtgcaaggaagccatcgacgcggtgctcgacctggagaagatggggatgccgttcaaccgcacccccgagggccgcatcgaccagcgccgcttcggcggccacacccgcgaccacggcaaggccccggtgcgccgggcctgttacgccgccgaccgcaccggccacatgatcctgcagacgctctaccagaactgtgtgcggcacgacgtgcagttcttcaacgagttctacgcgctggacctggttttgacgcagacgcccagcggcccggtggccagcggcgtggtggcctacgagctggccaccggcgacatccacgtctttcacgccaaggccgtcgtgctcgccaccggcgggtcgggccggatgtacaagaccacctccaacgcgcacaccctgaccggcgacggcatcggcatcgtcttccgtaagggactgcccttggaggacatggagtttcaccagttccacccgaccggcctggccggattggggattctgatctccgaggcggtgcgcggcgagggcggccggctgctcaacggcgagggcgagcggttcatggagcgctacgcccccaccatcgtcgacctggcgccgcgcgacatcgtcgcgcgctcaatggttttggaggtgctggagggccgcggcgccggaccgcacaaggactacgtctacatcgacgtgcgccacctcggcgaggacgtgctggagtccaagctgcccgacatcaccgagttcgcccgcacttacctgggcgtggacccagtgcacgagctggtgccggtgtacccgacgtgccactacgtgatgggcggcatccccaccacggtcaccggacaagtgttgcgggacaacacctccaccgtgccgggcctgtacgcggccggcgagtgcgcgtgcgtgtcggtgcacggcgccaaccggctgggcaccaattcgctgctggacatcaacgtgttcggccgccgggccggcatcgccgcggccaactacgcccggggccacgacttcgtggacatgccgcctgacccggcggcgatggtggtgcgctgggtcgccgacatcctctccgagcacggcaacgagcgggtcgccgacatccgcggcacgctgcagcagtcgatggacaacaatgcggcggtgttccgcaccgaggagacgctcaagcaggcgctgacggacatccacgcttgcaaggagcggtactcgcgaatccgcatccacgacaagggaaaacgatttaacagcgacctgctggaagccatcgagctgggcttcctgctggagctggccgaggtcaccgtggtgggggcgctcaaccgcaaggagtcccgcggcggccacgcccgcgaggactatcccaaccgggacgacgtcaactacatgcgccacaccatggcctacaagcagggcaccgatctgctgagcgacatcgcgctggacttcaagcccgtggtgcagacgcgctacgaacccaaggaacggaagtac

SEQ ID NO: 25592 - DNA, 1134 bp, Mycobacterium avium
gtgggactgatcgccgcggggacgatggtggcatccgggcgggtccaccgcccgggctgggtcgagacgtccggcgggcacatcgcggcgtgcggcaccggcccgccgccgcgcccggccgaccgcgagttccccgacggcacggcggtgcccggcttcgtcgacatgcacgtgcacggcggcggcggcgcctcctacaccgaccccgacggcatcgcgaaggccgccgccttccatctgcggcacggcaccaccaccacgatggccagcctggtgaccggctcgccggccgagctgctgggcggggtgcgcgcgctcgccgaggccacccgggatcgcacggtcgcgggcatccacctggagggcccgtggttgagccgcgcccgctgcggcgcccacgacgcccgccggatgcgcgaccccgacccgcacgagatcgacgcggtgctctcggccggcgggggcgcgatcaggatggtcaccctggcgcccgagctgcccggggccgacgcggcgatccggcgtttcgtggacgcgggagtcgttgtggcagttgggcatacgaatgccgactaccggcagacccggcacgccatcgcgctgggcgccaccgtcggcacgcatctgttcaacgcgatgccgccgctgcatcaccgcgagcccggccccgcgctggccctgctgcgcgacccgcgggtcaccgtcgagctgatcgccgacggcgtgcacgtgcatcccgacgtggtgcacgcggtgatcgacgcggccgggccggagcgggtcgcgctggtcaccgatgcgctcgcggccgccggccgccccgacggcgcgttccggctcggcccggtgcacatcgacgtcgtcgccggcgtcgcgcgggtgcacgggacgacgacgatcgcgggcagcaccgccaccatggaccggctctttcgcaccgtggccgggtcaggcaccgaccgcgacgccgcgctggcggccgcggtgcagatgacgtcgacgacgccggcgcgcgcgctggggctcgatcgggtgggcagcttgcgggccggccatgaggccaacctcgttgtgctggacgatgattggcgagttagggccgtcatggtccgcggcgactggctggccgacccg

SEQ ID NO: 25593 - DNA, 1350 bp, Mycobacterium avium
gtggcacgcggatcgcggcgcggcctgctggtcgggctgaccgccgccagcgtgggcgtcatctacggttacgacctgtccatcatcgccggcgcgcagttgttcgtcaccgaggacttcggcctgtccacccggcaacaggaactgctgacgacgatggcggtgatcggccagatcggtggggcgcttttcgccggggtgctcgccaacgcgatcgggcgccgacggtcggtgctgctgatcctgtccggctacgcggttttcgcgctgctggccgcgttctcggtgggtctgccgatgctgttgacggcgcggctgctgctgggcctgaccatcggcgtgaccgtggtggtggtgccggtgtacgtggccgagtcggccccgacggcggtgcgcggcgcgctgctgacggcctatcagctggcgatcgtcagcggcctgatcgtcggctacctgagcgggtatctgctggccggcacgcacagctggcgctggatgctggggttggcctgtgttcccgcagtgttgttgctgccgttggtgtttcggatgcccgacacggcgcgctggtatctgctcaagggccgggtcgacgacgcgcggcgggcgctgctgcgggtggaacccgccgcgcgggtggacgacgagctggccgagatcggccgcgcggtgagcgaggaagccgcgagcctgccggccatgctggccgagatggtgcgcagtccctaccggcgcgccaccgtcttcgtggtggtgctggggtttctgattcagatcaccggcatcaacgcgatcatctactacagcccgcggatcttcgaggcgatgggcttcaccggcaatttcgcgctgctggcgttgccggcgctggtgcaggtcgccggcctggttgcggtgggcaccgcgctgctgctggtcgaccgggtgggccggcggccaatcctgttgtgcggcaccgccatgatgatcgtggccgacgtggtgctggtggccgtgttcggccgcggcccgggcggcgtgatcgccgggttcgccggggtgctgctgttcatcttcggctacaccatgggtttcggctccctgggctgggtgtacgccagcgagagcttcccgtcgcggctgcggtccatcgggtcgagcaccatgctgacctccaacctggtggccaacgccatcgtcgccgcggtgttcctgacgttgctgcattccttgggcggcgcaggcactttcgcggtgttcgcggtgctcgcggtggtcgcgttcgcgttcgtccaccggtatgcgccggagaccaagggccgccagctggaggacatccggcacttttgggagaacggcggccggtgggac

SEQ ID NO: 25594 - DNA, 1215 bp, Mycobacterium avium
atgcccacccctccggacgtgttcagccccgccaagctcggtccgatcacgctgcgcaatcgcatcatcaagtccgccaccttcgaggcgcgtacaccggacgcgctggtgaccgacgacctcatcgaataccaccggctgcccgccgcgggcggcgtcggcatgacgaccgtcgcctactgcgccgtctcccccggcggccgcaccgagggcaacggcatctggatgcggcccgaggccgtgcccgggttccgccggctcaccgacgcgatccacgccgagggcgcggcggtcagcgcgcagatcgggcacgccgggccggtggccaacgccaggtccaacaaggcgcacgcgctggcgccggtccggttcttcaacccgatcggaatgcggttcgccaagaaggcgacccgcgaggacatcgacgaggtgatcgccgcgcacgccaacgccgcgcggctggccatcgaggccgggttcgacgccgtcgaaatccacctgggccacaactatttggcgagttcgttcctgtcaccgctgatcaaccgccgcaacgacgagttcggcgggtcgctgcagaaccgtgcgaaggtggcccgcggcatggtgatggccgtgcggcgggcggtggaaaaggagggcacgcccatcgcggtgacggccaagctgaacatggccgacggggtgcgcggcggcatcagcaccgaggaatcgctgaccaccgccaagtggctggagtccgacggcggcctggacgcgatcgagctcaccgcgggcagctcgctggtcaacccgatgtacctgttccgcggcgacgcgccgctcaaggagttcgccggcgcgttcaagccgccgctgcgctggggcatgcgcatgacgggcaagaagttcctgcgcgaatacccctaccgcgaggcgtatctattgcgggacgccaagctgtttcgcgccgagctgaagatgccgctgatcctgctgggcggcatcaccaatcgggagacgatggacctggcgatggcggaggggttcgagttcgtcgccatggcccgcgcgctgctggccgagccggatctgatcaaccggatcgccgccgacggtgccgcgcaccgggtgcattcggcgtgcacgcactgcaatcagtgcatgcccaccatctacagccgaacgcactgcgtggtcaccggtgcgcccgaccggcacaccagcgccgcaact

SEQ ID NO: 25595 - DNA, 1623 bp, Mycobacterium avium
atggccaagacaattgcgtacgacgaagaggcccgtcgcggcctcgagcgggggctcaacgccctcgccgacgcggtaaaggtcacgttgggccccaagggtcgcaacgtcgtcctggagaagaagtggggtgcccccacgatcaccaacgatggtgtgtccatcgccaaggagatcgagctggaggacccgtacgagaagatcggcgccgagctggtcaaggaagtcgccaagaagaccgacgacgtcgccggtgacggcacgacgacggccacggtgctcgcccaggcgttggtccgcgagggcctgcgcaacgtcgcggccggcgccaacccgctgggtctcaagcgcggcatcgagaaggccgtcgagaaggtcaccgagaccctgctcaagtcggccaaggaggtcgagaccaaggaccagatcgctgccaccgcggccatctccgcgggcgaccagtcgatcggcgacctgatcgccgaggcgatggacaaggtcggcaacgagggcgtcatcaccgtcgaggagtccaacaccttcggcctgcagctcgagctcaccgagggtatgcggttcgacaagggttacatctcgggctacttcgtcaccgacgccgagcgtcaggaagccgtcctcgaggacccgttcatcctgctggtcagctccaaggtctcgaccgtcaaggacctgctgccgctgctggagaaggtcatccaggccggcaagccgctgctgatcatcgccgaggacgtcgagggcgaggccctgtccaccctggtcgtcaacaagatccgcggcaccttcaagtcggtggccgtcaaggcgcccggcttcggcgaccgccgcaaggcgatgctgcaggacatggccatcctcaccggcggccaggtcatcagcgaagaggtcggcctgtcgctggagagcgccgacatctcgctgctcggtaaggcccgcaaggtcgtcgtcaccaaggacgagaccaccatcgtcgagggcgccggtgactccgacgccatcgccggccgggtggcccagatccgcaccgagatcgagaacagcgactccgactacgaccgcgagaagctgcaggagcggctggccaagctggccggcggcgtggcggtcatcaaggccggcgccgcgaccgaggtcgagctcaaggagcgcaagcaccgcatcgaggacgcggtccgcaacgccaaggcggccgtggaagagggcatcgtcgccggcggtggcgtggccctgctgcacgcgatcccggcgctcgacgagctgaagctcgagggcgacgaggcgaccggcgccaacatcgtccgggtggccctcgaggctccgctgaagcagatcgccttcaacggtggcctggagcccggcgtggtggccgagaaggtccgcaactcgcccgccggtaccggcctcaacgccgccaccggtgagtacgaggacctgctcaaggccggcgttgccgacccggtgaaggtgacccgctcggcgctgcagaacgcggcgtccatcgcggggctgttcctaaccaccgaggcggtcgtcgccgacaagccggagaaggcggccgctcccgcgggcgacccgaccggcggcatgggcggcatggacttc

SEQ ID NO: 25596 - DNA, 1212 bp, Mycobacterium avium
atggccgcgatgcgctccgtcgccgaacaccagcgggtggtggccgggctgatccgcgcccggccgccggtcgcggtgccgctggcgcaggcccagggcctggtgctggccgaggacgtggtggcggggctggcgctgccggtgttcgacaactccgcgatggacggctacgcggtgcgcgccgaggacatcgcgggcgccacccccgagcggccggtcgtgctgccggtcgccgaggacattccggccgggcgcaccgacgagctgacgctgcagccgggcaccgcgcaccggatcatgacgggcgcgccggtgccggccggggcgacggccgtcgtgccggtggaggacaccgacggcggcgtggacgtggtgtcgatccgggcgccgcgcgaacccggcaagcacatccgccgcgccggcgaggacgtctcccccggcaccaccgtgttgcgccgcgggcaggtggtgacgccggcggtgctcgggctggccgcggcgctgggcatcgccgagctgtcggtgatcccgcggcagcgggtgctggtcatctcgacgggatcggagctggtggccccgggcgccgcgctgcggccggggcagatctacgagtccaactcgatcatgctggccggggccgtgcgcgacgccggcgcggagctggtggccgtcacgaccgccgaggacgaggtggcacagttcagttcgatcatcgaccggtatgcggccggcaccgacctgatcatcaccagcggcggcgtcagcgccggcgcctacgaggtggtcaaggacgccttcgggcgcgagggtgatcagggcgtggagttcgtcaaggtggccatgcagccgggcatgccgcagggcgtgggacgggtggccggggcgaccatcgtcacgctgcccggcaatccggtcagcgcgctggtgtccttcgaggtgttcatccgcccggcgctgcgcgccgcgatgggcctgcccgatcccgaacgcccgcaccggtcggcggtgctcgccgagtcgctcacctcgccgcgcggcaaacgccaattccgccgcgcggtgctcgacgacgacgccggcaccgtcgtcagctacggcccgccggcctcgcatcacctgcgctggctggcgtcggcgaacgggctgctggacatccccgaagacgtcgtcgaggtgcccgaggggaccaccctcgaggtgtgggatctgcgc

SEQ ID NO: 25597 - DNA, 1290 bp, Mycobacterium avium
atgcccatgtctgtcgttggcacccccaagagcgccgaggagatccagaaggactgggacaccaacccgcgctggaaggatgtcacccgcacctacaccgccgaggacgtcgtcgccctgcagggcaccgtcgtcgaggagaacaccctggcccgccggggcgcggaggtgctgtgggagcagctgcacgacctggagtacatcaacgcgctgggcgccctgaccggcaacatggccgtgcagcaggtgcgcgccggcctgaaggccatctacctgtcgggctggcaggtcgccggtgacgccaacctgtccggtcacacctaccccgaccagagcctgtaccccgccaactcggtgccgaccgtggtgcgccggatcaacaacgcgctgctgcgcgcggaccagatcgccaaggtcgagggcgacacctcggtgaagaactggctggcgccgatcgtcgccgacggcgaggccggcttcggtggtgcgctcaacgtcttcgagctgcagaaggcgatgatcgccgccggtgtggcgggctcgcactgggaggaccagctggcttcggagaagaagtgcggccacctgggtggcaaggtgctgatcccgacccagcagcacatccgcacgctgacctcggcccggctggccgccgacgtgtgcgacgtgccgaccgtcgtcatcgcccgcaccgacgccgaggcggccacgctgatcacctccgacgtcgacgagcgcgaccagccgttcatcaccggcgagcgcaccaaggagggcttctaccgggtccgcaacggcctcgagccctgcatcgcccgggccaaggcctacgcgccgtactccgacctgatctggatggagaccggcacgcccgacctggagctggccgccaagttcgccgagggcgtcaaggccgagttccccgaccagatgctggcctacaactgctcgccgtcgttcaactggaagaagcacctcgacgacgccaccatcgcgaagttccaaaaggagcttgccgcaatgggattcaagttccagttcatcacgctggccggcttccacgcgctgaactactcgatgttcgatctggcctacggctacgcccgcaaccagatgaccgcctacgtcgagctgcaggagcgcgagttcgccgccgaggagcgcggttacaccgccaccaagcaccagcgcgaggtgggcgccggttacttcgaccggatcgccaccacggtcgacccgacgtcgtcgaccaccgcgctgaccggctccaccgaagagggccagttccac

SEQ ID NO: 25598 - DNA, 1395 bp, Mycobacterium avium
gtgacttctcactatgacgtcgtcgtcctcggggccggtcccggcggatatgtggcagccatccgcgccgcgcagctggggctgagcaccgccatcgtcgaaccgaaatactggggcggcgtctgcctcaacgtcggctgcattccgtccaaggcgctgctgcgcaacgccgaactcgcccacatcttcaccaaagaggccaagacgttcggcatcaacggcgaggcgaccttcgactacggcgccgccttcgaccgcagccgcaaggtggccgagggccgcgtcgccggcgtgcacttcctgatgaagaagaacaagatcaccgagatccacggctacggccggttcaccgacccgcacacgctggcggtcgagctcaacgacggcgggaccgagacggtcacgttcgacaacgcgatcatcgccaccggcagcagcacccggctggttccgggcacgtcgctgtcggccaacgtggtcacctacgaggaacagattctgtcccgggagttgcccgagtcgatcatcatcgccggcgccggcgccatcggcatggagttcggctacgtgctgcacaactacggcgtcgaggtgaccatcgtcgagttcctgccgcgcgcgctgcccaacgaggacgccgacgtgtccaaggagatcgagaagcagttcaagaagctgggcgtcaagatcctcaccggcaccaaggtcgaatccatctccgatgacggctcgcaagtgacggtggtggtcagcaaggacggcaacagccaggaactcaaggccgcaaaggtgttgcaggccatcggttttgcgcccaacgtcgagggctacggcctggaggcggccggggtcgcgctgaccgaccgcaaggccatcggcatcaccgactacatgcgcaccaacatcgagcacatctacgccatcggcgacgtcaccggcaagctgcagctggcccacgtcgcagaggcccaaggcgtggtggccgccgaaaccatcgccggcgcagagactttggcgctcggcgactaccggatgatgccgcgcgccaccttctgccagcccaacgtcgccagcttcgggctcaccgaacagcaggcccgcgacgaggggcacgacgtggtggtggccaagttcccgttcaccgcgaacggcaaggcgcacggcgtgggcgaccccagcgggttcgtcaagctgatcgccgacgcgaaatacggtgagctgctgggcgggcacctggtcggccacgacgtctccgagctgctgccggagctcaccctggcgcagaagtgggacctgacggccaccgagctggcccgcaacgtgcacacccacccgaccatgtccgaggcgctgcaggaatgcttccacggcctgaccgggcacatgatcaacttc

SEQ ID NO: 25599 - DNA, 1521 bp, Mycobacterium avium
atgactgtcttcgcacgtccgggttcggccggggcgttgatgtcgtacgaatcccgctacgacaacttcatcggggggcagtgggttgcaccggcgcgcgggcgctacttcgagaacccgacaccggtcaccggccagacgttctgcgaggtggcccgctcggatgaggccgacgtcgacaaggcgctcgacgccgcccacgccgcggcgccggcgtggggcaagaccgcgccgccggagcgggccgcgatcctgaacaagatcgccgaccgcatcgaggagaacctggaatccctcgcggtggccgaggtgtgggacaacggcaagccgatccgcgaggcgctggccgccgacatcccgttggcggccgaccatttccggtacttcgccggggcgctgcgcgcgcaggagggctcgctgagccagatcgacgacgacaccgtggcctaccacttccacgagccgctcggcgtggtcgggcagatcatcccgtggaacttcccgatcctgatgggtgcctggaaattggcgcccgcgctggcggccggcaacgccgtcgtgctcaaacccgcggagcagaccccggtttcggtgctctacctgatgtcgctgatcggcgacctgctgccgcccggagtcgtcaacgtggtcaacggattcggcgccgaggccggcaagccgctggcgtcgagcaaccgaatcgccaagatcgccttcaccggcgagaccaccaccgggcggctgatcatgcagtacgccagccagaacctgatcccggtcaccctggagctcggcggcaagagccccaacatcttcttctccgacgtgatggccaaggccgacgactaccaggacaaggcgctcgagggcttcaccatgttcgccctcaaccagggcgaggtgtgcacctgcccgtcgcgcagcctgatccaggccgacatctacgacgagttcctggagctggccgcgatccgcaccaaggcggtccgccagggcgacccgctggattccgagaccatgctgggctcgcaggcgtccaacgatcagctggaaaaggtgttgtcctacatcgcaatcggcaaggacgaaggcgccacgatcatcaccggcggggaacgcgccgaactgggcggcgacctgtccggcggcttctacatgcagcccaccatcttcgccggcaacaacaagatgcgcatcttccaggaggagatcttcgggccggtggtggcggtgacgtcgttcaccgattacgacgacgccatctccatcgccaacgacaccctgtacgggctgggcgcgggcgtgtggtcccgagacggcaacaccgcctatcgcgccggccgcgacatccaggccggccgggtgtgggtgaactgctatcacgcctatccggcgcacgcggcgttcggcggctacaagcagtccggcatcggccgggagaaccacaagatgatgctcgaccactaccagcagaccaagaacatgctggtgtcctacagcaacaaggcgcagggcttcttt

SEQ ID NO: 25600 - DNA, 1599 bp, Mycobacterium avium
atgcctttcgaccaccgtcagctgcgcgacaagtggtatagcgccggttggtactccgaccgcacctgcctggacgccttcgaagcgggggcggtcgagcacaaggacgtgccgttgacattcgtcatcggcgattcggtgtccagtccgacggtatgcgaaatccacgaccgggccgtggccttggcggcgtcgttgcagcggctgggggtgcgcgacggcgacgccgtcgcggtacagctgaccaatcgtgtcgagtgtgcagtcgcgtatcaggcggtgttgttgtgcggggcagtgctggtgccgatcgtgcacatctacggtatggccgaggtggccttcgttctcgaccagtcggctgcgaaggtactgatcatgccagagcggcacggatcgatcgtgtatagcaaaaggctgcaagatctttcgcggatcgactcgctgcagcatgtcgtcatgctggacgccgagccgggcgagggctatctcgcgtggtcgcaactggacacacccgccgcccggtaccggcgccccgcagtggccgccgacgacgtctgtctgctgctgtacacatcgggcaccacgtcggcgcctaaaggcgtacagcacaccaacaacacggttctcgccgagcagagaaccatgccggcgctgctggccggtaagcccgacgacgtgtcgctggtgacctttccgccgggccacatcgcgggcgtcgggtcgatgctgcggccgttgctcagcggcgcccggactgtcttcatggatggttgggacccggcgcgggcggtcgaggtggtgcaccgtttcggcgtgacctgcaccgcgggcacaccatttcacctcgcgggcatccttgatctgggtgacaccggagacaagctggcaagtctgcgggagtttctggtcggcgccgcaccggtcgccgaggagatcggccggcgtgctgcgcaagccgggatcagcaccttccgcagttacggcgccaccgaacatcccaccgtcaccggcgaacacgagggacagccgcagtgggcccggctgggtaccgatggaaaaccgctcccgggctccgagattcgcatcgtcgggtccgacggcacggactgcccgatcgggataggtggcgaggtcgtcgtgcgcggtcccgatcaattcatcggataccaggattccgctttgaacactgaggcgttcactgacgacggttggtttcgcaccggcgatctcgggcaccttgacgcccacggcagattgaccatcaccgaccggatcaaggacgtcatcatccgcggtggcgagaccatctcctccggtcaggtcgaagaggtactcaacgcacatcccgccgtcgccgacggcgttgccgtcgcggccccggattcgcgttacggcgacgtggtcgccgcggtcgtggtcctcaaaccggggtatgcgctcaacctcgacgacctgcgggcccacttcgcggcatccgggctggcccggcagaagaccccggaacgtctcgccatcgtcgacgagctaccgcgcacgtcgttgggcaaagtgcgcaaggcgcaactgcgcagtgaccacttcggcgccgctaggcgt

SEQ ID NO: 25601 - DNA, 1488 bp, Mycobacterium avium
atgaccgacaccgcgaccgagacgttggtccagttcgacctcctgattgggggcgaatcatcctccgctgcgtcgggattgacctacgacagcgttgatcccttcactggcaggccctgggcgcgcgtgcccaatgccgcggcggccgatgtggatcgcgccgtcggcgccgcccgtgccgcgctgaatggaccgtggggtgcgctcactgcgaccgcccgcggcaagctactgcaccgactcggtgagatcatcgcacgcgaagccgaccagctcgccgaactcgaggtgcgtgacggcggcaagctggttcgcgaaatggtcggccagatgcggtcgctgccggattactacttttactatggcgggctggcagacaagctgcagggcgacgtcataccggtggacaagcccaactacttcgtctacacccgccatgagcccgtcggcgtggtcggcgcgatcacgccctggaactcaccgctactgctgttgacctggaagttggccgccgggctggccgcgggttgcacgttcgtcgtcaagccaagcgatcacaccccgacgtcgacattggcgttcgcaaagctgttcgccgaggccggttttccgccgggcgtgatcaacgtcgtcaccggctggggaccggagacgggtgccgcgctggcgtcgcacccgggcgtcgacaaggtcgcgttcaccgggtcgacggccaccggcattcacgtcggcaaggccgcgatcgagaacatgacccggttctcactcgaactcggcggcaagtcggcgcaagtggtgttcgccgatgctgacctcgacgccgcggccaacggggtgatcgccggcgtcttcgccgccaccggccagacgtgtctggcgggctcgcgcctgctggtagaccgcagcgtcgcggacgcgttggtggagaagatcgtcgcgcgggcggcgaccatcaaactgggcgacccgaaggacccgacgaccgagatgggtccggtgtccaacttgccgcagtacgaaaaggtgctgtcgcacttcgcttccgcacgtgagcagggggcgacggtcgcctacggcggcgagcccgccagcgacctcggcgggttcttcgtcaagccaacggtgctgaccggcgtcgacccgtcgatgcgggccgtcgccgaggagatcttcggacccgtgctggcggtgatgaccttcgaagacgaagacgaagccgtcgccgcggccaacggcaccgagttcggactggccgcggctgtgtggaccaaggacgtccaccgcgcgcaccgggtggccgccaagctgcgggccggcacggtgtgggtcaacgcttatcgagtcgtcgcgcctcatgttccgttcggtggcatcggctacagcggcatcggacgggagaacggcatcgacgccgtgaaggacttcaccgagaccaaagcggtctgggtggagctgtccggagagactcgcgacccgttcacgctcggc

SEQ ID NO: 25602 - DNA, 753 bp, Mycobacterium avium
atgaacggcatctcggtcgagcacgacggcgcggtgctgcggatccggctggaccgaccggagaagctcaacgccgtcgacacccccatgctcgaggagttgtcggttcacattcgcgatgccgaggcagacgaatcggtccgcgcggtgctgctcaccggtgccggtcgagcattctgttccggcggcgacctgaccggcggtgacactgcgggcgccgctgatgccgccaaccgggtggtccgggcgatcacctcgctacccaagccggtgatcgccggtgtccatggagcggccgttggcttcgggtgttcgctggcgctcgcctgcgatctggtggtggccgcgccagcgtcgtactttcagttggcctttacccgggtcgggctgatgccggacgggggtgcgtccgcgctgctgccattgctgattggtcgagcgcgcacctctcgcatggccatgaccgcggaaaagatctccgctgcaaccgcatttgaatgggggatgatctcgcacatcacttccgcggacgaatacgagtcggtgctgaccgacgtgctgcggtcggtctccggcggtccaacgttggcgttcggctggacgaagcgtgcgctggccgcagcgaccctggccgagctcgagccggtgcaagctatcgaagccgaggggcagttggcgttggtcgagaccgctgacttcagagaaggggcacgcgccttccgcgagcggcgcaccccaaattttcgtggccac

SEQ ID NO: 25603 - DNA, 2148 bp, Mycobacterium avium
atgaccgtgaccgcgatcgacccggccgagcaggcgcatccggcgccgtcggccggcaccaagcgggtgcagggcggcctgctcgacccgaagatgctgtggcgctctaccccggacgcgctgcgcaaactcgacccgcgcacgctgtggcgcaacccggtgatgttcatcgtcgaaatcggcgcggcgtggagcacggtgttggcgatcgtcggcccgacctggttcgcctggctgaccgtgatctggctgtggctcaccgtactgttcgccaacctcgccgaggcggtggccgagggccggggcaaggcccaggcagaaaccctgcgccgggccaaaacccagaccatggcgcggcgcctgcgcgactgggcgcccggctcgaccgggatcgaggaggccgtcgccgccaccgcgctgcaacagggcgacatcgtcgtggtggaggccgggcaggtgatccccggcgacggtgatgtggtggaaggcattgcgtcggtggacgaatcggccatcaccggcgagtccgcaccggtgatccgcgagtccggcggggaccgatcggcggtcaccggcggcaccaccgtgctcagcgaccgcatcgtcgtgcagatcacccagaagccgggcgaaagcttcatcgaccggatgatcgccctcgtcgagggcgccaaccggcagaagacacccaacgagatcgcgctgaacatcctgctggccgcgctgacgatcatcttcgtgttcgccgtcgccacgttgcagccgctggccatctactcgaaggtgaacaacccgggcgtcccggatacccaggcgctcaacacaagtggcgtcaccggcatcgtgatggtgtcgctgctggtgtgcctgatcccgaccaccatcggggcgctgctgtcggccatcggcatcgccggcatggaccggctggtgcagcgcaacgtgctcgccatgtcggggcgggcggtggaggctgccggtgatgtcaacaccctgctgctggacaaaaccggcaccatcacgctgggcaaccggcaggccgccgccttcatcccgctggccggcgtgccccccgaggagttggccgacgccgcgcagctgtccagcctggccgacgaaacacccgagggccgttcggttgtggtgttcgccaagcagcacttcgggttgcgggcgcgcacccccggcgagctgtcccaggcgcagtgggtggcgttctcggccaccacccggatgtcgggggtcgacctggacgggcactccctgcgcaagggcgcggccagttcggtagccgaatgggtacgcagccaacgcggcagcgtcccgcaccagctcggcgagatcgtggacggcatctccgccggcggcggcacaccactggtcgtcggcgagagcgtcgacggccgggcacgggtgctcggtgtcatccacctcaaggacgtggtgaagcagggcatgcgggaacggttcgacgagatgcggcggatgggcatccggacggtgatgatcaccggcgataatccgttgaccgccaaggcaattgccgacgaggccggcgtcgacgacttcctcgccgaggccacccccgaggacaagcttcaattgatcaagcgggagcaggccggcggcaagctggtggcgatgaccggcgacggcaccaacgacgcgcccgccctggcccaggccgacgtgggggtggcgatgaacaccggcacgtcggcggccaaagaggccggcaacatggtcgatctcgactccgaccccaccaagctcatcgagatcgtcgagatcggcaagcaattgctgatcacccgcggggcgctgaccaccttctcgatcgccaacgacatcgccaagtacttcgcgatcatcccggcgatgttcgtcgcgctgttccccggcctggatctgatcaacgtgatgcggctgcacagcccgcagtcggcgatcctgtcggcggtgatcttcaacgcgatcatcatcgtgctgctgatcccgctgtcgctgcgcggtgtgcggtacacgccaagcagcgcgtcaaagctgttgagccgcaacctgtatatctacggcctgggcggcatcgtcgccccgttcatcggaatcaaggcgatcgacctgatcgtccaattcgtccccgggatgtcc

SEQ ID NO: 25604 - DNA, 1224 bp, Mycobacterium avium
ttggaccggtcagccggcccggaattcgccggcgacatgacgagtgcgccactggccggcataaccgtcgtgagcctcgagcaggcggtcgccgcgccgtacgccacccgacagctggcggacctcggcgcacgggtaatcaaggtcgagcgtccgcagggcggcgatttcgcccgcggctacgaccgcacagtgcacggggagtcgagctacttcgtctggctcaatcgtggcaaagagtcgttgactgtcgacctcaagcagcccgagggcagacgcatcgttgagcgtctactcgagggcgccgacgtgctggtgcaaaacctggcgccgggtgccgcggctcggatgggcttggacaccgaatcggtggcgcgcgcgcacccacggaccatcacggcgaccatcagcggctatggacaggacggaccttggcgcgaccgcaaggcctacgaccttttggtacaagccgaggccgggttgttgtcggtgaccggttcgccggcggaggtggcgcgcaccggtgtatcgatcgccgacatcgccgccggcatgttcgccttctccggaatcctcaccgcgctttacacccgcgccaccaccggcgcggtgcggccggtctcggtgtcgttattcgacgcgttggtcgaatggatgtcccaacccctctactacggccgctacgggggaaaggcgccaccacgcaccggcgcgcggcatccgacgatcgccccgtacggcccggtgaccgcgggcgacggcggcaccgtgttgctgggcgtgcagaattcagccgaatggctgaggttctgcgaaatcgtcttggaaagaagagatctcgtcgacgaaccgcggttcgctacgaaccctgatcgggtagcgcaccgcgatgagttggagtcgattatcaccaccgtggcggcgcggctgagcgctgaagaactcgaagcgcgcctgcagagcgccggcgtggcgcacgcgcgcatgaacggtgttgatcacttgtggctacatccggtactcgtcggccgggatcgatggcacgagattcagacgcccggcggtccggctgccgcgctgccgccgcccgcgggcctggcaggcgtcgatccggtgattggtgacgtgcccgcgctgggcgagcacagccgaaagattttgcacgagttgggatattccgcacaggcgaccgacgaactcatcgccgctggtgttacgacggca

SEQ ID NO: 25605 - DNA, 4833 bp, Mycobacterium avium
gtgaagattcccggcgtttccagcgtcgtcgctggggtggctggtggggccgcacaggtggtgcgggccggcgtatccaccgcggcgggagccgccggtgccctgcagacgttggccagcccggtggccgagctcgccggcccggtgatccagtcgatggcgcagaccaccggccgggccatcgggttggacggctcggccgacggcgcgcccgcgatcgtgccgccggtgcgctggcacagcgggcggcgcgtgcacctggacctggacccgctgctgcccttcccccgctggcacgagtacgcgccggccgtcgaggagccggtgcgcaggatcccgggggtggccaaggcgcacgtcgagggctcgctgggccggctggtggtcgaactcgccgacgacgccgacaacgccgccgtgctggacgaggtgcgctccaccgtggcctccgtcgccgcggacatcagctggtccaaggcggaggcggccccgccgtcggcgccgttcgccgacccgggcaacccgctggcgatcctggtgccgctcaccgcggcggcgctggatctggtggccatgggtgcggcggtcaccggctgggtgacccggctgcccgccgcgccgcaaaccacccgggccgcggccgcgctgatcaaccaccaaccgcgcatggtgtccatcctggaggcgcggctgggccgggtgggcaccgacatcgcgctcgccgcgacgacggccgccgcgcacggcctcacccagtcgttcggcaccccgctgctcgacctgacccagcgcaccctgcagatttccgaggcggcggcacaccgccgggtgtggcgggaccgcgagccacagctggcctcgccggaccggccgcaggccccggtggtgccggtcatctcgtcggccaagtccgaggtgccccggcacagctgggcggccgcggccgccggtgaggcgtcgcacgtcgtggtcggcgggaccatcgacgccgcgatggacaaggcgaagggctcgatggcggggccggtggaaagctacgtcgactccgcggccaacggctcgttgatcgccgcggtgagcgcgctggtggccggcggcggcaccgaggacgcggcggcggccatcgaggccggggtgccgcgagccgcgcacatgggtcgccaggcgttcgccgcggtgctgggtcgcgggctggccaactccgggcagctggtgctcgaccccggcgcgctgcgccgcctggaccgggtcaaggtggtggtcatcgacggcgccgcgctgcgcggcgaccaccgcgccgtgctgcgggtccgcggcgaggcgcccggctgggacgacgaccgcgtctacgaggtcgccgacgcgctgctgcacggcgaggaggcccccgagcccgaccccgacgagttgcccgcgaccggcgcccggctgagatgggtgccgtcccaaggaccttcggccatgcccgcgcagggcctggaaagcgccgacctgatcgtcgacggcgaccgcgtcggccgcgtcgacgtgggctgggaggtcgacccgtacgcgattccgctgttccagaccgcgcaccgcaccggcgcccgggtggtgctgcgccacgtcgccggcaccgaggacctcaccgccagcgtcggcgccacgcatccgcccggcaccccgctgctgaacgtggtccgggagctgcgcgccgaccgggggccggtgctgctgatcaccgcgctgcaccgcgatttcgcgtcgaccgacaccctggccgccctggccatcgcggatgtcggtgtggcccttgatgatccgcgcgccgccacggcctggaccgccgacatcatcaccggcaccgacctggccgacgcggtgcggatcctgtcggcgatcccggtggcccgctcggccagcgagtcggcggtgcacctggcccagggcggcaccacgttggccgggctgctgctggtcaccggtgagcaggagaagggcgccagcccggtgagcttccggcgctggctcaacccggtcaacgccgcggcggccaccgcgctggtggcgggaaccttctcggccacccgggtgctgcggctgcccgatcccactccgcaaccgctgaccgcctggcacgcgctggatcccgagatcgtctactcccggctggccggcggcgcgcggccgctggccgtggagaccgagccgtcgtggcggcgccgcctcgacgacctgtcctacagcccggccctggcgccgctgcgggcgccgctgcagaacgtgctgcggctggcgtcggccacccgcaccgagctggrcgatccgctgacccccatcctggccgtcggcgcggcggcctcggcgatcgtcggcagcaacatcgacgcgctgctggtcgccggcgtcatgaccgtcaacgcgataaccggtggggcgcaacgacttcgggccgagtcggcggccgccgagctgttcgccgagcaggaccagatggtgcgccgggtggtggtgccggcggtggcgaccacccgccgccggctggaggccgcccggcacgccacccgcaccgcgacggtgtccgccaagtcgctgcggcccggcgacgtcatcgacctggccgcaccggaagtggtgcccgccgacgcccggctgctggaggccgaagacctcgaggtcgacgagtcgctgctcaccggggagtcgctgccggtggacaagcaggtggagcccgtcgccgtcaacgaccccgaccgcgccagcatgctgttcgagggcagcaccatcgtggccgggcacgcccgggcgatcgtggtggccaccggcgtggggaccgccgcgcaccgcgccatctcggccgtcgccgacgtggaaaccgcggccggggtgcaggcccggctgcgcgagctcaccagcaaggtgctgccgctgacgctggccggcggtgccgcggtgtcgacgctggcgctgctgcgccgcgcgtcgctgcgccaggcggtggccgacggcgtggcgatcgcggtggccgccgtccccgaggggctgccgctggtggccaccctgtcccagctgtcggccgcgcagcggctgaccgcccgcggcgccctggtccgcgcgccccgcaccatcgaggcgctgggccgcgtcgacaccatctgtttcgacaagaccggcacgctcaccgagaaccggctgcgggtggtgtgcgcggtgcccgacgacgtcaacccgcacgacccgttcccggagctgaccgccccgcagtcggcggagctggtgcgggccgccgcgcgggcgtccgcccggccgcaggaggggcaggggcatgcgcacgccaccgacgaggcgatcctgaccgccgcgagttcgctgaacgggcaacgggattcggactggtcgatgatcgccgaggtgccgttcgagtccagccgcggcttcgccgccgcgatcggcaccgtcggcaacgccaacgggaacccctcggacacaccggtgctcatcctcaagggggcgcccgaggtgatcctgccgcgctgccggttcgccgacccggaggccgaccagcagcgggccgaggcggtggtgcgcggcctggccgaacagggcttgcgggtgctcgcggtggcgcagcggggctggaagcacgacaccgacgacgacgacaccgacgccgacgcggtggacgccgccgcgcacaacctggaactgctcggctacgtcggtctggccgacaccgcccgcgcgtcggcgcgcccgctgatcgaggcgctgctggacgccgagcgtgacgtcgtgctgatcaccggcgaccacccgatcaccgcgcgggcgatcgcccgccagctgggcctgccggccgacgcccgggtggtcaccggcgccgagctggccggcctggacgaggacgcgtgcgccaagctggtcgccgacgtgcaggtgttcgcccgggtcagcccggagcagaaggtgcagatcgtggccgccctgcagcgctgcggacgggtgaccgcgatggtcggcgacggcgccaacgacgccgcggcgatccggatggccgacgtcggcatcggggtgagcgggcgcggttcgtcggccgcccgcggcgcggccgacatcgtgctgaccgaccaggacctgagcgtgctgctggacgccctggtcgagggccgcagcatgtgggccggggtgcgcgacgccgtcacgatcctggtcggcggcaacgtgggcgaggtgctgttcaccatcatcgggaccgccttcggcgccggccgggccccggtgggcacccggcagctgctgctggtcaacctgctcaccgacatgttccccgcgctggcggtcgcggtcacctcgcagtacgtcgaacccgacgaagccgagtacccctccgccgcggacgccgaggccgcccggcgcgagcaccgccgcgcggtgctgaccggacccaccccctcgctggacgccccgctgatgcgccagatcgtcacccgcggcgcggtcaccgcggccggggcgaccgcggcctgggccatcggccggtggaccccaggcaccgaacgccgcacggcgacaatgggtttgaccgcgctggtgaccacccagctggcgcagacgctgctgacccgccggcacagcccgctggtggtggcgaccgcgctgggcagcgcgggggtgttggtcggcatcgtgcagaccccggtgctcagccagttcttcggctgcacgccgttggggccggtcgcctggaccggggtgctgggttccaccgcgggcgccaccgcgatctcggcgctggcccccaactggctggccaaacaggtcgccgccctcgagcccggccagcaggatgcc

SEQ ID NO: 25606 - DNA, 594 bp, Mycobacterium avium
gtgagcgccccgcggatcggggtgctggcgctgcagggcgacacccgcgagcatctggccgcgctgcgcgaggccggggccgagtcgatgccggtgcgccggcgcggcgagctcgaggcggtcgacgggctggtcattcccggcggggaatcgaccaccatgagccacctgctcaaagacctcgacctgctggagccgctgcgggggctgctggccgacggcctgcccgcctacggcgcctgcgccgggatgatcctgctggccagcgagatcctggacgccggcgccggcgggcgggaggcgctgccgctgcgggcgatcgatatgacggtgcgccgcaatgcttttggacgccaggtcgactcgttcgagggtgacatcgcgttcgcgggactggacgtgccggtgcgcgcggtgttcatccgcgcgccctgggtggagcgcgccggcgacggcgtcgaggtgctggcccgcgccgccggtcacgtcgtcgcggtgcgccagggcgccaggctggccacggcgtttcaccccgagatgaccggcgaccggcgcatccaccggctgttcgtcgacctggtcaccggggtggtc

SEQ ID NO: 25607 - DNA, 909 bp, Mycobacterium avium
gtgaacaccgcccattcaccggacggcagcgggcgaaccgggaccgcgcgggtcaagcgcggcatggccgaaatgctcaagggcggcgtcatcatggacgtcgtcacccccgagcaggccaagatcgccgagggcgccggcgccgtcgccgtgatggccctcgagcgggtgcccgccgacatccgcgcccagggcggggtgtcgcggatgagcgacccggacatgatcgagggcatcatctccgcggtcaccatcccggtgatggccaaggcccgcatcgggcatttcgtcgaggcgcagatcctgcagagcctgggcgtggactacatcgacgagtccgaggtgctcacccccgccgactacacccaccacatcgacaagtggaagttcaccgtgccgttcgtgtgcggggcgaccaacctgggcgaggcgttaagacgcatcaacgagggcgcggcgatgatccgctccaagggtgaggccggcaccggcgacgtctccaacgccaccacccacatgcgggcgatcggcggcgagatccgccgcctgatgtcgctgtcggaagacgagttgtatgtcgccgcaaaggaattgcaggccccctacgaactggtcgtggaggtggcccgggccggcaagctgccggtcaccctgttcaccgccggcggcatcgccaccccggccgacgcggcgatgatgatgcagctcggcgccgagggcgtgttcgtcggctccggcatcttcaagtccggcgaccccgcccagcgcgccgccgcgatcgtcaaggccaccaccttctacgacgaccccgacgtgctggccaaggtgtcacgcgggctgggcgaggcgatggtcggcatcaacgtcgagcagatcgcgcagcccgaacggctggcggaacgcggctgg

SEQ ID NO: 25608 - DNA, 1023 bp, Mycobacterium avium
atggcagctcagatgcgtgaacccaaagtcgttgtgctcggaggcggctcctggggcaccaccgtggcgtcgatctgtgcgcgccgcgggccgacgctgcagtgggtgcgctcgcgggagaccgccgacgacatcaacgagaaccaccgcaacagccgctatctgggcaacgacgtggtgctgagcgacacgctgcgcgccaccaccgatttctgcgaggcggccaacaccgccgacgtggtggtgatgggggtcccctcgcacggctttcgcggcgtactcaccgaactggcgcgggaattgcggccgtgggtgccggtggtgtccttggtcaaagggctcgagcagggcaccaacatgcggatgtcgcagatcgtcgaggaggtgctgcccggtcatccggcgggcatcctggccgggccgaacatcgcgcgcgaggtggccgagggctacgccgccgcggcggtgctggcgatgcccgaccagcatctggcgacccggctgtccgggctgttccgcacccggcggttccgcgtctacaccaccgacgacgtcgtcggggcggagatggccggggcgctgaagaacgtgttcgccatcgccgtgggcatggggtattcgctgggcatcggcgagaacacccgcgcgctggtgatcgcccgcgcgctgcgcgagatgaccaagctgggggtggcgatgggcggcagccccgacaccttcccgggactggccggactcggcgacctcatcgtcacctgcaccagccagcgcagccgcaaccggcacgtcggcgaacaactgggcgccggcaaaccgatcgacgagatcatcgcgtcgatgaaccaggtcgccgagggcgtcaaagcggccagcgtgatcatggagttcgccaacgagttcggcctgaccatgccgatcgcccgcgaagtcgatgcggtgatcaaccacggctcgacggtcgagcaggcctatcgggggctgatcgccgaggttcccggccacgaggtgcacggctccggcttc

SEQ ID NO: 25609 - DNA, 2181 bp, Mycobacterium avium
gtgatcggctccgatcccggcttgctgcggctgcgcatggcgactcggaccacggccgcgctcgggctgtcactgctggcgctgtggctgctgaccagggcgacgggacagccgttgaccgtcgcgttgctgggtgtggtgatcaccatggtcgcgtcgcgctcggtcaacgagcccgatccgcgccagcagcggatcaccatggcgctgttgccggttccggccgcggtggccatcacggccgctgcggtgctggcgccgcacccggtggccggcgacgtggtgttcgtgctgatcgtgttcgcggcggcctacattcgccgcttcggcgcgcggggccgcgcgctgggcatggtcgcgttcatgtcctacttcttcacgctgtatctgcgtgcccgggtctcggagctgccctggatgatcggggcggtcgcggtgggcacggtgtgcacgtatgtgatgaccagccatgtgctgcccgaccggccggagcgggtgctgcgggccaccatccgggcgctgcgggcccgcatggcgatcgtgatcgacaccaccgccgaggcggtgcgcaccggccggctggacgagcggcggcgccggcgcatgcgggcccgcaccgtccggctcaacgagaccgccctgatggtgcagagccagatcgaggacagggccgacccgggcacgctgtggcccggagtcaccgccgaacagctggccccctggctgttggacgccgagctggccatcgagtgggtggcgacggccgggcggcgggccgcggccctgggcgccgagttacccgaggccgtgcgcgccgaattggtctcggcgctaacccaattgggccgcgcgatccggttgcccgaaccgggtggcctgcgcgacgccgccagccgagcgcgccggctgctggacgcggccaccgacgaccggcccgccggcaccgaggtgcgccggctggccctggcgatcatcaacgccgcgacggcgaccgccgacgtgcgggccatcgtcgacggggctgccggcgccgcggtgcccgacgtcgccggcagcgagcgcccgccggcggccgccggcgtcgcggccgaggagcccgccgagcaagaagaagaacaaccgkcgggtctgcggcccaccacccgtcaggccatccaggtgtcggtggcggcgtcgctggccatcatcaccggcgagctggtgtcgccggcccgctggtattgggccgtgatcgccgcgttcgtcatcttcgccggcaccaactcgtggggcgaaaccctgaccaagggctggcagcggctgctcggcacgatgctcggcgtgcccgccggcgtgctggtggccacactgctgaccggacacgaggcggccgcgctggccggcatcttcgtgtgcctgttctgtgccttctatttcatgacggtgacctacagcctgatgaccttctggatcaccaccatgctggcgctgctgtacgggctgctcggccagttctcgttcggggtgctgatgcttcgcatcgaagagaccgcgctcggcgcggtaatcggtgcgacggtggccgtcgtggtgctgccgaccaacacccggaccgcgatccgcgccgacacccgggcctttctgaccagcctgtccgcgctgatcgaggcctgcgcggcggccatgtccggcggcgcggccagcccgtccgagcaggcacgtcagctggaccgcgacctgcagcagttccgggtgaccgccaagccgctgctggccggtgtcgccgggctcgcgggccgccgcggcatccgccgcgcgctgcggatcttcaccgcctgcgaccggtacggccgggcgctggcgcgcagcagcgagcagtaccgcggctcgcccgggcccggcccccaactggcgcaagccttttcggcggccgcggcccagacgcggcgcaacctcgacgcgttactggaggcgatcgacagtggccacccgccgacgttggtctcggcggccgacgaactcgacgccgcggaaaccgcggcccgccagcacgacagcgacggtgacggcgagacacggcccgacgtccggcgattcctgaccgccgtgcacgccctgcgccagatcgagcgggccgtcatcagcacggccaccaatctcggtggccgcgaagacgtcaggacggccaccgccgcgccgcgc

SEQ ID NO: 25610 - DNA, 1388 bp, Mycobacterium avium
atgcaagacattcaacgggcggacgatgccctgcccaccgcgtcgcgcgccgagcggttgcgcggcgtcatccggcacgacctgccctcctcgctggtggtgttcctggtggcgctgccgctgtcgctgggcatcgcgatcgcgtccaacgccccggtgctggccggtctgatcgcggccatcgtcggcggaatcgtcgtcggcgccctgggcggatcgccgctgcaagtcagcggcccggcggccgggctgaccgtcgtggtcgccggtctggtctccgacttcggttggggcgtcacctgtttcatcaccgtcgcggccggagccgtgcaggttctgttggggctcagccgggtggcgcgcgccgccctggcgatctcgccggtggtggtgcacgccatgctggccggcatcgggatcaccatcgccctgcagcagacgcacgtgctgctgggcgggaaatccaagagcacggcctggcacaacctgatcggcctgccggggcagatcatcggcgcgcaccggcccggggtgctgctgggcgtgctggtgatcgtcatcctggtcgcctggcgctgggttcccgccaaggtgcgccgcgttcccggcccgctggtcgccatcgtggcggtgacggtgatctcggtggtctttccctttcacgtgcgccggatcgacctcgacgggtcgccgctggatgcgctgcagctgcccgacctgccgcacggcaactggagcggtgtcgccgtcggggtgatcaccgtcgcgctgatcgccagcgtcgagagcctgctgtccgcggtgtcggtcgaccggatgcacaacgggccgcgcaccgacttcaaccgcgaattggtgggacagggcgcggccaacatgatctccggcgccgtcggcgggctgccggtcaccggggtcatcgtgcgcagctcgaccaacgtcaacgcgggcgcccgatcccgcgcctcggcgatcatgcacggcgtgtggatcctgctgttcaccattccgttcgccgggctggtcgacgagatccccacggccgccctggccgggctgctcatcgtcatcggcatccagctgctcaagccggcgcacatcgaaaccgcaatgaagcacggcgatctcgcggtgtacgtggtgacggccgtcagcgtcatcttcctcaacctgctgcacggggtgatgatcgggctggcgctggccatcgcgctgaccggctggcgggtgatccgggccaakatcgaggccgcccagctcgacggcgagtggcgggtgacgatcgagggcgcggcgtgcaccttcctggcgctgccgaggctgacccgggtgctggcgtcggtgccgcggggcgcgacggtgacggtggccatcgcggtgcactacct

SEQ ID NO: 25611 - DNA, 1593 bp, Mycobacterium avium
atgaccgtgctgcagtccaccctcgaccgcgaggccaccgccttcaccgacgcggcgtcggcggcgatggcgaaactcgaggagatcgacaccgaactcgccaacgcgctggccggcggcggaccgaaatacgttgaacgccaccacgcccggggcaagctgacggcgcgggaacgcatcgaactgctggtcgaccaggactcgccgttcctggagctgagccccctggcggcctggggcagctccttcaaggtcggcgccagcaccgtcaccggtatcggcgtggtcgagggcgtcgaatgcatgatcgtggcgaatgaccccacggtcaaaggcggcaccagcaacccgtggaccctgaagaagatcctgcgggccaaccaaatcgccttcgagaaccggcttccggtgatctccctggtggagtccggcggggcggacctgcccacccagaaggagatcttcatccccggcggacggatgttccgcgacctgacccggctgtcggctgccggaatccccaccatcgctttggttttcggaaactccacggcgggcggcgcctacgtcccgggcatgtcggatcacgtggtgatgatcaaggaacgttccaaggtgttcctggccggtccgccgctggtgaagatggccaccggtgaggaatccgacgacgaatcactgggtggggccgaaatgcatgcccgggtctcgggtttggccgactacttcgccgtagacgaactcgacgcgatccgcatcggccggcgcatcgtggcccggttgaactgggtcaagcagggccccacacccaaaccggtcaccgagccgctgttcgacaccgaagagctcatcggcatcgtgcccgccgatctgcgcatcccgttcgatccgcgggaagtgatcgcccgcatcgtcgacggctccgagttcgacgaattcaagccgctgtacggctcgtcgctggtgaccggctgggcccggctgcacggctatccgatcggcatcctggccaacgcgcgcggtgtgctgttcagcgaggagtcgcaaaaggccacccagttcatccagctggccaaccgctccaacacgccattgctgttcctgcacaacaccaccggctacatggtaggcaaggactacgaagagggcgggatgatcaagcacgggtcgatgatgatcaacgccgtgtccaactcgacggtgccgcacatctcgctgttgatcggcgcctcctacggcgcgggccactacggcatgtgcggccgcgcctacgacccgcgtttcctgttcgcctggccgacgtcgaagtccgcggtgatgggcggcgcccagctggccggcgtgctgtccatcgtggcccgcgcggcggccgaggcccgcggccagcagttcgacgagcaggccgacgcggcgatgcgggcggcggtggaaggccagatcgaagcggagtcgctgccgctggtgctgtccggaatgctctacgacgacggggtgatcgatccacgagacacccgcacggtattgggaatgtgtttgtccgccatagccaatggcccgatcgaggggacgtcgaacttcggcgtctttcggatg

SEQ ID NO: 25612 - DNA, 846 bp, Mycobacterium avium
gtgagcaaggttccgacgatcgaactcaacgacggtgcgcgcatcccgcagctcggcttcggcgtgtatcagatcaagcccgacgagactgccgcggcggtgcgggcggctctggatatcggataccgccacatcgacaccgccgaaatgtacggcaacgaacgggaagtcgctcagggtattcgcgacgccgggctggatcgatccgaggttttcgtcaccagcaagctcaacaacggatttcacgaacctgacgccgcgcgccgggcattcgacgccacgctgaaagccttgggctccgactacgtcgacctgtttctgatccactggccgctgcccacgctgtacggcggcgacttcgtttccacctggcgggttttggaggagttcgcccgcgacggccgcgcccgcagcatcggtgtgtcgaatttccaagtcccacacctggagcggctcgccaccgaaaccgacaccgtgcccgccgtcaaccaggtcgaggtgcatccctacttcaccaacgagaaggtccgcggctacgcccgcgagcacggcatcgcgatcgaggcgtggtcgcccatcgcgcagggcgacgtgctcggcgacgcggtcatcaaccgcatcgccgacggtctcggccgcaccgccgcgccggtggtgctgcgctggcacatccagcgcggcgacatcgtctttcccaagacggtcaacccggatcggatgaaatcgaacttcgaactgttcgacttcgagctggacgagcgcgcgatggaggcgatctcggcgctggaccgcggggaatccgggcgacgcggccccaatccggacaccttcgactacataccacgc

SEQ ID NO: 25613 - DNA, 1212 bp, Mycobacterium avium
atgggacccgtgttgcgttggatcaccgccggggagtcgcatggccgcgcgctggtggccgtgctggaaggcatggtcgccggggtggagatcacctccaccgacatctccgaacagttggcccggcgccgcctcgggtacggccgcggcgcccggatgagcttcgagcgggacgcggtgagcgtgctgtccggggtgcggcacggcctcaccctgggcggaccgatcgccgtcgagatcggcaacaccgaatggcccaagtgggaaaccgtgatggccaccgacccggtcgacccggcgcagctggccgacagcgcccgcaacgccccgctgacccggccgcggcccggccacgccgactacgccggcatgctcaagtacgggttcgacgacgcccggccggtgctggagcgggccagcgcccgcgagaccgcggcgcgggtggccgcgggcaccatcgcccggtcgttcctgcgccaggcgctcggcgtcgaggtgctctcgcacgtgatcgcgatcggcccgtcggcgccgtacgaagggccgcccccgggcccgggcgacctgcccgcgatcgacgccagcccggtgcgcgcctacgacgaggcggcggaacaggcgatgatcgccgagatcgaggccgccaagaaggacggcgacaccctgggcggcgtggtcgaggtggtggcgctggggctgcccgtcgggctgggctcgttcaccagcggcgacaaccggctggacggccagctggccgccgcggtgatgggcatccaggcgatcaagggggtggagatcggcgacggtttcgccaccgcccgccgccgcggcagccaggcccacgacgagatgtaccccggccccgacggcgtggtccgctcgaccaaccgggccggcgggctggagggcggcatgaccaacggccagccgctgcgggtgcgcgccgcgatgaagccgatctccaccgtgccgcgcgcgctggccaccgtcgacatggccaccggcgacgaggccgtcgccatccaccagcgctcggacgtgtgcgcggtgccggccgccggggtggtggtcgaggccatggtggcgctggtgctggcccgcgcggcgctgcagaagttcggcggcgactcgctggccgagacccgccgcaacatcgacgcctaccggcgggcggtcgccgagcgcgaggctccggccgcccggggaaccgcg

SEQ ID NO: 25614 - DNA, 468 bp, Mycobacterium avium
gtgagcaaacccctgaggggacgccatcaggcccgcaagcgcgcggtcgacctgctgttcgaggccgaggcgcgggggttgagcccggccgaggtggtcgacgtccggaccggcctggccgacaccaaccccgaagtggcgcccctgcagccgtacacggccgcggtggcccgcggggtgggcgaccacgccgcccacatcgacgacctgatcagctcgcacctgcagggctggacgctggaccggctgcccgccgtggaccgcgccatcctgcgggtggcggtgtgggagctgctgtacgccgacgacgtgcccgagccggtcgccgtcgacgaggccgtccagctggccaaggagctgtccaccgacgactcgccgggcttcgtcaacggcgtgctgggccaggtcatgctggtgacgccgcagatcagggcggccgcccgggcggtgcggggtccccgggacacg

SEQ ID NO: 25615 - DNA, 2085 bp, Mycobacterium avium
ttggctgacatttcggcgatctacgttgccgctcccgaaccggagaccggcaagtccaccgtcgcgctgggcctgctgcaccggctgaccgcgacggtcgccaaagtcggtgtgtttaggccgattacgcgtgacgggcaggaccgcgactacatcttggagctgctgctgtcgcgcaccaccgcggggctgtcctaccagcagtgcgtcggcgtcacctaccagcagctgcacgccgacggcgacgcggcgatcgccacgatcgtcgacgcctaccacgcgatggccgagctgtgcgacgtggtggtcatcgtcggcagcgactattccgaactgggacaggcgatccggcccgcggagctgtccaccaacgcccggatcgcggtcaacctcggtgcgccgatcctgctgacggtcagcggcaaggggcgcaccgccgccgaggtcgccaccgtcgtgcaggtctgcctggccgagctggacgcccagcacgcgcacaccgcggcggtggtggccaaccggtgcgagccggccgagctggacgcggtggccgaagcgctgcgcggctttccccagcgctgctacgtgctgcccgacgagccgctgctgtcggcgccgacggtgaccgaactggaaaaggcggtcgccggttcgccggtcagcggcgaggagtcgctgcgcgagcgcgaggtcaccggcatcctggtcgccgggatgaccgccgaccacgtgctggagcgcctcgcggacggcatggccgtgatcacccccggcgaccgctccgacgtggtgctcgccgtggccagcgcccatgccgccgaaggctttccgtcgctgtcgtgcatcgtgctcaacggcgggttcgcgctgcatccgtccatcgcggcgctggtggccgggctgcggctgcggctgcccatcgtcgccaccgcgctgggcacctacgacaccgccagcgcggcggccgcggcccgcggcagggtgacggccacctcacagcgcaagatcgacaccgcgctggagctgatggaccggcacgtcgacatcgcggatctgcttgaacagcttgccattccgattcccaccgtgaccacgccgcagatgttcatccatcagctgaccctgcaggcgcgcgccgaccgcaagcacatcgtgctgcccgagggcgacgacgaccgcatcctgcgcgccgccggcagggtgctgcagcgccgcgtcgccgacctgaccatcctgggcgacgaggcccggatccggcagcgctcgggggaactcggggtggacctgagcgacgtgaaggtcatcgacccgcgcaccagcgcgctgcgccccgagttcgcgcagcagtacgcgcagctgcgcaaggccaagggcgtcaccatcgagcaggcccgcgaaatcatgcgcgacgcaacgtacttcggcaccatgctggtgtacacctcccaggtcgacggcatggtgtccggcgccgcccacaccaccgcacataccgtgcgcccggccttcgagatcatcaagacggtgccggacgtctccaccgtgtccagcatcttcctgatgtgtctgccggaccgggtgctggcctacggcgactgcgcgatcatccccaacccgacaccggagcagctggccgacatcgcgatctcctcggcgcgcaccgccgcccagttcggcatcgaaccgcgggtggccatgctgtcctactcgacgggtgactccggcaccggagccgacgtcgaaaaggtgagaacggcaacgcaattggtgcggcagcgcaaccccgacctgccggtcgagggccccatccagtacgacgccgccatcgaaccgtcggtcgccgccaccaagctgcgcgactcgccggtggccggtcgggccaccgtgttgatctttcccgacctcaacaccggcaacaacacctacaaggcggtgcagcgcagcgccggcgcgctggccatcgggcccgtgctgcagggcctgcgcaagccggtcaacgacctgtcgcggggtgcgctggtcgaagacatcgtgaacacgattgccatcaccgcgattcaggcgcaggggctgcccggtggacgg

SEQ ID NO: 25616 - DNA, 1008 bp, Mycobacterium avium
atggccgaccaagagatgacgatgcgcgaggcgctcaacctcgcgctggatcaggcgctcgccgccgacgagcgagtcttcctgctgggcgaggacattgccgatcccggcgcttccggaccgaccgcgggtctgtcgacgaaatacggctgcgaccgggtgctggacacaccgatctcggaggcggcgatcgtgggggcggcgatcggcgccgccatcgacggcctgctgccggtcgccgagatcatgatcatggatttcatcggcatcgccgccgaccagctgatcaacaacgccgccaagctgagattcatgacggccggacgcacgtcggcgccgctgaccgtgcgcacccaggtgtatgccggattatccaccggcgcaacgcattcgcagagcctggaggcatggttcatgcacatcccgggattgaaggtgatcgtgccggccaccccgcgcgacggcaaggggttgctgagctcggcgatcttcgaccccgacccgtgcctgttcatcgagacgattcggctgcagggcaagaagggcctggtccccgtcgaacccggcttccgcatcccgctgggccaggccgacatcaagcggcccggcaccgacgtcagcctgatcggttacgggcgcccggtgcacgacgcgctggccgccgcggcgatgctgggcgaccagggcgtcagcgccgaggtggtcgacctgcgcaccctggtgccgctggacgtcgacaccgtggtggcgtccgtgcggcgcacccgccgggccgtgatcgtgcacgacgcggtgcaattcgccggtcccggagccgaagtcgcggcgatcctgcactcgcggctgttttcggagctggccgcgcccgtcgaacgggtcgccgcccggttcgtccccaatccggccgcggccgcgctggaggcgcaggtgtacccgtccccggagcgcatcgcggcggcggcgctgaagacgttgggcaggacgctgacgggggccacggcgcatggc

SEQ ID NO: 25617 - DNA, 1716 bp, Mycobacterium avium
gtgcggcctcggtgctcaggtgacccggggagcgtccgagcagtggatgtagacctcgccccgcctggcccgctggccgccggggggttgcgggtcaccgcgctgggcggcatcagcgaaatcggccgcaacatgacggttttcgagcacctgggccggctgttgatcatcgactgcggggtgatgtttcccacccacgacgagcccggcgtcgatctgatcctgccggacctgcggcacatcgaagaccggctcgacgacatcgaggcgctggtgctcacccacgcgcacgaggaccacatcggcggcattccctacctgctcaagctgcggcccgacatcccggtcgtcggttcgaaattcaccctggccctggtcgccgccaagtgccgcgaacaccggctcaagccggtgttcgtcgaggtgtccgaggggcgcaagagcacccacggcgtgttcgaatgcgaatacttcgccgtcaaccactccatccccgacgcgctggcgatcgccgtacacactggcgccggaacggttttgcacaccggcgacatcaagctcgaccagcttcccctggacggccggcccaccgatctgcccggcatgtcgcggctcggtgacgccggggtcgatctgttcctgtgcgattcgaccaacgccgagctgcccggcgtcggcccctcggaaagcgaagtcggcccgaccctgcaccggctgatccgcggcgccgagggccgcgtcatcgtggcctgcttcgcctccaacgtggaccgggttcagcagatcatcgatgccgcagtggcattgggccggcgggtgtcgttcgttggccggtcgatggtgcgcaacatgggcatcgcccgcgaactcggattcctgcgggtggccgacgccgacgtgatcgacatcggcgccgccgagctgatgccgccggagcgggtggtgctgatcaccaccggcacccagggcgagccgatgtcggcgctgtcgcggatgtcgcgcggcgagcaccgcagcatcacgttgaccgcgggcgaccttgtggtgctggcctcgtcgctgatcccgggcaacgaggaggcggtctacggcgtgatcgacgagctcgccaagatcggcgcccgggtggtcaccaacgcccaagcgcgcgttcatgtttcgggccacgcctacgccggtgagctgttgttcctctacaacggcgtccggccgcgccacgtgatgccggtgcacgggacgtggcggatgctgcgggccaactccaagctggcggcccgcaccggcgtgccggaggagtcgatcctgctggccgagaacggggtgagcgtcgacctggtcgcgggcagggcctcgatctccggggcggtgccggtcggcaagatgttcgtcgacggcctggtcgacggcgacgtcggcgacatcacgttgggggagcggctgattctgtcgtcgggtttcgtggcggtgacggtggtggtgcagcgcggcaccgggcgtccggtggcgccaccgcatctgcattcgcgcggcttctccgaggaccccaaggcgctcgagcccgcggtgcgccgggtcgaggaggagctcgaggcgctggtggccgagaacatcaccgaccccagccgcatcgcccagggggtgcggcgcaccgtcggcaaatgggtgggcgaaacctaccgccgacagccgatgatcgtccccaccgtcatcgaggtc

SEQ ID NO: 25618 - DNA, 798 bp, Mycobacterium avium
gtgcccatcccgacgccctacgaggaccttctgcgtctggtgctcgatcggggaacggccaaatccgaccgaaccggcaccgggacgcgcagcctgttcggccagcagctgcgctatgacctgtcggccggcttcccgctgatcaccaccaagaaggtgcatctgaaatcggtggtctatgagttgctgtggttcttgcgcggcgactccaacgtcgactggctgcaccggcacggcgtcaccatttgggacgaatgggcaagcgacacaggcgatctcggaccgatctacggcgtgcagtggcggtcctggccgacgccgtcgggtgagcacatcgaccagatcagcgccgcgctggatctgttgcgcaccgaccccgactcgcggcgcatcatcgtctcggcgtggaacgtcggcgagatcccgcggatggcgctgccgccgtgtcacgcgttcttccagttctacgtggccgacgggcggctgagctgccagctctaccagcgcagcgccgacctgtttctgggcgtgccgttcaacatcgccagctacgcgctgctcacccacatgatggccgcccaggccgggctgtcggtcggcgaattcgtgtggaccggcggcgactgccacatctacgacaaccacgtcgagcaggtccggctgcaactgagccgcgagcccaggccctacccggaactcgttctggcgcatagggattcgatcttcgactacacctacgacgacgtcgtggtgcacaactacgatccgcacccggccatcaaggcccccgtcgcggta

SEQ ID NO: 25619 - DNA, 543 bp, Mycobacterium avium
atgacccgtgccgaggtgggcctggtgtgggcccagtcgacgtctggcgtcatcggccgcggcggtgacatcccgtggaacgtgcccgaagacctgacccggttcaaagaggtgaccatggggcacacggtgatcatgggccggcggacctgggagtcgttgccggccaaggtgcggccgctgcccggccggcgcaacgtggtggtgtcgcgccggcccgacttcgtcgccgagggggcgcgggtggccgggtcgctggaggcggccctcgcgtacgccgggagcgaccccgcgccgtgggtgatcggcggcgcgcagatctatctgctggcgctgccccatgccacccgctgcgaggtcaccgagatcgagatcgacctgcgccgcgacgacgacgacgcgctggcgcccgcgctggacgacagctgggtaggcgagacgggcgagtggctggccagccgctccgggctgcggtaccggttccacagctaccgtcgggacccgcgctcttccgttcgcggctgttcgccctcacgcccgagc

SEQ ID NO: 25620 - DNA, 984 bp, Mycobacterium avium
gtggcaggaccggcccacggcgtttcccgcgcggaaggccgggcgatgacgacggtggcgttggagacccaactgcagggctacctcgaccacctcacgatcgagcggggcgtcgcggcgaacacgctcagctcgtatcggcgcgacctgcgccgctacaccaaacacctgtcggaccgcgggatttcggacctggccaaggtgggcgaggacgacgtgagcgatttcctggtggcgctgcgccgcggcgatcccgacaccggcgccgccgcgctgtcggcggtgtcggcggcccgcgcgctgatcgcggtgcgcggcttgcaccggttcctggcggccgaggggttggccgaactcgacgtcgcccgcgccgtgcgcccgccgacgccgggccgccggctgcccaagagcctgaccatcgaccaggtgctggcgctgctggaggcggcgggcggcgagagccccgccgacggcccgctgaccctgcggaaccgggcgttgctggaactgctgtactccaccggcgcgcgcatctccgaggccgtcggcctcgacgtcgacgacgtcgacacccaggcccggtcggtgctgctgcgcggcaagggcggcaagcagcggttggtgcccatcgggcgtcccgccgtggccgcgctggatgcctatctggtgcgcggccgctcggagctggcgcgccgcgggcgcggcacgccggccatcttcctcaacgtgcgcggcggccggttgtcgcggcaaagcgcctggcaggtgctgcaggacgcggccgagcgcgccgggatcacctcgggggtgtcgccgcacatgctgcggcattcgttcgccacccacctgctcgagggcggcgccgacgtgcgggtggtgcaggagttgctcggccacgcctcggtcacgacgacgcagatctacaccatggtcaccgtgcacgcgctgcgcgaggtgtgggccgaggcgcacccgcgggcgcgc

SEQ ID NO: 25621 - DNA, 741 bp, Mycobacterium avium
atggtcgaagctcagggcatccggctgcaaaaggtgttgtcgcaggccggaatcgcgtcgcggcgggccgccgagaagttgatcgtcgacggccgcgtcgaggtggacgggcaggtggtgaccgagctgggcacccgcgtcgacccggatgccgcggtgatccgagtcgacggggcccgggtggtcctcgacgagtcgcaggtctatctggcgctgaacaagccgcgcggggtgcactcgacgatgtcggacgaccgcggccggccgtgcatcggcgacctgatcgaacgccgagttcgcggcaacaagaacctgtttcacgtcgggcggttggacgccgagaccgaagggctgatcctgctgaccaacgacggcgaactcgcgcaccggttgatgcatccctcccacgaggtgcccaagacgtatctggcgacggtcaccggatcgataccgcgcgggctgggcaagacgctgcgcgcgggcatcgagctggacgacgggatggcgcgggtcgacgagttcgcggtggtggacgccatcccgggcaagacgctggtgcgggtgacgttgcacgaggggcggaatcgcattgtgcgccggctgctggcggccgcgggcttcccggtcgagtcgttggtgcgcaccgacatcgggccgatttccctgggcaagcagcggccgggcagcattcgggcgctgggacgcgacgaggtgggccggctctaccaggcggtcgggctg

SEQ ID NO: 25622 - DNA, 684 bp, Mycobacterium avium
gtgagcgccgacgtcgtggtggccatcgacggccccgcggggaccggaaagtcctccgtctcaaagggattggcgcgcgcgctgggtgcgcgctatctggacaccggcggaatgtaccggatggtgacgctggcggtgttgcgcgccggcatcgacccggccgacgccgacgccgtcgggcgcgccgcgcaggcggtgcggatgtcggtggactatcaccccgacggtgaccgttatttccttggcggagaagacgtttccaccgagatccggggcgacaaggtcaccgcggcggtgtccgcggtgtcgtcgattcccgccgtgcgcacccgcctggtcggcttgcagcgcgaaatggcttccggccccggcagtatcgtcgtcgagggccgcgacatcggcaccgtggtgctgcccgacgcgccggtgaagatcttcctgaccgcctcggccgagacccgggcccggcggcgcaacgaccagaacgtggcggcggggctggccgacgactacgaggcggtgctcgccgaggtccgccggcgcgaccatctggattccacccggcgggtgtcgccgttgcgggcggctcccgacgcggtggtggtcgacaccagtgacatgaccgaggcgcaggtgatcgaccacctgcgggatctggtcaggcagcgaagcgaagtggcgcgg

SEQ ID NO: 25623 - DNA, 1398 bp, Mycobacterium avium
gtgactcacgacggaacatggagcgacgaaagcgactgggaagcggtcgaattcgagctcgacgaggcggcgcaagcgcctcccgcgccggtggtggcggtggtggggcggcccaacgtcggcaagtcgacgctggtgaaccggatcctgggccgccgggaggcggtggtgcaggacgtgccgggcgtcacccgcgaccgggtgtcctacgacgcgctgtggaccgggcgccgattcgtcgtgcaggacaccgggggatgggagcccgacgccaaggggctgcagcagctggtcgccgaacaggcgtcggtggccatgcgcaccgccgacgcggtgatcctggtggtcgacgcgctcgtcggcgccaccaccgccgacgaggccgccgcccggatcctgctgcggtcggggaagccggttttcttggccgccaacaaggttgacagcgacaaggccgaggccgacgcggcgatgctgtggtcgctgggcctcggcgagccgcacccgatcagcgcgatgcacgggcgcggggtggccgacctgctcgacgaggtgctggccgcgctgcccgaggtgtccgaggtggcgcccaggcccggcgggccgcggcgggtggcgctggtgggcaagccgaacgtgggcaagagctcgctgctgaacaagctggccggcgatcagcgctcggtggtgcacgatgtggccgggacgacggtggacccggtggactcgctgatcgagctgggcgatcgggtgtggcggttcgtcgacaccgcgggtctgcggcgcaaggtggggcaggccagcggccacgagttctatgcgtcggtgcgcacgcactcggccatcgacgcggccgaggtggtgatcgtgctgatcgacgcgtcggccccgctcaccgagcaggaccagcgggtgctgtccatggtgatcgaagccggccgggccctggtgttggcgttcaacaaatgggatctggtcgacgaggaccgccgcgagctgctggagcgcgagatcgaccgcgagctggtgcagctgcggtgggcgccgcgggtcaacatctccgcgaaaaccggtcgcgcggtggccaagctggtgccggcgatggagaccgccctggcgtcgtgggacacccggatcgccaccggcccgctgaactcctggctgaaggaggtggtggcggccaccccgccgccggtgcggggcggtaagcagccgcgcatcttgttcgccacccaggccgccgcccggccgccgactttcgtgctgttcaccaccggctttctcgaggccggataccggcgtttcctggagcggcggctgcgcgaggcgttcgggttcgaggggacgccgatccggatcaacgtgcgggtgcgggagaagcgcggggcccggcggcgc

SEQ ID NO: 25624 - DNA, 783 bp, Mycobacterium avium
atgtgggggtcggtgctgggcttggggatgctggctgcgctcaatccggttcgtctgggtctggctctgctgatgatttcgcggccgcggcccgggccgagcctgctggcgtattggatcggcgggctgaccgtgtgcgtgcccgagctgctgatcccggtgctgctgctgaacttcacgccgatgttcggccatccctcgcacgcgtccccgtccacgggctcggccctggggaagattcagatcggcctcggcgtggtggggctgtcgatcgccgcggtgctgaccgtgcgcttcgcggcccgccagcgcgccgccgcgccaccgcccgacgaccggacctcggaactgtcagcggccccgggcgccaccatcgcgatgccgcggctgctgacccgggcgcaggacgtgtcccccgacgaccggtcggtgctgcggcggctgctcgggcggatgcacagcgcgtgggagagcggggcgtcatgggtggcctgggtgatcggcgtcatctccgtgcccgtcgacggtgtgctgttcatcgtcgcgatcatcgcggcctcgggagcctccgtcaccgcgcaggtcagcgcgtcggtggcgttcgtcgtgctgatgtacgccgtggtggaggtcatcctggtcgggtacctggccacaccggggaagacgcagtcgctgctgctggtgctgcacgactgggtgcgcacctaccaccggcagatcctggtcgcgctgttcaccgtggtcggggtgtcccagctggcccaggggctgcacctggtc

SEQ ID NO: 25625 - DNA, 1803 bp, Mycobacterium avium
gtgtgcggagtcaccggggaggtacgactcgacgggcgggcgcccgatgtagccgcggtctcggcgatggccgccgtgctgacaccacgcggccccgacgccggcggcgcctggtcgcagggccgcgtcgcgctcgggcatcgtcgcctcaagatcatcgacctgaccgaagccggcgcccagccgatggtcgactccgagctgggcctgtccatcgcttggaacggctgcatctacaactacaaggaactgcgcagcgagctgtccggctacggctaccggttcttctcgcacagcgacaccgaggtcctgatcaaggcctaccaccggtggggcgacgacttcgtcagccatctgttcggcatgttcgccttcgccatcgtcgaacgcgacagcggtcgggtgctgctcggccgcgaccgcctcggcatcaaacccctctacctgaccgaggacagtcaccgggtccggttcgcctcgacgctgcccgcgctgctggccggcggcggcgtggacacccgcatcgacccggtcgccctgcaccactacatgagcttccactcggtggtgcccgccccggccaccatcctgcgcggggtccgcaaggtgccgcccgcctcgctggtcgccatcgaacccgacggcaaacgcaccgtcaccacctactgggcgcccgatttcacccggcacgccgaccgcgccgactggtccgaacgcgactgggaggacgccgtgctgtccaccctgcgactggccgtcaagcgccggctggtggccgacgtcccggtgggctgcctgctgtccggtggtgtcgactccagcctgatcgtgggtctgctcgccgaagccggccaacacgggctgtccaccttctccatcggcttcgagtcggcgggcggggtgaagggcgacgagttccagtactccgacatcgtggcccagcgcttcgagaccaaccaccaccagatccgcatcgactccgcccggatgctgcccgcgctggacggcgccatcggcgcgatgagcgaaccgatggtcagccacgactgcgtcgccttctacctgctcagccaggaagtggcccggcacgtcaaggtggtgcagtccgggcagggcgccgacgaggtgttcgccggctaccactggtacccgccgatgggcgatccggccgccgccaccctggacggggccgtcgcccagtaccggcgggccttcttcgaccgagacaccgccggcgtcgcgcagctggtcggacccggcatcctcgccccgggcgaccccagcctgcggttcgtcaccgaacacttcgcccaggccggcgccgagaccggcatcgaccgcgcgttgcggctcgacaccacggtgatgctgatcgacgacccggtgaagcgggtcgacaacatgacgatggcctgggggctggagggccgggtgcccttcctcgaccacgagctggtcgagctggccgccacctgcccgccggagtacaagatcgcccacgaaggcaagggtgtgctcaaacaggctgcgcgacgggtcattccgtccgaggtgatcgaccggcccaagggctacttcccggtcccggcgctgacccacctggaaggcccctacctggacatggtccgtgacgcgctgtacgcgccgaccgccaaggaacgcggtctgttcaacaccgacgcggtcgacgcgctgctggccaaccccaacggcaagctgaccccgctgcgcggcaacgagctgtggcagatcgccctgctcgagctgtggctgcagcggcacggtgtgacgggcccggttgca

SEQ ID NO: 25626 - DNA, 963 bp, Mycobacterium avium
gtgccgcgcggtgcggcgcgcggtggaaagcggaccgcagtgaccccggccgagcgcaccgtcctgatggtggtccacaccggccgcgaagaagcaaccgagacggcacgccgagtacagaaggtgctgggcgacaacgggattgcgctgcgggtgctgtccgccgaggcggtcgaccgggggccgctgcacctggcgcccgacgacatgcgggccatgggtgtcgagatcgaggtggtcgacgccgacccgctggccgcccgcggctgcgagctggtgctggtcctcggcggcgacggcacgtttctgcgggccgcggaattggcgcgcaacgccgacatcccggtgctcggcgtcaacctcggtcggatcggttttctggccgaggccgaagccgaggccatcgacaaggtgctggaacacgttgtggcgcgcgactatcgggtggagaaccggatgacgctcgacgtcgtggtgcgccaccacggcacggtgtccgaccacggctgggcgctcaacgaagtcagcctggaaaaaggcccgcggctcggggtgctcggggtggtggtcgagatcgacggccggccggtgtcggccttcggctgcgacggcgtgctggtgtcgacgcccaccggatccaccgcgtacgcgttctccgcgggcggcccggtgctctggcccgacctggaggcaatcctggtggtgcccaacaacgctcacgcgctgttcggtcgccccatggtcaccagcccggccgccaccatcgcgatcgagatcgaggccgacggccacgacgccctggtgttctgcgacggtcgccgcgagatgctgataccggccggcagccggatcgaggtcaaacggtgtgacaccgcggtgaagtgggcccggctggacagcgccccgttcaccgaccggctggtgcgcaagttccggcttccggtgaccgggtggcgcggcaac

SEQ ID NO: 25627 - DNA, 1749 bp, Mycobacterium avium
gtgcgaaagcacccgcaaaccgccaccaagcacctcttcgtcagcgggggcgtcgcatcctcgttgggcaagggattgaccgccagcagcctcggtcagctactgacggcgcgcgggttgtacgtgacgatgcaaaagctcgatccgtacctcaacgtcgaccccggcaccatgaacccgttccagcacggcgaggtcttcgtcaccgaggacggcgccgaaaccgacctcgacgtcggccattacgagcggttcctggatcgcgatctgtccggttcggcgaatgtcactacgggacaggtgtattcgaccgtcatcgccaaggaacggcgcggtgaatacctgggcgacaccgtccaggtgatcccgcacatcaccgacgagatcaagggccgcatcctggcgatggcccagccggacgcgcagggcaaccgccccgacgtcgtcatcaccgaaatcggcggcaccgtcggcgacatcgagtcgcagcccttcctcgaggcggcccggcaggtgcgccacgacctgggccgggagaacgtcttcttcctgcacgtgtcgctggtgccctacctggcgccgtccggtgagctcaagaccaaacccacccagcactcggtggccgcgctgcgcagcatcggtatcacccccgacgcgctgatcctgcgctgcgaccgcgacgtgcccgaggcgctgaagaacaagatcgcgctgatgtgcgacgtggacatcgacggcgtcatctccaccccggacgcgccgtccatctacgacattcccaaggtgctgcaccgcgaggagctcgacgcctacgtggtgcgccggctcaacctgccgttccgcgatgtcgactggaccgaatgggacgacctgctgcgccgggtgcacgagccgcacgagacggtgcgaatcgccttggtgggcaagtacgttgagctttccgacgcctacctgtcggtcaccgaggcattgcgtgccggcgggttcttccaccacgccaaggtcgagatggtgtgggtggcctccgacgactgcgagagcgcgtccggtgccgcggcggcgctgggggaggtgcacggcgtgctgatccccggcgggttcggcatccgcggcatcgagggcaagatcggggccatccactacgcccgcacccgcgggctgccggtgctggggctgtgcctgggcctgcaatgcattgtgatcgaggccgcccgcgcggccggcctggccggcgccaactcggccgaattcgacccggacacaccggatcccgtcatctccacgatggccgaccaggtggacatcgtcgccggcgcggccgacctgggcggcaccatgcgactgggcgcctatcccgctgtgctggaagaggattcgatcgtggcccgggcctacgggacgacgcaggtgtcggagcggcaccggcaccgctacgaggtcaacaacgcctaccgcgacaagatcgccgaaagcggcctgaggttctccggaacatcgcccgacggccatctggtggagttcgtcgaatacccgcccgacgtgcacccgttcatcgtgggcacccaggcccacccggagctgaagagccggcccacccgtccgcacccgttgttcgtcgcattcgtcggggcggccatggattacaaagcgggagaactgcttccggtggaaatccccgagcagtcctccaacggcatccagcaccgggacagcgctgcgcggcccatacctgagcccgcggcccgtggc

SEQ ID NO: 25628 - DNA, 351 bp, Mycobacterium avium
gtgatggcagaagcgaagaaggccgcccccaagaaggccgccacggccgcgtcgaaggacgcagatgccaaggggcccaagcacactccgcccaaccccaaggtgcggggccggcgcaagacccgcatcggctacgtggtgagcgacaagatgcagaagaccatcgtggtcgagctggaggatcgggtgaagcacccgctgtacggcaagatcatccggaccaccaagaaggtcaaggcgcacgacgagaacagcatcgccgggatcggcgaccgcgtctcgctgatggagacccgcccgacgtcggcgaccaagcgttggcggctggtcgaaatcctggaaaaggcgaag

SEQ ID NO: 25629 - DNA, 651 bp, Mycobacterium avium
atgaagttcgtcgacgacccggaacaggcggtgctggacgccgccaaggacatgctgcgccgcggcctggtggagggcaccgccggcaacatctcggcgcgccgctccgacggcaacatcgtcatcacgccatcatcggtggactaccgcgacatgcagctcgacgacctggtgctgatcgaccccgccggttcggtgctgcaggccgcgcagggccgctcgccgtccacggagatgcagctgcacctggcctgcttcgccgcgttcgacgacatcggctgcgtcatccacagccatccggtgtgggcgaccatgttcgccattgcgcaccaatcgattccggcgtgcatcgacgagttcgcggtgtattgcggcggcgacgtgcgctgcgccgagtacgccgcctccggctcccccgacgtcggcgccaacgcggtcaaggcgctgcagggccgcggcgccgccctgatcgccaaccacggcctggtggcggtgggcccgcggcccgacaaggtcctgcacatcaccgcgctggtggagcggaccgcccaaatcgtctggggcgcaagggctctcggcggtccggtgccaattcccgaggacgtcaaccgcaacttcgccgcggtgtacggctatctgcgcgccaacccc

SEQ ID NO: 25630 - DNA, 366 bp, Mycobacterium avium
gtgattcagcaggaatcgcggctgaaggtcgccgacaacaccggcgccaaggagatcttgtgcatccgtgtgctcggcggttcgtcgcgacgctacgccggcatcggtgacgtcatcgtcgccaccgtcaaggacgccatccccggcggcaacgtcaagcgaggggacgtcgtcaaggccgtcgtggtgcgcaccgtcaaggagcgccggcgtcccgacggcagctacatcaagttcgacgagaacgccgcggtgatcatcaagcccgacaacgacccgcgcgggacgcgcatcttcgggccggtcggccgggaactgcgcgagaagcggttcatgaagatcatctcgctcgccccggaggtgttg

SEQ ID NO: 25631 - DNA, 315 bp, Mycobacterium avium
atgaaggtccgcaaaggcgacaccgtcctggtcatcgccggcaaagacaagggcgccaagggcaaggtgctcaaggcctacccggaccgcgagcgcgtcctggtcgagggcgtcaaccggatcaagaagcacaccgcgatctcgaccaaccagcgtggcgcccagtccggtggcatcgtcacccaggaagcgcccatccacgtctccaacgtcatggtggtcgactccgacggcaagcccgcccgggtcggctaccgcctcgacgaggagaccggcaagcgcgtccgtatctccaagcgcaacggcaaggacatc

SEQ ID NO: 25632 - DNA, 561 bp, Mycobacterium avium
atgaccacgacagagaaagttcagccgcgcctgaaagagcgctaccgcaacgagattcgcgattcgctgcagcagcagttcggatacgccaacgtcatgcagatcccgacggtgaccaaggtcgtggtcaacatgggcatcggtgaggcggcgcgcgacgcgaagctgatcaacggtgccgtcaacgacctggcgctgatcaccgggcaacggcccgagatccgccgggcgcgcaagtccatcgcgcagttcaagctgcgcgagggcatgccgatcggcgcccgggtcaccctgcgcggggaccggatgtgggagttcctcgaccggctcacctcgatcgcgctgccccgtattcgcgacttccgcgggctctcgcccaagcagttcgacggtgtcggcaactacaccttcgggctggccgagcagtcggtgttccacgagatcgatgtggacaagatcgaccgggtccgcggcatggacatcaacgtcgtcacctcggcgacgactgacgacgaaggacgagcgctgttgcgggccctcggctttcccttcaaggagaac

SEQ ID NO: 25633 - DNA, 1359 bp, Mycobacterium avium
gtgatgcaggaaatcccggctgcgcaggaggaagagttgctttcggctttcatctcatcgctgcggacagtcgacctgagacggaagatcctcttcacgctgggcatcgtcgtcctgtaccgggtcggggccgcgttgccgtccccgggcgtcaactaccccaacgtccagcagtgcatcaaggaagccagcggcggcgcggccgggcagatctactcgctgatcaacctgttctccggcggcgcgttgctcaaactcaccgtgttcgccgtcggggtgatgccctacatcaccgccagcatcatcgtgcagctgctcaccgtcgtcatcccgcgcttcgaggaactgcgcaaggaaggccagtccggtcaggccaagatgacgcagtacacccgctacctggccatcgcgctggccatcctgcaggccaccagcatcgtggcgctggccgccaacggcgggctgctgcagggctgctcactggacatcatcgccgaccaatccatcttcaccctcgtcgtcatcgtgctggtgatgacggccggcgcggcgctggtgatgtggatgggcgagctgatcaccgagcgcggcatcggcaacggcatgtccctgctgatcttcgtcggtatcgcggcgcgcatccccgccgagggcaagaccatcctggacagccgcggcggcatgatcttcgccgccgtgctggtggccgcgctgatcatcatcgtcggcgtggtgttcgtcgaacaggggcagcgccgcatcccggtgcagtacgccaagcggatggtgggccggcgcatgtacggcggcacctcgacgtacctgccgctcaaggtcaaccaggccggcgtcatcccggtgatcttcgcgtcctcgctgatctacatcccgcacctgatcacccagctgatccgcagcggcagcggcggcgtcggcaacagctggtgggacaagttcgtcggcagctacctgtccgaccccagcgacccggtctacatcggcatctacttcgggctgatcatcttcttcacgtacttctacgtgtccatcacgttcaaccccgacgagcgcgccgacgagatgaagaagttcggcggcttcatccccggcatccggccgggcaagcccaccgcggattacctgcgttacgtgctgagccggatcaccttgcccggctccatctacctgggtgcgatctcggtgctgcccaacctgttcctgcagatcggcaacggcggggcggtgcagaacctgccgttcggcggtaccgcggttttgatcatgatcggcgtgggcttggatacggtcaagcagatcgagagtcagctcatgcagcgcaactatgaagggttcctcaag

SEQ ID NO: 25634 - DNA, 543 bp, Mycobacterium avium
gtgagagtcgttttgctggggccgccgggagcgggcaaggggacgcaggcccagaagctctccgagaagctcgggatcccgcagatctccaccggtgagctgttccgcagcaacatcgagaacgggaccaagctggggctggaggccaagcgctacctggacgccggcgacctggtgcccgcggagctgaccaaccagctcgtcgacgaccggctcagcgagccggacgccgccaacggtttcatcctggacgggtttccccgatcgttgcagcaggccaaggcgctgcacgagatgctggaacgccgcggcaccgacatcgacgcggtgctggagttccgggtgtcccaggacgagctgctggcgcggctcaaggcgcgcggccgggccgacgacaccgacgaggtgatcctgaaccggatgaaggtgtaccgcgacgagacggcgccgctgctggactactaccgcgaccagctcaagacggtcgacgccgtcggcaccctggacgaggtgttcgcccgggcgctgcgcgcgctgggcaag

SEQ ID NO: 25635 - DNA, 183 bp, Mycobacterium avium
atggcaaagaaggcactggtcaacaaggccgcacgcaagccgaagttcgcggtgcgcggctacacacgctgcaacaagtgcggccggccgcgcgcggtcttccgcaaattcggtctgtgcaggatctgcctgcgcgagatggcgcatgcgggcgagctgcccggcgtgcagaagagcagctgg

SEQ ID NO: 25636 - DNA, 396 bp, Mycobacterium avium
atgactatgacggacccgatcgcagacttcttgacccgtctgcgcaacgccaattcggcgtatcacgacgaggtgacgttgccgcactccaagctcaaggccaacatcgcccagatcctcaagaacgagggttacatcagcgacttccggaccgaggatgcccgggttggcaagtcgctgatcgttcagctcaagtacggcccgagccgggagcgcagcatcgccggcttgcgccgcgtgtccaagcccggtttgcgggtgtacgcgaaatccaccaacctgccgcgcgttctgggcggcctgggcgtggcgatcatctccacctcctcgggcctgctcaccgatcgccaggcggcccggcagggcgtgggcggcgaagtcctcgcgtacgtgtgg

SEQ ID NO: 25637 - DNA, 537 bp, Mycobacterium avium
atgtcgcgtattggtaagcaaccggttccggtccccgccggagtcgacgtcaccatcgacggccagaaggtctcggtgaagggacccaagggcaccctggatctgaccgtcgccgagccgatcaccgtgtcgcgcaacgacgacggcgcgatcgtggtgacccgccccaacgacgagcggcgcaaccgctcgctgcacgggctgtcccgcaccctggtgtccaacctcgtcaccggcgtgacccagggctacaccacgaagatggagatcttcggcgtcggttaccgggtgcagctcaagggctccaacctcgagttcgcgctgggctacagccaccccgtggtgatcgaggcgcccgagggcatcaccttcgccgtccagtccccgacgaagttctccatcagcgggatcgacaagcagaaggtcggccagatctcggcgaacatccgccgcctgcgccgccccgacccgtacaagggcaagggcgtgcgctacgagggcgagcagatccgccgcaaggtcggaaagacaggtaag

SEQ ID NO: 25638 - DNA, 405 bp, Mycobacterium avium
atggcgcaaacacaagctgacaccgccgcgcgaaagccggtggggcagagcgtatccgcgacccggcgcgtctctcggctgcgccggcacgcgcggctgcgcaagaagatcgcgggtacccccgagcggccgcggctggtggtcaaccggtcggcgcggcacatccacgtgcaactggtcaacgacgagaacggcaccacggtggccgccgcgtcgtcgatcgaggacgacgtgcgcagcctgcagggagacaagaaggcccgcagcgtgcgggtcggccagctgatcgccgagcgggccaaggccgccggtatcgacagcgtggtcttcgaccgcggcggatacacctacggcggacggatcgcggcgctggccgacgccgcccgcgagaacggattgcaattc

SEQ ID NO: 25639 - DNA, 675 bp, Mycobacterium avium
atgatggcggagcagccggccggcggacagggcgccggcgacagccgcgactcgcgcggtgaccgcgacagccgcggtcggcgcggcgacggcggtcgtgggggccgcgaccgcgatggcgacaagagcaactacctggagcgcgtcgtcgccatcaaccgagtctccaaggtggtcaagggcggtcggcgattcagcttcaccgcactggtgatcgtcggcgacggcaacggcatggtcggtgtcggctacggcaaggccaaggaagttcccgccgccatcgccaagggcgtggaggaggcccgcaagggcttcttccgggtgccgctgatccgcgggaccatcacccacccggtgcagggcgaggcggccgccggcgtggtgctgctgcgcccggccagcccgggtaccggtgtgatcgccggcggcgccgcccgcgcggtgctggaatgcgccggggtgcacgacatcctggccaagtcgctgggcagcgacaacgccatcaacgtggtgcacgcgaccgtggccgcgctcaagctgctgcagcggcccgaggaggtggccgcgcggcgcggcctgcccatcgaggacgtggcgccggccggaatgctcaaggcgcgccgggaaagtgacgcgctggccagtgcggcggcggcgagagaggcggcggcgcaa

SEQ ID NO: 25640 - DNA, 213 bp, Mycobacterium avium
atgagtcaactgaagatcacccaggtgcgcagcaccatcggagcccgctggaagcagcgcgagtccctgcgcaccctgggcctgcggcggatccgccactcggtgatccgcgaggacaacccgcagacccgcggtctgatcgcggtggtcagccacctcgtcgaggtggcgccggccgacgcgagctccgcgggcaccggaggtagcaagaaa

SEQ ID NO: 25641 - DNA, 438 bp, Mycobacterium avium
atgacgatcaagctgcacgacctcaagccggcgcgcggatcgaagaccccccgcacccgggtcggccgcggtgagggctcgaagggcaagaccgccggccgcggcaccaagggcaccaaggcccgcaagaacgtgccggtgaccttcgagggtgggcagatgccgatccacatgcggctgcccaagctcaagggattccgtaaccggttccgcaccgagtacgagatcgtcaacgtcggcgacatcaatcgccttttcccgcaaggcggttcggtcggggtggacgagctggtggccaagggcgcggtccggcgcaactcgctggtcaaggttctcggcgacggcaagctgaccgtgaaggtcgaggtgtccgcgcacaagttcagcggcagcgcacgcgagaagatcaccgccgcgggcggctcggtcaccgagctg

SEQ ID NO: 25642 - DNA, 1785 bp, Mycobacterium avium
atgttcgctgtgctgtcctcgatacccggcctgtccaaaggcgccgacgagatccgtgccctggccgggcgcgtcgacaccgcccgccatcacggcgtgcccaacggctgtgtgctcgagctggatctgcggtcgatgccgccggagacgtccggcttcgacccgctggcgctcgtcaccggcggcagccggtcggcatcgctgcgcgacacggtggacgccatccaccgggcggccgaggacccgcgggtggccgggctgatcgcccgggtgcagctggcgccgtcgccgtcggccgcggtgcaggagctgcgcgaggcgatcgtcgccttcaccgccgccaagccgtccctggcctgggccgagacctatccgggcacgctgtcgtactacctggcgtcggcgttcggcgagatctggatgcagcccggcggcagcgtcgggctgatcggcttcgccagcaacgccaccttcctgcgcgacgcgctcgacaaggccggcatcgaggcccaattcgtcgcccgcggcgaatacaagtccgcggtaaaccgtttcaccgaacacggcttcaccgaggcgcaccgcgaggccgttacccggatgctggacagcgtccaggaacaggtgtggcaggcggtcgccgaatcacgcaagctcgacaccgacgcgctggacgcgctggccgaccgcgcgccgctgctgcgccaggacgcgctggactccggcctggtcgaccggatcggcttccgcgaccaggcgtacgaccggatcgcagaactcgttggcgtacaagatgtttcaccggacaccgagccgccccggctgtatgtgtcgcgctacgccggcgcggcccggtcccggctgtccccgccggtgccctcgctaccggggcgccgccgcccaccgacggtggcggtcatcaacgtcgacggcaccctcgtcgacgggcgcggcgggccccatttcctgccgttcggcgccgccaccgtgggcagcgacaccatcgcgccggcgctgcgggaggccgccgccgacgatgcggtgtcggcgatcgtgctgcgggtcaacagccccggcggctcggtcaccgcgtcggaaaccctttggcgcgaagtgaaaagggcccgtgaacgcggcaagccggtggtggcgtcgatgggtgcggtggccgcctccggcggctactacgtgtcggtggccgccgacgcgatcgtcgccaacccggcaacgatcaccggttcgatcggcgtcatcaccggcaagctggtgatccgcgacctgctggggcggctgggcgtcgggtcggacaccgtgcgcaccaacgccaatgccgacgcgtggtcgatcgacgcgccgttcaccccggagcagcgcgcccaccgcgaggccgaggccgacctggtgtacaccgacttcgtgtcccgggtggccgagggccgcaacctgaccacggacgccgtcgaacgggtggcccggggccgggtctggacgggcgccgacgcccacgagcgggggctggtcgacgaactgggcggctttcgaatcgcggtgcggcgggccaagattctcgccgggctggacgaggacgccgacgtgcgcatcgtcacctatccgagcggctcgctgctggacgtactgcggccgcgggcctcgtcgcaaccggcggcggtgtcgctgcccgacgcgctgggcgccctgacggtcaagatcctgggcgcgatcctggacaacgtcgagcggtcctgcagcggcgccagcgcgctgtggctggggccgtcgcggctc

SEQ ID NO: 25643 - DNA, 303 bp, Mycobacterium avium
gtggcgggacagaagatccgcatcaggcttaaggcctacgaccatgaggctatcgacgcctcggcgcgcaagatcgtcgagaccgtcgtccgcacgggtgccagcgtcgtagggccggtgccgctgccgaccgagaagaacgtgtattgcgtcatccgctccccgcacaagtacaaggactcgcgggagcacttcgagatgcgtacgcacaagcggctgatcgacatcctcgacccgacgccgaagaccgtcgacgcgctgatgcgcatcgaccttccggccagtgtcgacgtcaacatccag

SEQ ID NO: 25644 - DNA, 651 bp, Mycobacterium avium
atggcgcgtaagggcattctcggtaccaagctgggcatgacgcaggtattcgacgagaacaacagggtcgtgccggtgacggtggtcaaggccgggccgaacgtggtgacccgcatccgcacgcccgagcaggacggctacagcgcggtgcagctggcgtacggcgagatcagtccgcgcaaggtgaacaagccggtgaccggccagtacgccgcggcgggcatcaacccgcgccggtttctggccgagctgcggctggacaacccggacgcggcggccgaataccaggtcggccaggagctgacggcggagatcttcaccgacggcagctacgtcgacgtcaccggaacctccaagggcaagggcttcgccggcaccatgaagcggcacggcttccgcggtcagggcgccagccacggcgcccaggcggtgcaccggcggccgggttccatcggcggctgcgccacccccgcccgggtgttcaagggcaccaggatggccggccggatgggcaacgaccgggtgacggtccagaacctgttggtgcacaaggtcgataccgagaacggcgtgctgctgatcaagggcgcggtccccggccgcaccggcggactcgtcatggtccgcagcgcggtcaaacgaggtgagaag

SEQ ID NO: 25645 - DNA, 651 bp, Mycobacterium avium
atggcactcaagcttgacgtgaaggcgccgggcggcaaggtcgagggttcgatcgagctgccggccgaattgttcgacgcccccgccaacatcgcgctgatgcaccaggtggtgaccgcgcagcgggcggcggcgcgtcagggcacgcactcgacgaagacgcgcggcgacgtcagcggcggtggccgtaagccgtaccggcagaagggaaccggccgggcccgtcagggttcgacgcgcgctccgcagttcaccggcggtggcgtggtgcacggccccaagccgcgcgactacagccagcgcacgcccaagaagatgatcgccgccgcgctgcgcggcgcgctgtccgaccgggcccgcaacgggcgcatccacgcgatcaccgagctggtgtccggccagaccccgtcgaccaagagcgccaaggcgttcctgggcacgctgaccgagcgcaagcaggtgctggtggtgatcggccgcagcgacgaagccggcgccaagagcgtgcgcaacctgcccggtgtgcacatcctggctcccgaccagctcaacacctacgacgtgctgcgcgccgacgacgtggtgttcagcgtcgaggcgctgcgcgcctacatcgccgccaacaccggtactcccgaggaggtttcggcc

SEQ ID NO: 25646 - DNA, 300 bp, Mycobacterium avium
atggcgaccgtcacggacccccgcgacatcatcttggctccggtgatctcggagaagtcctattcgttgctcgacgacaacgtgtacacgttcgtggtgcaccccgactcgaacaagacgcagatcaagatcgccatcgagaagatcttctcggtcaaggtcgcctcggtgaacaccgcgaaccggcagggcaagcgcaagcgcacccgcaccggtttcggcaaacgcaagagcaccaagcgggccatcgtcaccctggcgccgggcagcaagccgatcgatctgttcggggcaccggcg

SEQ ID NO: 25647 - DNA, 840 bp, Mycobacterium avium
atggcaattcgtaagtacaagccgacgagcccgggccgtcgcggcgccagcgtgtccgatttctccgaggtcactcgttccaccccggagaagtcgctggtgcgtccgctgcacggtcacggtggccgcaacgcgcacggccgcatcaccacccgccacaagggcggcggccacaagcgcgcctaccgggtgatcgacttccgccgcaacgacaaagacggcgtcaacgccaaggtcgcgcacatcgagtacgaccccaaccggaccgccaacatcgcgctgctgcacttcctggacggcgagaagcgttacatcattgccccacagggactctcgcagggcgacgtggtggagtcgggtcccaacgccgacatcaagcccggcaacaacctgccgttgcgcaacatcccggccggtaccgtgatccacgcggtggaactgcggcccggcggtggcgccaagctggcccggtcggccgggtccagcatccagctgctcggcaaggagggcagctacgcgtcgctgcggatgccgtccggcgagatccgccgggtcgacgtgcgctgccgcgccaccgtcggcgaggtcggcaacgccgagcaggccaacatcaactggggcaaggccggccgcatgcggtggaagggcaagcgcccgtccgtccgcggtgtggtgatgaacccggtggaccacccgcacggtggtggtgagggtaagacctccggtggtcgccacccggtgagcccctggggcaagccggagggccgcacccgccacccgaacaaggccagcaacaaactcatcgtccggcgccggcgcaccggcaagaagcacggtcgc

SEQ ID NO: 25648 - DNA, 279 bp, Mycobacterium avium
atgccacgcagcctgaagaagggcccgttcgtcgacggccacctgctcaagaaggtggacgcgcagaacgagaagaacaccaagcaggtcatcaagacatggtcgcggcgttccacgatcattcctgacttcatcgggcacaccttcgccgtgcacgacggacgcaagcacgtgccggtgttcgtcaccgaggcgatggtcggccacaagcttggtgaattcgcgcccacccgcaccttcaaggggcacatcaaggacgaccggaaggccaaacggcga

SEQ ID NO: 25649 - DNA, 540 bp, Mycobacterium avium
atgaccacaacggaattcccttcggcggtggccaaggcacgcttcgtgcgggtgtcgccgagaaaggcacgccgggtgatcgacctggtgcgcggccgctcggtgaccgacgcactcgacatcctgcggtgggcgccgcaggccgccagtgaaccggtggccaaggtgatcgccagcgccgcggccaacgcgcagaacaacaatgggctggacccggccaccctggtggtcgccaccgtctacgccgacgagggcccgaccgccaagcgcatccgtccgcgcgcgcaggggcgtgcgttccgaatccgcaagcgcaccagtcacatcaccgtggtggtggaaagccggccggccaaggaccagcggtcggcgaagtcgtccaggacccgccgcgccgaggccagcaaggccgccgccaaggcgccggccaagaaggccccggccaagaaggcacccgccaagaaggcacccgcgaagaccgcggccaagaagacaccggcgaagacgtctgagacttctgacgcgaagggaggctcagac

SEQ ID NO: 25650 - DNA, 840 bp, Mycobacterium avium
gtgggccagaagatcaatccgcacggcttccgcctcggcatcaccaccgactggaagtcccgctggtacgccgacaagcagtacgcggactacgtcaaggaggacgtcgccatccgccggctgctgtcgaccggcctggagcgggccggtatcgccgacgtggagatcgagcgcacccgcgaccgggtccgggtggacatccacaccgcgcgtccgggcatcgtcatcggccgccgcggcaccgaggccgaccggatccgcgccgacctggagaagctgaccggcaagcaggtgcagctcaacatcctcgaggtgagaaaccctgagtcgcaagcacaattggtggcccagggcgtggccgagcagttgagcaaccgggtggcgttccgccgcgcgatgcgcaaggccatccagtcggcgatgcgccagcccaacgtcaagggcatccgggtgcagtgctccggccgtctcggcggcgccgagatgagccgctcggagttctaccgcgagggccgggtgccgctgcacacgctgcgcgccgacatcgactacgggctgtatgaggccaagaccaccttcggtcggatcggtgtgaaggtgtggatctacaagggagacgtcgtcggcggcaagcgcgaattggccgctgccgccccggcgggcgccgagcgtccgcgccgcgagcgcccgtcgggcacccgcccccggcgcagtggcgcgtcgggcaccacggccaccggcaccgaggccggccgcgcggccgcgagcgccgacgagagcaccgcggccgggcaacccgccgaggccgcgcccgccgccgaaccgcaaagcacggagagc

SEQ ID NO: 25651 - DNA, 414 bp, Mycobacterium avium
atgttgattccccgcaaggtcaagcaccgcaagcagcatcacccccgccagcgcggcatcgccagcggcggcacggcggtgaacttcggtgactacggcatccaggcgttagagcacgcctacgtcaccaaccggcagatcgagtccgcgcgtatcgcgatcaaccggcacatcaagcgtggcggcaaggtgtggatcaacgtcttccccgaccgcccgctgaccaagaagcccgccgagacccggatgggttcgggtaagggctcaccggaatggtgggtggtcaacgtcaagccgggccgggtgctgttcgagctcagctaccccaacgaacagaccgcccgggcggcgctgacccgcgcgatccacaagttgccgatcaaggcccgcatcgtgacccgagaggatcagttc

SEQ ID NO: 25652 - DNA, 1047 bp, Mycobacterium avium
ggcgcggcgacacccgcgccggacgcatcgagcgcgacgcacaccccggcggcacccattgggccgggggccccgtcgggcacgccgggggcgtcggcggttgcatccccggcgccgaccgcggccacggcgccgccgtcatccgccgccgcgcccgccccgccgccggccaatgtttcacgtgaaacagcggacgaattcgacaccccgatcggcgcggcggccgagcgcgcgatgcggatcctccacaccacctatccgccgctacgccggcccaagcatcgccgcgtcttcaccgtcgcgaaccagaagggcggcgtgggcaagacgacgaccgccgtcaacctcgccgccgcgctcgccctgcagggactcaaaaccctcgtcatcgacctcgacccgcagggcaacgccagcaccgcgctcgggatcacggaccggcagtcgggtacgccgtcgtcctacgaggtcctgctcggcgaggtgtcggtgcacgacgcgttgcggcagagcccgcacaacgagcgactgttctgcatcccggcgaccatcgacctggccggcgccgagatcgagttggtgagcatggtggcgcgggagaaccggctgcggaccgcgctggccgatctggacaacctcgatttcgactgcgtcttcatcgactgcccaccgtcgctggggctgctgaccatcaacgcgctcgtcgccgccccggaggtgatgatcccgatccagtgcgagtactacgccctcgagggcgtgtcgcagctgatgcgcaacatcgagatggtgaaggcgcacctcaacccgcagctcgaagtgagcaccgtggtgctgaccatgtacgacggccgcaccaagctcgcggaccaggtggccgaagaggtgcgccgctacttcggcagcaaggtgctgcggacggtgatcccgcgcagcgtcaaggtgtccgaggcgcccggctacagcatgaccatcatcgactacgaccccgggtcgcgcggggcgatgagctatctcgatgcgagccgcgaactcgccgagcgtgat

SEQ ID NO: 25653 - DNA, 927 bp, Mycobacterium avium
atgctgtttcgtcagctggagtacttcgtcgcgctcgcctccgagcgtcacttcgcgcgggccgcccgcgcctgctacgtgtcccagcccgcgctctcggaggccatccgcaagctcgagcaggaactcaacgtgcccctggtgcgtcgcgggcagaagttcgaagggctgacgcccgagggcgagcggctggtgctgtgggcgcggcgcatcctggccgaccacgacgccctcaagcaggaggtcgccgcgctgcagaccggcctcaccggcgagctgcgcctcggcgtcatcccggcggcctcgagcatcgtcgccctgctcaccgatcccttctgcgccgcccatccgctggtgcgggtgcagctcgagaccagcctgcggtcggccgagatcgtgcagcgactgcgccggttcgagctggacgccggggtcctctaccccgaccggcaggatgtcgccgacctgctggtcaccccgctctacaccgagcagcaggtgctcatcgccggcgccgagttgctccccgacccgtcggagaccatcagctggtccgacgcgctgacgctgccgatgtgcctgctgaaccagggcatgcgcggtcgccggctcatcgacgacgcgctggccgcgcaggagctcacggtcacgccgcagctcgagaccgactccgtcgccacgctgctggcgcacgtcggcaccggccgctgggcaagcatcatcccgcagacctggatccactcgctgcgcccgcccgccggcgcgcgcatcctgcggctggagaacccgaccgtcaccgccacggtcgcgctggtcaccagcgccaccgagccgggctcggtgctgacccgcgcgttggtgcagaccgcgcggggcgccggcatcaatgacgtgttgcgcaaggccgcgcccggatactccgcgggc

SEQ ID NO: 25654 - DNA, 1167 bp, Mycobacterium avium
atggaggaggagccagtggctaagtgtgtgatggtgctgtaccccgatcccgttgacgggtatccgccgaagtacgcccgcgacagcatcccggtgatcaacagctaccccgacggctcgtcgctgccgacgccgtcaaagatcgacttcacgcccggtgagctgctcggctgcgtctccggtgccctggggttgcgcaagttcttcgaagacggcgggcacgagctggtcgtgacgtcggacaaggacggcccggactcggagttcgagcgggaactgcccgacgccgatatcgtgatctcccaacctttttggcccgcctacatcaccaaggagcggttcgccaaggcgcgcaacctcaagctggcgctgaccgccggcatcgggtcggaccacgtggacctcaccgaggcgcaggcgcggggggtcaccgtcgccgaggaaacctggagcaacagcatcagcgtcgccgagcacacggtgatgcagatcctggcgttggtgcgcaacttcgtcccgtcgcaccagtggatccgcgacggcggctggaatatcgccgactgtgtgcagcggtcctacgacgtggagggcatggacgtcggggtgatcgccgccggccggatcgggcgcgcggtgctcgagcggatgaaaccctttggggtgaacctgcactacttcgatgtgcaccggctctcgccggagtacgagaagcaactcggcgtgacgtatcaccccgacgtcgagtcgctggcccgctcggtggacgtggtgtcgatccactcgccgctgatcgcccagacccatcacatgttcaacgagaagctgctgaagtcgatgcggcgcggctcctacatcgtcaacaccgcccgcgccgaggagaccgaccacaaggcgatcgtggccgcgctggagagcggtcagctcgccggctacgccggcgacgtgtggttcccgcagccgccgccaccgcatcacccgtggcgcaccatgcccaatcacgcgatgacgccgcatatctcgggctccagcctgtcggcgcaggcccgctactgcgccgggacccgcgagatcctcgaggactggttcgccggccgccccatccgctcggaatacctgatcgtcgagggcggcaagttcgccgggaccggggccaagtcctacgcgcag

SEQ ID NO: 25655 - DNA, 1482 bp, Mycobacterium avium
gtgttgtttctgcgtcggggtatgcctataggacaaccgtatcgaggacgaacttacttcagagtaagaacagtgggtagtatggcccgagacgggcgacccgcaaaccgaccaaccgcagacacacggagaacacaagtggcccctgcaagttccgaggcaagcaaaccggctgctcagcgcagtgcgcagcggcggccagtggccgtcctgggtggcaaccggattccgttcgcccgctccgacggcgcctatgccgaggcgtccaaccaggacatgctcaccgccgcgctggaggggttggtggaccgcttcgggctggccggtgagcggctgggcgtggtggtcggcggcgcggtgctcaagcacagccgggacttcaacctgacccgtgaatgcgtgctgggttcacagctgtcgtcctacacgccggcgttcgacctgcagcaggcctgcggcaccgggttgcaggccgcgatcgcggccgccgagggcatcgccgccggccgctacgacgtggccgccgccggcggggtggacaccacctcggacgcgccgatcggcctgggcgacaacctgcgccgcacactgctgaagttgcgccgggccaagtcgaacgtgcagcgactcaagctggtgggcacgctgccggcgaccctgggcgtcgagatcccggtcaacagcgagccgcgcaccggcctgtccatgggcgagcaccaggcgatcaccgccaagcagatgggcatcacccgggtcgcccaggacgagctggccgccgccagccaccgcaacatggccgccgcctacgaccgcggcttcttcgacgacctggtcaccccgttcctgggcctgtaccgcgacgacaacctgcggcccgactcgtcgccggagaagctggccaagctgcggccggtgttcggggtgaaggccggcgacgcgacgatgacggcgggtaactcgaccccgctgaccgacggcgcctcggtggcgctgctgggcaccgaggagtgggcggccgcgcactcgctgaccccgctggcctacctggtggatgccgagacggccgcggtcgactacgtcaacgggcgcgacggcctgctgatggcccccacctacgcggtgccgcggctgctcgcccgcaacggcctgagcctgcaggacttcgacttctacgagatccacgaggcgttcgcctcggtggtgctggcccatctgcaggcctgggaatccgaggactactgcaaggaacggctcggcctggacgccgcgctgggctccatcgaccgctccaagctcaacgtcaacgggtcctcgctggccgccggtcacccgttcgcggccaccggcgggcggatcctggcgcaggccgccaagcaggtcgcgcagcgtaaggccgagctcaagggcgccgacaaaccggtgcgcgccctgatctcgatctgcgcggccggcggccagggcgtggccgcaatcctcgaggcc

SEQ ID NO: 25656 - DNA, 1164 bp, Mycobacterium avium
atggcattgtcgcgccccctcgccgcgcacgcggccgtgctggccgccgtgtcggcgctgatgatcggctgcgcccaccgcgccgcacccccgcccgcgcactcgtcgacgtcgaacacgccggccgctgccccggcgccgcgggtgtgcgtcgacccgccggcagcgccggccaccctgaaccttcgcgacaagctggcccaactgctgatggtgggtgtcaagaacgccgacgacgcgcgcaacgtcgtcaacggctatcacgtcggcggcatcttcatcggcagctggacggacctgacgatcttccagggcccgctggccgacatcgcggccaaggcggggccgttgccgctggcggtcagcgtcgacgaggagggcggccgggtctcgcggctgaaatccctgatcgggacgtcgccgtcgccgcgtgagctggcgcagacgcagaccgtgcagcaggtgcacgacctggccgccgaccgcggcaagaagatgcgcgacctaggcatcaccatcgatttcgcgcccgtcgtcgacgtcagcgacgagcccgacgacgccgtgatcggcaaccgttcgttcggcgcggacccggccaaggtcaccgagtacgccggtgcgtatgcgcaggggctgcgggacgccggcctgttgcccgtgctcaagcacttccccggccacgggcacggctcgggtgactcccacaccggtggcgtggtcacgccgccgctggacgacctgcagaacaacgacctggtgccctaccggaccctggtgaccacgccgccggtcggggtgatggtaggccacctgcaggttcccgggctcaccgacgacgtgccggccagcctgagccccgaggcggtgcagttgctgcgcaacggcgtcggctacaaggggccgccgttcaccggcccggtcttcagcgacgatctgtccagcatggcggccatctccgaccgatacggggtctccgaggcggtgctgcgcagcctgctggccggcgtcgacgtcgccttgtgggtcaccaccgacgaggtgccggcggtgctggaccggctgcagaaggcggtcgcctcgggcgaattgccggcacagcgggtggacgagtcgctggtgcgggtggcgaccatgaagggccgcggcccggcctgcgggcac

SEQ ID NO: 25657 - DNA, 1224 bp, Mycobacterium avium
atgcccgggtgtacccgttctccgggccgcgcgcacaggcaaactgtggtggtgagcgatgaccagcgggtgggcggggtgcgcagcttcctgcccgccgtggagggcatgcgcgcctgcgcggccatgggtgtggtggtcacccacgtcgcgttccagaccgggcactccagcggcgtcgacggcaggctgttcggccgcttcgaccttgcggtggcggtgttcttcgcgctgtcgggttttctgctctggcgcggacatgccgcggcggcacgggatttggcgccgcgcccccgcaccggccattacctgcggtcccgggtggtccgcatcatgcccgcctacctggtggcggtcgtggtgatcctgaccctgttgcccgacgccgatcaccccagcccgacggtgtggctggccaacctgaccctgacccagatctatgtgccgctcacgctgaccggtgggctgacccagatgtggagcctgtccgtggaggtcggcttctacctggcgctgccggtgctggcgttgctggcccgccgcctcccggtgaccgcgcgggtgccggcgatcgccgcgctgggggcgctgagctgggcgtggggctgggtgccggtgcaccccggttcgggcctcaacccgctgaactggccgccggccttcttctcctggttcgccgccggcatgctgctggccgagtgggtgcacggcggcatcggccggccggtgcggttggcgcagagccggacgggccgggtgctgctggccgtcgtcgcggtggccgcctacctggttgcggcctcgccgctggccggtcccgaggggctggtgccgggcacccccgcgcagttcgcggtgaagacggcgatgggctcgctggtggccttcgcgctgatcgccccgttggtgctggaccggatggacacgccgcaccgggtgttggggacgaccgtgatggtgacgctggggcgctggtcctacggcctgttcatctggcacctggcggcgctggccatggtgttcccggtgctcggcacgttcccgttcaccggccgcatgcccgcggtgttggtgttgacgctgatcttcggcttcgcgatcgccgcggtcagctacgccctggtcgagtcgccctgccgggaagccttgcgccgctgggagaaacgccaccagcccgccgcgccgcgccagctcatcgacgctgaggccgacgcaatcgcgccg

SEQ ID NO: 25658 - DNA, 978 bp, Mycobacterium avium
gtgtcagaactcaataccgctcgcgggcccatcgacaccgctgcgctgggtgtcaccctgatgcacgaacacgtgttcatcatgaccaccgagatcgcgcagaactaccccgaagcgtggggcgacgaagagcagcgggtggccgacgccatcgaccggctcaacgagctcaaggcgcgcggcgtggacaccatcgtcgacctcaccgtcatcggcctgggccgctacattccgcgcatcgcccgggtcgcggcggcgaccgagctgaatatcgttgtggcaacggggctttacacctacaacgatgtgcccttctatttccactacctgggcccgggcgcggagctgggcggcccggagatcatgaccgacatgttcgtccgcgacatcgagcagggcatcgccgacaccggcatcaaggccggcatcctcaagtgcgccactgacgcacccggcgtcactccgggcgtcgagcgggtgctgcgggcggtggcgcaggcgcacaagcgcaccggggtgccgatctccacgcacacccacgccgggctgcgccgcggcctcgaccagcagcggatcttcgaggaggagggcgtcgacctgagccgggtggtgatcgggcattccggcgacagcaccgacgtcggctacctcgaagagctcatcgccgccggctcgtatctgggcatggaccggttcggcatcgacgcgatctcgccgttcgaggaccgggtgaacatcgtcgcgcagatgtgcgagcgcggccacgccgacaagatggtgctctcgcacgacgccaactgttatttcgacgcacttcccgaggagttggtgccccaggtcatgccgaactggcattacctgcacatccacaacgacgtgatccccgccctcaagcagcgcggcgtcaccgacgagcagctgcacaccatgctcgtcgacaacccccggcgcatcttcgagcgccagggcccctatggg

SEQ ID NO: 25659 - DNA, 1704 bp, Mycobacterium avium
gtgcttggtgaaacgtccgacttccagcctgccactatcgtggccaacgggaggtgtcggatgagcaaagccgctgagctgatcgtcaagtgcctggaaaacgagggggtttccgtcgtgttcgggctgcccggcgaggagaacatccgcttcgtgcaggcgctggccgcctcaccgatccgctacgtgctgacccggcacgagcaggccgcctccttcatggccgagatgtacggacgggtcaccggccgggcggcggtggtgtcggccaccctggggcccggcgcgatcaacatgcaactcggggtcgccgacgccaccaccaacagcaccccgctggtcgccatctccgcgcaggtgggtcacgaccgggagttcaaggagtcgcatcaatacgtcgacctggtgtcgatgttcgccccgatcacccggtgggcggccggcatcccgaccgcgcgcgccatccccgagatggtgcgcaaggccttcaaactcgccgaatccgagcgcccggccgcggtgtatctggcggtgcccgaacacatcgatgccgacgaaaccgactacgacctggggccgttgccgcgcaacgtggtccggcccgacgccccgtcgccgcgccaggtggaacgcgccgcgcagatcctgcgcaacgccaagcgcccggtggtgctggccgggcacggcgcggcgcgcgccgatgccaccaaggcgctggtgcgcttctccgaggagttcggcatccaggtggccaacaccttccacggcaagggcgtcatgcccgacgaccaccccaacagcatcggcacgctgggcttcatgcggcacgactacgtcaacttcgggttcgaccacgccgacgccgtcatcgccgtcggctacgaattgcaggagttcgacccggtccggatcaacccgcaggccgacaagaagatcatccacatgcaccggttcccggccgaggtggacgcgcactactcggtcgacgtgggcatcatcggcgacatcagcgattcgctgaacgcgctgaccgacgcgctgtccggtcaccgtttcgagcacgccgccgacgtgcccggctccgggctgctgaccgacgaattcgcgcgcgggcaacaggattcgcgttatccgctggccccggcgcgggtggtcgccgacacccgggcggcgctgggccgcagcgacgtggtgctggtcgacaccggcgccaccaagatgtggatggcccggctgtacccgacctacgagcgcaacacctgcctgatctcaaatggcttgtccaccatgagctttgccctgcccggggcgctcggggtgaagcttgcccagccgcagtccaaggtgctggccgtggtcggcgacggcgcgttcctgatgaactcccaggagatcgagaccgccgtgcgcgaacgcatcccgctggtggtgctgatctgggaggacggcggctacggcctgatcgaatggaagatggacctcgagctcggcgcacactactacgtcaaattcgccaaccccgacgtggtcacctacgcagaaagcttcggcgccaagggatatcgcatctctcatgccgacgaactgttgccgacgctgcgggccgcgctcgacgacgacggcgtctcgctgatcagctgcccggtcgactactcagagaacctgcggctgaccaaccgtcttggtgagctcgacgaaacgctg

SEQ ID NO: 25660 - DNA, 2658 bp, Mycobacterium avium
gtgaaggcgggccacaccgaggtgccgagcgcgtcggtgatcctcgacgaccccaacctgctgttcgtcaacgcgggcatggtccagttcgtgccctacttcctgggcgcgcgcacgccgccgtacccgacggccaccagcatccagaagtgcatccgcacccccgacatcgacgaggtcggcatcaccacccggcacaacaccttcttccagatggccggcaacttctcgttcggcgactacttcaagcgcgaggccatcgaactggcgtggacgctgctgacgggcagcgtcgagcagggcggctacggccttgaccccgaacgcatctggacgacggtctacttcgacgacgacgaggccgtgcggctgtggcaggagatcgccgggctgcccgcggagcgcatccagcgccgcggcatggaggacaactactggtcgatgggcatccccggcccgtgcggcccgtcctcggagatctactacgaccgcggcgaggagttcggcgtgggcggcgggccgatcgccaacgaggaccgctacgtcgagctgtggaacctggtgttcatgcagagcgagcgcggcgagggcacctccaagaccgacttcgagatcctggggccgttgccgcgcaagaacatcgacaccggcatgggtgtggagcgggtcgcgttcgtgctgcagggcgtgcacaacgtctacgagaccgacctgctgcggcccgtcatcgacgcggtcgccgcccgcgccccgcggccctacgacgccggcaaccacgacgacgacgtgcgctaccggatcatcgccgaccacagccgcaccgcggccatcctgatcggcgacggcgtcaccccgggcaacgacggccgcggctacgtgctgcgccggctgctgcgccgggtcatccgctcggccaggctgctcgacatcgaggggcccattgtcggtgacctgatggccaccgtgcgcgacgcgatgggcccgtcgtatcccgaactggtcaccgacttcgaccggatcgcccgcatcgccgtcgccgaggagaccgcgttcaaccgcaccctggcggccggctccaaactgttcgacgaagtggccagcaccaccaaagcgactggggcgaaatcgatttcgggctccgacgcgttcacgttgcacgacacctacgggttcccgatcgaactcacgctggagatggcgtccgaggccgggctgcaggtggacgaggtaggcttccgcgagctgatggccgagcagcgccgccgggccaaggccgacgccgccgcccgcaagcacgcgcacgccgacctgaccgcgtatcgcgaactggtcgacgccggccccaccgagttcaccggcttcgacgaattgtcctcggaggcaaggattctggggatcttcgtggacggtaaacgggtgccggtggtcacccacggcggcgacggcgcggaccgggtcgagctggtgctggaccgcaccccgctctacgccgagtccggcgggcagatcgccgacgagggcaccatcagcggcaccggcgccggcgagagcgcccgggccgccgtcaccgacgtgcagaagatcgccaaaaccctgtgggtgcaccgggtcaacgtcgagtccggtgaattcgtcgagggcgacaccgtgatcgccgcggtcgacccgcagtggcgccgcggcgccacccagggccactcgggcacccacatggtgcacgccgcgctgcgacaagtgctggggcccaacgccgttcaggcgggctccctgaaccgcccgggctacctgcgtttcgacttcaactggcagggcccgctgaccgaggagcagcgcacccagatcgaagaggtgaccaaccaggccgtgcaggccgacttcgaggtgcacaccttcaccgagcagctggagaaggccaaggcgatgggggccatcgcgctgttcggcgagagctaccccgagcaggtgcgggtggtggagatcggcggcccgttctcgctggagctctgcggcggcacgcacgtgcacaactccgcgcagatcgggccggtgaccatcctgggcgaatcctcggtcggctccggggtgcgccgggtggaggcctacgtcgggctggactcgttccggcacctggccaaggaacgcgcgctgatggcggggctggcgtcgtcgctgaaggtgccgtcggaggaggtgccggcccgggtggccaacctggtggagcggctgcgggccgcggagaaggaactcgagcggatgcggctggcctccgcgcgggccgcggccggcaacgccgccgcgggcgcggagcggatcggtaacgtccgcgtggtggcgcagcggatgtccggcgggatgacggcggccgacctgcgctcgctggtcggcgacatccgcggcaagctgggcagcgatcccgcggtggtcgcgctgatcgccgagggtgagggcgggtcggtgccgtacgccgtcgccgccaaccccgccgcccaggacctcggcatccgggccaacgatctggtcaagcagctggcggcgccagtcgacgggcgcggcggcggcaaggcggacctggcgcagggatcgggcaaggatccggccggcatcgacgcggcgctggacgccgtgcgttccgagatcgccgcgatagcgcgggtcggt

SEQ ID NO: 25661 - DNA, 1350 bp, Mycobacterium avium
atgcctgaagccgtgtccgacggtctgttcgacctgcccggcgcgccgccgccgggcgaccacggcctgggcgtgccggccggtgcgccgctggcggtccggatgcgcccggcgtcgctggacgaggtggtagggcaggaccacctgctggcccccgggtcgccgctgcgccgcctggtggagggctcgggcgtggcgtcagccatcctgtacgggccgccgggcagcggcaagaccacgctggccgcgctgatctcccaggcgaccggccgccggttcgaggcgctctcggcgctgtcggcgggtgtcaaggacgtgcgcgcggtgatcgagagcgcgcgcaccgcgctgttgcgcggcgagcagaccgtgctgttcatcgacgaggtgcaccggttctccaagacccagcaggacgccctgctgtccgcggtggagaaccgggtggtgctgctggtggcggccaccacggagaacccgtccttctcggtggtggcgccgctgctgtcccggtcgctgatcctgcagctgcggccgctgagcgccgacgacatccgcaccgtggtgcgccgcgcgatcgacgacccgcgcggccttggcgggcgggtcccggtcgcgcccgaggccgtcgacctgctggtgcggctggccgcaggcgatgcccggcgggcgctgacggcgctggaggtggccgccgaggccggcgaatcggtcaccgtgcagaccgtcgagcagtccctggacgaggccgcggtgcgctacgaccgcgacggcgaccagcactacgacgtgatcagcgccttcatcaaatcggtccgcggctcggacgtggacgccgcgctgcactatctggcccgcatgctggtggcgggggaggacccgcgcttcatcgcgcgccggctgatgatcctggccagcgaggacatcggcatggccgactcggccgcgctgcaggtggcggtggcggccgcgcagacggtggcgctgatcggcatgcccgaggcgcagctcaccctggcgcactgcaccgtctatctggccaccgcgccgaagtcgaacgcggtcaccaccgcgctgggcgcggcgatgagcgacatcaaggccggcaaggccggcctggtgcccgctcacctgcgcgacggacactattcgggtgcggcggcgctgggccacgcccagggctaccagtactcccacgaccacccggatggtgttgtggcacaacagtatccgccggacgagctggtcggtgtggactactaccggcccaccggccgcggcgccgagcgggagatagccgggcggctggaccggctgcgcgcgatcatccgcaacaagaggggacggtca

SEQ ID NO: 25662 - DNA, 2115 bp, Mycobacterium avium
atgaaagatccggacgagcgggcgcgcacggtcgaggcccagatgaccgacgacgagcggttctcgctgctggtcgcggtgatgggcgccggcgacatgtggccggtgcgcgacgagcgcatcccggcggacgtgccgatgagcgcgggttacgtgccgggggtgccgcgcctcggcgtgccgccgctgctgatgagcgacgccggactgggtgtcaccaaccccggctaccgtccgggtgacaccgccaccgcgcttccggccggcctggcgctggccgccaccttcgatccggcgctggcccgcgccgcgggcgaactgatcggccgggaagcccgcagccgcggattcaacgtccagctggccggggcgatgaacctggcccgcgacccgcgcaacggccgcaacttcgaatacctttccgaggacccgcttttgaccgccgccatggtcgcggagtcggtcgcgggcatccagcaacagggcgtcatctcgaccgtcaagcactactcgctgaattgcaacgaaacgaatcgccactttctggacgcggtcatcgaccccgacgcgcaccgcgaatccgacctgctggccttcgagttggccatcgaacgggcccagcccggggcggtgatgaccgcatacaacaaggtcaacggcgtctacgccgcggcgaacagtgtgttgctcaacgacgtcctcaaggacgcctgggcgtatcgcggctgggtgatgtcggactggggcgccactccgggctgggaatgcgccctgggcggtctggatcaggaatgcggcgcccagatcgacgcgctgctgtggcaggccgaatccttcggtgcgccgctgcgcgacgcctacgccgacggccggttgcccaaggatcggctctcggacatggtccggcgcatcctgcgctccatcttcgccgtcggcgtcgaccggtcggaccgggcgccggcaccagatctaaacgcccacaacgacattgccttgcgcatcgcgcggcagggcatcgtgctgctgaccaaccgcgggttgttgccgttgcgccccgactcgccggcgcgcatcgccgtcatcggcgggtacgcgcaactgggcgtgccggccggtttcggttccagcaccgtcgttccggcgggcgggtatgccgccgtggtgccgatcggcggcacagcgctggaggccgggctgcgcaacttgtacctgctgccgtccagtccactgcaggaactgcgaaagcttctgcccgagaacacgattgacttcgatcccggaatcagcccggccgaggcggtggcggcggcacaacgcgccgacatcgcgatcgtgttcgcggtacgcgccgaaggggagggcttcgacctcgccgatctgtcgctgccgtcgggccaggacgagctgatcggcgcggtggcggccgccaaccccaacacggtggtggtgctgcagaccggcaacccggtcaccatgccgtggctgggagcggtgaatgccgttgtgcaggcgtggtatccgggtcaggccggcgccacggccatcgccgaggtgctcaccggccgggtgaatcccggcggccggctgccgatcaccttcccggtcgacctgcaccagacgccgcgcccgcagctgcccggcgccgggctaccgtggggaacgccgagcaccatcgactacgtcgagggcgccgacgtcggctaccggtggttcgcggccaagggccacgtcccgatgttcgccttcggacatggattgtcctacaccagatttgaacaccgcgacctggtcgtgcggggtggcgacaccattaccgccggcttcaccgtggtcaacaccggcgatcgcgccggggcggatgtaccgcagctgtacctgacggcgatgcccggaaagccgtgcctacggctgctgggattcgagcgggtcgagctgggcccgggcgagagccggcacgtgaccatcgacgccgatccgcgactgctggcccactacgacggcagcatccgaagctggcggatcgccgcgggcagtcatacggtggcgctggggatttcggccaccaccctgcgctcgacggccacggtcgagctgaccgctcgtacgttcgggcgg

SEQ ID NO: 25663 - DNA, 831 bp, Mycobacterium avium
gtgaaccggaccgaacgtagtttcgacggcgtcggcggtgtgcgcatcgtctatgacgtctggacgccggaggtcgcgccgcgtgcggtgctggtgctggcccacggcttcggcgagcatgcccgccgctacgaccacgtcgcccggcgcttcggtgcggccggcctggtcacctacgcgctggaccatcgcgggcacggccgttccggcggcaagcgggtgttggtgcgcgacatccacgaatacaccaccgacttcgacaccctggtcggcatcgctacccgggagcatcacggcctcaagtgcatcgtggtcgggcacagcatgggcggcgggatcgtgttcgcctacggtgtcgagcgccccgacaactacgacctgatggtgctgtccggtcccgcggtggcggcccaggaccaggtgtcgccgctgctggcgctggccgccaaggtgctcggcgtgatcgtgcccgggctgcccgcgcaggaactcgacgccgacgccgtctcccgggaccccgaggtggtggccgcctaccgcaacgatcccctggtgtaccacggcaaggtcccggccggcgtgggccgcgcgttgttgcaggtgggtgagacgatgccgcagcgggccccggcgctgacggcgccgctgctggtcgtgcacggctcggacgaccggttgatcccggtcgccggcagccggcgcctggtcgaatgcgtgggctcggccgacgtcgagttgaaggtctacccggggctctaccacgaggtgttcaacgagcccgagcgcgagcaggtgctcgacgatgtggtcggctggatcaccgctcggctg

SEQ ID NO: 25664 - DNA, 942 bp, Mycobacterium avium
atgacgatcaacgcttcagcgccgcagcgccagggcgcagtggcggtggtggacacggtcaccgcgttgcccgccgccgtcgccggcgacggcggcaccgcggatcccttcgagccgctgacggtcggcgccatggtggaccgggtttcggccatggcggtggaaaaggcggcgcacccgtgggcgttcctgatgcgctcgttggtcggcggcgcgatggtggccttcggtgtgctgctggccctggtggtcagcaccggcgtcaagacaccgggagtggcgagcctgttgatgggcctggcattcggcatgtctttcgtcctcatcctggtgtcgggcatgtcgctgatcaccgccgacatggccgccggctttctcgccgtgctgcaacgggcgctgagcatccgcagctacgtggtgctggtcgccgtcggactggtcggcaacatcgtcggcgcgctggtgttcgtcaccgtgtgcgccgccgccggcggcccctacctgggcgccttcgccgaccgcgccgcgaccgtcggcacccagaaggccggccagccgttctggacggcgctgctgctcgccgtgctgtgcacgtggttcctgcagacctcgatgtgcatgttcttcaaggcccgcagcgacgtggcccggatggcgctggcgttctacggcccgttcgcgttcgtgatcggtggcacccagcacgtgatcgccaacgtcgggttcgtcggacttcccttgctgctcaacctgtttcacccgatcgcggcgcgcggcgatatcggctggggattcggcgaccacggcctgctgaccaacatcggcgtcaccaccgtgggcaacctgatcggcggcaccgtcttcgtggcgctgccgttctggatcatcgcgcacttgcagcggcgccgcctcctttcgacgggagccctccggcccgacggc

SEQ ID NO: 25665 - DNA, 921 bp, Mycobacterium avium
gtgcagccgcaggtcgacgtgcagcccccggccgacaccggggaggccgacgggttgagcccggccagcctcaccgtcacgatcgggttggggccgtcgctgttcggcgatcgtttcggattggccgcgcgccggcccgcggtgttcaccgacctgccaccgctcaacggcgacaacctggatcctcgcctgcacggcggcgacctgtccgtgcaggcgtgcgccgacgacccgcaggtctgctaccacgccgtgcgcaacctggcccggctgggccgcaacatcgtctcgccgttctgggcggtgctcggcttcggccgagcctcggccggccccggccagcacacgccgcgaaacctgttggggttcaaggacggcacccgcaacatcgccagccaggcggaatacgatcggttcgtgtgggtcgacgacagcgaccagccgtggatgaacggcggaacctaccaagtggtccgcaagatccggatgctgctcgagacatgggacgtcgaccggatcggcaatcagcagcggatcttcggccgcaccaaggaagaaggcgcgccgctgtccggcaggcacgaattcgacacccccgatttcaccgccaagggcgccgacggcaatccgctcatcgatccgatgtcgcacgtcggcctggccgcccgggagaacaacgacggcatcatgatccgacggcggtcctacaactacaccgacggcctggacgccaacggccaactcaacgccggcctgctgttcatctcgtatcaaaaagatccgcaagattttatccggctgcagaaccggttgggcgcccacgacctgctcaacgagtacatccgccacatcgggtcagcaatcttcgccgtcccgcccgcgcccgctgaaggccactacatcgcccaaagcctgttccgc

SEQ ID NO: 25666 - DNA, 3072 bp, Mycobacterium avium
atggcatgccggttccccggcgcgccggaccccggctccttctggcgtctgctgcgcgacgggcgcgaagtcacccgattcgccggggaggccgcggaattcgacgccgacttcttcaacctgtcgccgcgcgaggcggccgcgatggacccgcggcagcgcctggccctcgagctggcctgggaactgctcgaagatgccttcatcgtcgccgaaacgctacgcggagaagcggtttcggtgtacctgggtgcgatgaccgacgattacgccgcgctgacgctgcgtgacgtccccgacaacgtggaccaccacaccttcaccggcgtcagccggggcatgatcgccaaccggatctcgtacctgctcgggctgcgcggcgccagcatgaccgtcgactccggccagtcgtcctcgctggtcgcggtgcacctgggctgcgagagcgtgcgcagcgggcaggcgccgctggccatcgcgggcggcgtccatctcaacctggccgacgaaatcgccctgctggaacgcgaattcggcgcggtgtcggtgtcgggtcacacgtatgccttcgaccggcgcgccgacggctacgtgcgcggcgagggcggcgggctggtgctgctcaaaccgttggcggcggcccggcgggacggcgaccgcatccacgccgtcatccgcgccaccgcggtgggcaacgccgggcacggcgcgcccgcccagaccctgccatcggcggccgccgaggccgacgtgatcggccgcgcgctggccgaggccggcctgggcggcgccgacatcgactacgtcgaggcgcacggcaccggcaccagggtcggcgacgccgtcgaaacccaagcgctgggccggattttcgccgaacgatcccaccacccggtgtcggtgggatcggtgaagaccaacatcggccacgccgccagcgccgccgggatcgcgggcctgctcaaggcggtcctggccatcgaacacgccgcgatcccgccgaacctgcacttcgagcgccccgaccccgacatcgacctgaaccgtctcggcctgcgcgtcaataccgcgctggcgccgtggccggaccgcggcgggccgcggcgcgccggcgtctcgtccttcgggatgggcggcaccaacgcacacgtcatcgtggaacaggatgcggcgcaacagaatccaactccagcgtccgcgccggccgacgtcgcactgccctgggtgctctcggcccgctccgaacgggcgctggccctgcaggcgcaacggctgtcggcccacctcgccgagcgaccgcaggcgagtccactggacgtggggtggtcgttggtcagcgcccgggcggtgttcgagcatcgcgcggtgctggtgggatgcgagcgtggcgtgctggcaacgggtttggcgggtgtggcgtcggggcggccggatgcggccaccgtggtggggcgggcccgggcgacgggcaagacggtgttggtgtttcccggtcagggctcgcagacgttggggatgggccggcagctgtacgagaggttcgtggtgttcgctcgggcgttggatgaggctgtcgcggtggtggacgagcattcccggctgtcggtgcgtgaggtgatgtggggcgccgatccggagttgttgcagagcacggagtttgcccagccggcgttgttcgtgttcgaggtggcgttggcggcgttgtgggaatccttgggtgtgacaccggatgtggtgatggggcattcggtgggtgagatcgccgcggcgtgtgtggcgggggtgttgtcgctgcgggatgcggcgcggttggtggcggcccggggtgcgttgatggcggcgctgccgcccggcggtgtgatggtggcggtgaccgcgaccgaggcgcaggtggcgccgctggtgggtggtggggtgagcatcgcggcggtcaacggccccgacgcggtggtgctctccggtgagcaggaagccgtgtcggcggtggcggagcggttggccggctcgggcgcgcgggtgcaccggttggcggtctcgcatgcgtttcactcggccctgatggagccgatgctggacggttttgccgccgcggcggccggtatcgagccgcggcccccgcgaatccctttggtgtccaacctgaccggacaactcgccggccccggctacggcacgccacagtactgggtcgagcacgtccgccggccggtccggttcgtcgacggtgtgcggctggccgaatcccagggtgccggcgtgttcctggaagtcggcccgggcgcggccctgacggccgcggtggaccaatcgctgagcaccgagggcgccaccgcgatcgccaccctgcccaaggaccgccccgagaccgaatcggcgctgcacgcggccgggcacctgttcacccgcggccaccgcctcgactgggcgggtgtgttcgccggcctgcccgcccgtcgcgtcgatctgccgacgtatgcctttgcacgcgaacgcttttggctgggcggcgcatcgttggccggcgccccggcgggagcggcgccggtggggggcggcacgcgtgcccccgagctggcgcaccgcctgcacgcactgccccgcgacgaacagcagcgggtgctgcgcgaattggtctgcgagcacgcggccgcggtgctcgggcaccccggcggtgacgccatcgaccccgaccgcgccttcgccgatctcgggttcgactcactgatcggggtcgaattgcgcaaccgcctcaccacgcataccgggacggcgttgtcgcgcaccctgatcttcgactacccgacgccggccgcgctggccgaccatcttcgccagcaactgctgcacgacgaggacccggaatccgacgacgagagaatctggtcggcgctgcgcagaattccgctgcgcgagctgcggcggaccggattgctcgacaaactcctattgctcgccggtatgccggaaaccgcgaccaccgacgcgaaaatcagcgacgcggatatcgactcgttaagccccgacgcgctgatcgcgatggcgctgaactcggcggacgacgacgaggccgaa

SEQ ID NO: 25667 - DNA, 1470 bp, Mycobacterium avium
atgtcgtctcctggtgataccgcggtcctggtgctggcggccgggcccggcacccggatgcggtcggacaccccgaaggtgctgcacacgctcggcggccgcagcatgctgtcccatctgctgcacgccatcgccaaggtggcgccgcaacacctggccgtggtgctgggccacgaccacgagcgcatcgccccgctgatcgccgactgggccgacgacctgggccgccccatcgacgtggcgctgcaggaacggccccgcggcaccggcgacgccgtccggtgtggcctgtcggcgctgcccgacgactacgccggcgtcctggtcgtcacctccggcgacaccccgctgctggacgccgacaccgtggccgacctgatcgccggccacaccgcgacccgggccgcggtcaccgtgctgaccacgacgctgagcgaccccagcggctacggccgcatcctgcgcacccaggacaacgaggtgacggcgatcgtcgagcacgccgacgccaccgaatcgcaacgcgaaatccgcgaggtcaacgccggggtgtacgccttcgacacggcggcgttgcgctcggcgctgaaccggttgagcgccgacaacgcccagcaggagctgtacctgaccgacgtcatcgcgatcctgcgcggcgacggcctgcccatccgcgcccgccacgtcgacgacagcgcgctggtggccggcgtcaacaaccgcgtgcagctcgcccagctgggcgccgagctcaaccgccgcatcgtggccgcccatcagctggcgggcgtgaccgtcgtcgacccggccaccacctggatcgacgtcgacgtcaccatcggtcgcgacaccgtcatccacccgggcacccagctgctgggccgcacccagatcggcggccactgcgtcgtcgggccggacaccaccctgaccgacgtcagcgtcggcgacggcgcgtcggtggtgcgcacccacggcaccgggtcgtccgtcggcgccggcgccaccgtcggcccgttcgcctatctgcggcccggcaccgtgctgggcgacgacggcaagctgggggcgttcgtcgagaccaagaacgccaccatcggcaccggcaccaaggtgccgcacctgacctacgtgggcgacgccgacatcggcgagcacagcaacatcggcgcctccagcgtgttcgtcaactacgacggcgagtccaagcggcgcaccaccgtgggctcgcacgtgcggaccgggtccgacaccatgttcgtggccccggtcacggtcggcgacggcgcctacaccggggcgggcaccgtggtgcgcgaggatgtgccgcccggcgcgctggcggtgtccgccggtccgcagcgcaacatcgagggctgggtgcgccgcaaacgccccggcagcgcggccgcgcgagcggcggaggccgccgagaaggccgccgggggccgtcccgccggggaggccgaa

SEQ ID NO: 25668 - DNA, 1614 bp, Mycobacterium avium
atgaccgcccgcgccgccccggacaccgcgcaaacatccctggcctaccggcgcggctggtgggtgcgcagcacactggccgacgcggcgcgcgccgctgcgcaacgtacgccagagcggatagcgttggtggacaacgaggttcggctgaactgcgccaccctgtacgcccaggccggcgagctggccgccgccctgctggcccgtatcccggccggcagcgtggtgtcgttcatgctgccgaactggcacgaggccgcggtcatctacctggccgcgacactggccggcatggtggtgaacccgatcctgccgtcactgcgcgaccacgacctgcgtttcgttctcgaggatgccggcgccgcaatggttttcgtcccgcaccggtacggcggccacgactacccggcgatgctggaccgcgtgacggccgcgatgagcgcggcgccgcaggtggtggtgctgcgcggccccgacacgggacgaaccggtcggcacaccccgtaccgctgcatgctgggcggaccgcccgggggccttccggcactggatcccgatgcggtgcggatgatcctctatacctccggcaccaccagccgcccgaaaggcgttctgcacacccataattcgatacatgcgctgatctgccagatccgtgaccactgggcgatcgatcctggcgacacattcctggtgccgtcgccgctcgcccatatcggcggctcgatctacgcgtttgaatgcccgctgctgctgggcaccacggcggtgctgatggaccggtgggacccggcgcgggcggtggcgttgatgaccgcgcatcgctgcacccacatggccggggccacaccgtttttgcagcagctgctctcggccgccgcgaacgccggcacccgcctgcccgacctgaaggtgttcatctgcggcggcgcctcggtgtcgccgtcactgatccgccgggccgcagcctatttcgaccgcgcggtcgtcacccgggtgtacggctgcaccgaggtgccggtggccaccgtcggggcgccccggccgcaggaggccgactacgccgccgacaccgacggccggcccggcatcgccgagatcaagctcgtcgcgcacccggcggcgcccaccggtgacggcgagatctgcgtgcgcggcccgcagatgctgcgcggctaccgccacccggaggacgacgccgagtccttcgacgccgcagggtttttccgtaccggcgacctgggccgctgggccttagccgattccgccgaccggtacctggtcgtgaccggccgcgccaaggacgtcatcatccgcagcggcgagaacatctccgccaaggaggtggaggacctgctggccgaccatcccggcatcgccgagatcgcggtcgtcgggctgcccgacgagcgcaccggcgagcgggcgtgcgcggtcatcgttccgacccccggggcgagcccggacgtggccagcctgctggcgctgctggtgagcaagggggtggccaagttcaaggcgcccgaacaggtggtgctctgggatgccctgccgaagaacgacgccggcaaggtgctcaagcatcggatccgcgcggcgctgagtaaggatggc

SEQ ID NO: 25669 - DNA, 690 bp, Mycobacterium avium
gtgagccgcgcggagttggacaagaatccccgggacgtcgcgtcgatgttcgacggcgtggcccgccggtacgacctgaccaacaccgtgctgtcgctgggtcaggaccggtactggcgcaaggccacccggtcggcgctgggcattggacccggccagaaggtgctcgacctggccgcgggcaccgcggtgtccaccgtcgagctgaacaaatccggggcgtggtgcgtggccgccgacttctcggtcggcatgctggcggccggtgccgcccgccgggtgcccaaggtcgccggtgacgccaccaggctgccgttcgccgacgacgtattcgacgccgtcacaatcagtttcgggctgcgcaacgtggtcgacacgcaggccgcgctgcgcgagatggcccgggtcacccggccgggcgggcggctggtggtgtgcgagttctccacccccagcaacgcgctgttcgccaccgtctacaaggagtacctgatgcgggcgctgccgcgggtggcgcgggcggtgtccagcaaccccgacgcctacgtgtacctcgccgagtcgatccgagcctggccggatcaggcggcgctggccgaccagatcgccggcgccggctgggcgggggtgcgctggcgcaatctgaccggcggcatcgtcgcgctacacgccgcccaccggccgccgcgc

SEQ ID NO: 25670 - DNA, 1236 bp, Mycobacterium avium
atgacgacggcagcgacccgagccgatctggtggtggtgggcgccgggcccgctggatccgccgcggcggcgtgggccgcgcgcgcggggcatgacgtgctggtcgtcgatgcggcgcgctttccccgcgacaaggcctgcggcgacgggctgaccccgcgtgccgtcgccgagtgcgaacgcctgggcctgggcggctggctggacagccgcatccggcaccgggggctgcggatgagcgggttcggcgcccaggtgcaggtcgactggcccggcccgtcgttcccgtccaccggcagcgcggtggcccgcacggagttggacgaccggatccgcagggtcgccgaggattccggggcgcggatgttgctgggaaccaaagccgttggtgtgcagcgtgactcgtcggccgcggtgacgtcgctgatgttggccgacggcaccggggtgcaatgccgtcagctgatcgtggccgacggggcgcgttcgtcgctgggccgcacgctgggccggcgctggcatcaggagacggtgtacggcgtggccgcccgcggctacctgagcaccccgcgcgccgacgacccgtggctgacgtcgcacctggaactgcgcggacccgacggcgcccgggacaaggtgctgcccggctacggctggatcttcccgctcggcaacggcgaggtgaacatcggcgtcggggcgctgtcgacgtcgaggcgaccggccgagctggcgctgcggccgctgatcgaccactacacggacctgcgccgcgacgagtggggcttcgtcggcagaccccgggcggtcgcttcggcgctgctgccgatgggcggcgcggtgtccggggtggccgggcccaactggatgctgatcggcgacgcggcggcctgtgtgaacccgctcaacggcgagggcatcgactacgggatggagacgggacggctggccgcgggcctgctggggtgcccggacctgtcgcaggagtggccggcgctgctgcgggagcactacgcgcgcggcttctcggtggcgcgccggctggcgttgctgctgacctaccagcggttcctgcccgcgacggggccggtcgcgatgcgttccacgacgctgatgaggatcgcggtgcgggtgatggccaacctggtcaccgacgacgacgcggactgggtggcgcgggcgtggcggggcgccgggcggctgtcgcggctgatcgatcggcgggcaccgttcagc

SEQ ID NO: 25671 - DNA, 1029 bp, Mycobacterium avium
atgcacaccagtatgtttggtcgggtgaatactccggcgacggtggtggcgggcgtggatttcggtgacccggctttcgcggcgaccgtgcgcgacggcgtcgggcgcatcgagcagctcatggacaccgagctgcgcagcgccgacgacatcatgaccgagttgctgacccatctgttcaaggccggcggcaagcggttccgcccgctgttcaccgtgctgtccgcgcagatcggccccgaccccgacgccgccgaggtgaccatcgccggcgccgtcatcgagctggtgcacctggccacgctctaccacgacgacgtgatggacgaggcggaggtgcgccgcggcacccccaccgccaacgtgcgctggggcaacaacgtcgcgatcctggccggggactatctgttcgccacggcgtcgcggctggtgtcgcggctgggcccggaggcggtgcagctgatcgccgagacgttcgcccagctggtgaccgggcagatgcgcgagacccgcggccgcaaggagggatcggatccgatcgagcactacctgaaggtggtgtacgagaagacggcgtgcctgatcgccgcggcgggccggttcggggccatgttctccggggccgacgccgatcaggtcgagcggctgagccggctgggcggcatcgtgggcaccgcgttccagatctccgacgacatcatcgacatcgacagcgactcgcacgaatccggcaagctgcccggcaccgacgtgcgcgaaggcgtgcacaccctgccgatggtctacgcgctgcgcgaacccgggccggacgcggcgcggctgcgcgagttgctggtcgggccgatcgacgacgacgaggtggtggccgaggcgttgacgctgctgcgggcgtcgccgggcatggccaaggccaagcagtcgctgcgcgagtacgcggcgcaggcgcatcgggagctggaccagctgcccgacgtcccgggccggcgcgcgctgcaaacactggtcgacttcaccatcagccggcacggc

SEQ ID NO: 25672 - DNA, 684 bp, Mycobacterium avium
atgaccaaacgcatcctgaacgtggtcaccaacgtggcccactacgacgagcccgagcacccgaccggcccatggctgtcggaactcacccacgcgtggcacgtcttcgacgagcacggcttggagcagaccctcgtcagcccctccggcggcaaggtcccgctggagcccagagcgctaaagttccccaactacgacaagaccgccaaggcctggcgcgccgacccgggcaagatggcactcctggaaagcacccgcagccccgacgagatcgactcagccgactacgacgcgatctccttcaccgggggccacgctgtcatgtacgacttccccgatagcattgggctgcaacgcatcactcgtgagatctacgaacgcggggacatcgtcgcctcggtgtgccacggctactgcggccttctcaacaccacgctttccgacggctcctacctcatcgcgggcaagaagatgacgggcttctcttggcgagaagaggtcctcgcccgcgtcgacaagctcgttccctacaacgcggagcaacgagccaaggatcgtggcgcgctctatgaaaaggccaaacttcccttcatctcctacgccgtcgtcgacggcaacctcgtcaccggacagaatccagcctcggccaaggagacggccaagaagctcgcatcgcttcttcgc

SEQ ID NO: 25673 - DNA, 1077 bp, Mycobacterium avium
atgaagtggctggcagcgtggtggggacaacccgaccatttcgattggctgaccggctatttgcaagatcatgggttcggcaccgccacccgccgggcgatggccgtggtgggtgcctcgctggtgctggttccggccaacgtgctgtggggcgccacgccgttctttcccgggctgacgctgacggtctcggtgctggccggcatggtggggctgggcatggcggtgctgtggctgcacggctggcccacccgccgccagtccgtcgtcttcgcgctgaccggcagcgtggccatcggcgccggctgcctgtggcaaaccgagccgctggtcggactcatggcatgctcggcgctctcggttaccggcggctacaacgccttcttccacaccgccaagttcatgggcctgaacttcgggttggccggcgccatcggggcgctgcaggcggcccggctggccgcgtccggccaggcgatgctggccttcaccgggtatttcctggtcctcgagctcaacgtgatcgtcccgctgtccatccagatcgtggtgcgtgcactctggctcgacttgctgcgcgccaaccgcgacccgctgaccgggctgctgaaccgcagagcgtgcaaccgggccatcatcggacgcatgctcaccggggccagccacatgtttttggccgtggccatggtcgacctggaccggttcaaggcgctcaacgacacgcacggacacgccgccggcgacgaggcgctcatcgcggtggccggcgccctgaccgcggcctgcggcgacaccaccgtcgtcggccgcgtcggcggcgaggaattcctggtcgccgacatcgtgaccaccgagcagctacccgggtggggccaacaactgtgcgaggccgtggccgcgctggatccgccggtgaccgccagcgtcggcacggcgaccctgccgctgcgcgacctcgtgtccgaatacgccgaacacgcgtttcaccagttggtcgcccaggccgacagcgccatgtacgaagctaaacgctgcggcggcaaccaaacccggcaccggcccgcccaggtctctacc

SEQ ID NO: 25674 - DNA, 477 bp, Mycobacterium avium
atgcgcgtctacctcggctctgaccacgccggattcgagctcaagcagcagatcatcgcccacctcgagcagtccggccaccagccgatcgactgcggcgccttcagctacgacgccgacgacgactacccggcgttctgcatcgccgccgcgacgcgcaccgtggccgacccggacagcctcggcatcgtgctcggggggtcgggcaacggcgagcagatcgccgccaacaaggttcccggcgcccgctgcgcgttggcctggagcgtggaaacggcgcagctggcgcgcgagcacaacaacgcccagctgatcggcatcggcggtcgcatgcacaccgtggccgaggcgctggccatcgtcgacgccttcgtgaccacgccgtggtcgaaagccccacgccaccaacggcgtatcgacatactggccgaatacgaacgcacccaccaagccccgccggtacccggcgccgtgggc

SEQ ID NO: 25675 - DNA, 1278 bp, Mycobacterium avium
atggcgcgcatcggagacggcggtgacctgctgaagtgctcgttctgcggaaagagccagaaacaggtcaagaaactcattgctggccccggcgtgtacatctgcgatgagtgcatcgacctctgcaacgagatcatcgaagaggagctcgccgacgccgacgacgtgaagctcgacgagctgcctaagccgatcgagatccgggagttcctcgagggatacgtcatcgggcaggacaccgccaagcggacgctggccgtggcggtgtacaaccactacaagcgcatccaggccggcgagaagggccgcgactcgcgccacgaaccggtcgagctgaccaagtccaacatcttgatgctggggccgaccggatgcggcaagacctacctggcccagacgctggccaagatgctcaacgtgccgttcgccatcgccgacgccaccgcgctcaccgaggccggatacgtcggtgaggacgtggagaacatcctgctgaagctgatccaggccgccgactacgacgtcaagcgcgccgagaccggcatcatctacatcgacgaggtggacaagatcgcgcgcaagagcgagaacccgtcgatcacccgcgacgtgtcgggggagggcgtgcagcaggccttgctgaagatcctggagggcacccaggcgtcggtgccgccgcagggcggccgcaagcacccgcaccaggagttcatccagatcgacaccaccaacgtgttgtttatcgtggcgggcgccttcgccgggctggagaagatcatctacgagcgcgtcggcaagcggggcctgggttttggcgccgaggtgcgctccaaggccgagatcgacaccaccgatcacttcgccgaggtcatgcccgaggacctgatcaagttcggtctgatccccgagttcatcggccggttgcccgtggtcgcctcggtcaccaacctggaccgcgagtcgctggtcaagatcctgtccgagccgaagaacgctctggtcaagcagtacacccggctgttcgagatggacggcgtggagctggagttcaccgacgacgcgctggaggcgatcgccgatcaggccatccaccgcggcaccggggcccgcggcctgcgcgcgatcatggaagaagtgctgctgccggtgatgtacgacatccccagccgcgacgacgtcgccaaggttgtggtgaccaaggagaccgtgcaggacaacgtgttgccgacgatcgtgccgcgcaagccgtcgcgcaccgagcgtcgcgacaagagcgcc

SEQ ID NO: 25676 - DNA, 780 bp, Mycobacterium avium
gtgagcttccgcgccccccaacacgagtcggtgcggcccagcccgatctttctggccctgctggggttgaccgcgctgggcggggcgctggcctggctggccggatccagcccgcggccgctggcctacctcggcgtgttcgtcttcgtcatcgccggctggctggtgtcgctgtgcctgcacgaattcgggcacgcggtgaccgcctggcgcttcggcgaccgggacgcggcggtgcgcggctacctgacgctggacccgcgccgctacagccatcccgcgctgtcgctggtgctgccgatggtgatcatcgcgctgggcggcatcggtctgcccggtgcggcggtctacgtgcagacctggttcatgaccccggcccgccgcaccctggtcagcctggccggcccggcggccaacctggtgctggcggcggtgctgctggcgctgacccgggcgttcttcaccgccgaccacgcggtgctgtgggcgggcgtggccttcctggggttcctgcagctcaccgcggtgctgttgaacctgctgccgatcccggggctggacggctacgacgccctggaaccgcacctgagccccgagacgcagcgggcgctggcgccggccaagcagtgggggttcttcatcctgctgttcctgctgttggcgccggggctcaaccggtggttcttcgggatcgtctactggctgttcgacttctccggcgtgccgcactggctggccggcgcgggcaacgtgctgacccgcttctggagccgctgggtc

SEQ ID NO: 25677 - DNA, 546 bp, Mycobacterium avium
gtggtggccgtggccgaacctgagctcgaggagctggccgagctggtgcgccggctgtcggtggtgcacgggcgggtgacgctgtcgtcgggcaaggaggccgactactacgtcgacctgcgccgggccaccctgcatcatcgcgcctcggcgttgatcggcaggctcatgcgcgagctgaccagcgactgggactacgcggtggtcggcggcctgaccctgggcgccgacccggtggccaccgccatcatgcacgcgccgggccgcccgatcgacgccttcgttgtccgcaagtcagcgaaaacccatgggctgcaacgccttatcgaaggctcggaggtcgcgggcaagcgggtgctggtggtcgaggacaccagcaccaccggcaactcggcgctcaccgcggtgcgcgccgtccagcaggccggcggtcaggtgctgggggtggccaccgtggtggaccgcgccaccggcgccgccgaggccatcgaggccgaggggctgccctaccgcagcgtgctcggtctcgccgatctggggctgggc

SEQ ID NO: 25678 - DNA, 426 bp, Mycobacterium avium
atggccccgaagaagaaagtcgtcgggctgatcaagctccagatccaggcggggcaggccaacccggcgccgccggtcgggcccgcgctcggtcagcacggcgtcaacatcatggagttctgcaaggcctacaacgccgccaccgagaaccagcgcggccaggtcatccccgtcgagatcaccgtctacgaggaccgcagcttcacgttcgcgctcaagaccccgcccgcggccaagctgttgctcaaggccgccggtgtgggtaagggctcggccgagccgcacaagaacaaagtcgccaaggtcagctgggaccaggtcaaggagatcgccgagaccaagaaggccgacctgaacgccaacgacatcgacgccgcggccaagatcatcgccggcaccgcccggtcgatgggtatcaccgtcgag

SEQ ID NO: 25679 - DNA, 705 bp, Mycobacterium avium
atgagcaagcgcagcaaggcatatcgcgcggccgccgagaaggtggaccgcgacaacctctacaccccgttgcaggcggccaagctggccaaggagacgtcgtcgaccaagcaggacgcgaccgtcgaggtggcgatccggctcggcgtcgacccgcgcaaggcggaccagatggtgcgcggcacggtcaacctgccgcacggcaccggcaagaccgcccgggtcgcggtgttcgccgtcggcgagaaggccgagcaggcgcaggccgccggcgccgacatcgtcggcagcgacgacctgatcgaaaagatccaaggcggcttcctggacttcgacgcggccatcgccacgcccgaccagatggccaaggtgggccgcatcgcccgggtgctcggcccgcgcggcctgatgcccaaccccaagaccggcaccgtcacccccgacgtcgccaaggccgtcgccgacatcaagggcggcaagatcaacttccgggtggacaagcaggccaacctgcacttcgtcatcggcaaggcgtcgttcgacgagaaggccctcgcggagaactacggtgccgcgctggacgaagtgctgcggctcaagccgtcggcgtccaagggccggtacctgaagaagatcaccgtgtcgacgacgacgggcccgggcattccggtggacccgtcgatcacccgcaacttcgccgaggcc

SEQ ID NO: 25680 - DNA, 441 bp, Mycobacterium avium
gtgagcgacgaaggcgacgttgccaacgacgccgcaagcgacggcgctgacacgacggacgaccgcgccggcggtggccggaccgcggtggtgacgcggccgcagcgccctaccggcaagcggtcacggcagcggacggcgggggacgccgacgcggagccgtcggacgaggccgaggtctccgcgccggagaaagccgagaaagccaagcgcaagaaggccgcgaagccgaagaaatccgcggacacccgggcgaacccgtttgtgttcgtctacaactacctcaagcaggtcgttgcagagatgcggaaggtcatctggcccaaccgcaagcagatgctcacctacacctccgtcgtgctggccttcctggccttcatggtggcgctggtcggcctggcggatttcggcctgaccaagctggtgctgctggtgttcggc

SEQ ID NO: 25681 - DNA, 768 bp, Mycobacterium avium
gtgactaccttcgacggtgacccgtccgcgggtgacgcggtcgacctgagggagaccgacgaggccaccgaggccgccgacgaggccgccgagaccaccgaggacgccgccgagtcggccgagacgcagggcgaaccggcggaagaggtcgacccggccgccgcgctcaaggccgaactgcgcagcaagcccggcgactggtacgtcatccactcctacgcgggatacgagaacaaggtcaaagccaacctggaaacgcgggtgcagaacctcgacgtcggggactacatcttccaggtcgaggtgcccaccgaagaggtcaccgagatcaagaacggccagcgcaagcaggtcaaccgcaaggtgctgcccggctacatcctggtgcggatggatctgaccgacgactcgtgggccgcggtgcgcaacacgcccggggtcaccgggttcgtcggcgcgacgtcgcgcccgtcggcgctgtcgctcgacgacgtggtgaagttcctgctgccgcgcggcgcgacgaagaaggtcgccaagggtgcggccagcaccgcggccgccgccgaggcgggcggcctggagcgtccggccatcgaggtcgactacgaggtgggcgagtcggtgacggtgatggacggaccgttcgccaccctgccggccaccatcagcgaggtcaacggcgagcagcagaagctcaaggtgctggtgtccatcttcggccgcgaaacgccggtggaactgaccttcagccaagtctccaagctc

SEQ ID NO: 25682 - DNA, 2364 bp, Mycobacterium avium
gtggcaacagatcgcatcgcgaacccgtgggggacgcgcacaccctatgcgcccggcacccgatggccggaacgcatcgacacctatctggccgacggggtcaccgccgagtcggtggaccgctgggtgcaatcggcggcggtattgcattccaacggcgacggtttggacatcgccgtcaaggacgggcggatcgtgggggtgcgcgggcgcgccgtcgaccgggtcaaccacggccggctcgatcccaaggatctgttcggctggcaggccaacgcctccgccgaccggctcaccacgccgctgctccgggtgcgcggcgcgttgcggccgtgcgactgggacaccgcgatggagcggatcgtcgcgcgcagccgcgaactgctggaccgccacggccccagctcgatcggcttctacacctccgggcagttgttcgccgaggagtactacacccaggcggccatcgcgcacggggcgatcggcaccaaccacgtcgacggcaacacccggctgtgcaccgcgacggccgccgaggcgttgaaggaatcgttcggctgcgacggccagcccgggtcctacaccgacgtggaccacgccgacgtcatcgcgctgttcgggcacaacgtcgccgagacgcagaccgtgctgtgggcgcggatgctggaccggctggccggcagcgacccgccggccatcgtctgcgtcgacccccggctgacgccggtcgcccggcacgccaccgtgcacctggcgccgctgccgggcaccaacgtggcgctgatgaacggcctgctgcacgagatcatcggcaacggctggatcgatcgggactacatcgacgcgcacagcgtgggtttcgacgaattacaatgcagggtaagcgaattcacgcccgagtgggtggccgagatctgcggtgtggccgccacggacctccggcgggccgcccggctgatcggcaccgcgcagcggctactgtccaccgtgctgcagggtttctaccagtcgcaccaggccaccgcggcggccgtgcaggtcaacaacattcacctggtgcgcggcatgctgggcaggcccggctgcggggtgctgcagatgaacggacagccgaccgcggagaatacccgcgagtgcggcgccgacggcgacctggccggtttccgtaactggtccaacgactcccacgtcgccgagttggcggacctgtggaatctcgagccgctgcagatcccgcactacggtccgcccacgcacgccatgcagatgttccgcttcgccgaggaggggacgctgcgcatgctgtgggtgaccgccaccaaccccgcggtgtcgctgccggagttgccgcgcatccgcgacatcctgtcgcagcagcggctgttcctcgtcgtccaggacatcttcttgaccgagaccgccgcgctggccgacgtggtgttgccggccgcggcgtgggcggagaagacgggcaccttcaccaacgccgaccgcacggtgcacctgtccgaaaaggccgtggagccaccgggttccgcgcgttcggacttggagatcttcctggactacgcgcgccggatggatttccgcgacaaggacggccggccgtttccgccgtggaccgatccggagtcggcgttcgaggcgtggaagaaatgcagcgcgggccgaccgtgcgactacaccggcttgagctacgcgaagctgcgtggcggtagcggcatccaatggccgtgcaacacagatcatcccgacggtatcgagcggctgtatgaggatgggagatttccggccgcgcccgactactgcgaggcgtacggcaaggacctgatcacgggcgccccgctgcagcccgacgagtaccgctcgctgaacccgtccggcaaggccatcatcaaggcggcgcaatacctgcccccgcacgagcggcccggcccggattacccgttcgcgctgatcaccggccgcactatctaccactttcacacccgcacgaaaacggctcgggcccaacagcttcaggatgccgcgcccgaggtgtgggtggaggtctccgaacgcgacgcgcgccgcctgggcatcgaggccggcgatctggtgcacgtgagcactccgcgcggccgaatcacctgcgccgcgcgcgtcggcggcatccgcgacggggtgctgttcgtgcccttccactacggctactgggaccgggatggcggggatcatcaacgggccggcaacgaactcacggcgaccgactgggacccggcgtccaagcagccgagcttcaaaacggccgcagcccggctcgacatggccccgacccacacggcggcgccggtgagcgaggccgtcgcggccgggagcccgtca

SEQ ID NO: 25683 - DNA, 1389 bp, Mycobacterium avium
atgaccacgaccatcaccccggtaccgcagcccgcggcggcgcccgagcggcacaaggggcggcactggatcgacgactggcggcccgaagaccccgaattctgggagacgacgggcaaggcgatcgcccgccgcaacctgatcttctcgatcttcgccgagcacgtcgggttcagcgtgtggatgctgtggagcatcgtggtggtgcacatgacggccggaccgcacgggcacccgtcggcgtccgggtgggcgctgaccgccagtcaggcgctgtgcctggtggccgtgcccagcggggtcggcgcctttctgcggctgccctacacgttcgccgtcccggtgttcggcggccgcaactggacgaccatctcggcggccttgctgctgatcccgtgcctgctgctggcgtgggcggtgagccatcccggcatcccgttcggggtgctggtggcgatcgccgcgaccgccgggttcggcggcggcaacttcgcctcgtcgatggccaacatctccttcttctacccggagaaggacaagggctgggcgctggggctcaacgcggccggcggcaacatcggcgtggcggtggtgcagaaggtcatcccgcccgtcgtgatcgcgggcggcggcgtggcgctgtcccgggccgggctgttctacgtgccgctggcggtcgtggctgcggtgtgcgcgttcctgttcatgaacaacctgaccgagatcaaggccgacgtgaagccggtttggcagtcgctgcgccacgccgacacctggatcatgtcgctgctctacatcggcaccttcggatccttcatcggctactcggccgccttcccgaccctgctcaaaacggtgttcgggcgcggcgacatcgcgctggcgtgggcgtttctgggcgccgccatcgggtcggtgatccggccgctgggcggcaagctggccgaccgggtcggcggggcgcggatcaccgcggccagcttcgtaatgctggcggtcggcgcggcggccgcgctgtggtcggtgaaggcggtgaacctgccggccttcttcgccagcttcatgttcctgttcgtcgcgaccggcatcggcaacggttcgacctaccggatgatctcgcggatcttcaagatcaagggcgagctggccgggggcgatcccgacaccatggtgacgatgcgccgccaggccgccggcgcgctgggcgtcatctcggcggtgggcgccttcggcgggttcatcgtgccgctggcctacgcctggtcgaagtcgcagttcggcagcatcgaacccgcgctgcgcttctatgtggtgttcttcctgggcttgctggccgtcacctggtactgctacctgcgcaagcacaacgcgatcacccgggtcggcatc

SEQ ID NO: 25684 - DNA, 2499 bp, Mycobacterium avium
atggtcggacaccggttcgtggaggcgctgcgcgcccgcgacaccgagggccgttggcgcatcacggttttcgccgaggaggctgacgccgcctacgaccgggtggggctgacttcgtacaccgagagctgggaccgcgcgctgctggcgttgcccggcaacgactaccagggtgacccgcaggtccggctggtgctcaaccagcgggtcaccgaaatagaccgcgcgacaaagtcagtggtgaccgccgacggtcagcggcaccactacgacaccctggtcctggccaccggttcctacgcctttgtgccgccagtgcccggccacgagctgcctacctgccacgtctaccgcaccctcgacgacctcgacgccatccgcgccgacgcccagcgtgcggcgcagaccgaccatgctcgcgccggcgtggtcatcggcggcggcctgctcgggctggaggccgctaatgcgctgcgccagttcggcttagcgacccatgtggtcgagatgatgccgcggttgatggcccagcagatcgacgaggccggcggcgcgctgctggcccggatgatcggcgacctgggcatctcggtgcacgtcggcaccggcaccgaggcgatcgaaccggtcgagggccccgacgggtccacgacggtgcgggtgcgcctgagcgacggccaggtgatcgacgccggcctggtcatcttcgcggccggcatccggccgcgcgacgagctggcggtggccgccggcctcgcccgcgccgagcggggcggggtgctcaccgacttgtcctgccggacaagcgatcccgacatctacgcgatcggcgaggtggccgcgatcgacggccggtgctacggcctggtggggcccggctacacctccgccgaagtggtggccgaccggctgctggacggcagcgcggagttcggcgaggcggacctgtccaccaagctcaaactgctgggcgtcgacgtggccagcttcggcgacgcgatggggacgaccgagaactgcctcgaggtcgcgatcaacgacgcggtcaaccgcacctacgccaaactggtgctctccgatgacgccaagaccctgctcggcggtgtgctggtcggcgacgcctcgtcctacggggtgctgcggcccatggtcggcagcgagctgccgggcgacccgctggcgctgatcgcgccggcgtcctccggcggcggaacggcgttgggcgttggggcgcttcccgattcggcgcagatctgctcctgcaacaacgtcaccaagggcgacctgaaatgcgcgatcgccgacggctgcgccgacgtcgccgcgctcaagtcgtgcacctcggccggcacctcgtgcgggtcgtgcgtgccgctgctcaagcagctgctggaagccgagggggtggagcagtccaaggcgctgtgcgagcacttcagccagtcgcgggccgagctgttcgagatcatctcggccaccgagatccgcaccttctccggcctgctggagcgcttcggccgcggaaagggttgcgacatctgcaaacccgtggtcgcctcgatcctggcgtccaccgggtcggagcacatcctggagggtgagcaggcctcgctgcaggattccaacgaccacttcctggccaacatccaaaagaacggcagctactcggtggtgccccgggtgcccggcggcgacatcaagcccgaacacctgatcctgatcggccagatcgcccaggacttcggcctttacaccaagatcaccggcggccagcggatcgacatgttcggcgcccgggtggaccagctgccggcgatctggaagcggctggtcgacggcggcatggagtccggccacgcctacggcaaggcgctgcgcaccgtgaagagctgcgtgggcaccgactggtgccggtacgggcagcaggactcggtgcagctggccatcgacctggagctgcgctaccgcgggttgcgggcgccgcacaagatcaagatgggcgtctcgggctgcgcgcgcgagtgcgcggaggcgcggtccaaggacgtcggcgtcatcgccaccgagaagggctggaacctctacgtcggcggcaacggcggtatgacgcccaagcacgcgcagctgctcgccagcgacctggacaccgagacgctggtccgctacatcgaccggttcgtcatgtactacatccgcacggccgaccggctgcagcgcaccgcgccgtgggtcgagtcgctggacggcggtctggaccacgtccgcgaggtggtgtgcgaggactcgctggggctggccgaggaattcgaggccgcaatggagcggcatgtgcgcaactacaagtgcgaatggaagggcgtgctggacgatccggacaagctgtcgcggttcgtgtcgttcgtcaacgcccccgacgccgtcgattcgacggtggcgttcaccgagcatgccggccgcaaaatccctgtgtccattggcatgccgaagatccgtcagggg

SEQ ID NO: 25685 - DNA, 600 bp, Mycobacterium avium
gtgggcacggcacggcaggcggtcagcgatgagcagttctggctcgtcgagcacagccctgcccggacgcgggtgctcgacgccgccctggatctgttcgccgcgaacggtgtcagcggtacgtcgctgcagatgatcgccgacgcggtcggcatcacgaaagccgctgtctaccaccagttccgaaccaaggagcagatcgtcatcgccgtgaccgagcgagaactgggccggctggtgccggcgctcgaggaggccgaagcgcacgatgacgggccgcaagcccgggacgccttgttggtgcgggtgatcgagatggcggttcgtgaccgccgattggtgcgcacgctgcagttcgatcccgtggtcgtccggttgctggccgagcacgagccgtttcaacggttcatggatcgcctgtatcgggtgctgctgagcgatgcgggtctcgacgggcggatcgaggccgccatgttctcgggcgcgctcagcaccgcggtcatgcatccgctggtcgtcgacatcgacgacgagacattgctggaccgggtcaccgatctaagccgccgcctgctcggtctgcctcgcaagcccgtcgag

SEQ ID NO: 25686 - DNA, 309 bp, Mycobacterium avium
atggcgacctacgcaatcgtcaagacgggcggcaagcagtacaaggtcgccgtcggggacgtggtcaaagtcgagaagctcgactccgagccgggttcgaacgtgtcgctgccggtcgccctggtggtcgacggcgccaaggtgaccagcgacgccgccgcgctggccaaggtcgcggtcaccggcgaggtgctcgagcacaccaagggccccaagatccgcattcacaagttcaggaacaagaccggctaccacaaacgtcagggacaccgtcagcagctgacggtcctcaaggtcaccggtatcaag

SEQ ID NO: 25687 - DNA, 2145 bp, Mycobacterium avium
atggcagagaacaccatcaagtgggacaaggacgccgacggcattgtcacgctgacgctcgacgacccgaccgggtcggccaatgtgatgaacgagcactacaaggaatcgatgcacaacgctgtcgaacgccttgtggcagagaaggattcgatcaccggtgtggtgatcaccagcgccaagaagacgttcttcgccggcggtgacctcaagagcatgatcaacctcggcccggagaacgccggtgaggcgttcgacaccgtcgaggcggtcaagcgcgacctgcgcgcgctggagacgctcggcaagccggtggtggccgccatcaacggcgcggcgctgggcggcgggctggagatcgcgctggcctgtcaccaccggatcgccgcggacgtcaaggggctggtcgtcggcctgcccgaggtgaccctgggcctgctgcccggcggcggcggggtgacccgcaccgtgcggatgttcggcatccagaacgcgttcatgaacatcctgagccagggcacccggttcaagccggacaaggccaaggagatcggcctggtcgacgagctggtcggcagcgtcgaggaactggtgcccgccgccaaggcgtggatcaaggccaaccccgacgcccacgaacagccttgggacaaaaagggttacaagatgcccggcggcaccccgtccagccccgcgctggccggcatcctgccgtcgttcccggcgctgctcaaaaagcagctcaagggcgccccgatgcccgcaccgcgtgccatcctggacgcggccgtcgagggcgctcaggtggacttcgacaccgccagtcgcatcgagagccgctacttcacccagctggtcaccggccaggtcgccaagaacatgatccaggcgttcttcttcgacctgcagcacatcaacggcggcggctcccgccccgagggcatcgagccggtcaagatcaacaagatcggtgtgctcggcgcgggcatgatgggcgccggcatcgcctatgtctcggccaaggccggcttcgacgtggtgctcaaggacgtcagcctcgaggccgcccagaagggcaagggctactcggaaaagcttgaggccaaagcacttcagcggggcaagaccaccgaggagaagagcaagtcgctgctggaccgcatcaccccgacggccgacgccgccgacttcaagggcgtcgacttcgtgatcgaggcggtgttcgagaaccaggaactcaagcacaaggtcttccaggagatcgaggacatcgtcgagcccaacgcgctgctcggctccaacacctcgacgctgccgatcaccggtctggccaccggtgtcaagcggcaggaggacttcatcgggatccacttcttctccccggtcgacaagatgccgctggtcgaaatcatcaagggcgagaagacttccgacgaggcgctggcccgcgtgttcgactacacgctggccattggcaagaccccgatcgtggtcaacgacagccgcggcttcttcaccagccgcgtcatcggcaccttcgtcaacgaggcgctggccatgctcggtgagggcgtggcgccggccagcatcgagcacgccggctcgcaagccggctacccgtcgccgccgctgcagctgtccgacgagctcaacctggagctgatgcacaagatcgccgtcgccacccgcaagggcatcgaggacgccggcggcacctacgagccgcaccctgccgaggcggtcgtcgagaagatgatcgagatcggccggccgtcgcggttgaagggcgccggcttctacgagtacgtggacggcaagcgcacccgcttgtggcccggcctgcaggagacgttcaactccggcagcaccagtattccgttgcaggacatgatcgatcggatgctgttcgccgaggcgctggagacgcagaagtgcctggacgagggggtgctcacctccaccgccgacgccaacatcggctcgatcatgggcatcggtttcccgccgtacaccggtggtagcgcgcagttcatcgtcggctactccggtgccggcgggaccggcaaggaggccttcgtggcccgggccaaggagctggccgcccgctacggcgaccgcttcctgccgccggcgtcgctcaccagc

SEQ ID NO: 25688 - DNA, 1254 bp, Mycobacterium avium
ttggggtcgaccggcgcggatgagtacggtgatcgggtggcggtagctggggacgcagagctggagcgggtacgggcggttcaccaaatgcgctcgtaccgaatcggctcggtgctgcgggtcggcgtggtgggcctgatggtcgcggcgatgatcatcggcaccgcccgatccgagtggccgcaggaaagcgtgttgatcctgctgtacggaatcatcgccctcggtgctgtggcgctcgcgttcgcgccgtttcgccgctggatcgggatcggcagattggccggggtcggccggctggagccgttcgcgttcacggtcgtcgacatcctggcgttgaccatctttcagctgctgtccaccaacgggatctatccgctgctcatcatggccatgctgccggtcctgttgggactcgacgtctcctcccgccgggcggccgtggtgctgatcttctccatgctcgggttcgcgattgccgtgctgcaagatccggtgatgtcgagctcggtgcgtttgccggaggcgggttttcggttcctgctctacggctttctctgttgtgcggcatttttggtggtgcgcatcgaggagcgccatacccgctcggtggccgggctcagcgcgttgcgggaggaattgctcgcccagaccatgaacgcgtcggatgtgtcccagcgcaggatctcggagttcattcacgacgggccgctgcaagacatcctggcggtgcgccaagagctcgtcgagctggatgcggccgtgcccgatgacgaacgtatcggccgggcgctggccggtctgcagctggcctcggagcggttgcggcaggcgacgttcgagctgcatcccgcggtgctcgaacaggtcgggctgggtgctgccgtgcagcagctggccgaattcaccgcgcagcggtccgggatcgaaatctccaccgacatcgactattcggggcgcagcgccatcgacgcggtggtgttcggcgtggtgcgcgagctgctgtccaacgtcgtgcagcattcgcgggcccgcaccgcggcgatcatgctcggccgcaccgacgggacgtgcgtcctgcacgtcgtcgacgacggcgtgggcttcaaccaggagacggtggcgcgccgcttgggcgaggggcacatcgggctggcctcgcatcgcgcccgggtggaggccgccgggggagagctggtattcctggatgttccggtgggcacacacgtgtgcgtcgaggtaccgctgagaaac

SEQ ID NO: 25689 - DNA, 1275 bp, Mycobacterium avium
gtgactttttccctccgtcctgcgcgcttgggggagcgtgcgccgcgtcccggtccgctgccgcgcgaagtctggatcctgagctgggcgaacgtcatggtcgccttgggctacggggtcatctcgccggcgctgccgacctttgcgcgcagcttcggggtgagcatcaaggcggtgactttcctggtcaccgtcttttcgttgagccggttgtgttttgcgccgatcagcgggctgctcaccgaacgattgggggagcggcgaatctatatcgggggtttgctgatcgtggcggtgtccaccgccgcgtgcgccttttcccaggcgtattggcagttgatgctgtgccgggtgttcagcggcgtcgggtcgacgatgttctacgtctcggcgctggggctgatgatccacatcagccctgccgacgcgcgtggccggatcgcgggactgttcaccacctcgttcatggtgggcgcggtcggcggtccggcggtcggcggcctggcggcggggtgggggttgaccgccccgttcgtcgtgtacggcgtcgcgatgttgggtgtggcgctggtgctgttcctcggcctgcgcaattccgcgctggccgcaccgccacccccgacgcgatcgacggtcacgatgcgcgaagcgctgcgggtgcgcgcgtaccagtcagcgctgctgtccaatttcgcgaccggctggtcggccttcgggctgcgcatggcactcgtcccgctgttcgtctccgacgtcatgggtcggggtatcggcaccatcggcgtggtgctcgccgcgttcgccggcggcaacgcgctggcggtggtgcccagtggctacctgtcggatcggatggggcggcggacgttgttgatcgtcgggctggtgacgtccggggcggcgacggtctggctgggttttgtcgcgtcgctgccggtgttcctggtggcggccggcgtggtcggcgtggtcaccgggatctacatgtcgccgctgcaggccgccgtcgccgacatcctcggcaacgaggcgcgcgccggcctgccggtggccaccgtgcagatgatgtcggacctgggcgccatcgtcgggtccatggcggtgggctgggcggccgagcagatcggctacggctggggctttttcatcagcggggtggtcctgctgatcgccgccgtcggctgggtgatggcgccggaaacgcggacggcgacggagctggaggccgatctgatggcggcgagtcggacgtcgagccggtgtgaacagcaactt

SEQ ID NO: 25690 - DNA, 2052 bp, Mycobacterium avium
atgaccgtccccgcaaccgattcctggccagccccgatccgggtgccggccgggaccaccgccgccgccgcggtgcgcgacgcggggctgccgggccggggagcgcccgacgccgtcgtggtggtgcgcgacgcctcgggcacgctgcgcgacctgagctgggtgcccgacaccgacgccgaggtcgtccccgtcgcggccaacaccgacgagggccgcagcgtcatccggcactcggcggcacacgtgctggcccaggccgtgcaggagttgttcccgcaggccaagctgggcatcggcccgcccatcaccgacggcttctactacgacttcgacgtgcccgagccgttcacgccggaggatctggacaagctggaaaagcggatgcgccagatcgtcaaggagggccagctgttctcccggcgggtgtacgagtccaaggagcaggcgcgtgccgagctggccggcgagccctacaagctggagctggtcgacgacaagtccggtgaccccgacatcatggaggtcggcggcgacgagctcaccgcctacgacaacctcaatccccgtacccgggaacgggtttggggtgatttgtgccgcgggccgcacatcccgaccacccgccacatcccggccttcaagctgacccgcagctcggcggcctactggcggggcgatcagaacaacgccagcctgcaacgcatctacggcaccgcgtgggagtcgcaggaggcgctggacgaccacctgcggctgatcgaggaagcccagcggcgcgaccatcgcaagctgggcagcgagctggacctgttcagcttccccgacgaaatcggttcgggcttggcggttttccaccccaggggcggggtggtgcgccgggagctggaggagtattcgcggcgcaagcacatcgaggccggctacgagttcgtcaacaccccgcacatcaccaaggcgcagctgttccacacctccgggcacctggactggtacgccgacgggatgttcccgcccatgcacctcgacgccgaatacgacgacgacgggacggtgcgcaagcccgggcaggactactacctcaagccgatgaactgcccgatgcacacgctgatctaccggtcccgcggccggtcctaccgcgaattgccgttgcggctcttcgaattcggcaccgtgtaccgctacgagaagtccggcgtggtgcacgggctgacccgggcgcgcgggttcaccatggacgactcgcacatcttctgcacccgcgagcagctgcacggcgagctggcgtcgctgctgcggttcgtgctcgagctgctgggcgactacgggttgaccgacttctacctggagctgtccaccaaggacccggacaagttcgtcggctccgacgaaatgtgggagcaggccaccacttcgctggccgacgtggccgccgagtccggcctggagctggtgcccgatccgggcggggcggcgttctacggcccgaagatctcggtgcaggcccgcgacgcgctgggccgcagctggcagatgtcgacgattcaggtggacttcaacttcccggagcgattcgagctggaatacaccgcgtccgacggcacccggcagcggccggtgatgatccaccgcgccctgttcgggtcgatcgagcggttcttcggcatcctgaccgagcactacgcgggcgcgttcccggcctggctggcgccggtgcaggcggtgggcatcccggtcgccgacgagcacgtgccgtacctggaaagcgttgccgcacagctgaagtcgcacggggtgcgggtggaggtggacgccagcgacgaccggatggccaagaagatcgtgcaccacaccgcgcagaaggtgccgttcatgctgctggccggcgaccgagacgtggccgcgggggcggtcagcttccggttcggcgaccgcacccagatcaacggcgtgccccgcgacagcgcggtcgacgcgatcgtcaagtggatcgccgaccgcgagaattccgtccccagcgccgaactcgtgaaagtgtccagtggtgag

SEQ ID NO: 25691 - DNA, 1650 bp, Mycobacterium avium
atgggcgcgcagacggctttgaccttgctgctcgccgccatcgcggtcatcgtgctggtcgactggatcagcgagcgcacccgcctgcccagcgcgacgctgctggtcctggtcggcatcgggcaggcgctgctgccgggaccgaccatcggcctcgagcccgacgtggtgatgacgtgcatcctgccgcccctgctctaccacgcggcgctggaatcgtcgctggtcggtatccgccgcaatctgcgcacggtggtcagcctgtcggtcgtcctcgtgctgctgaccgcggcgtcggtcggtgtcgcgttcagcctgctcgtgggcggcgcgacgctcgcggtgggcatggtgctgggcgcggcggtggcgccgaccgatccggtggccgcgctcgccgtcgcccgcaaggagggcctgccgctcaacatcgtcacgctgatcgagggcgaggggctgctcaacgacgcgaccgcgctgaccacgctcgcggtcgccgtcaccgtggcgcgcggggccgcgttctcggcgccgtcggcgatccgggagttcgtgctggcggccgtcggcggcctggtggtgggccaggtgttcgcctacgcccggcgcctgctgcgccggtggcggcacgacgtgctgaccgccaacgccatctcgctggccacgccgtttctcacctatctggtcgccgagaagctgtccgcctccggcgtgctggccgtcgtggtgtgcgggctgatcgtcggccacgactcgccgcgggtggaatccggggcgagccgcctgcagactcgcgccgtctggcggctggtcaacttcctgctcgagggcgtggtgttcctgctgatcggccatcaggtgccggtgatcctggacgagctgggcggctacgcgttgtcgacgatcctggtggcggtcggggtgaccgtcgcagtggttctgctggtccggccgctgtggctgctgctcacccaggcgctgccccggtcgctgcacacccggctgggaaacgtcgacgattcggcgaccgacgacgccgagccgcggcccgagcgcacccgcgagcggctcagcggccgcgagatcgtcgtgctgagctgggccggcacccgcggcgtggtcagcctcgccgcgatcttcgcggtgccggtgctgaccgagggcaacgcgccgtttcccgaccgcgacctgctgctgttctgcaccctggtggtggtgctggtgacgctgatcggacagggtgtcaccttcggtccgctggtgcgcgccctgggcctgcgcgccaagaccaccgacgagctgcggctgcgcaaccgggcccgggcggccgcgctgcgggccgccctggaccggctcgactcgctggaccccgaggacggcgccgacgtcgatccccgggtgatcgacgttgtgcgccaacagttgtcggcgcagctggagcgctacgaacaccggctcaccctgttgtcggacgtcgacgagttgcccgccgcccccgcctacgaggccgccgtggggctgcgccgggtggccatcgacgcccagcgcgacgaactcgtgcgctggcgcgacgcgggcatgctgcccgaccagagcctgcgcgcgatcgaacgcgaacttgaccacgaggagagcatgctgccgatgggg

SEQ ID NO: 25692 - DNA, 2856 bp, Mycobacterium avium
ttgcctgaccggccgggcatcctcgggcggctgaccggccggtacgcgctgctggtggtggggctgtgggtgctggccgcggccgtcgccaatgtggctgtgccgcaactggaacgggtggtcgacagccacgcccggtccttcatgccgccgagcgccccgagcgcggtggccgccgcccgggccgcccagttgttcgaccagacgccgagcaacaacttcgtttacgttgtgctggaacgcaatcagcggctgggcgccggcgatcggcagttctacgacgcgttggcggcggcgctgggctcggaccaccggcacgtgtacgcggtgaccgacctgtggtcacagcccgccaccgcggccggcgcccagagcaccgacggccaggccgtcagcgtgatggtccggctggccggcatgctcggcactgcccaggcccgcgattcggtgaacgcggtgcgcgccaccgcccagaagctcggcccgccggccggcctgcaggtccatgtcaccggccccggcgccaccatcgtcgacgaattctccgcgatcgaccggcagatgctggggatcaccgccgccaccatcggcctgatcctgctgttgctgctggtggtgtaccggtcgccggtcgccgcggcgatcccgctgatctcggtggggctcgccctcgcgctggcccgcgccgtcgtcgccgccctcgggcaggccaatgtggttgaggtgtcgctgttttcggttgcgctgatggccgccatgacactgggcgccggcaccgattacgcgatcttcctggtgggccgctaccacgaagcgcggcgcggcggcgtcgcgccggcccaggcgctgaccgtggcctaccgttccatcgcgcccgtggtgatcgggtcggcgctgaccgtgtctgtggcattggcctgcctggttttcgcccacgtgggatcgttccgcagcgccggattaccttgcgctatcggcattctggccaccatggtggcggcgctgacgttgacgcccgcgctgatgagcctggcggtgcggcgcagatacctggaaccgcggccgtcgcgcaccgcgcggcgctggcgccgggtgggcaccaccgtggcgcgctggcccggtccgatcctggtcgccgcgttggggttgaccctgctggtcgccctgccgctggccggcatgcggatcggcttcaacgagcccgccgccacgccgtcgtccaccgactccaaccgcggatacgccagcgccggccggcatttcccggagaacgcgttgctgcccgacgtcatcgccattcgggccgaccacgacctgcgcaacccggcgggcttgatcgccatcgaacggatcacgcggcacatcatggccgtccccggcgtgcgtgccgtgcaatccgccagccgcccggacggcaaggtgcccgaacaggcgacgttgagctatcaggccggggtgctgggccgccagttcggcgacaccgtggattcgctgacccagcgcctggcgcgggtctccgagctggacggcgcgctggcgcagacccagcaagcggtggatggcctcggcaacggattacacggcggcagcgcgggtttggccgacatgtcgggcgcggccgacgacatgcgggccgggatggacggcctgcagcgcaacgtcaccacggtgtcgggctacctcgacccgctgcgcgacctcgtcgggcggacccccgactgcgccgccaacccgatctgctcgatggtggaccgggtgctggcgccggtcgacagcctggtgcagacgtcggcgcaactcggctccggagccgcgaaactgaccaccggctccaacaccgccgccaccgcgatggccgggctgccgcagaacgttgacgcgatgaaaagcgccctggtgcaggcgcgttcggcgacgcgcgatctgctgggactgtccgacacgctggggccgcagatgcgccagctgaccgactacctcaacgagatcagcacccagttccagggcagtgccgccgcggatttctacctgccgcagcgcgcgctcaccgatccgcgctacaccgccgtgctgaaccacttgatctcgcaaaccggccgcgccgcttacctgttggtgtacggcgacggcgcggagtggggcgccgacagtgccgagcgggccgagcaggtgcgcgcggccatcaaggaggccaccaaggaaggcaccctgacccccgtggaggtcgacctcgccggggtcggcccggtcaccgccgacctgcagcgcttcgtggccgacgacacccggctgctggtgggcgccgcgctggtgctgatcttcctgatcgtcaccgcgatgctgcgcagccccgtggcgggcctggtggtggtcgggaccgtcgtcacgtcatacgcctcggcgatcggtgccagcgtgctgatctggcagcacctgctgcatcaggagctgcactgggcggtcgccccgatcgcgttcatcgcgttgatcgccgtcggcgcggactacaacctgctgctggcgttgcgcatcaaacaggaagcggcggcgggacttcggaccgggatcatccgcgccttcggcggcaccggcggggtggtcaccgtcgccggcatcatcttcgggctgaccatgctggcgctgctgaccagcagcgtgctcagcatcgcccagatcggcaccaccatcgccgtcggtctgctgctggacactctggtggtgcgggcgttcatcgtcccgtccatcgtggcgctgttgggccgctggttctggtggcccagtcccctgccccgccgcggcgtcgcacgcgtcgtgaaaacggttgagccgcaaccggtcagcgtcgctactgcggtg

SEQ ID NO: 25693 - DNA, 891 bp, Mycobacterium avium
atgtcgaaccaacagcaagcggagcggatgacatcgggcaaagggttcatcgccgcgctcgaccagagcggcggctcgacgcccaaggcgctgcgcctgtacggcatcgaagacagcgcgtactcctccgagaaggagatgttcgacctcatccaccagatgcggtcgcggatcatcacctcgccggcgttcaccggcgaccgggtgctggcggcgatcctgttcgagcagaccatggaccgcgacatcgagggcaagccgtcgaccacctacctgtgggagaccaagggcgtggtgcccatcctcaagatcgacaagggtctggccgaagcgtccgacgacgtgcagctgatgaagccgatccccgggctcgacgagctgctgcagcgggccgtgagcaagggcgtgttcggcaccaaggaacggtcggtgatcggcggcgccaacccggcgggcatcgccgcggtggtcgcccagcagttcgagctcgcccaccaggtgctctcccacgggctggtgccgatcatcgaacccgaggtcaccatctcgatcgccgacaaggccaaggccgagggcatcctgcgcgacgagatcaccaagcaactcgactcggtgcccgacgggcagcgggtgatgctcaagctgagcctgcccaccgaggccaacttctaccgcccgctgatcgaacaccccaaggtgatgcgggtggtggcgctctcgggtggctactcccgcgaggaggccaacgagctgctggccaagaacgccggcctgatcgccagcttcagccgggcgctcaccgagggcctcacggtcgaccagtccgacgagcagttcaacgcgacgctggacaaggcgatccagtcgatttacgacgcctcggtcgccggc

SEQ ID NO: 25694 - DNA, 1083 bp, Mycobacterium avium
gtgacgctgggcgccgagcgggaacgacggctgaccggctggctgcgcggccggctgccggacgccgacgacgtgcgggtcgagggcatcgaccgggtcagcttcgggcactcggccgagatgatgacgatgagcgtcatcgcgacccggcgcggccgcgacgagcggcgcgacgtggtgttgcggctgcggcccagcccgccggcgctgctggagccctacgacctggcgcggcagttcggcatcctgcgcgccctggccgacaccgacgtccgggcgccgcgggcgttgtggctggaacccaccggagacgtgctcggccggccgttcttcgtgatggaacgggtcgccggagaggtctacgagatgcagccgcccgccgatgcgtccgatgacaccgtggccaggatgtgcgagagcctggccgaacaactggccgcgatccacgccgtcgacctcacccggaccggactggcccccctcgacgacggcgccggccacctggatcgcgaactcggccactgggccgccgagatgaaccgggtcaaacgcgggccgctgcccgccctggagcggctgcaccgggcgctgctttccggtaagcctgcgccgtgcccgcgcatcacgctggtgcacggcgacgccaaaccgggcaacttcgccttcaccggcggcgaggtcagcgcggtcttcgattgggagatgaccaccgtcggcgacccgctcaccgatatcggctggctggagatgctgtggatgcagccggtcgggatcaacagccatcccgcggcgctgcccatcgacgccctgctggcgcactaccagtccgccagcggcatcgagccggtcaaccggccctggtatcgggccttcaacgcctacaagatggcggtcatctgcctcatcggggcgatgctcgtcgaggacggccacagcgacgaccagaagctggtgctggccgcctacggcaccgggctgctgaccaaggccggactggccgagctgggcatcgacgaacccctcgacgacggcccggtgctgccgcggcaggaacgcatccagcaggtgctggcccgcgcccag

SEQ ID NO: 25695 - DNA, 1008 bp, Mycobacterium avium
gtgaaagcatccgtggtcaccagcccggaccgggccgaggtcatcgacgtcgagcgccccggcgtgggcccgcgcgacgtcctggtgcggatgcgtgcctgcggcatctgcggctccgacgcgttctacatcagcatcggcggcgtcccgccgcggcagggacacaccccgctcgggcacgaaccggccggcgaggtcgtcgaggtcggcgccgaggtgaccgggctggccgtcggtgaccacgtcgtcatcaacccgatggccgcgcccagcggcatcatcggcaacggcggagccagcggggcgctcgccgactacctgctgatcgaaaacgccgtccgcggaacaagtctcgaggtcattccggaccacatcccgtgggaggtggcggcgctcaacgaaccgatggccgtcgcgcgccacggcgtcaaccgctgtcaaccccgacccacggacaaggtcgtcgtcttcggcgccggcccgatcgggctgggcgccacgctggccttcaaatccctcggcgtgcagcacatcgtggtcatcgatctgattcccgggcgcctggacaaggcagtgcggatcggcgccgacgcggtcgtcaactccgccgaagaagacgtggcggcgcgcctggtcgagctgcacggcccaggcgagagcatgttccccggcaaggccggcaccgacatctacctcgacgccgccggcgcgccggccgtcgtcagcaccgcgctggccgccgccaagaagggcgccacgttgggaatcgttggcgtgcacaaggaaccggtgcccgtcgacctgatcaacgtgatgagcaacgagatcaccatcgtcgggagcatgggttatccggacgaaatcttcgaagtgaccggcgatctggtgaggaactgggagaagtacgcgctgatcgtcagccacaccattccgttcgaccgcgtcggcgaggcgctcgaactggcccgtactcccggcgccgccgacaaggtcgtcgtcaccttctgc

SEQ ID NO: 25696 - DNA, 1194 bp, Mycobacterium avium
gtgtccacgccgctgccgccgctggtggcgcccgcagaccagctgaccgccgacgagatggcccgctacagccggcagctgatcatccccggcctcggcgtggacgggcagaagcggctcaagaacgcccgggtgctggtgatcggggccggcgggctgggcgcgccgacgctgctctacctggccgcggccggggtgggcaccatcggcatcgtcgagttcgacgcggtcgaggagtccaacctgcagcgccagatcattcacggggtggccgacgtcgggcggtccaaggccgcctcggcgcgcgactcgatcgccgcgatcaacccgctggtcgacgtgcggctgcacgagttccggctggacgcgtccaacgccgtcgagctgttcggccactacgacctgatcgtcgacggcaccgacaacttcgccacccgctacctcatcaacgacgcagcggtgctggccggcaagccgtacgtgtgggggtccatctaccggttcgagggccaggcctcggtgtgctgggaggacgccccggacggccgcggactcaactaccgcgacctctaccccgaacccccgccgcccggcgcggtcccgtcctgcgccgagggcggggtgctgggcgtcgtctgcgccgccatcgcctcggtgatgagcaccgaggtgatcaaactcatcaccgggatcggcgaatccctgctgggccggttgatgatctacgacgcgctcgagatgagctatcgcaccatcgcgatccgccgcgacccctgcgacgcgtcgcggcccgccatcaccacgctggtcgactacgagcagctgtgcggcgccgcgccggccgcctccaccgacgccgccaccggcggggccgaggcggccatcaccccgcggcagctgcgcgagctgctggactccggcgccaagctggcgctgatcgacgtgcgcgaaccggtggagttcgacatcgtgcacctcgacggggcgcagctgatcccgcagtcgtcgatcaactccggggagggcctggcaaagctgccggccgaccgcatgccggtgctgtactgcaagaccggggtgcggtcggcccaggcgttggcggtggtgcgccaggccggattcagcgacgcggtgcatctgcagggcgggatcgtggcctgggcgcaacagatgcagcccgacatgatcctgtac

SEQ ID NO: 25697 - DNA, 717 bp, Mycobacterium avium
atgacccggtcctcttgccagtcctccgatgcagccagagaagccgaccgagcagccgattcacccgccccccgactgtcggccgaccacccgggcgtcaacgagctgttcgcggtgctggcctacggcgagatcgccgcgttctaccggctcaccgacgaggccaagatggctcccgacctgcgcggacggatctcgatggcgagcatggccgccgccgagatgcagcactacgagcagctgcgcgacgcgctggagagccggggcgtcgacgtggtgtccgcgatgtcgaagtacgtctcggcgctggagaactaccaccggctgacgatgcccagcacctggctggaggcgctggtcaagacctacgtcggcgacgcgttggccgccgacctgtacctggagatcgccgacgggctgcccgacgaggtcgccgacgtggtgcgcgccgcgctggcggagaccgggcactcgcagttcgtcgtcgccgaggtgcgcgccgccgtcacctccagcagcaagcagcgcagccggctggcgctgtgggcgcgccgcctgttgggcgaggcgatcacccaggcgcagtacctgctggccgaccacgacgagctggtcgatctggtggtgtccggcgccggcgggctgggccagctcaacgcgttcttcgaccggctgcagcagacccacgagcggcgcatgcgggaactgggcctgggc

SEQ ID NO: 25698 - DNA, 1512 bp, Mycobacterium avium
atgagcgcccccaccgaccaagcgaccgagcgcgtccaggccctggtcggcgacggtcaactgacccgcgcccaggccggcggcaaggcctggagcattcagcacatgctctcgctgaacatcccggtgccaccaggattcgtgttgaccaccgacgtgtgccgcgagtaccacgaccgaggccgcgttcttccggccggggtgacacgcgatatcgcgcgcgcaatggagaacctggaatcgcgctccgggcggcgcttcggccatgtcgatcacccgcttctggtgtcggtgcgttccggggctgcaatttcgatgcccggaatgatggacaccatcctcaatctcgggatgaacagcagcatcgaggaggcgctggctgccgagaccggcgacgcacgctacgccgccgacacccggcaccggttcaccgagcagttcaccagagttgtcggcgtcgagccgcccgaaaaccactgggaacaactcgatctggctatccgggcggtgttggaatcgtggaattccaagcgggccctcgcatatcgccgttctcatggcattcccgacgacggcggcactgctgtcacggtgcaggccatggtctttggcaatctcgatgaccgctcgggcaccggagtgctcttctctcgcgacccgctgtccggggccgcgcagccctacggtgaatggttgccccgtggtcagggcgaggacgtggtctcgggccgcaaagacgccctgcaccttgaccaccttgccgcaaccatgccgtctgtgcaccgggatctgcttgccgccgcagccacgctcgaacgtcacggtcgtgacatgcaagacatcgaattcacggtgcagtccgggaagctgtggctgttgcaatcccgcgcggccaaacggtccccgcaggcggctctgcgctgcgcggtgcagctgcagcgcgaaggcgtgatcagcaccaaggaggcgctcgaccgcctcaccgctgaacacgtccgcgcactgcagcgccccaccctcgaccccgccgctgtcgcagcctctccccccgtcgcctcgggcaaacccgcctccccgggcatcgccacaggcctcgtcgtcatcgatgccgacgaggccgaagaccttgccgacaagggtcgcgcggtgatcttggcccggcccaccaccgatcccgatgacgtcgccgccatgtccgcgtcggtggccgtcgtaaccgaattgggtggctccacttcgcatgccgcggtcgtgtgccgcgagatggcggttccctgcgtagttggctgcggcatggactcggtgaccgccctggccggtcgggtcgtcacagtcgacgcagacaccggcaccgtgcacctcggcgagctgccggtgcgtcccttgctggaagcagatgacgaggatctgcgcaccatcgaacggtggttgcgcgacgacctagaaaactacgaccccagctatgacgtcgtggcgctgatcgaacggcgccagcagcgcggagcaacgcgg

SEQ ID NO: 25699 - DNA, 1146 bp, Mycobacterium avium
gtgcagatttcggggacgctgctactgcaactcggcgccctcctggccactctggccgtattgggcgccgccgcgcgccgattcgcgttgtcgcccatccccgtctacctgctggcgggcctggcgctgggcaagggcgggctgctgccgctggccaccggcgggcagttcatcaccaccagcgcgcccatcggcgtggtgttgctgctgctgaccctgggctgcgagttctccgtcgccgaattctccagcagcatgcggcaccacttgccgtccgcggcggtcgacgtcgtgctgaacgccgcgcccggcgcgatcgccggctggctgctgggactggacggggtggccatcctgtgcctggccggcgtcacctacatctcctcgtcgggcgtcgtcgcccggctgctggaggacctgcgccggctcggtaaccgggagaccccggcggtgctgtcggtgctggtgctcgaggacttcgcgatggccgcctacctgccgctgttcgcggtgctggcgtccggcggcggctggctgcacgccgtcgtcggcatggtggtggcggtgagcgcgctggtggcggcgttcgccgcgtcctaccgctggggtcaccacgtgcagcggctggtcgaacatcccgactccgaacagttgatgctgcgggtgctcggcatcaccctgatcgtggcggccatggccgaatccctgcacgcctcggccgcggtgggcgcgttcctggtgggcctgacgctgaccggggagaccgcgacccggacccgtcaggtgctggcgccgctgcgggatctgttcgccgccatcttctttctggcgatcggctactcggtggatccgcacgagctgatcccgatgctgcccgcggcgctgatcctggccgccgcgaccgcggcgaccaaggtggccaccgggatcttcgccgcccggcacgacggggtggcgcggcgcgggcagttgcgggcgggcaccgcgctgatcgcccgcggcgaattctcgttgatcatcatcggattggccggcagctcgctgcccgcggtcgcggcgctggcgacgtcctacgttttcatcatggcgatcgcggggccggtgctcgcccgctacaccggcccgcggccggccgcaccggcgacc

SEQ ID NO: 25700 - DNA, 1749 bp, Mycobacterium avium
gcaatcgcgcgccgcgtgcacgggcacgccgaggcgatcgccgccgcgctgggcaccgcggtggtgcacgacaggtacttcgacaccgtgctggcgcgggtgccgggccgggcccacgaggtgatcgccgcggccaaggccaggggcatcaacctgtggcgggtcgacgacgaccacgtctcggtggcctgcgacgaggccaccaccgacgaacacgtcgccgcggtgctcgaggcgttcggcgtcgcacccgccgagcccgtcgccagcgaaatcgctacccgcacttcggaattccttacccatcccgccttcacccagtaccgcaccgagacggcgatgatgcgctacctgcgcaccctggccgacaaggatattgcgttggaccgcagcatgattccgctcggctcgtgcaccatgaaactcaacgccgccgccgagatggagccgatcacctggccggagttcgcccgtcagcaccccttcgccccggcgtccgacacgccggggctgcgccggctcatcggcgacctggagaactggctggtggccatcaccggctacgacgccgtctcgctgcaacccaacgccgggtcgcagggcgagtacgccggcctgctggccatccacgactaccacgccagccgcggggaaccgcaccgcgacatctgcctcatcccgtccagcgcgcacggcacgaatgccgcgtcggcggccctggccgggatgcgggtggtggtcgtgggctgccacgacaacggcgacgtcgacctcgacgacctgcgcgcgaaggtcaccgaccaccgcgaccggctgtcgacgctgatgatcacctacccgtccacgcacggcgtctacgagcacgacatcgccgagatctgcgcggccgtccacgacgcgggcggccaggtgtacgtcgacggcgccaacctcaacgcgctggtcgggttggcccggccgggcaagttcggcggcgacgtcagccacctgaacctgcacaagacgttctgcatcccgcacggcggcggcgggccgggggtggggccggtggcggtgcgctcgcacctggcgccgttcttgcccgggcatccgcacgccccggagctgccgcaggggcatccggtgtcctcggcgccctacggctcggcgtcgatcctgccgatcagctgggcctacatcaggatgatgggcgccgacggcctgcgcgcggcgtcgctgaccgcgatcacctcggccaactacatcgcccggcggctcgacgaatactttccggtgctctacaccggcgagaacggcatggtggcccacgagtgcatcctggacctgcgtcccatcaccaaggccaccggcgtgaccgtcgacgatgtcgcaaaacggttggcggactacggttttcacgctcccaccatgagcttcccggtggccggcacgctgatggtggagcccaccgagagcgaaaccctcaccgaggtggacgccttctgcgacgccatgatcgccatccgcggcgagatcgaccgggtgggtgcgggggagtggccggtggaggacaatccgctgcgcggcgccccgcacaccgccgagtgcctggtgaccaccgactgggaccacccgtacagccgcgaacaggcggcctatccgctgggcaaggacttccgacccaaggtatggccgccggtgcgacgcatcgacggcgcctacggcgaccgcaacctggtgtgctcgtgcccgccggtcgaggcgttcgcc

SEQ ID NO: 25701 - DNA, 1467 bp, Mycobacterium avium
atgagttcgtcggttaccccgtcgcgtcccaccaccggcaccgcccagatcggcgtcaccgggctggccgtgatgggttcgaacatcgcccgcaatttcgccaggcacggctacaccgtggcgctgcacaaccggtcgatcgccaaaaccgacgcgctgctgaaagagcacggcgacgagggcgagttcgtgcgctgcgaaaccatcgccgaattcctcgacgcgctggaaaaaccgcgccgcgtgctgatcatggtcaaggccggcgaccccaccgacgcggtgatcaacgagctcgccgacgccatggagcccggcgacatcatcatcgacggcggcaacgccctctacaccgacaccatccgccgggagcaggcgatgcgcgaacgcggcctgcacttcgtcggcgccggcatctccggcggcgaggagggcgcgctcaacggcccgtcgatcatgcccggcggcccggccgagtcctaccggtcgctgggcccgctgctcgaggagatctccgcgcacgtcgacggggtgccgtgctgcacgcacatcggccccgacggggccgggcacttcgtcaagatggtgcacaacggcatcgagtactccgacatgcagctgatcggtgaggcctaccagctgctgcgcgacgcgctgggcaagaccgccgagcagatcgccgacgtgttcgacgaatggaactccggcgacctggacagcttcctggtcgagatcaccgcgcaggtgctgcgccagaccgacgccaagaccggaaagccgctcgtcgacctcatcctcgacgaggccgaacagaagggcaccggccgctggacggtcaaatcggcgctggacctcggcgtgccggtgaccggcatcgccgaggcggtgttcgcccgcgcgctgtcgggctcggtggcccagcgcagggccaccaccgggctggcgtcgggccgactcggcgaaaagccaagcgatgcagcacagttcaccgaggacatccgccaggctttgtacgcgtccaagatcatcgcctacgcgcagggcttcaaccagatccaggccggcagcgccgaatacggctgggacatcacccccggcgacctggccaccatctggcgcggcggctgcatcatccgggccaagttcctcaaccggatcaaggacgccttcgacgagaaccccgacctgccgaccctgatcgtcgcgccgtatttccgcagcgcgatcgaggccgccatcgacggctggcgccgggtcgtggtcacggccacccggttgggcatcccgatccccggcttctcctcggcgctgtcctactacgacgcgctgcgcaccgagcggctgcccgccgcgctcacccagggtctgcgggacttcttcggcgcgcacacctacgggcgcatcgacgaggaccccgacaagcgcttccacacgctgtggagcgccgaccgccgcgaagtgccggcg

SEQ ID NO: 25702 - DNA, 585 bp, Mycobacterium avium
atgcctctgctgaccatcggcgaccagttccccgcctacgagctgaccgcgttgatcgcgggcgacctgtccaaggtcgacgccaagcagcccggtgactacttcaccaccatcaccagcgaggaccacgccggcaagtggcgcgtggtgttcttctggcccaaggacttcaccttcgtctgccccaccgagatcgccaccttcggcaagctcaacgacgagttcgaggaccgcgacgcccaggtgctcggcgtctcgatcgacagcgagttcgtccacttcaactggcgcgcccagcacgaggacctcaagaacctgccgttcccgatgctctcggacatcaagcgcgaactgagcctggccaccggtgttctcaacgccgacggcgtggccgaccgggccaccttcatcgtcgacccgaacaacgagatccagttcgtctcggtcaccgcgggttcggtgggccgcaacgtcgaggaagtactgcgggtgctggatgcgctgcagtccgacgagctgtgcgcgtgcaactggcgcaagggtgacccgacgctgaacgccaccgaactgctcaaggcctctgct

SEQ ID NO: 25703 - DNA, 1377 bp, Mycobacterium avium
gtgacggcgaagtgggtcggccgctgcctggaatgcggcacctggggcaccgtcgacgaggttcccgcgctcagcgcggtggccggccgtcgcccgcgcctgacggccgcgtcgcaggccgtgccgatcacctccatcaagcccgacgccagccggcaccgctcgaccggtgtggacgagctcgaccgggtgctcggcggcggcgtggtgcccggttcggtcacgctgctggccggcgatccgggcgtgggcaagtcgacgctgctgctcgaggtcgcgcaccgctgggcgcagtccggccggcgcgcgctgtacatctccggtgaggagtcggccggccagatccggctgcgggccgaccgcatcggctgcggcggggaccaggtgtatctggctgcggaatccgacctgcacacggtgctcgagcacgtcgccacggtcaagcccgcgctggtgatcgtggattcggtgcagaccatgtccaccaccgaggccgacggcgtcgccggcggggtcacgcaggtgcgggcggtgacggcggcgctgaccgccgcggccaaggccaacggggtggcgctgatcctggtcgggcacgtcaccaaggacggcgccatcgccgggccgcggtcgctcgagcacctggtcgacgtggtgctgcacttcgagggcgaccgcaacggctcgctgcggatggtccgcggcatcaagaaccggttcggcgccgccgacgaggtcgggtgttttctgttgcacgacaacgggatcgccggcgtcaccgacccgtcgaacctgtttctggatcagcgctcggccccggtgccgggcaccgcgatcacggtgacgctggacggcaaacggccgctgatcggcgaggtgcaggcgttgctggccagcccgtcgggcggctccccgcgccgtgcggtcagcggcatcgaccactcccgggccgcgatgatcaccgcggtgctggaaaagcacggaaagctgccggtcgcggtcaacgacatctacctgtccacggtcggcggcatgcggctgaccgacccgtcgtcggatctggccgtcgcgatcgcgctggcgtcggcgctgtccgagctgccgctgccgacgacggcggtgatgatcggcgaggtggggctggccggggacctgcggcgggtcagcggcatggcgcggcggctgagcgaggccgcccggcaggggttttccatcgcgctgattccggacggcgacgacccgcggcgcgagatcgtgcccagcgggatgcgggcgctacgggccccgaccattggtgcggccctgcagcacatggtcgacatcgccgagccccgcaaaggctggacgcatcgtgcactggggccgcagaatgacacgctg

SEQ ID NO: 25704 - DNA, 756 bp, Mycobacterium avium
gtggccggtatcgacctcaacgccgacctgggcgagggcttcggcgtctggcgcctcggtgacgacgacgccatgctcggcatcgtcagcagcgccaacgtggcgtgcggtttccacgccggcgaccccgccgggctgctgcgggtgtgccggtcggccgccgagcgcggggtgcgagtcggcgcgcaggtcagctaccgcgacctggccgggttcggccggcgtttcatcgacgtcgccgccgacgagctgctcgccgacgtggtgtaccagatcggcgcgctgcaggcgatcgcgcacgcggcgggttcttccgtgtgctacgtcaaaccgcatggcgcgctgtacaacacgatcgtgacgcaccccgcgcaggccgccgccgtggccgaggcggtccggctggtggaccccggcctgccggtgctgggcatggccggctcagtgtttttcgacgaggccgcccgccgcggtctgcgggtggtcgccgaggcgttcgccgatcgggcctaccggccggacggccggctggtctcccgccgggaaccgggcgcggtgctggcagacccggcggccatcgccgagcgggtgctggccatggtcgagaccggggcggtcaccgccgtcgacggcacccggctcgcgctgagcgtggaatcggtttgcgtgcatggcgattcgccgggggcggtgcagatcgccaccgcggtgcgcgatcgcctgcgggcggccggcgtcgagatccgggcgttctgc

SEQ ID NO: 25705 - DNA, 705 bp, Mycobacterium avium
ttggtcccggagacggggttggccccggagacgggcagctcaggcgccgtagccgccgtcgtcccggctgccgggtcgggggagcgactggcagcgggaattcccaaggcattctgtgagatcgacggtgccagcatgctggcccgcgccgtcgccggtctgctggactccaaggtggtcgaccacgtggtggtggcggtgcccgccgaccgcgtcgacgaggccaaacgactgctggccgcgcaggccaccgtcgtcgccggcggagccgaccgcaccgcatccgtgcgcctggccctggccgccgtgcccggcaaccccgcgttcgtgctggtgcacgacgccgcccgcgccctgacgccgccggcgctgatcgcccgggtggtgcaggcgctgcgcgacggtcaccgcgccgtggtgccggcgctgccgctgcacgacaccgtcaaggccgtcgacgccaacggggtggtgctcggcacgccggaacgcgacgggctgcgggcggtgcagacaccgcagggtttcgccaccgacctgctgctgcgcgcctacgccgccggggccggcacggcgggtttcaccgacgatgcgtcgctggtcgagcacgtcggcggccaggtccaggtggtcgacggcgacccgctggccttcaagatcaccacccagctcgatctgctgctggccgagaccatcgtgcgccgg

SEQ ID NO: 25706 - DNA, 1404 bp, Mycobacterium avium
gtgaccgatcgcccccgcttgcggctacacgacacggcagccggtgctgtgcgtgatttcgtgccgctgcgcgacggccacgtctccatctacctctgcggcgccaccgtgcagggcctgccgcacatcggccacgtccgcagcggggtggccttcgacatcctgcgccgctggctgatcgccctcggctacgacgtcgccttcatccgcaacgtcaccgacatcgacgacaagatcctcaacaaggccgccgcggcgggccggccgtggtgggagtgggcggccacctacgaacgcgcgttcagcgccgcctacgacgccctggacgtgttgccgccgtcggccgagccgcgcgccaccgggcacatcacccagatggtcgaattgatcgagcggctgatcgaaaagggccacgcctacaccggcgacggcgacgtctacttcgacgtgctgagctaccccgagtacgggcagctgtccgggcacaggatcgacgacgtccaccagggcgagggcgtggccagcggcaagcgcgaccaacgcgacttcacgctgtggaagggcgccaagcccggcgagccgtcctggcccacgccgtggggccgcgggcgccccggctggcacaccgaatgcgtggccatggcccacgagtacctcggccccgaattcgacatccattgcggcggaatggatttggtgttcccccaccacgagaacgagatcgcccagagccgcgcggccggggacgggttcgcccgctactggctgcacaacggctgggtgaccatgggcggggagaagatgagcaagtcgctgggcaacgtgttggccatcccggcgatgctgcagcgggtgcggcccgccgagctgcgctactacctgggcagcgcgcactaccggtcgatgctggagttctccgacaccgcgctgcaggacgccgtgaaagcctatgtgggagttgaggaattcctgcaccgggtgcgggtgcgggtcggcgcggtggagccgggcgagcccaccccgcggttcgccgacgcgctcaacgacgacctggcggtgccggccgcgctggccgaggtgcaccaggcccgcgccgaaggcaaccgcgccctggacagcggcgatcacgagggcgcgctgcggcaggcccgctccatccgcgcgatgatgggcatcctgggctgcgacccgctgcacgaacgctgggagacccgcgacgagtcatcggcggccctggccgccgtcgacgtgctggtgcgcgcggagctgcagaatcgggagaaggcgcgcgagcagcgcaactgggcgctcgccgacgagatccgaaaccggctcaagcaggccggcatcgaggtcaccgacaccgccgacgggccgcagtggacgttgggcggagacggcaag

SEQ ID NO: 25707 - DNA, 1431 bp, Mycobacterium avium
atgacgaccaaggtgggtgagcacgcggtggtgttgggggcgagcatgggcggtttgctggccgggcgctcgctggccgacttcttcgaccgggtcaccgtggtggagcgcgacccgctgcccgacgcccacggcgctcggcggggtgtgccgcagggccggcatctgcacgccctattgtgccgcggcgcccaggcgatcgaggagttgttcccgggtgttctcgaccagatggtccgcgacggcgcccagtacttcgacggccaggacctctcgcagctctactacaacatcggcgggcatctgatgacgcgcagcggcgccgcccccggactgaccgcctacagcgcgacccggccgttcctcgaggaccacgtccgcgggcggctgcgcggcattcccaacgtcaccctgcgcgacgagcactgcgtcacgcgtctcgtctcgaccgccgaccgccggcgcgtggtgggggcgtgggtggccgacggccggaccggcgaaaccaccgcgatgcccgccgatttggtggtcgacgccaccgggcgcgccgcccacacgcccacctggctggacagcctggggtatgaccgcccgcgcgaggaccgcgtcaccgtgcagctcacctacgccagccaggcgttgcgcatgacgggcgaggcgccgcgcgaactcggcttgctgatcgggatcgtgccgggcaggccgcgcggctgcgggctgctgcactgcgagcacgacacctggctgctcaccgtgatgggggtcggcggcgaggagcccgcgacgctggacctcgccaccctgtgcgatttcatcgccgactgcgcaccggcgcacctgctcgccgcggtgcgcggcgccgaacccgtcggggagccggtgcggcaccggatgccgtgcagccgctggcgccgctacgacaagctgcggcgtttcccggacggcctgctggtcaccggcgacgcgatctgcagcttcaacccgatctacggccagggcatgtcggtggccgcgttggaggcactggcgctgcgcgactgcttgtcaagcggcacaacggatctggcgcgccgattcttccgcgccgcggcggcgccgatccggcaggcctggcagctgtccaccaaccccgacctcgccctgcccgaaatcgagggcaccccgccgctgatagcccgggcgttcaacaagtacgtcgatcgggtgctcaccgcggccgaaaccgacacggtcgcgctgaaccagttcatcagggtcacctcgctcgtcgaccccgcgacccggctgttgcggccgagcatcatgtggcgcgccgcgcgcgcccgcggcgccgatcaccccggcacggccggcggcagcggcacgccgagttcggccagcaccccgcgcgccaacgtcgggaagtcggtgatgagcccgtcgactccg

SEQ ID NO: 25708 - DNA, 816 bp, Mycobacterium avium
gtgagtgctgggggttcgcccctgcggaatggggaccccgccccggcgcgtgggaccgttccgctgacgcctgacgcctgcccgtcctggctgcgtccgctggtcgacaacgtcgacgacgtccccgacgcggcccggcgccggttgccggccgacgtgctggcgatgatcaccaccaaggccgcgtcggcgctgacgagcgtgcgcggcgccgcgcgggaagccgcggtgctggtgctgttctccggcccggaatccgggccgcccggcgggggcccgcccaccgacgccgacctgctggtcaccgtgcgggcgtccacgctgcgccaccacgccgggcaggcggcgtttcccggcggcgccgccgatcccaccgacgacggcccggtggccaccgccctgcgcgaggcccgcgaggagaccgggatcgacgtcagccggctgcatccgctggccacgatggagaagatgttcatcgcgccctcgcagttccacgtcgtgcccgtgctggcgtattcgcccgaccccgggccggtggccgtggtcaacgaggccgagaccgcgctggtggcgcgagttccgttgcgcgccttcatcaatcccgccaaccggctgatggtgtaccgcggcgacttgggccgccggtgggcagggccggcgtttctgctcaacgagatgctggtgtggggcttcaccggccaggtgatctccgcgctgctcgacgtcgcgggctgggcccagccctgggacacctccgatcagcgggagttggacgcggcgatggcgctggtcggcgagcggggtgacgcactcgaa

SEQ ID NO: 25709 - DNA, 1644 bp, Mycobacterium avium
atgaccaccccgctgctgtcggtcgagggcctgcatgtcgggttcggcgagcacgccgcggtgcgcggcctggatttgcgggtactgcccggccagaccgtcgcggtggtgggcgagtccgggtccgggaaatccagcaccgccgccgcgatcctgggactgttgccgcccggcggtcgaatcacggccgggcgcatcatgttcgatggtgtggacatctcggccgccgaccgccgcgcactgcgctcgatgcgcggccggcaaatcggctacattccgcaggacccgatgaccaacctgaacccggtttggaaggtcggcttccagatccgggaagcgttgcgggccaacacctccgaccgcgacacccggcgtcgcgcggtgcagctgctggaagcggcgggaatgccggacccggcgaaacaagcggcccgctacccgcaccagctgtccggcggcatgtgccaacgcgcgctgatcgccatcgggctggccgggcggccgcggctgctgatcgccgacgagccgacctccgcgctggacgtcacggtgcagcgccaggtgctcgaccacctgcagcggctcaccgccgacctcggcacggccgtgctgctgatcacccacgacctggcgctggcggcagagcgcgccgagtcggtggtcgtcgtgcacgacggtgtcgcggtggaatccggtgcggcgcagtcgatactgcaggatccgcggcacgagtacacccgccggctggtggccgccgcaccggcgctgacggtcagcggcggcgcgcggaccggcccgcggcagccggaccgcacgcaaccggagcccgccgacatcctcgtcgcctccgacttgaccaagctgtaccgggagccgcgcgcaacattgtggcggcgcaccgaatttcgtgccgtcgacgcggtgtcgttccggctgcaccgggcccgcacgctggcgattgccggagagtcggggtcggggaagtccaccctggcgttgatggtgctcgggctgttgccgcccacctcgggcaccgtggttttcgacggcacccgcatcgacgacacgttgtcgggcgaccaacacctggccttccgccgccgggtgcagccggtgttccaaaacccttacagcagtttggatcccatgtactcggtgtttcgcgccatcgaggaaccgttgcggatccaccgcgtcggtgaccgcaggcagcgcgccaaggcggtgcacgacctcgtcgaccaggtggcgctgccgtcgtcggtgctgaaccggctgccccgcgaattgtcgggcgggcagcggcaacgggtggcgatcgcccgcgcgctggcgttgcggccgcaggtgctggtctgcgacgaggcggtgtccgcgctcgacgtgctggtgcaggcgcagatcctggagctgttggccaggctgcaggccgagctggggctggcgtatctgttcatcagtcatgacctggcggtgatccgccagatcgccgacgacgtcctggtgatgcgcgccgggcgggtggtggagcaggcgcccaccgaaaagctgttcaccgccccggcccaggactacacccggcagctgctggatgccatcccgcgaccgcggcgcggcggagataggttgtcaagctgtgacggc

SEQ ID NO: 25710 - DNA, 873 bp, Mycobacterium avium
atggctgaacggatcagggcgcggggcggattctggcgcgagacgtggcgccggctgcggcgacgtccgaagttcatcggcgcgggattgctgatcctggtgatccttgccgtggcgctgttccccgcgctgttcaccgccgccgatcccacctacgccgatcccgcccagagcctgttgccgccgtcgcgcacgcactggttcggcaccgatctgcagggccacgacgtgtacgcccgcaccgtgtacggggcgcgcgcctcggtcaccgtcgggttgggcgccgcggcgatcgtcttcgtggtcggcggcgcactgggcgcgctggccggcttctacggcggctggatcgacgcggtggtctcccgggtcaccgacgtgttcttcgggctgccgctgctgctggccgcgatcgtgctgatgcaggtgctgcaccaccgcacggtgtggacggtgatcgcgatcctggcattgttcggctggccccaggtggcccggatcgcgcgtggggcggtcctggcggtgcgcgccagcgactacgtgcttgcggctaaagcgttgggcatgagcaggtttcagatcctgatccggcacgcgctgccgaacgcgctggggccggtgatcgcggtggccaccatcgcgctgggtcttttcatcgtcaccgaggcaacgttgtcctacctcggcgtggggctgccgccgtcggtggtgtcgtggggcggcgacatcaacctcgcccagacacggctgcgggccggttcgccgatcctgttctatccggccggcgcgctggcggcgaccgtgctggccttcatgatgatgggcgacgcgctgcgcgacgccctcgacccggcgtcgcgggcgtggcgggca

SEQ ID NO: 25711 - DNA, 924 bp, Mycobacterium avium
atgggttggtacatcgcacgccggatcgccgtcatggtgcccgtatttctgggcgccaccctgctgatctacgccatggttttcctgctgcccggcgacccggtggccgcgatcgccggggaccgcccgttgacgcccgcggtggccgcggcgctgcgggcccgctaccacctcgacgatccgttcctggtccagtacctgcgctacctcggcggggtgctgcgcggcgacctgggccgggcctattccgggctgcccgtcagtgatgttctggcacatgcctttccggtcaccctgcggctgtcgttgatcgcgctggccgtcgaggcggtgctgggcatcgggttcggggtcatcgcggggctgcgccagggcggcctgttcgattccgcggtgctgatcaccggcctggtcatcatcgcggtccccatcttcgtgctggggttcttggcgcagttcgtgttcggggtgcggttgggcatcgcgccggtgacggtgggcaacgccgcgaccttcacgcggttgctgttgcccggaatcgtgctgggctcggtgtctttcgcctacgtggtgcggttgacccggtcgacggtggcggtcaatgcgcatgccgattacgtgcgcaccgccaccgccaagggattgtcacggccccgggtggtgacggtgcacatcctgcgcaattcgctgatcccggtggtgacgttcctgggggcggatctgggcgcgctgatgggcggggccatcgtcaccgaaggcatcttcaacatccacggcgtgggtggggtgctctaccaggccgtcacccggcaggaggcccccaccgtggtgtccatcgtgacggtgctggtgctgatctacctggtcaccaacctggtggtggacctgttgtacgccgtgctggacccccggatccgttatggc

SEQ ID NO: 25712 - DNA, 1959 bp, Mycobacterium avium
gtgaagcccgtgaccgccagcaacaccgcaaaccccccgtcgtatccgccgccgccgcagttcgtcgagcaggccaatgcgggtgagcagttgtaccgcgaggccgagcgggaccggttggcgttctgggccgagcaggccaaccggttgtcctgggccacaccgttcaccgaggtgctggactggtcccgggcgccgttcgccgagtggttcgcggacggaacgctcaacgtcgcctacaactgcgtggaccgccacgtgcaggccggccacggcgaccgggtcgccatccactgggagggcgaatctcccggcgatcagcgcagtctgacctattccgagctgtacacgcaggtgtgcaaggccgccaacgcgctgaccgatctcggtctggtcgccggcgaccgcgtcgccatctatctgccgctgatccccgaggcggtgatcgcgatgctggcctgcgcgcggctgggcgtcatgcacagcgtggtgttcgccggcttcaccgccaaggcgctgcaggcccgcatcgccgacgcggcagccaagctgctgatcaccagcgacgggcagttccgccgcggcaagcccgcgccgctcaaggacgccgccgacgaggcggtcgccgaccccgacagcccggtcgagcacgttgtggtggtgcggcgcaccggaattgacgtgtcctggaccgacggccgcgacctgtggtggcacgacgtcgtcgacgccgccgcgcccgaacacacccccgagccgttccccgccgagcagccgctgtttctgctgtacacctcgggcaccaccggcaagcccaagggcatcgtgcacaccagcggcggatatttgacccaggccgcctacacgcactactacgtcttcgacatcaaggccgacaccgacgtgttctggtgcaccgccgacatcggctgggtcaccggacacacctacggcgtctacggcccgctggccaacggggtcaccgaggtgctctacgagggaaccccggacacaccgacccagcaccggcatttcgagatcatcgaaaaatacggcgtgacaatctattacaccgcgcccacgctgatccgcacgttcatgaagtggggccgggaaatccccgacgcgcacgacctgtccagcctgcggctgctgggttcggtcggcgagccgatcaatcccgaggcgtggcgctggtatcgcagcgtgatcggcgccgaccggctgcccatcgtcgacacctggtggcagaccgagaccggcgccacgatgatctccccgctgcccggagtcgctgcggccaaaccgggttcggcgatgcggccgctgccgggcatctcggccaggatcgtcgacgaccacggcgaccagctggtgccgggcatccaccacggtgagcacgtcaccggctacctggtgctggaccaaccgtggccgtcgatgctgcgcggcatctggggcgaccccgaccgctacgtcgagacctactggtcgcggttcgccgagcagggctggtatttcgccggtgacagcgcctattacgaccgcgacggcgccatctgggtggtcggccgcatcgacgacgtgatgaacgtgtcggggcatcggctgtccaccgccgaggtggagtcggcgctggtcggacaccacggcgtcgccgaggcggcggtggtcggcgccaccgacgccacgaccggccaggccatctgcgcgttcgtcgtgctgtgcgccgattaccaggtgcacgacgggatcgtcgacgagctgcgcgccgaggtggcccgggagatttcgccgatcgccaagccgcgggaggtgcacgtggtgcccgagctgccgaagacccgcagcggcaagatcatgcgccggctgctgcgcgacatcgccgagaaccgcgaattgggcgacacctcaacgctgctcgaccccggggtgttcgacgcgatccgggcggcgaag

SEQ ID NO: 25713 - DNA, 2100 bp, Mycobacterium avium
gtgagcatcgtggcggaggaaaacagcgcggcgcaagcgcttgacgcgccggcggagtcgccgcccaacccggtgatcgagactcccgagccgccgaccgaatcgctcaagacgtccagcagcgcgtcgcgccgggtccgggcccggctggcccggcggatgaccgcccagcgcagcacgctcaacccggtgctggagccgctggtggcgatgcaccgcgagatctaccccaaggccaacgtgcagctgctgcagcgcgcattcgaggtcgccgaccagcggcacgccagccagttgcgccactccggcgacccctacatcacccatccgctggccgtcgccaccatcctggccgaattgggcatggacagcaccactttggtggccgcgctgttgcacgacaccgtcgaggacaccggctacaccctggcccagctgtccgaggaattcggcgaagaggtcggtcatctggtcgacggggtgaccaagctggaccgggtggtgctgggcagcgccgccgagggcgagaccatccgcaagatgatcaccgcgatggcccgcgacccgcgggtgctggtgatcaaggtcgccgaccggctgcacaacatgcgcaccatgcggttcctgccgccggagaagcaggcccgcaaggcccgcgagacgctggaagtcattgcgcccctcgcccatcggctgggcatggccagcgtcaagtgggagttggaggacctgtcgttcgccatcctgcatcccaagaagtacgacgagatcgtccggctggtcgccggccgggccccgtcgcgggacacctacctggccaaggtgcgggccgagatcatcaacacgctgaacgcgtcgaagatcaaggcgacggtggagggccggcccaagcactactggtcgatctaccagaagatgatcgtcaagggccgcgacttcgacgacatccacgacctggtcggcatccgcatcctgtgcgacgagatccgggactgctatgccgctgtgggcgtggtgcattcgctgtggcagccgatggccgggcggttcaaggactacatcgcccagccgcgctacggcgtctaccagtcgctgcacaccaccgtcgtcgggccggagggcaagccgctggaggtgcagatccgcacccgcgacatgcaccgcaccgccgagtacggcatcgccgcgcactggcgctacaaggaagccaagggccgcaacggcgttccgcacccgcacgccgccgccgagatcgacgacatggcctggatgcgccagctgctcgactggcagcgggaagccgccgacccgggcgaattcctcgagtcgctgcgctatgaccttgcggtacaagagatcttcgtgttcacccccaagggcgacgtgatcaccctgcccaccgggtcgacgccgatcgacttcgcctacgccgtgcacaccgaggtcgggcaccgctgcatcggcgcccgggtcaacggccggctggtggcgctggaacgcaagctggaaaacggggaagtcgtcgaggttttcacctccaaggcggccaatgccggcccgtcgcgggactggcagcagttcgtggtgtcgccgcgggccaaggccaagatccggcagtggttcgccaaggagcggcgcgaagaggccctggaggccggcaaggacgcgatggcccgcgaggtgcgccgcggcggacttccgttgcagcgcttggtcaatgccgaatccatgagcgcggtggcccgcgaactgcactacgccgacgtgtcggccctctacaccgcgatcggtgaggggcatgtgtcggcccggcacgtggtgcagcggctgctggccgagctcggcggcatcgaccaggccgaggaggacctcgccgagcggtccaccccgaccaccatgctgcgccgcccgcgcagcagcgacgacgtcggcgtgtcggtgcccggcgccccgggcgtgctgaccaagctggccaaatgctgcacgccggtgcctggggaccagatcatggggttcgtcacccgcggcggcggggtgagcgtgcaccgcaccgactgcaccaacgccgcctcgctgcagcagcagtccgagcgcatcatc

SEQ ID NO: 25714 - DNA, 1050 bp, Mycobacterium avium
atgacgcaagcccccgaccgcgagaaggctctcgaactggcgatggcccagatcgaaaagagttacgggaaaggctcggtgatgcgtctcggcgacgagatgcgtcagccgatctcggtcatcccgaccggatccatcgccctggacgtcgccctgggcatcggcggccttccccgcggccgggtcgtggagatctacggcccggaatcctcgggtaagaccaccgtcgccctgcacgcggtggccaacgcccaggccgccggcggtgtcgcggcgttcatcgacgccgagcacgcgctggaccccgagtacgccaagaagctcggcgtggacaccgattcgctgctggtcagccagccggacacgggggagcaggcgctcgagatcgccgacatgctgatccgctccggcgcgctggacatcctggtcatcgactcggtggccgcgctggtgccgcgcgccgagctggagggcgagatgggggacagccacgtcgggctgcaggcccggctgatgagccaggcgctgcgaaaaatgaccggcgcgctgaacaattcgggcaccaccgcgatcttcatcaaccagctgcgggagaagatcggggtgatgttcggcagcccggagaccacgacgggtggcaaggcgttgaagttctacgcctcggtgcgcatggacgtgcgccggatcgagacgctcaaggacggcaccaacgcggtcggcaaccgcacccgggtcaagatcgtcaagaacaaggtgtcgccgccgttcaagcaggccgagttcgacatcctctacggccggggaatcagccgggagggctcgctgatcgacatgggtgtggatcagggcttcatccgcaagtccggttcctggttcacctatgagggcgagcagctcggccagggcaaggagaacgcccgcaccttcttgatggagaacgacgaagtcgccaacgagatcgagaagaagatcaaggaaaagctcggcattggcgcggtcgtgaccgatgacttgtccgatgacggcgtcctgcccgcccccgtcgacttc

SEQ ID NO: 25715 - DNA, 582 bp, Mycobacterium avium
gtgacgaccgggggcggccggggcgcgcgccggcgcatcctggacaccgctactgagctgttctaccgcgacggcatcaacgccactggcgtggaacgactcgccgccgaagcatcggtatccaaacgcactctctaccaacactttccgagcaagaacgctgtggtcgaggagtatctgcgcggaatccagcaagctgttggggacccgatccaccccgaggcggacgccacgaatcggtcaccccgcgcccgcctgcttgccctgttcgacactccagccccgggcgacgccctcatgcgcggctgccccttccataacgccgccgtcgaggccggccagaccatgcccgaagttcggagcatcgttcgtgaacacaagcgcacctacatcgacggcctcgccgaattggcccggcgggccggtgcgtccgatccccaattgctgggcaaccaactcgctgtgctctatgagggcgcggccgctctgtccacctcgctcaacgacccctccccctgggcccatgctcgggccgccgcgcacacgctgatcgaccgcgccgtatcacgcgacgacggagat

SEQ ID NO: 25716 - DNA, 1236 bp, Mycobacterium avium
atgacgattctggacgggcagctcaccgcgacccgcgtggattccgcgatcaggctggcggaaaagcgtgccgcgcacaactattcgccgttaccgatcgtcgccgcgagcgcgcagggggcgtggatcaccgatgtcgacggccgccgctacctggattgtctgtccgcctattccgcggtgaacttcggccaccgccaccccgagatcgtcgccactgcccatgcgcagctggacaccgtcacgctggtcagccgcgcggtccattccgacaagctcgggccgttctgcgcggcgctcgcctacctgtgcgacaaagacatggtgctgccgatgaattcgggcgccgaagccgtggaaagcggcctcaaggtggcccgcaagtggggggccgaggtcaagggggttcccgccggccaggccaatatcatcgtggcggacaacaacttccacggccgcaccatcagcatcgtcagcttctcctcggacgccgcggcgcgggacgggttcggccccttcacgccgggattccgctcggtgccgttcggtgatgccggcgcgctggcccaggcgatcgacgacaacaccgtcgcggtgctgctggagccgattcagggtgaggccggcatcgtcgtcccgcccgacgactacctgccggccgtccgcgcgctgtgcagcgagcacaacgtgctgatgatcgccgacgagattcaatccggcctggcgcgtaccggttacacgtttgcctgcgaccggtggcgggtggtgcccgacgtctacctgctgggcaaagccctgggcggcggggtggttccgctgtcggcggtggtggccgaccgggagatcctgggtgtgttgcatcccggcgagcacggctccaccttcggcggcaacccgctggccgccgcgatcggcaccaccgtggtgtccatgctggcccgcggcgagtaccaggctcgcgcgaccgcgctgggcgcgcacctgcagcggcggctgcgggcgctggtcggtcacggggtggacgaggtgcgcggcctggggttgtgggcaggggtggacatcgacccgtcgctgggcagcggccggcagatgagcctgcggctggccgagcggggcgtgctggtgaaggacacgcacggcgcgaccttgcgcttcgcgccgcctctggtggtcaccgcgcaggagatcgactgggcggtcggccagcttgctgcggtgttgcgggaggctgcttca

SEQ ID NO: 25717 - DNA, 1518 bp, Mycobacterium avium
atggcgccggagaacgccgtgaacaccatgtgcgcttactgcggcgtcggctgcggcatggtgttgcagatcacaaccgatccgcaaaccgggcgccgtcacgtcgccaagtcggttggcaacaaagaacatccggccaacttcggccgcctgtgcaccaagggggccaccaccgccgacctgctcgccgccccgggccggatggactcggcgcacgcgcgggccggccgcggcgaaccgctcgaaccgatcggcacggatcaggcgatcacccggtgcgcgaaacagttacgggcgatcatcgacgagcacggcccggacgcgttcgcgatgtacgtgtccggccagatgtcgctggaggcgcagtacctggcgaacaagctgaccaagggttttatcggcaccaaccagatcgagtcgaactcgcgactgtgcatggccagcgccggttccggctacaagctgtcgctgggcgccgacggaccaccgggttcctaccaggacttcgaacacgccgacgtgtttttcgtcatcggcgccaacatggccgactgccacccgatcctgttcctgcgcatgatggaccgcgtcaaggcgggcgcgaaactcatcgtcgtcgacccgcgccgcaccgcgaccgccgaaaaggcggacctgttcctgcagatcgccccggggacggatctcgcgctgctcaacggcctgttgcacctgatcgtcgaaaatgggcacaccgacggcgaattcatcgccgagttcaccgagggctgggaggtgatgcccagcttcctggagcagtacacccccgaccgggtcagcgaaatcaccggcatccccgagcaagacatccgcgcggcggctcagctgatcggcgaggccgacaacttcatgagctgctggacgatgggcctcaaccagagcacgcacggcacctggaacaccaacgccatctgcaacctgcacctggccaccggggcgatctgcaagccgggcagcggccccttctcgctcaccggtcagcccaacgcgatgggcggccgcgaaatgggttacatgggaccgggtttgccgggccagcggtcggtggcatcggccgccgaccgcgagttcgtcgaagacgtgtggggtgttccccgcggaaggctgcgcaccgaggtcggcaccggaaccatcgacatgttctcccggatggccgacgggcagatcaaggcatgctggatcatctgcaccaatcccgttgcctccgttgctaatcggaagaccgtgctggccgggctggagcgcgccgagttggtgatcgcccaggacgcctacctcggcacggagaccagcgaatacgccgacgtgttgttgccggcggcgctgtgggcggagaccgagggggtgatggtcaattctgagcgcaacatcacgctgtcccagccggcggtcgcggcgccgggtggggccatgcccgactggcagatcatcgcccggatcgcttgcgagatggggttttccgaagcgttcatctacagc

SEQ ID NO: 25718 - DNA, 264 bp, Mycobacterium avium
atgattttcaataagcgggggaggggtttcgtgtctgccgactgccaggtgacgggccggcggccgagcttcggtaatgcggtgtcgcattcgcatcgccggacgcctcggcgctggtcgcccaacattcaactgaagacctattacctgccctcggaggggcgccggattcggctgcgggtcagcgccaagggcatcaaggtcatcgaccgcgacggcatcgaggcggtggtggcgcggctgcgccggcacggacagcaaatc

SEQ ID NO: 25719 - DNA, 162 bp, Mycobacterium avium
atgccccgcaacgagattcgacccttggtcaaactgcgttcgacggccgggaccggatacacctacatcacccgcaagaaccggcgcaatgaccccgaccggctggtgctgcgcaaatacgatccggtcgtccgccgccacgtcgacttccgcgaagagcgc

SEQ ID NO: 25720 - DNA, 1503 bp, Mycobacterium avium
gtgtcatcgctagccaggaccacccgcacggacgtcgtgctggtgggcgcgggcatcatgagcgccacgctgggcgcgttgctgcggcggctgcagccggattggtcgatgaccttcgtcgagcgcctggacgcggtcgccgccgagagcagcagcccgtggaacaacgccggcaccgggcattcggcgctgtgcgagctcaactacaccccgcagcgcgccgacggctccatcgacatcgccaaagcggtgcgcatcaacgagcagttccaggtgacccgccaattctgggcgtatgccgtggaggacggcatgctgaccgatcggggcttcgtgaccccgatcccgcacgcgagtttcgtgcgcggggcgcgggccgtcgagtatctgcggcgccggcagcaggcgctggcgcccaacccgttgttcgccggcatcgaattgatcgaggacgccgacgagttcgcccgccggctgccgttgatggccgaccggcgggacttctccgaaccgaccgcgctgaattgggcgcgccacggcaccgacgtcgacttcggcgcgctgtcgcgacagctgatcgggttctgcgtgcgcggcggcgcgacggcgctgttcggccatcaggtgcacaacctgacgcgggagtccgacggcagctggacgttgctgatccgcaaccgccggaccggcgaaaagcaccggtgcaacgccaaattcgtgttcgtcggggccggcggtgacgcgctgccgctgctgcagaagtcgggtatcggcgaggcccgcggattcgcggggttcccgatcggcggtcggttcctgcgcgccgacaatcccgtgctcaccgcggcgcaccgggccaaggtgtacggggctccagcgccgggggccccgccgctgggcgcgttgcatctggacctgcgctacgtcaacggcaagccgtggctggtgttcgggccgtacgccggctggtcgccgaagttcttgaaacacgggcacttcaccgatctgccccgctcggtgcgcccgcacaatctggtcgcgctgctcggcgtcggcgtcacccagctgacgttgctgcgatacctgatcggccagttgcggctgtccgcgccggaccggatgcggatgctacgcgaattcgcgcccaccgcagtggattcggactgggagctgacggtggccggtcagcgggtgcaggtgatccggcgcgatcggcgccgcggcggcgtgctcgacttcgacaccaccgtggtggcggccggcgacggcagcatcgcggggttgctcggcggctcgccgggagcgtcgacggcggtgccgatcatgctcgatgtgctgcagcgctgtttcgctgaccgttatcggtcgtggctgcccgcgctcaaggagatggttccctcgctgggcgtgacgctgtccgacgagccggcgctgtatgaggaagtctattcatggggaacgaagatcctgggactggacgagttggatgaggagcgccctaag

SEQ ID NO: 25721 - DNA, 1734 bp, Mycobacterium avium
atgtcccagctgttcctgcgcaccctgcgcgacgaccccgccgacgccgaagtgcccagccacaagctgctgatccgggccggatacatccggcccgtcgcgcccgggctgtacagctggctcccgctggggctgcgggtgctgcgccggatcgagcacatcgtccgcgaggaaatgaatgcgattggcggccaagagatcctgtttcccgccctgctgccgcgcgcgccgtacgaggcgacgaaccggtggaccgagtacggcgacagcgtctttcggctgcaggaccgccgcggcaacgactacctgctggggcccacccacgaggagctgttcaccctgaccgtcaagggtgaatacagctcctacaaagactttccggtgctgctgtatcagatccagaacaaataccgcgacgaggcgcggccacgggcaggcatcctgcgggtgcgcgagttcgtgatgaaggactcctactcgttcgacatcgacgatgccgggctcaaggccgcctatcacgcacaccgggaggcctatcagcgcatcttcgcgcggctgcaggtgcgctacgtgatcgtgtccgcggtgtcgggcgccatgggcggcagcgcctccgaggagttcctggccgagagcccggtcggcgaggacaccttcgtgcgctgcctggagtccggctatgcggccaacgtcgaggcggtgatcaccgcccgcccggacccgcaacccgtcgagggtctgcccgaggcggtggtccacgacaccggtgacaccccgaccatcgccaccctggtcgactgggcaaaccgggcgggcctgggccgcaccgtcaccgcggccgacacgttgaagaacgtcctgctcaaggtgcgccagcccggcggggactgggagctgctggccatcggcctgcccggcgaccgtgaggtcgacgacaagcggctgggcgcggcgctggagccggccgagtacgtgctgctcgacgacgccgacttcgccaggtacccgttcctggtgaagggttacatcggtccgaaagcgttgaaggacaacggagttcgttacctggtcgatccgcgggtggtggacggcaccagctggatcaccggggccgacgaaccgggccgccatgtcgtcgggctggtcgcgggccgggacttcaccgccgacggcaccatcgaggccgccgaggtgcgcgacggcgacccgtcgccggacggcgccgggccgctggtgtccgcgcgcggcatcgaggtcgcccacatcttccagttgggccgcaagtacaccgacgccttcaccgccgacgtgctgggcgaggacggcaagccggtgcggctcaccatgggctcctacggcctgggggtgtcgcggatggtggccgtcatcgccgaacagcaccacgacgagctgggcctgcgctggcccgcgtcggtggcgccgttcgacgtccacctggtgatcgccaacaaggacgcgcaggcgcgcgccggagccaccgcgctggccgacgacctggaccggctcggcgtcgaggtgctgctcgacgaccgtcaggcctcgccgggagtgaagttcaaggacgccgagctgctgggcgtgccgtggatcgtggtggtgggccggggctgggccgacggtgtggtggagctgcgcgaccgcttcgccggccagacccgggagctggccaccgggccgtcgcttgccgccgacatcgcggccgccctgcgcggc

SEQ ID NO: 25722 - DNA, 1203 bp, Mycobacterium avium
gtgaccgagagcgcctacctggtggggctgcggctgaccggcaagaaggtggtcgtggtcggcggcggcaccgtcgcccagcgccggctgccgttgctgatcgccagcggcgcggacgtccacgtcatctcccgcagcgccacccgatcggtcgaggcgatgaccggaatcaccctgcaattgcgcgaataccgcgacggcgacctcgacggcgcctggtacgcgatcgcggccaccgacgacccgcgggtcaacgaggccgtggttgccgaggccgaacgccgccgcatcttctgcgtccgggcggacgtcgccgtggcggggaccgcggtcaccccagcatctttcagctatgccgggttgtcggtgggcgtgctggccggcggcgagcaccgccgctcggcggcgatccgctcggccatccgggaggcgctgcagaccggggtcatcacgccggaaggcccggtgggctccgacgccgtcaagggcggggtggcgctgatcggcggcggccccggcgaccccgaactgatcacggtgcgcggccggcggctgctggcccaggccgacgtcgtggtggccgaccggctcgccccgcccgaactgctcgccgagctgcccccgcacgtggaggtgatcgacgccgccaagattccctacggccgggccatggcccaggacgccatcaacgacgtcatgatcgaacgcgcccgcgccggaagcttcgtggtgcgcctcaaaggcggggacccgttcgtcttcgcccgcggctacgaggaggtgctggcgtgcgccgacgccgggattccggtcaccgtcgtcccgggtgtgacgagtgccataggagtgcccgcattggcgggcgtcccggtcacccatcgggcggtaaatcacgaattcgtggtggtcagcgggcatctcccacccggtcatcccgaatcgttagtgaattgggatgcactggccgcattgaccggcacaattgttttgctgatggcggtcgaacgtatcgaacttttcgccgaggccctgctgaagggcggacgaccagcggatacgccggtgctggtggttcagcacgggacgacggcggcgcaacacactttgcgggccaccctggccgacacgcccgaaaagattcgtgccgaaggtatccgacctcccgcgatcatcgtgatcggcgcggtggcggctttcggggtt

SEQ ID NO: 25723 - DNA, 966 bp, Mycobacterium avium
gtgatcggccttcccggggcaaaacaactacactgccttctcgtgtggtgtcccagtgtttcgctgtccctgtgggccaatgcctggctcgccggcaaggccgcgcccgacgacgtcctcgacgcgttatccgtttgggcgccaaagcaatcggtgaccgcgtatgatgccgtcgccgcgggccacaccgggctgccgtggcccgacgtgcacgacgccgggacggtcacgctgctgcagacgctgcgcgccgcgatcggcgtgccggtgggctccggactgatgcgcgggacgatcaacgtggttttgccggtaccgggcgatgtgcgcgggctggcccccggcacccagttcgagcaggacgcgctggccgccggcgaggcggtgatcgtcagcaatccgcaccagcccggcgccgccgtcgggctggtccccgaattctgttacgccgacgacgacgatgggtcccaggactacgcgctgaccgaattgtgcgcgctgagctggacggtgtattcgctgcccggggcgccggtgctggaccatcacgagctcggcgacgccgagtacacgttgcgctccgcggtgcgctcggccgccgagacgctgggcgccatcggcctcggctcggccgcgtccgacgtcgacgacccgcgggggctggtcgagcagttgctggaatcggcacggcagcaccgcattccggatcacgcgccgtcgcgcgcgttgcgggtgctggagaacgccgcgcacgtcgacgccatcatcgcggtgagcgccgggctgagtcggtcggattcgccggaccgattcgccgcgccgatcgccgccggtctggaaccgcttggcacacaatcgtcgtcggaggcgcgcatcgccggcgacgcgctgcggccgctgaccgcggtggtgcgttcggcgcggatggccgcggtcaccgcgatcctgcattccgcctggggcgat

SEQ ID NO: 25724 - DNA, 903 bp, Mycobacterium avium
atgcccccaccgtatggacccggtcatgccggtttcgggctggtcagcgccgctgtcctcgcgtcgctggtgctgctggggtgggcggccgtgtggatcgcccggcgcgccgacccgttgcagcggctctggcagcgggcgacccacaacgccgtggtcgatgaggcgctggcctggctgcgcgaccggatcggcgatcgggggcgggcgctggcgcgccgctttccggtgagcgagatcgccggtgtggcattgcttctcgggctcgcggcggtcgcgttgctggcggtcggcttcaccgaagtgctcgacgacgtgctcgagggcgacggcatcgccgtcatcgaccacccggtgacccgatggctcgcggcccaccgcgatctgtggctgaccaccgtcctgcaggcgatcaccgtcgcgggcggcccgctgttcctggccgcgctggccctcccgatctccgtggtcgccgcgtggcggtaccggtcgtggcggcccgtgctgctcgcggtggtggccggcgccggggtcccggtcatgctgttcaccgccaaggcgctggtgggtcgccatcgccctccgctgccgttcgccctcgtcgacgccgacgggtactcgttcccctccgggcacgccaccggcaccgcggcgatgatggccatctcggcgtggctgctcacccgctggctgattcccgggtggaccgggcgggtgctggtgtgggcgctcgccatcggcgcggtcctgctgatcgggttctcgcggatctacctcggcgtccactacctcagcgacgtgctctccggctggatgctgggcacggcctgggcgttcgccgtcatgctcgtcggaacctggtgggacaacacccgcccggcccgcgagcggcaacggcaggcg

SEQ ID NO: 25725 - DNA, 1917 bp, Mycobacterium avium
atgggtgccaagccgttcaagccgtcgatcgactggtcggcggcgtttgtcgattccttgcggtggctggccatagcgtgggtgatcagcgccgtctgcctgttcggggtgctgctggcgttccggttcctcacgccctggggccggcagttctggcggatcacccgcggttacttcgtcggcgcccacagcgtgcgggtgtggctgatgctcggcgtgctgctgctgtcggtgctgctgtcggtgcggctgagcgtgctgctcagcttccaaagcaatgacctgtacacggcgctgcagaaggcgttcgaaggcatcgcgtcgggcaatgacgcggtcaaacattcggggatacatggcttttgggtatcgctcggcatcttctgcctgctggcggcgctgtgggtgacccgcttcatggccgacgtctatctgacgcagcggttcatcatcgcgtggcgcatgtggctcaccgcgaacctcaccgacgactggctggcgggccgggcgtattaccgggacctgttcatcgacaacacgatcgacaacccggatcagcgcatccagcaggacatcgacatcttcaccgccaacgccggcgggacgccgaacgtcccgtccaacggcacgggcagcacgttgctgttcggggccgtcaacgcggtggcctcggtcatctcgttcaccgcgatcctgtggaagctgtccggggacctgaacctgttcggcttggtgttgccgcgcgcgatgttctggacggtgctggtgtacgtgttcatcgcgaccgtcgtcgcggtttggcttgggcgcccgctgatttggcttagcttcaacaacgagaagttaaacgccgccttccgttatgcgctggtgcggttgcgggacgccgcggaggcggtcgggttctaccgcggcgagcgcgtcgagcgggcccagctgtggcagcgtttcacgccgatcatcgccaactaccgccggtacgtgcgccggaccatcatcttcaacggctggaactggtcggtgacgcagatcatcgttccgctgccgctggccatccaggcgccgcgactgttcgccggcgagatcgctttcggcgatgtgacccagacggccacggcgttcaacaacattcacgactcgctgtcgttcttccggaacaactacgacgccttcgccgccttccgggccgcgatcatccgtctgcacggcctggtggacgccaacagcaagggccgggcgctgcccgccatcctcgtcaaacccagcgaagagacggcggtcgagctgcgcggtatcgaggtgcgcacccccgagggagatcagctggtcgactcgctggacatccagctcgacgagggcgacacgctggtgatcaccggacgctcgggggccggcaagacgacgctgctgcgcagcctggccgaattgtggccgtacgcctcgggaaccctgtgccggcccgacggcgacaacgcgacgatgttcctgtcgcagttgccctacgtgccgctgggcacgctgcgcaccgtggtgtgctacccgaattcgccggatagcatcgccgattcgcagctgcacgaggtgctcaccaaagtggctctggcgccgctcatctcccggctggacgaagaccaggactgggccaaggtgctctcccccggcgagcagcagcgcgtcgcgttcgcgcgcgtcctgctcaccaggcccaaggcggtcttcctcgacgaggccacctcggcgctggacgaggggctggaatacgcgctgtaccaattggttcgggccgagctgccggggtgcgtgatggtcagcgtgagccatcggcccaccgtcgagcagcaccacgaccagcagctgcacctgctcggcggcggcccgtggcagctgagcccggtcgaaaaggagcccgcgcgggtt

SEQ ID NO: 25726 - DNA, 556 bp, Mycobacterium avium
atgacgaccatcctggcgatcgaaacctcttgcgacgaaacgggagtcggcatcgcgcggctggacgccgacggtgcggtgaccctgctggccgacgaggtcgcctccagcgtcgacgagcacgtgcggttcggcggcgtggtgcccgagatcgcgtcgcgcgcacacctggaggccctggggcccaccatgcgccgcgccctgtccgccgccggcgtgaccaaacccgacgtcgtcgcggccaccatcgggcccgggctggccggtgccctgctggtgggagtcgctgcggccaaagcgtattcggcggcctggggggtgccgttctacgccgtcaaccacctgggcgggcacctggccgccgacgtctaccagcacgggccgctgcccgagtgcgtcgcgctgctggtctccggcggccatacccacctgctgcaggtgcgctcgctcggcgacccgatcgtcgagctgggcagcaccgtcgacgacgccgcgggcgaggcctacgacaaggtggcgcggctgctggggctgggctacccgggcggccgggtgc

SEQ ID NO: 25727 - DNA, 339 bp, Mycobacterium avium
atgaaccggctggacttcgtcgatcaggcgtcgctgcgcgacgacatcccggttttcggcccgggcgacaccgtcaacgtgcacgtcaaggtcatcgagggcgccaaggagcggatccaggtgttcaagggcgtggtgatccgccgccagggcggcggcgtgcgcgagaccttcaccgtgcgcaaggaaagctacggcgtcggcgtcgagcggaccttcccggtgcactcgcccaacatcgaccacatccaggtggtgacccgcggagacgtgcgccgcgccaagctgtactacctgcgtgaactgcgcggcaagaaggccaagatcaaggagaagcgc

SEQ ID NO: 25728 - DNA, 897 bp, Mycobacterium avium
gtgaccgacaccgcggattcctctaacccccagtcccacgctggcgacgcagatccgaaggtctccacccgcaacccggatacccgccccgacgacgacgccggcgcgcccgcaccggttcccgaaccggggaccaagcccgacgcagccgctcccaccgagggctccaagcgttcgacgctgcgcgaattcgccatcctggcggtgatcgccgtgctgctctactacgtcatgctgaccttcgtggcgcggccgtacctgattccgtcggagtccatggagcccacgctgcacggctgcaccggctgtgtgggcgaccggatcatggtcgacaaggtcagctaccgcttcggcgccccgcgccccggcgacgtgatcgtcttcaagggcccgccgtcgtggaacctcggctacaagtcgatccggtccaacaacaccgcgctgcgctgggcgcagaacgcgctgtccttcgtcggcttcgtcccaccggacgagaacgacctggtcaaacgggtgatcgcggtcggggggcagaccgtgcagtgccgggccgagaccgggctgacggtcaacggcaagccgctgcgcgagccctacctggatcgcaacaccatggccgccgacccgtcggtgtacccgtgcctgggcagtgagttcggcccggtcaccgtgccggccgggcggctgtgggtgatgggcgacaaccggacccactccgcggattcacgcgcgcactgcaccagcgtgccggccgaggcgctcaagggcgtgttgtgcaccggggatccggcgtcgggaaccgtgccggtgtccaacgtgatcggcaaggccaggttcatcgtgtggccgccgtcccgctggggcggggtgggatcggtgaacccgcaacaggggcag

SEQ ID NO: 25729 - DNA, 717 bp, Mycobacterium avium
atggccacgacgtggccgccccggacggtgattcgtaaatcgtcgggtctgcgcaccctggagtcggcgctgtaccgcagcgggctggggccggtggccggcgtcgacgaggtgggccgcggcgcctgcgccggaccgctggtggtggcggcctgcgtgctcggcccggggaagctggaaagccttgctgcccttgatgattcgaaaaagctgacggagagcgtgcgggagcggctgttcccggtgatccgccgctatgcgctggcctaccacgtggtgttcattccgccggcggaggtggaccgccgcggcgtgcacgtcgccaacatcgaggggatgcgccgtgccgtggccgggctgtcgctgcggcccggctacgtgctcagcgacggcttccgggtgcccgggttggcggtgccgtcgctgccggtgatcgggggcgacgccgtcgcggcgtgcatcgcggccgccagcgtgctggccaaggtcagccgggaccggttgatggtggcgatggacgccgagcaccccggctacggcttcgccgaccacaagggctacagcacgccggcgcacagcgcggcgctggcccggctgggcccgtgcccgcagcatcgtcattcgttcatcaacgtgcggcgggtggccaacggctcgggcggccgggtggtggccgactgcaaaccggacctaccgctgcagcgcgacgagggccgg

SEQ ID NO: 25730 - DNA, 678 bp, Mycobacterium avium
gtggtgaatctgtgcacgatgctcaaccagatgggcgcgcaggtcgagggtgcgggttcgccgaccatgaccatcaccggcgtgccgcggctgtacccgaccgaacatcgggtgatcggcgaccgcatcgtggccgcgacctggggcatcgcagcggcgatgacccgcggggacatctcggtgaccggcgtcgaccccgcccacctgcaggtggtgctgcacaagttgcacgatgccggggccaccgtgacccagaccgacgacagcttccgggtgacccagtacgagcggcccaaggcggttaacgtggccaccctgccgtttcccggatttcccaccgacctgcagccgatggcgatcgccctggcgtcgatcgccgatggcacgtcgatgatcaccgagaacgtgttcgaggcgcgcttccggttcgtcgaggaaatgatccggctgggcgccgacgcccgcaccgacgggcaccacgcggtggtgcgcgggctgccgcaattgtccagtgcgccggtgtggtgttcggacattcgggccggcgccggcctggtgttggcggggctggtggccgacggggacaccgaggtgcacgacgtcttccacatcgaccgcggctacccgttgttcgtggaaaacctggcgattttgggagcggagatcgagcgggtagag

SEQ ID NO: 25731 - DNA, 495 bp, Mycobacterium avium
atgatcgagtaccgcaccgtcgacagcccgatcggactgctgaccctggccgggcgcgatccggttctgacgaacttacggatggtcgaccagacctacgaaccgagccgcaccgggtggacggagaatccgcgggcgttcgccggggccgtcgagcaactcggtgcctatttcgccggcgagctcaccgagttcgacatcgagctggatctgcgcggctcggaattccagcgccgggtgtggcgggcgctgcagaccatcccctacggggaaaccaggtcgtacggcgaaatcgccgagcagatcggcgcgcccggcgccgcgcgcgccgtcggattggccaacgggcacaacccgatcgcgatcgtggtgccctgccatcgcgtcatcggcgccagcgggaagctgaccggatacggcggcggactggaccgcaaacaaacgctgctggcgctggagaggcgccactcgccggcgagcctgacgctattcgac

SEQ ID NO: 25732 - DNA, 1245 bp, Mycobacterium avium
atggtggtcatgcccaacggtccggtcgcgcatcaagcaggaacccgcggataccggcggatgaccgcggcgctctgcggcgccggcctggccagcttcgccgcgatgtattgcacccaggcgctgcttcccgccctgtcggcgcaccaccggatcggcccggccaccgcggcgctgaccgtgtcgctgacgaccggcgcgttggcgctgtcgatcattcccgcgagtgtgctctccgagcgctacggccggaccagggtgatgctgatctcaggggtggcctccagtgtcatcgggctgttgttgccgttcagcccctcgctcggcgtgctggtcttcggacgtgcggtgcagggcgtcgcgctcgccgggatacccgcggtcgcgatggcgctgctggccgaggaggtcgacgcgtcgtccctgggatccgcgatggggcgctacatcgccggaaccacgataggcgggctggccgggcggatcgttccgtcggtggtcgtccaggtcggcacctggcgggtggccctgctggcgtgctccctcatcacgctggccggcacggcggtgttcgcggtgctggtgccgcggtcccggttcttcaccccgaagccggccagcgtgcgcgccgccctgcgcaacctcgccgggcatctgcgaaacccggtgttggccaagctttttgcggtgggctttgtgctgatgggtggattcgtgacggtgtacaactacctcggttaccggctggccgcccggccgttcgggctggcgccgtcggtggtgggcctgcttttcctgctctatctcgtcgggacggggacgtcggtcgtggccggacggctcgccgatcgccggggacgccccctggtgctgggggccgcgttacccatcgcggtagccggactgctgctgaccgtgccgccctccctggccgccatcgtcgccggcgtcggcgtcttcaccgggggcttcttcgccgcgcacaccgtggccagcggttgggtgggcgccgtcgctcagcgcgaccgcgccgaggcgtcggcgctgtatctgttcagctactacctgggtggttcggtggccggtgcgttcggcggcgtcctgtacggcgtgggcggctggtcggcgactgtctgtttcgtcgtcgtgctgctgatggccggcgccgcactggtcgcattgttggtgcgggacaacggattccgcatcggccggcgcgtggtcgccggcgtggccagcgtgaag

SEQ ID NO: 25733 - DNA, 1509 bp, Mycobacterium avium
ttgtcacagcgcgagttacatgacgtcgtcgttgtcggcgcgggcaccgccgggtccgtggtcgctgcccggctgacagaagacagcacgttgcgtgtgcttttactggagactggcagcgcccgtcctccccgtgcgagcatcacgccaccggcctggccgactctgctgcagggcgaggctagctggggagacgtgaccacagtgcaaacggcaatcggccgagccgttccctttgcgcgaggtcgcggcatcggaggatcgtcgaccatcaatgcgatggtgttcgcccggggacatcgcgacagctactcacgctggcgtgacaacggcgcggcggggtggagtttcgacgaattgctcccctacttcaagcgcagtgaatcgacgtgcggcaaggacccgtccctgcgcggacaggacggtccgatggcggtggctccggcagcccaccccaacccggtactggtcgcatgtctttgcgccgcaatacagcagggctacccgcgagccgcagacatcagcggcggccttgaggtgggcttcggcttcaccgatctcaacatcgtcgatgggaagcggcagagcgcggcagacgcctacctgctgccggcgcttgatcggcccaaccttgaatttcactctggcgcaacggttcaccggcttcgcatccgcgggagtcgctgcaccggcgtcgagtacaccaccgccgagggccggcaggtgacggcggcggcccgggagatcatcttgtgcgcgggcgcaatcgggtcgccgcatctgctgctggcttccggaatcgggccgccgaaccatctccggtccttccgggtcgacgtcgccctggagttgcctggggtcggtgcgaacctgcaggatcatccgatcgttccgctggtctatcgcgccgcgcgtcccgtgccggccggccggtacaaccacggggagctgctcgggctcatccggcgccacgcaaccggcggaccaccggagatccagatcttcggcgtcgactccgcggacgttccgggcctcggcggagccgatggatacgtgctgggagtctccgtcatgcagccagtcagccgcgggcgcgtcggactttcgggccccaccatccaggagccgcccgccatcgacccgaactacctcagcgacgatcgcgacatgggcctcatgatcgagggcctgcggatcggccgcaaaatcgggatgtcgcaggcgctcgatccatggagggccgaggaactcgcacccggcgacgacgccgtcgacgacgcggcgctgcgctcgtacattcagcggtccgtcgcgtcctactttcacccggttggcacgtgcgcgatgggtactgggccggagtcggtcgtggacaatcaattacgtctgcacggcatcgataaccttcgcgtaatagacgcttcggtgatgccctcgctcccatcgaacaacaccgccgcaacggtctacgcaatcgccgaacgaggcgccgatctcgttcgtctcgga

SEQ ID NO: 25734 - DNA, 3126 bp, Mycobacterium avium
ttcgtcgaatacgtgtggggtgttccccgcggaaggctgcgcaccgaggtcggcaccggaaccatcgacatgttctcccggatggccgacgggcagatcaaggcatgctggatcatctgcaccaatcccgttgcctccgttgctaatcggaagaccgtgctggccgggctggagcgcgccgagttggtgatcgcccaggacgcctacctcggcacggagaccagcgaatacgccgacgtgttgttgccggcggcgctgtgggcggagaccgagggggtgatggtcaattctgagcgcaacatcacgctgtcccagccggcggtcgcggcgccgggtggggccatgcccgactggcagatcatcgcccggatcgcttgcgagatggggttttccgaggcgttcagctacagctgcgccgaggaggtgttcgaggagatcaagcggttctggaatccgacgaccggctacgacctgcgcggtgtgagctatgagcggctgcgtcggcagccgctgcagtggccgtgcccgccgcagagcacggccgaccgcaacccgatccgctacctcaatgacggcgtcagccagacacaactggtccgcgaggacggcaccgtgccgcggctggccttcccgacgccgagcggccgcgcggtgttcttcgcccgtccgcacctgcagcccgaggaaatgcccgacgacgactacccgttcctgttgaacaccgggcggctgccgcaccagtggcacaccatgaccaagaccggcaaggtcgccaaactcaacaagctcaaccccggcccgttcgtcgagatccatcccgacgacgccgcccggctgggcatcggcgaacacgaccgcgtcgaaatcgcttcccgccgcggccgggccgtgctgcccgccgtcgtcagcgaccgggtgcggcccggcaactgcttcgccccgttccactggaacgacgccttcggcgagtatctgtcgatcaacgcggtcaccaacgacgcggtcgacccgatctcgaaccagcccgaattcaaggcgtgcgccgtcaccctgacgaaagtcgccgtctcccaccccgattcggccatcggaaccggcccttcggcgggccacgacacaccggaatccgcgcccacggaggtacgagaaatcagcgtgtcacaagtcgatgccctcggcgaattgctgggcgtggcaacgtcattcaagccggaattcaacgagctcggccgctcgtacctggccgggatgctgaccggactgcgctcggacgtcggccgccgcgccggtggcgtgcccacgctgccgccgagcgcgcccttcgattcccgcacccgactgtgggtggacggcctgctggccgggttgttctcccgcgccgacgcatcccagcaggcggcgctgcccgagccgccccagccggccgcccagcagccaccggccgcgccggccggtgccacacccgcgcccgagcgggccccggtcgtggtgttgtgggcgtcgcagaccggcaacgccgaggagctcgccgcggacgtcgccgcgcaactcgcggcggccgagctgccggtcgccctgcacagcatggacgacttcccggcggccgagctggcggcgacgcgggaactgctgctgatcaccagcaccaccggtgacggcgacgcacccgacaacggctccggcctgtggcgcgcgctgaccggcgacgctgcaccgcgattgggcaacacccgctacgcggtgctcgcgctgggcgactccaactacgacgacttctgcggtcacggacgcaaactcgacgcgcggctggccgagctgggcgcgacccgaatcgccgaacgcgtcgactgcgaacccgactacgaacaggccgcggccaagtgggtcgctgacgtcatcgaggccctgacccgcacccccaccgcggtgggcggcgacggcggcgcgaccgtctcggcccgcacctccccggtggcggcaccgtcccgcccgaacacgcccgcgccgcacacctacagcaaaaagcacccgctcatcaccgacatggtgcgcaacaccacgttgaacgggccgaaatccaccaaggacgtgcggcatctggtgttcaacctgccggaagacgccgtcagctacgaggccggtgacgcgctcggggtgtggccgcgcaacagcgacgagctggtcgacgagtggctggcggtcaccggcctggacgggcagaccccggtcgaggtcggcgagcacgggctgatgtcactgcgttcggcgctcaccgagcgcatcgagatcgcgcacatcagccgggatttggtgcgtttcgtgcaggagcgtaccggcgacgccaaactcgccgagctgttgaagccggaaaacaaacgcgcactggcggattggacgtgggggcggcagtccatcgacctgctggcgcagctgccggtgtccgcctcggcccacgaatggctcagggtgctcaaacgccttcagccgcggctgtattcgatctcgtcgagccccaaggcctgcccgggcgaagtgcacctgacggtgtcgccggtgcgctacaacttccagggcgtgccgcgccgcggggtgtgttcgacttacctcgccgcccgctcccccggcgatcgggtggccgtctacctgcagccgtcgagcaacttccgcccgcccagcgacccggacaccccgatgatcatgatcgggccgggcaccgggatcgcacccttccgcggcttcctgcaggagcggcgcgcgctcggccaccgcggccccaactggctgttcttcggcgagcagcacgccgccaccgacttctactaccgcgacgagctggagcagatgcgcgaggacggcttcctcaccgagctggacctcgccttctcccgggaccagcaacacaaggtctacgtgcagcacctgatgcgcaaccgcggcaagcagctgtggagctggctgcaggacggcgcccagctgtacgtgtgcggcaccgccgacccgatggccaaggacgtcgaccgggcgctgtgcgacatcgccgccgaattcggcaatctcgacccggacgcggccaaggcctacgttcagtcgctcagcgcggacaagcgctaccaccgcgacgtctac

SEQ ID NO: 25735 - DNA, 603 bp, Mycobacterium avium
gtgccgctgtacgtgcacgcgccgtatctcatcaacgtcgcctcggcgaacaaccgcgtgcgcatcccgtcgcgcaagatcctgcaggacacctgcgacgccgccgcggagatcaacgccacggccgtcatcgtgcacggcggccacgccgacgacaacgacatggaggccggtttcgaacgctgggtgaaggcgctcgactacctggaaaccgacgtgcaggtgtatctggagaacaccgccggcggcgaccacgcgatggcccgccacttcgacaccatcggccggctgtgggatcgcatcggcgacaaggggattggcttctgcctggacacctgccacgcctgggccgcgggtgaggcgctgatcgacgccgtggaccggatcaaggcgctgactgggcgcatcgatttggtgcactgcaacgactcccgggacgcggcgggctcaggggccgaccgacacgccaacttcggcaccggccagatcgaccccgacctgctggtcaccgtggtcaaggccgccgccgcgccggtgatctgcgaaaccgccgacgagggccgcaaggacgacatcgccttcctgcgggagcacaccaagagc

SEQ ID NO: 25736 - DNA, 3948 bp, Mycobacterium avium
gtgctcgacgtcaacttcttcgatgaactccggatcggtctggccaccgcggaggacatcaggcaatggtcgtacggcgaggtcaagaagccggagaccatcaactaccgcacgctcaagccggagaaggacggcctgttctgcgagaagatcttcggaccgactcgcgactgggagtgctactgcggcaagtacaagcgcgtgcgcttcaagggcatcatctgtgagcgctgcggcgtcgaggtgacccgcgccaaggtgcgccgcgagcgcatgggccacatcgagttggccgcgcccgtcacgcacatctggtacttcaagggcgtgccgtcgcgattgggctacctgctcgacctggcgcccaaggacctcgagaagatcatctacttcgccgcgtacgtgatcacgtccgtcgacgaggagatgcggcacaacgagctctccaccctcgaggccgagatgatggtggagcgcaaggccgtcgaggaccagcgcgacgccgacctggaggcgcgcgcccagaagctggaggccgacctggccgagctggaggccgagggcgccaaggccgacgcgcggcgcaaggtccgcgacagcggcgagcgggagatgcgccagatccgcgaccgcgcccagcgcgagctggaccggctggaggacatctggaacaccttcaccaagctggcccccaagcagctgatcgtcgacgagaacctctaccgcgagctggtcgaccgttacggcgagtacttcaccggcgccatgggcgcggagtcgatccagaagctcatcgagaacttcgacatcgacgccgaggccgagcagctgcgtgacgtcatccgaaacggcaaggggcagaagaagcttcgcgccctcaagcggctcaaggtggtcgccgcgttccaacagagcggcaactcgccgatgggcatggtgctcgacgccgtcccggtgatcccgccggagctgcgcccgatggtgcagctcgacggtggccggttcgccaccagcgacctcaacgacctgtaccgccgggtgatcaaccgcaacaaccggctcaagaggctgatcgacctcggcgcgcccgagatcatcgtcaacaacgagaagcggatgctgcaggagtccgtcgacgcgctgttcgacaacggccgccgcggccgcccggtcaccgggccgggcaaccgcccgctgaagtcgttgagcgacctgctcaagggcaagcagggccggttccggcagaacctgctcggtaagcgcgtcgactactcgggccgttcggtcatcgtggtcggcccgcagctcaagctgcaccagtgcggcctgcccaagctgatggcgctcgagctgttcaagccgttcgtgatgaagcggctggtcgacctcaaccacgcgcagaacatcaagagcgccaagcggatggtggagcgccagcgtccgcaggtgtgggacgtgctggaagaggtcatcgccgagcacccggtgctgctgaaccgcgcgcccacgctgcaccggttgggcatccaggccttcgagccgatgctggtggagggcaaggcaattcagctgcacccgttggtgtgtgaggcgttcaacgccgacttcgacggtgaccagatggcggtgcacctgccgttgagcgccgaggcgcaggccgaggcccgcatcctgatgctgtcgtccaacaacatcctgtcgcccgcgtcgggccgcccgctggccatgccgcgactggacatggtgaccgggctgtactacctgaccaccgaggtcgaaggcgacaagggcgagtaccggcccgcggccaaggacacccccgaggtgggcgtgtactcctcgccggccgaggccatcatggccgccgaccgcggggtgctctcggtgcgggccaagatcaaggtgcggctgacccagttgcgtccgcctgccgagatcgaggccgagctgttcggtgccaacggctggcagccgggcgacgcctggatggccgagaccacgctgggccgggtgctgttcaacgagctgctgccggtgggctacccgttcgtgaacaagcagatgcacaagaaggtgcaggcgtcgatcatcaacgacctggccgagcgctacccgatgatcgtcgtcgcgcagaccgtggacaagctcaaggacgccggcttctactgggcgacccgcagcggtgtcaccgtgtcgatggccgacgtcttggttccgccgcgcaagaaggagatcctcgaccagtacgaggagcgggccgagaaggtcgaaaagcagttccagcgtggtgctttgaaccacgacgagcgcaacgaggcgctggtggagatctggaaggaagccaccgacgaggtcggtcaggcgctgcgcgagcactacccggccgacaacccgatcatcacgatcgtcgactcgggcgccaccggtaacttcacccagacccggacgctggccggcatgaagggtctggtgaccaacccgaagggtgagttcatcccgcgtccggtcaagtcgtcgttccgcgagggcctgaccgtgctggagtacttcatcaacacgcacggcgctcgaaagggcttggcggacaccgcgttgcgtaccgccgactcgggttatctgacccgtcgtctggtggacgtcagccaagacgtcatcgtgcgcgagcacgactgcgagaccgagcggggcatcgtcgtcgaactggccgagcgtcagcccgacggcaccctgatccgtgacccgtacatcgaaacctcggcgtacgcacggactttgggcaccgacgcggtcgacgaggccggcaacgtcatcgtcgcccgcggcgaggacctcggtgacccggagatcgacgccctgctggcggccggcatcacgtcggtcaaggtgcgctcggtgctgacctgcaccacgggcaccggcgtgtgcgcgacctgctacggccggtcgatggccaccgggaagctggtcgacatcggcgaggccgtcggcatcgtcgccgcccagtccatcggtgagcccggtacccagctgaccatgcgtaccttccaccagggtggtgtcggtgaggacatcacgggcggtctgccccgggtgcaggagctgttcgaggcccgcatcccgcgcggtaaggcgccgatcgccgacgtcaccggccgggtgcggctcgaggacggtgagcggttctacaagatcaccatcgttcccgacgacggcagcgaggaggtcgtctacgacaagctgtccaagcggcagcggctgcgcgtgttcaagcacgaggacggctccgagcgggtgctctccgacggcgaccacgtcgaggtgggccagcagctgatggaaggctcggccgacccgcatgaggtgctgcgtgtgcagggcccgcgcgaggtgcagatccacttggtccgcgaggtccaggaggtctaccgcgcgcagggtgtgtcgatccacgacaagcacatcgaggtgatcgttcgccagatgctgcgccgcgtcaccatcatcgactcgggctcgacggagttcctgcccggctcgctgatcgaccgcgcggagttcgaggcggagaaccgccgggtggtggccgagggcggcgagcccgccgccgggcgtccggtgctgatgggtatcacgaaggcgagcctcgccaccgactcgtggctgagcgcggcgtcgttccaggagaccacgcgagtgctgaccgacgcggcgatcaactgccgcagcgacaagctcaacggtctgaaggagaacgtgatcatcgggaagctgatcccggccggtaccgggatcaaccggtaccgcaacatccaggtgcagccgaccgaggaggcccgggccgccgcgtacacgatcccgtcctacgaggatcagtactacagcccggacttcggccaggccaccggcgccgcggtgccgctggacgactacggctacagcgactaccgc

SEQ ID NO: 25737 - DNA, 3444 bp, Mycobacterium avium
ttgaacggctccgtgcccggagcgcccaaccgagtttccttcgccaagctgcgcgaaccgctcgaggttcccggcctgctggacgtgcagatcgactccttcgagtggctgatcggcgcgccacggtggcgtgaggccgcgatcgcccgcggcgacgcggagcccaagggcgggctggaagaggtgctcgacgagctgtcgccgatcgaggacttctcgggctcgatgtcgctgtctttctccgacccccgcttcgacgaggtcaaggcgccggtcgacgagtgcaaagacaaggacatgacgtacgcggccccgctgttcgtcacggccgagttcatcaacaacaacaccggcgagatcaagagccagacggtgttcatgggcgacttcccgatgatgaccgagaagggcaccttcatcatcaacgggaccgagcgcgtggtggtcagccagctggtccgctcgccgggcgtgtacttcgacgagaccatcgacaagtccaccgagaagacgctgcacagcgtcaaggtgatccccagccgcggcgcctggctggagttcgacgtcgacaagcgcgacaccgtcggcgtgcgcatcgaccgcaagcgccgccagccggtcaccgtgctgctcaaggcgctgggctggaccaacgagcagatcaccgagcggttcggcttctccgagatcatgatgtcgacgctggagaaggacaacaccgccggcaccgacgaggcgctgctggacatctaccgcaagctgcgcccgggcgagccgccgaccaaggagtccgcgcagaccctgctggagaacctgttcttcaaggagaagcgctacgacctggcccgggtgggccgctacaaggtcaacaagaagctcggcctgcacgccggtgagccgatcaccagctcgacgctgaccgaggaagacgtcgtcgccaccatcgagtacctggtgcgcctgcacgagggtcagcccacgatgaccgtccccggcggcatcgaggtgccggtggagaccgacgacatcgaccacttcggcaaccgccggctgcgcaccgtcggtgagctgatccagaaccagatccgggtcggcatgtcccggatggagcgcgtcgtccgcgagcggatgaccacccaggacgtcgaggccatcacgccgcagaccctgatcaacatccgtccagtcgtggcggcgatcaaggagttcttcggcaccagccagctgtcccagttcatggaccagaacaacccgctgtcggggctcacccacaagcgccgcctgtcggcgctgggcccgggtggtctgtcccgggagcgggccgggctggaggtccgcgacgtgcacccgtcccactacggccggatgtgcccgatcgagaccccggagggtcccaacatcggtctgatcggctcgctgtcggtgtatgcgcgggtcaacccgttcgggttcatcgagacgccgtaccgcaaggtggtcgacggcgtggtcaccgacgagatccactacctgaccgccgacgaggaggaccgccacgtggtggcgcaggccaactcgccgatcgacgacaagggccggttcgcggaggcccgggtgctggtccgccgcaaggcgggcgaggtcgagtacgtgccctcgtccgaggtggactacatggacgtgtcgccgcgccagatggtgtcggtggccaccgcgatgatcccgttcctcgagcacgacgacgccaaccgtgccctgatgggcgccaacatgcagcgccaggcggttccgctggtgcgcagcgaggcgccgctggtgggcaccggcatggagctgcgcgccgcgatcgacgccggcgacgtcgtcgtcgccgagaagtccggggtgatcgaggaggtctccgccgactacatcaccgttatggccgacgacggcacccggcacacctaccggatgcgcaagttcgagcggtccaaccacggcacctgcgccaaccagagcccgatcgtcgacgccggcgaccgggtcgaggcgggccaggtcatcgccgacggtccgtgcaccgagaacggcgaaatggcgctgggcaagaacctgctcgtggcgatcatgccgtgggaaggccacaactacgaggacgcgatcatcctctccaaccggctggttgaggaggacgtgctcacctcgatccacatcgaggagcacgagatcgacgcccgcgacaccaagctgggcgccgaggagatcacccgggacatcccgaacgtctccgacgaggtgctggccgacctcgacgagcgcggcatcgtgcgcatcggcgccgaggtccgcgacggcgacatcctggtcggcaaggtcaccccgaagggggagaccgagctgacgccggaggagcggctgctgcgcgccatcttcggcgagaaggcccgcgaggtccgcgacacctcgctgaaggtgccgcacggcgagtccggcaaggtcatcggcatccgggtgttctcccgcgaggacgacgacgagctgcccgccggggtcaacgagctggtccgcgtctacgtggcccagaagcgcaagatctccgacggtgacaagcttgccggccggcacggcaacaagggcgtcatcggcaagatcctgccgcaggaggacatgccgttcctgccggacggcacgccggtggacatcatcctgaacacccacggtgtgccgcgacggatgaacatcggccagatcctggagacccacctggggtgggtggccaagtccggctggaacatcgacggcaatcccgagtgggcggtcaacctgcccgaggagctgcggcacgcacagccgaaccagatcgtgtcgacaccggtgttcgacggcgccaaggaagaggagctggccggcatgctgtcgtgcacgctgcccaaccgcgacggcgaggtcatggtggacggcgacggcaaggcggtgctgttcgacggccggtccggggagccgttcccgtacccggtgaccgtcggctacatgtacatcatgaagctgcaccacctggtggacgacaagatccacgcccgctccaccggcccgtactcgatgatcacccagcagccgctgggcggtaaggcgcagttcggtggccagcgcttcggtgagatggagtgctgggccatgcaggcctacggcgcggcgtacacgctgcaggagctgttgaccatcaagtccgacgacacggtcggccgggtcaaggtgtacgaggcgatcgtcaagggcgagaacatcccggagccgggtatccccgagtccttcaaggtgttgctcaaggagctgcagtcgctgtgcctcaacgtcgaggtgctctcctccgacggcgcggcgatcgagctgcgcgaaggcgaggacgaggacctggagcgggccgcggcgaacctgggaatcaacttgtcccgcaacgaatccgcgtccgtcgaggacctggct

SEQ ID NO: 25738 - DNA, 390 bp, Mycobacterium avium
atggcaaagatgtccaccgacgacctgctcgacgcgttcaaggagatgaccctgctggagctctccgacttcgtgaagaagttcgaggagaccttcgaggtcaccgcggccgccccggtcgccgtcgccgcggccggcccggccgccggtggcgcgcccgccgaggccgccgaggagcagtcggagttcgacgtgatcctcgagtccgccggcgacaagaagatcggcgtgatcaaggtggtccgcgagatcgtctccggcctgggcctcaaggaggccaaggacctggtcgacggcgcgcccaagccgctgctggagaaggtcgccaaggaggcggccgacgacgccaaggccaagctcgaggccgccggcgccaccgtcaccgtcaag

SEQ ID NO: 25739 - DNA, 588 bp, Mycobacterium avium
atggccagggctgacaaggccaccgccgttgcagacatcgccgagcagttcaaggaggcgaccgcgaccctgatcaccgagtaccggggtctgacggtcgccaacctggccgagctgcggcgctcgctgagcggggcggccacctactcggtggccaagaacacgctggtcaagcgggcggcgtcggaggccggcatcgagggcctggacgagctcttcgccggcccgacggccatcgcgttcgtcaccggggaaccggtcgacgcggccaaggccatcaagaccttcgccaaggagcacaaggcgctggtcatcaagggcggctacatggacggccgggcgctctcggtcgccgaggtggagcgcatcgccgacctcgagtcccgcgaggtgctgctggccaagctggccggcgcgatgaagggcaacctggccaaggcggccgggctattcaacgccccggcctcgcaggtcgcccgcctggcggccgccctgcaggagaagaaggccgccgaatgccccgccgaggccccgcaaccagctgccgaaacacccgccgaggcccccgaggccccggccgacgccgaa

SEQ ID NO: 25740 - DNA, 1188 bp, Mycobacterium avium
gtggcgaaggcgaagttcgagcggacgaagccgcacgtcaacatcgggaccatcggtcacgttgaccacggcaagaccacgctgaccgcggctatcaccaaggttctgcacgacaagtacccggacctgaacgagtcccgcgcgttcgaccagatcgacaacgcgcccgaggagcgtcagcgcggtatcaccatcaacatctcccacgtggagtaccagaccgacaagcggcactacgctcacgtcgacgccccgggtcacgccgactacatcaagaacatgatcaccggcgccgcccagatggacggcgcgatcctggtggtcgccgccaccgacggcccgatgccgcagacccgcgagcacgtgctgctggcccgtcaggtcggtgtgccctacatcctggtcgcgctgaacaaggccgacatggtcgacgacgaggagctgctcgagctcgtcgagatggaggtccgcgagctgctggccgcccaggagttcgacgaggacgccccggtggtgcgggtgtcggcgctcaaggcgctcgagggcgacgccaagtgggtggagtccgtcgagcagctgatggaggccgtcgacgagtcgatcccggacccggtccgcgagacggacaagccgttcctgatgccggtggaggacgtcttcaccatcaccggtcgtggcacggtggtcaccggccgtgtcgagcgcggcgtgatcaacgtgaacgaggaagtcgagatcgtcggcatccgcccatccagcaccaagaccacggtcaccggtgtggagatgttccgcaagctgctcgaccagggccaggccggtgacaacgtcggtctgctgctgcgtggtatcaagcgtgaggacgtcgagcgcggtcaggtcgtcaccaagcccggcaccaccacgccgcacaccgagttcgagggccaggtctacatcctgtccaaggacgagggcggccggcacacgccgttcttcaacaactaccgcccgcagttctacttccgcaccaccgacgtgaccggtgtggtgacgctgccggagggcaccgagatggtgatgcccggtgacaacaccaacatctcggtgaagctgatccagcccgtcgccatggacgagggtctgcggttcgccatccgcgagggtggtcgcaccgtcggcgccggccgggtcgtcaagatcatcaag

SEQ ID NO: 25741 - DNA, 2103 bp, Mycobacterium avium
gtggcacagaaggacgtgctgaccgacctgaccaaggtccgcaacatcggcatcatggcgcacatcgacgccggcaagacgacgacgaccgagcgcatcctctactacaccggcatcagctacaagatcggtgaggtgcacgacggcgccgccaccatggactggatggagcaggagcaggagcgggggatcaccatcacctccgcggccaccacctgcttctggaacgacaaccagatcaacatcatcgacaccccgggccacgtcgacttcaccgtggaggtggagcgcagcctgcgcgtgctcgacggcgccgtcgcggtgttcgacggcaaggagggcgtcgagccgcagtccgagcaggtgtggcgccaggccgacaagtacgacgtcccgcgcatctgcttcgtcaacaagatggacaagatcggcgccgacttctacttctccgtgcgcaccatggaggagcggttgggcgccaacgtcatcccgatccagatccccgtcggctccgagggcgacttcgagggcgtcgtcgacctggtcgagatgaaggccaaggtgtggagcgccgaggccaagctcggcgagaagtacgacgtcgtcgacatccccgccgacctgcaggagaaggccgaggagtaccgcaccaagctgctcgaggccgtcgccgagacggacgaggcgctgctggacaagtacctcggcggtgaagagctcacgatcgaggagatcaagggagccatccgcaagctgaccatcagctcggaggcctacccggtgctgtgcggcagcgcgttcaagaacaagggcgtgcagcccatgctggacgcggtcatcgactacctgccgtcgccgctggacgtcccgcccgccgagggccacgtccccggcaaggaagaagagctgatcacccgcaagccgtcgacggacgagccattctccgcgctggcgttcaaggtcgccacgcacccgttcttcggcaagctgacctacgtccgggtgtactcgggcaaggtcgactcgggcagccaggtcatcaactccaccaagggcaagaaggagcggctgggcaagctgttccagatgcactccaacaaggagaacccggtggagaccgcctcggccggtcacatctacgcggtgatcgggctgaaggacaccaccaccggtgacaccctgagcgatccgaaccaccagatcgtgctggagtcgatgaccttccccgacccggtcatcgaggtggccatcgagcccaagaccaagagcgaccaggagaagctgagcctgtcgatccagaagctcgccgaggaggaccccaccttcaaggtgcacctggaccaggagaccggccagaccgtcatcggtggcatgggtgagctgcacctggacatcctggtggaccggatgcgccgcgagttcaaggtcgaggccaacgtcggcaagccgcaggtggcctacaaggagaccatccgccgcaaggtggagaacgtcgagtacacccacaagaagcagaccggtggctcgggccagttcgcgaaggtcatcatcaacctcgaaccgttcaccggcgaggacggcgcgacctacgagttcgagaacaaggtcaccggtggccgcatcccgcgcgagtacatcccgtcggtcgacgccggcgcgcaggacgccatgcagtacggtgtgctggccggttacccgctggtgaacctcaaggtgaccctgctcgacggtgccttccacgaggtcgactcgtcggagatggccttcaagatcgccggttcgcaggtgctgaaaaaggctgcggcgcaagcccagccggtcatcctggaaccgatcatggccgtcgaggtcaccacgcccgaggactacatgggcgacgtgatcggcgacctgaactcccgccgtggccagatccaggccatggaggagcgcagcggcgctcgcgtggtcaaggcgcacgtgccgctgtcggagatgttcggctacgtcggcgacctgcggtccaagacccaaggccgggcgaactactccatggtcttcgactcctacgccgaagtgccggccaacgtgtcgaaggagatcatcgcgaaggcgacgggtcag

SEQ ID NO: 25742 - DNA, 468 bp, Mycobacterium avium
atgccgcgcaaggggcccgcgccgaagcgcccgttggtcaacgacccggtctacgggtcgcaactggtcacccagctggtgaacaaagtcctgctgaaggggaagaaatcgctcgccgagcgcattgtgtatggtgcgctcgagaacgcccgggagaagacaggaaccgatcccgtgatcacgctcaagcgtgctctcgacaacgtcaagcccgccctcgaggtgcgcagccgccgggtcggcggtgccacctaccaggtgcccgtcgaggtgcgtccggaccggtccaccacgctggcgctgcgctggcttgtcagcttctcgcggcaacgccgggagaagaccatggtcgagcggctggcaaacgagatcctggatgccagcaacggcctcggggcctccgtcaagcggcgcgaggacacccacaagatggccgaggccaaccgcgccttcgcgcactaccgctgg

SEQ ID NO: 25743 - DNA, 372 bp, Mycobacterium avium
atgccaaccattcagcagctggtccgcaagggtcgtcgggacaagatcggcaaggtcaagaccgcggctctcaagggcagcccgcagcgccgtggcgtatgcacccgcgtgtacaccaccaccccgaagaagccgaactcggcgcttcggaaggtcgcccgcgtgaagctgacgagccaggtcgaggtcaccgcctacatccccggcgagggccacaacctgcaggagcactccatggtgctggtgcgcggcggccgggtgaaggacctgcccggtgtgcggtacaagatcatccgcggctcgctggacacccagggtgtcaagaaccgcaagcaggctcgcagccgttacggcgccaagaaggagaagagc

SEQ ID NO: 25744 - DNA, 1929 bp, Mycobacterium avium
gtgtgtggtctgctggcgttcgtcgccgcccgagccggtgccgtcggcgccgacgacgcgatcgcgcgcgcctcgcacctgatgcgccaccgcgggcccgacgagccgggcacctgggccggcgccgacggctccgtcgtgttcggcttcaaccggctgtcgatcatcgacatcgcccattcgcaccagccgctgcgctggggcccgcccgagacgccggaccgctacgagctggtgttcaacggcgagatctacaactacctggagctgcgcgacgagctggccgcccaccacggcgcggtgttcgccaccgacggcgacggcgaggccatcgtcgccggcttccaccactggggcaccgatgtattgacccggctgcgcggcatgttcgcgtttgcgttgtgggacaccgtcacccgcgaattgttctgtgcccgtgaccctttcggcatcaaaccgctgttcgtggcgaccggcaccggcggcaccgcggtggccagcgagaagaagtgcctgctggagctggccgagttgatcgggttcgacaccgcgatcgatgagcgcgcggtgcagcactacaccgtcctgcagtacgtgccggagcccgagacgctgcaccgcggggtgcgacggctggaatcgggctgttatgcccggatccggcccggcgcggcgcccgacatcacccgctacttcgtgccccggttcgccgccgtgcccatcacccgcgacaccgaacaggcccgctacgacgagatcaccgcggtgctcgaagattcggtggccaaacacatgcgcgccgacgtcaccgtcggggcgtttctgtccggcggcatcgactcgaccgccatcgcggcgctggccatccggcacaacccgcggctgatcaccttcaccaccggtttcgagcgcgagggattctccgagatcgacgtcgcggtggcctccgcggaggcgatcggcgcccggcacatcgccaaggtggtgcaccccgacgagttcgtcgccgccctgcccgagatcgtctggtacctcgacgagccggtggccgacccggcgctggtgccgttgttcttcgtcgcccgggaggcccgcaagcacgtcaaggtggtgctctccggcgagggcgccgacgagctgttcggcggctacacgatctatcgggaaccgttgtcgctcaagccctttgactacctgccgcggccggtgcggcgctcgatgggcaaggtgtccaagccgctgccgtacgggatgcgcggcaagagcctgctgcaccgcgggtcgctgacgctcgaggagcgctattacggcaacgcccgcagcttctccgatgcgcagctgcgcgacgtgctgcccggcttccgcgcggaatggacgcacaccgacgtcaccgccgcactgtacgcgcagtcgatcggctgggacccggtggcgcgcatgcagcacatcgacctgttcacctggctgcgcggggacatcctggtcaaggccgacaagatgacgatggccaactcgctggagctgcgggtgccgttcctggatcccgaggtgttcgccgtggcgtcccggttgccggtggaggccaagatcacccgcaccaccacgaagtacgcgttgcggcgggcgctggagccgatcgtcccggcgcacgtgctgcaccggcccaagctcggcttcccggtcccgatccggcattggctgcgcgccggcgagctgctggagtgggcctactcgatggtggcgtcgtctcaggccggtcacctggtggacctgggcgccgtgcgccggatgctcgacgagcaccgcaacggcgtcagcgatcacagccgccggctgtggacggtgctgatcttcatgctctggcacgccatcttcgtcgagcacagcgtggtgccacagatcggcgagccggtgtacccggtgcagctc

SEQ ID NO: 25745 - DNA, 1008 bp, Mycobacterium avium
gtgctgcggccgttggcgctggccgtgacgctgggtgtgctggcgatcgtgctgagcggatgcagcagctgggccgacgcgctggcgctgggctggccgaagggcatcaccccgcaggcccacctcaaccgggagctgtggatcggcgccgtgatcgcctcgctggtggtcggggccatcgtgtacgggctgatcttctgggcgtcggcgttccaccgcaagaaggcgaccgacaccgagctgccccgccagttcggctacaacatgccgttggagctggtgctgacggtgacgccgttcctcatcatctcggtgctgttctacttcaccgtggtggtgcaggagaagatgctgcacatcgccaaggaccccgaggtggtggtcgacgtcacggccttccagtggaactggaagttcgggtatcagaaggtcaacttcaaagacggcacgctgacctacgacggcgccgacccggagcgcaagaaggcgatggtgtccaagccggaaggcaaggacgcgcacggcgaggagcgggtcggggccgtccgcgggctgaacacctcggaccgcacctatctgaacttcgacaaggtcgagacgctgggctccagcgacgaaatcccggtgctggtgctgcccaccggcaagcgcatcgaattcgacctggcgtccgcggacgtggtgcacaccttctgggtgcccgagttcctgttcaagcgcgacgtcatccccaacgccgaggcgaacaactcgatccacgtgttccaggtcgaggagatcaactcgcccggggcgttcgtgggccactgcgccgagttctgcggcacctatcactcgatgatgaacttcgaggtccgtgtggtgtcgcccaacgacttcaaggcctacctgcagcagcggatggacggcaagagcaacgccgaggcgctgcaggcgattggtcagtccccggtggcggtgaccacgcacccgttcgactccaagcgcggtcagttggccggaagccag

SEQ ID NO: 25746 - DNA, 1320 bp, Mycobacterium avium
gtgagatttcccgacgcggccgaggtggccgcgcgcacaccggccgaccgcgatcgcgtgctggatgtcatccgcatcgtctccctgggcggcgtggtgctcggccataccgtgatggcggccagcatcattcgcgaccacgtcttgatctgggacaacctgctcaccacctcggcgctgttccaggcgatgacctggttgctccagatcatgccgctgttcttcttcgccggcgcggcggcgtgcgtgtcctcctggacacccggcaccgactggggaggctggttgatgaggcgctgcacccggctgttccgcccggtgttctactatctggcgttctgggcggtgacgctgacggtgctgtatcaggctctgccgcaacacatctacgagccgatcgccggcgtcagcacacagctgctgtggttcctgggggcctacgtcctggtgctggccgccatgcccgtgctgtaccgcatcaccaccaccgggcgccttgccgccggcgtggcggcggtctacggggccatcgcgttgatcgacgtgatccggttgcactggccggcgctgatgccgctgggttacctcaacctggccgtctggctgattccggccatgttcggggcggcctaccgtcgcggcctgctcggtgggcgtgccgcgctggccgtcgccgccgccttcttcgccgcggatgtcgccctggtgcgctggggcccgtatcagctcagcatggtcggcaccggcgaccaccacctgtccaacaccagcccgccgtcgctgctgctggccgggcacgcaatcatcttgagcgcgttggcgatcgcggccgcaccggcgatcgcgcgctgggcgcagcggccgcgggtgtggtggtggaccgccatcggcaactccggcgcgatgaccctgtacctgtggcacatgccggtgctgctcggcgtgcacctggccttcgattacctcggctgcccgcgctttccgggcgcgccggacttcctcgccatcagcgtcgcgcaggtgctcctggtggtcgtcgccgtggcggtgctgttcgtcgcgctgcggccgctggagaacaacccgctgtccggctgggacggcgcgcccgcggtgatgtcgcgcgggtggggtgcggccgtcggtgccctgctgtgcgtggccggcgtcgcgctgctcgccgcgatcaggtgggggctcaaggacgacgggctggtctgcatggccgtggtggtggccgcgctggtggccgcgcggatcgtggcccagcacgccggccccgcgggtcacggctcttcgtcgaggccgtgttcgatggcg

SEQ ID NO: 25747 - DNA, 2493 bp, Mycobacterium avium
atgaatcactgccgcaatgggtcactgccgcaacgctattggccggccccgggtcgacgcggcggccgaaggtcctctgcggtcgggaccaaagtcgttgaaccagttacgccccgacccgcagggagccgagaatgtgggatattggactggtctgccgacaggaaggctcgccatggtcaaggtgttcctggtcgacgaccacgaagtcgtccgccgcggactgtgcgatctgctctcctcggatcccgatctgcggatcgtcggcgaggccggcacggtggccgaggccaaggcgcggataccggcggcgcggcccgacgtggccgtgctcgacgtgcggctgcccgacggcaacggcatcgagttgtgccgcgacctgctctccgagcatcccgacctgcgctgcctgatgctgacgtcgttcacctccgacgaggcgatgctggaggccatcctggccggcgccagcgggttcgtcatcaaggacatcaagggcatggagctggcccgggcgatcaaagacgtgggcgccgggaaatcgctgctggacaaccgggccgccgcagcgttgatggccaagctgcgcggcagcgccgcgcaggcggacccgctgtcgggcctgaccgaacaggaacgaacgctgctcgggctgctcagcgagggcctgaccaaccggcagatcgccgcgcgaatgttcctcgcggagaagacggtcaagaactacgtgtcccggctgctggccaaactcggcatggagcgccggacccaggcggcggtgttcgcgtcgaaactcaaccagcaggccggccgtccgccgaccccaccggactggccggggtgaccgggaaccggttcgacgaactggcggccgcgcgcgatcaaaccgagaaactgctgcgggtgatcgccgagatcggcgcgggcctggatctcgacgcgacgctgcaccggatcatcagcgcggcaagggaattgacgtcggccccgtacggtgccctggccgtgcgcgactggcatgccaacctgatctcctttgtgcacgaaggcatggacgccgagacggtgcggcgcatcgggcaccacccggtcggcaaggggctgctcagtctgtccctgctggacaccccggcgctgcggatggacgacctgaccgcccaccccgccgccgccggattccccgagcaccatccggcgatgcgggcctttctcgcggtgccgatcaccatccgcggcgcggtgttcggcaacctgtatctgacccacgtcgatgaggcgcgggtgttctccgacgccgacgagatggccgcgcgcgccctggctttcgcggcggcggtcgccatcgacaacgcgcaggtcttcgagcgcgagcggatgtcggtgaaatggatcgaagccagccgcgagatcaccaccgcgctgctgtcgcgcaccgagccgcaccggcgcccgatgcagctgatcgccgaacgcgcctgcgcgttgaccgacgccgaacaggccatcgtgctggtgcccgccgaccccgagcagcccggcaacccggaggtggacaccctggtggtctcggcggcggtgggcctgcccgccgccgacgtgctcgggcagcgggtcccggtgcgcggctccaccagcggcgcggtcttcaagtccggcgaaccgctgatcaccgacgaattccgttatcccatccaggctttcaccgatgccgggcggcgaccggcgatcgtgatgccgctgcgcgcccgcgacgaagtggtcggggtgatcgcgatcgcccgcggcaccgagcagccgccgttcgacgagagctatctggacctggtgcgcgacttcgccacccacgccgccatcgcgctggtgctcgccgcggcgcgcgaggacgcgcggcagctggccgttttggccgagcgggagcgcatcgcgcacgacctgcacgaccacgtcatccagcggctgttcgccgccggcatggatctgcagggcacgctggcccgggcgcggtcgccggaggtggccgaccggctcaaccggacgctcgacgacctgcagacgatcatcgaggagatccgcaccacgatcttcgcgctgcgctccccggcggccgtcgccggcgacttccggcaccgcatccagcgggtcatcgccgagctgaccgagaaccgcgacctggtcaccacggtgcgcatggacggtccgatgacggcggtcggcgccgagctcgccgagcacgccgaggcggtgaccgccgaagccgtcagcaacgccgtccgccactcgggcgcgtcgcggctgacggtgcagatcggtgtcgccgacatgttcaccctggacgtgatcgacaacggccgcggcatcgcggccggcaacacccgtcgcagcgggctggccaacatgacacggcgggccgagcaactcggcggcagctgcgagatcagcagcccgcccggcggcggcacccgggtgcattggaccgccccgctgctcgaccac

SEQ ID NO: 25748 - DNA, 1413 bp, Mycobacterium avium
atgagctcgccgcaagagtacgacatggtggtcatcgggtcggggcccggcgggcagaaggccgcgatcgcgtcggccaagctgggcaagtccgtcgcggtcgtcgaacgcggacagatgctcggcggcgtgtgcgtcaacaccggcaccatcccgtcgaaaacgttgcgcgaggcggtcctctacctcaccggcatgagccagcgcgaactctacggcgccagctaccgggtgaaggagaagatcacccccgccgacctgctggcccgcacccagcacgtgatcggcaaggagatcgacgtggtgcgcaaccagttgatgcgcaaccgcatcgacctgctgatcgggcacggccgcttcgtcgacccgcacaccatcgaggtcgaggacccgtcccggcgcgaaaagatcaccatcagcggcaaatacgtcgtcatcgccaccggcacccggccggcgcggccctcaggcgtcgagttcgacgaggaccgggtgctcgactccgacgggatcctggacctcaagtcgctgcccacctcgatggtggtggtcggcgccggcgtgatcggcatcgagtacgcctcgatgttcgccgccctgggcaccaaggtgaccgtggtggagaagcgggacgacatgctcgacttctgcgaccccgaggtggtcgaggcgctcaagttccacctgcgcgacctggcggtgacgttccggttcggcgaggaggtgaccgcggtcgacgtcgggtcggcgggcaccgtcaccaccctggccagcggcaagcagattcccgccgagacggtgatgtactcggccggcaggcagggccagaccgaccatctggacctgcacaacgccgagctggaggccgacaaccggggccgcatcttcgtcgacgacaacttccagaccaaggtgccgcacatctacgccgtcggggacgtgatcggcttcccggcgctggccgccacgtcaatggagcagggccggctggccgcctaccacgcgttcggggaggcgtccgacggcatcaccgagcttcagccgatcggcatctactccatccccgaggtctcctacgtcggggccaccgaggtggagctcaccaaggacgcgatcccctacgaggtgggggtggcccggtaccgggagctggcccgcggccagatcgccggcgactcctacggcatgctcaagctgctggtgtccacccaggacctcaaggtgctcggcgtgcacatcttcggcaccagcgccaccgagatggtgcacatcgggcaggccgtgatgggctgcggcggcacggtggaatacctggtcgacgcggtgttcaactaccccactttttccgaggcctacaaggtggcggcgctggacgtgatgaacaaggtgcgcgcgctcaaccagttccgccgc

SEQ ID NO: 25749 - DNA, 1527 bp, Mycobacterium avium
gtggcagcgaccaaagcaagcccggcgacggatgggccggtgaaacgcaccgccacaaagtctccgtcgtcccccgccaagcggccggcggccaaggccgccaacggctccgcgcccgccaagcgggccaccaagaccgcatcgcggtccgccaagtccgaggccggcgcggccgccgaacccgccaagaagacccgctcgtcggccaagggtgccgacgccaaggcgccgtcggggcgcgggacgaaggctgccaagggcggcccggccgaccccgacgccctcgacaccgacggcgccgtcgaggatctcgacaccgagcccgacctggagggcgagcccggcgaggacctcgacatcgacaccgacctgaacctcgacgacctcgaggaggacgtggcggccgacgacgccgacatcgagcccggtgacgccgaggagggcgaggacgaggaagccgccgcccccaaggcggccggcgccacggccgccgacgaggacgacgagatcgccgagccgtccgaaaaggacaaggcctccggcgatttcgtctgggacgaggacgaatccgaggcgttgcggcaggcccgcaaggacgccgagctgaccgcgtcggccgactcggtgcgcgcctacctcaagcagatcggtaaggtcgcgctgctcaacgccgaggaagaggtcgagctggccaagcggatcgaggccggcctgtacgccacccagctgatgtcggagatggccgagcgcggcgagaagctgcccgccgcccagcgccgcgacatgatgtggatctgccgcgacggcgaccgcgcgaaaaaccatctgctggaagcgaatctgcggttggtggtgtcgctggccaagcgctacacaggccgcgggatggcgttcctcgatttgatccaggagggcaacctgggcctgatccgtgcggtcgagaagttcgactacaccaagggctacaagttctccacctacgcgacgtggtggatccgtcaggccatcacccgggccatggccgaccaggcccgcaccatccgcatcccggtgcacatggtcgaggtgatcaacaagctgggccgcatccagcgcgagctgctgcaggacctgggccgcgagcccacgcccgaggagctggccaaggaaatggacatcacgcccgaaaaggtgctggagatccagcaatatgcccgcgagccgatctcgctggaccagaccatcggcgacgagggcgattcccagctgggcgacttcatcgaggacagcgaggccgtggtggccgtggacgcggtgtcgttcacgctgttgcaggaccagctgcagtcggtgctggagacgctgtcggagcgcgaggccggcgtggtgcggctgcggttcggcctgaccgacggccagccccgcaccctggacgagatcggccaggtctacggggtgacccgcgagcgcatccgccagatcgagtccaagacgatgtcaaagttgcgccaccccagccgttcccaggtgctgcgcgactacctggac

SEQ ID NO: 25750 - DNA, 1227 bp, Mycobacterium avium
gtgactgtgttctcggcactgttgctggccggggtcttgtccgtgctggcactggccgcaggtgtggcggtcgggacccggttgtccccgcgggcggcgcagcgccgccagcgaatcagcaccgaatggaccgggatcaccgtcgcgcaaatgctggaacgcatcgtggcgctgatgccgctgggcgcggcggtggtggacgcccaccgcgacgtcgtctacctcaacgaccgggccaaggagcttggcctggtgcgcgaccgccagctcgatgaccaggcatgggaggccgcgcagcaggcgctgaccggtgtcgacgtggaattcgacctgcggccggcgaaacggtccgggggccggtccggcctgtcggtgcacgggcaggcgcggttgctcagcgaggaagaccgccggttcgccgtggtgttcgcccacgaccagtccgactatgcccggatggaggcgacccggcgcgacttcgtggccaacgtcagccacgagctcaagacgccggtgggggccatggcgctgctcgccgaggcgctgctggcgtcggccgacgactccgagaccgtgcgccggttcgccgagaaggtgctggtcgaggccaaccggctgggcgacatggttgccgagctgatcgagctgtcccggctgcagggcgccgagcggttgaccaacgtcaccgaggttgacgtggatagtgttgtgaacgaagcgatttcgcgccacaaggtggcggccgacaacgccaacatcgaggtccggaccgacgcccccagcggtttgcgggtgctgggcgacgagacgctgttggtcaccgcgttggcgaacctggtgtccaatgccatcgcctattcgccgccgggctcgccggtgtcgatcagccgtcgccgccgcggcgacaacatcgagatcgccgtcaccgaccgcggcatcggcatcgcgctggaggatcaggagcgggttttcgagcggttcttccggggggacaaggcgcgctcacgcgccaccggcggcagcgggttgggcctggccatcgtcaagcacgtcgcggccaatcacaacggcaccatcggggtgtggagcaagccgggcaccggatcgacattcaccctgtccattccggcggccgtggcgtcgcatcggggcgacggtgaatccgagcagccgcagggtcgtgaggtgcggcccaaccgttcccaacgagaggaagaactaagccga

SEQ ID NO: 25751 - DNA, 681 bp, Mycobacterium avium
atgaccagtgtgctgattgtcgaggacgaggagtcgctggccgacccgctggccttcctgctccgtaaggagggcttcgaggccaccgtggtgaccgacgggtccgccgcgctcgccgaattcgatcgggccggcgccgacatcgtgctgctcgacctgatgctccccgggatgtcgggcaccgacgtctgcaagcagctgcgcgcgcgttccagcgtgccggtgatcatggtgaccgcccgggacagcgagatcgacaaggtcgtcggcctcgagctcggcgccgatgactatgtgaccaagccgtattcggcgcgggagctgatcgcgcggatccgggcggtgctgcgccgcggcggtgacgacgactccgagatcagcgacggcgtgctcgaatccggcccggtgcggatggacgtcgaacgccacgtggtttcggtcaacggtgacacgatcacgttgccgctcaaggaattcgacctgctcgagtacctgatgcgcaacagcggccgggtgctgacccgcggccagctgatcgaccgggtgtggggcgccgactacgtcggcgacaccaagacgctcgacgtgcacgtcaagcggctgcgctccaagatcgaagccgacccggccaacccggtgcacctggtgacggtgcgcgggctgggctacaagctggaaggc

SEQ ID NO: 25752 - DNA, 1518 bp, Mycobacterium avium
gtgactgtctccccgacgagtgcgcccacccaggcgatcgacaccgtcgagcgcgccgcgaccacccccgacgagccgcagccattcggcgagttgggcctcaaagacgacgaataccagcgcatccgcgaaatcctgggccgccggcccaccgacaccgagctggcgatgtactcggtgatgtggagcgagcactgctcctacaagtcgtccaaggtgcacctgcgctacttcggggagaccaccaccgacgagatgcgcgccggcatgctggccggcatcggcgagaacgccggcgtcgtcgacatcggcgacggctgggcggtcaccttcaaggtggaatcgcacaaccacccctcctacgtcgagccctatcagggggcggccaccggcgtcggcggcatcgtgcgcgacatcatggcgatgggcgcgcgcccggtggcggtgatggaccagcttcggttcggcgccgccgatgcgccggacacccgccgcgtgctcgacggcgtggtgcgcggcatcggcggctacggcaactcgctgggcctgcccaacatcggcggcgagaccgtcttcgacgcctgctacgccggcaacccgctggtgaacgccatgtgcgtcggcgtgttacgccaggaggacctgcacctggccttcgcctccggcgcgggcaacaagatcatcctgttcggcgcccgcaccgggctggacggcatcggcggggtatcggtgctggcgtcggacaccttcgatgcggagaactcgcgcaagaagctgccctcggttcaggtgggcgacccgttcatggagaaggtgctcatcgagtgctgcctggagctctacgccggtgggctggtgatcggcatccaagacctgggcggtgccggattagcttgcgccacttctgaattggcgtccgccggtgacggggggatggaggtccggctggaggccgtgccgctgcgcaccgccggcatgacgcccgcggaggtgctgtgcagcgaatcccaggagcggatgtgcgcggtggtcacaccggagaacgtcgacgccttcctggcggtgtgccgcaagtgggacgtgctggccaccgtcatcggcgaggtcaccgacggcgaccggctgcggatcacctggcacgggcagacggtggtcgacgtgccgccgcgcaccgtcgcccacgaaggcccggtataccagcgaccgctcgcccgccccgacacccaggacgccctgaacgccgacagctcggcacggctgccccgcccggccaccggcgccgagctgcgggccactttgcttgcgctgcttggcagcccgcacctgtgcagccgcgcgttcatcaccgagcagtacgaccggtatgtgcgcggcaacaccgtgctggccgaacacgccgacggcggcgtgctgcgcgtcgacgagaccaccgggcgcggtatctccgtgtccaccgacgcctcgggccgctacaccatgctcgacccctacgccggcgcgcaactcgcgctcgccgag

SEQ ID NO: 25753 - DNA, 1545 bp, Mycobacterium avium
gtgctgcgcagccacgccgccggttcgctgagaagtagcgacgccgggcagcaggtgacgcrmgcsggctgggtggcgcsccggcgsgaccacggcggcgtcatcttcatcgacttgcgcgacgcctccggaatcacccaggtggtgttccgcgacccggacgtcctcaagcaggcgcaccggctgcgcgccgagttctgcgtcgcggtggccgggctggtcgagatccgcccggaaggcaacgccaaccccgagatcgccaccggcgacatcgaggtcaacgcgtcgtcgctgaccgtgctgggcgaaagcgcgccgctgccgttccagctcgacgagcccgccggcgaggagctgcggctgaaataccgttacctggacctgcgccgcgacgcgccggccgcggcaatccggttgcgctccaaggtgaatgccgccgcgcgcgaagtgctggaccggcacgacttcgtcgagatcgagacccccaccatcacccgctccaccccggagggggcgcgcgacttcctggtgccggcccggctgcatcccggctcgttctacgcgctgccgcagagcccgcagctgttcaagcagttgctgatggtggccgggatggagcgctactaccagatcgcccgctgctaccgcgacgaggatttccgcgccgaccgccagcccgagttcacccagctcgacatggagatgagcttcgtcgacgccgaggacgtcatcgcgatctccgaggagatcctggccgcgctgtgggcgctgatcggctacgagatcccccggccgatcccgcggatcagctacgccgacgcgatggcccgctacggctccgacaagcccgacctgcggttcggactcgagctcgtcgagtgctcggagttctttaaagacaccacatttcgcgtcttccaggcgccgtacgtgggtgcggtggtgatgccgggcggggcctcgcagccgcgccgcaccctggacggctggcaggagtgggccaagcagcgcggcgccaagggcctggcctacgtgctggtcggcgaggacggcgagctgggcgggccggtggccaagaacctctccgaggccgagcgcgccgggctggccgggcacgtcggcgccgcaccgggggactgcatcttcttcgcggccgggccggccaagccgtcgcgggcgctgctgggcgcggcccgcagcgagatcgcccaccggctgggcctgatcgacccgcaggcgtgggcgttcgtctgggtggtggacccgccgctgttcgagcccgccgacgacgccaccgccgccggtgacgtcgccgtcggctccggggcgtggaccgcggtgcaccacgcgttcaccgcacccaagccgggatacgaggacgcgatcgagaccgacaccggcaacgtgctcgccgacgcgtatgacatcgtctgcaacggcaacgagatcggcggcggctcgatccgtatccaccgccgcgacatccaggagcgggtgttcgcggtgatgggcctggacaacgccgaggctcgggagaagttcgga

SEQ ID NO: 25754 - DNA, 1260 bp, Mycobacterium avium
gtgccggaattcagcgctcccaagggtgtgcccgactacgtgccgccggactcggcgcagttcgtcgcggtccgctccggcctactggacgccgcccgcggcgccgggtacggcgacatcgagttgcccatcttcgaggacaccgcgctgttcgcccgcggcgtcggcgaatccaccgacgtggtgtccaaggagatgtacaccttcgccgaccgcggcgaccgctcggtgacgctgcggcccgagggtacggccggagtggtgcgcgcggtgatcgagcacggcctggaccggggcacgttgccggtgaaattgtgttatgcgggaccgtttttccgctacgagcgcccccaggcgggtcgctaccgccagctgcagcaggtcggtgtggaggcgatcggggtggacgacccggcgctggacgccgaggtgatcgccgtcgccgacgccgggttccgctcgctggggctggacgggttccgcttggagatcacctcgctgggcgacgacagctgccgtccgcaataccgggaactgttgcaggacttcctgttcggtctcgacctcgacgaagaaacccggcggcgcgctcggctgaatccattgcgcgtcctcgacgacaaacggcccgaggtgcgggcgatgacggccgacgcgccggtgctgctcgatcacctctccgatgcggccaaacaacacttcgacaccgtgctggcgcacctggacgcgctcggggtgccctacgtgatcaacccgcgcatggtgcgcgggctcgactactacaccaagaccacgttcgagttcgtgcacgacggtctcggcgcccagtccggcatcggcggcggtggccgctacgacgggctgatgcgtcagctcggcggacaagacttgtccggcatcggatttgggctcggcgtggaccgtaccctgctggcgctgcgcgccgagggcaagagcgtgggctcggcggcgcgctgcgacgtcttcggcgtcccgctgagcgatcaggccaagctgcggctggccgtgctggccgccgggctgcgcgccgccggcgtgcgcgttgacatggcctacggcgcgcgggggctcaagggcgcgatgcgcgcggccgaccgctccggtgcccgcatcgccctggttctcggcgatcgcgacatcgacgccggcacggtgggcgtgaaggatctgcagaccggctcgcaggtgtcggtggaactggattccgttgtcgccgaagttctttcacaactgagccgc

SEQ ID NO: 25755 - DNA, 873 bp, Mycobacterium avium
ttgaccgaacccaagatccacggcatcatcgcctacccggttacgcccttcgccgacaacgggattgacacgcagcggctggccgcattggtcgagcggctggtgtccgccggcgtgcacgcgatcgcgccgctgggcagcaccggcgagctggcctacctggaggagcccgaagtcgacgccgtgatcgacaccaccctgagcgccgtcgccggccgggtgccggtgatcgtgggagtgtcggatgtgaccaccgccaagacgattcggcgcgcccaatacgcgcagcgagccggggcggacgcggtgatgatcctgccggtgtcctactggaagctcaccgagcgggagatcttccatcactaccgcagcatcagcgacgccatctcgattccgatcatggcctacaacaacccggccaccagcggcgtggacatgccgccggagctgctggtgcggatgttcgaatccatcgacaacgtggccatggtcaaggagtccaccggcgacctgacccggatgcggcgcatcgccgagctgtccggcaaccggctgcccttctacaacggcagcaacccgctggtgctcgacgcgctgaaggccggggcgtccggatggtgcacggccgcaccgtgtttgcgaccgcaaccatgcatcgacctgtacgacgcggtgcgcgcgaacgacctcgacaccgcgcagcgactctacgacgacctcaagccactgctcaccttcatcgtggccggcgggctggccaccaccgtcaaggccggcctggagttgctcgatttcaaagtcggcgacccgcgcgcgccgttgctgccgctcgacgagcagggccgcgccgagttgcgcaaactgcttgcggcc

SEQ ID NO: 25756 - DNA, 1206 bp, Mycobacterium avium
gtggtaaccgccgtcacggcgacgacgtcgatcgcgccggacgtcgagagcacgtggaagggtctactcgccggcgaaagcggcatccacgtcctcgaagacgactacatcaccaagtgggacctgccggtccggatcggtggccacctcaaggagcccatcgacgagcggatgagcaggctcgacctgcgccgcatgtcctacgtccagcggctggccaagctgctcagcacccagctgtgggagaccgccggcaacccggagctcgaccccgaccggttctcggtcgtggtgggcaccggcctcggtggtgccgagcggatcgtggagagctacgacctgatgaacgagggcggcccccgcaaggtgtcgccgctggccgtgcagatgatcatgcccaacggcgccgccgccgtggtgggtctgcagctcggcgcccgcgccggggtgatcaccccggtgtcagcctgttcgtcgggctcggaggcgatcgcccacgcgtggcgccagatcgtcatgggcgacgccgatgtcgccgtgtgcggtggtgtcgagggccccatcgaggcgctgccgatcgcggccttctcgatgatgcgggccatgtcgacgcgcaacgacgagcccgagcgggcgtcgcggccgttcgacaaggaccgagacgggttcgtgttcggcgaggccggtgcgctgatgctgatcgagaccgaggagcacgccaaggcccgcggtgccaagccgctggcccggttgatgggtgccggcatcacgtccgacgcgttccacatggtggccccggcggccgacggtgtgcgggcgggccgggccatgacgcggtcgctggagttggcgggcctgtcccccaaggacgtcgaccacgtcaacgcgcacggcaccgcgacgccgatcggtgacaccgccgaggccaacgccatccgggtggccggatgtcaggaggcggcggtgtatgcgccgaagtccgcgctgggacactcgatcggcgcggtcggcgcgctggaatcggtgctcacggtgctgaccctgcgcgacggcgtcattccgcccaccttgaactatgaaaccccggaccccgaaatcgatctggacatcgtggcgggcgaaccccgctacggcgactaccaatacgcgatcaacaactcgttcggcttcggtggccacaacgtggcactggccttcgggcgctac

SEQ ID NO: 25757 - DNA, 345 bp, Mycobacterium avium
gtggctgtcagccaggaagaaatcatcgccggtatcgccgagatcatcgaagaggtgaccggtatcgagccctccgaggtcaccccggagaagtccttcgtcgacgacctggacatcgactcgctgtcgatggtcgagatcgccgtgcagaccgaggacaagtacggcgtcaagattcccgacgaggacctcgccggtctgcgcaccgtcggtgacgtcgtggcctacatccagaagctcgaggaagagaaccccgaggctgccgaggcgttgcgcgccaagctggagaccgagaaccccgaggcggtcgccaacgtcaaggcaaggctggaagcggacagcaag

SEQ ID NO: 25758 - DNA, 489 bp, Mycobacterium avium
atgatgttggattacggaacgtttccgccggagttcaattcggcgcggatttattcgggtccggggtcgggttcgttggtggctgcggcgtcggcgtggagttcgttggcggcggagttgaatgcggcggcgttgagttatgacaaggtggtcacggcgctggccagtgaggagtggttggggtcggcgtcggcgtcgatggcgtcggcggtggcgccgtatgtggggtggatgagtacgacggcggcgcaggctgaggaggcggccagccaggcgcgggcggcggcggcggcgtatgaggcggcgttggcggcgtcggtgccgccgccgttgattgcggcgaatcggatgcaggtctcgcagttgcaggcgacgaatgtgttggggcagaacacgccgttgattgcgcagttggaggcgcagtatggggagtattgggcccatgatgcggcggcgatgtatagctatgcggggcagtcggcgtcggcg

SEQ ID NO: 25759 - DNA, 1338 bp, Mycobacterium avium
atggatcgacagaaggaattcgtcctgcgcaccctcgaggaacgggacatccgcttcgttcggctgtggttcaccgatgtgctcgggttcctcaagtcggtcgccatcgcccccgccgaactcgaaggcgccttcgaggagggcatcggcttcgacggctcctcgatcgagggcttctcccgggtgtcggaatccgacaccgtcgccaaccccgacccgtccaccttccaggtgctgccatgggcctcgcccaacggccaccaccactcggcgcgaatgttctgcgacatcaccatgccggacgggtcgccgtcctgggccgacccacggcacgtgctgcgccgccagctgcagaaggccaacgacctgggcttctcctgctacgtgcaccccgagatcgagttcttcctgctcaagcccgggcccgacgacggcacgccgcccgtccccgtcgacaccgccggctacttcgaccaggccatccacgactccgcctccaacttccgcaggcacgccatcgaagcgctggagttcatgggcatctcggtggagttcagccaccacgagggcgcgcccggccagcaggagatcgacctgcgcttcgccgacgccctgtcgatggccgacaacgtgatgacgttccgctacgtcatcaaggaggtcgcgatcgagaacggcgcccgcgcctcgttcatgcccaagccgttcgggcagcaccccggctcggcgatgcacacccacatgagcctgttcgagggcgacgtcaacgccttccacagccccgacgacccgctgcagctctcggacgtgggcaagtcgttcatcgccggcatcctcgagcacgcctccgagatcagcgccgtcaccaaccaatgggtgaactcctacaagcggctggtgggcggcggcgaggcccccaccgccgcgtcctggggggcggccaaccgctcggcgctggtgcgggtgccgatgtacacgccgcacaagacgtcgtcgcggcgcgtcgaggtgcgcagccccgactcggcgtgcaacccctacctgaccttcgccgtgctgctggccgccggcctgcgcggggtggagaagggctacgtgctggggccgcaggccgaggacaacgtgtgggacctgactcccgaggagcggatcgcgatgggctatcgcgaactgcccaccagcctggacagcgcgctgcgcgccatggagtcctcggagctggtcgcggagacgttgggggagcacgtctttgacttcttcctgcgcaacaagcgcaccgagtgggcgacctaccgcagccacgtcaccccgtacgaactgcgcacctacctgtcgctg

SEQ ID NO: 25760 - DNA, 855 bp, Mycobacterium avium
atgtctgagcacaatgtttacggtgccgcccagccggcccagcccgcccaacctgcccagccgcgcaccaggattcgcacccaccatctgcagaagatgaaggccgagggccacaagtgggccatgctgacggcgtacgactattccaccgcccgcatcttcgacgaggccggcatcccggtgctgctggtgggcgactcggcggccaacgtcgtctacggctacgacaccacggtgccggtgtcgatcgacgagctgatcccgctggtccgcggcgtggtgcggggggcaccgcacgccctggtggtcgccgatctgccgttcggcagctacgaggccgggccggccgccgcgctggccgccgccacccggttcatgaaggagggcggcgcgcacgcggtgaagctggagggcggcgaacgggtggccgagcagatcgctcacctgaccgcggccggcatcccggtgatggcgcacatcggcttcaccccgcagagcgtgaacagcctgggcggtttccgggtgcagggccgcggcgacgcggccgaacagaccatcgccgacgcgatcgccgtcgccgaagccggagcgttctcggtggtgatggagatggtgccggccgggctggccacccagatcaccggcaagctcaccatcccgaccatcgggatcggcgccggccccaactgcgacggccaggttctggtttggcaggacatggccggcatgagcagcggcaagtccgcccgcttcgtcaagcgcttcgccgacatcggcggcgaattgcgccgcgccgcaacgcagtatgcgcacgaggtggccgccggggtcttcccggccgacgaacactgcttc

SEQ ID NO: 25761 - DNA, 1884 bp, Mycobacterium avium
atgcccgcagaccttggcgggcccgcattgtcgtcggccggccccggtagcctgctgaccgtggccctctaccgcaagtaccgtccggcaaccttcgccgaagtggtggggcaggagcacgtcaccgaacccctgtcgatcgcgctggaggccggccggatcaaccacgcctacctgttctcgggtccgcgcggctgcgggaagacctcctcggcgcgcatcctggcccgctcgctgaactgcgtgcaggggccgacggccacgccgtgcggggtgtgcgactcgtgcctggcgctggcgcccaacgcgcccggcagcatcgacgtggtcgagctggacgcggccagccacggcggcgtggacgacacccgcgagctgcgggaccgggcgttctacgcgccggcgcagtcgcgctaccgggtgttcatcgtcgacgaggcgcacatggtgaccaccgcggggttcaacgcgctgctcaagatcgtcgaggagccgcccgagcacctcatcttcatcttcgccaccaccgaaccggagaaggtgctgccgacgatccggtcgcgcacccatcactacccgttccggctgctgccgcccaagaccatgcgggcgctgatcgggcgaatctgcgaacaagagggcgtcgtcgtcgacgacgcggtgtacccgctggtgatccgcgccggcgggggctcgccacgcgacacgctctcggtgctggaccagctggtcgcgggtgccgagggcgggcacgtcacctaccagcgggcgctgggcctgctcggggccaccgacctggcgctgatcgacgacgccgtggacgccctggcggccggcgacgccgcggcgctgttcggcgcggtggagtcggtgatcgacgccgggcatgatccgcggcgcttcgccaccgacctgctcgagcggttccgcgacctgatcctgctgcaggccgtccccgatgcggccagccgcggcgtggtggacgcccccgaggatgtgctggagcggatgcgtgaccaggccacccggatcgggccggcgaccctgacccgttacgccgaggtggtgcaggcagggctgggcgagatgcggggtgcgacggcgccacgtctgctgctcgaggtggtgtgcgcccggctgttgctgccctcggccagcgacaccgaagccgcgctgctgcaacgggtcgagcggatcgagacccggctggacatgtccattcccgcggggtcgacgccggccgagccggtcgagcagccggtgcggttcacccggccgtccgcggcgcccaagccggcgtccaagcccgagccggcggcggccaagtccgagcacgagccggaaccccagcccgaggccaggccggagccgaggcccgaacccacgcccgaacccaagccggcgcgggcctccgaaaccccgtccgcgccaggggaactcaatgccgccgcggtgcgaagcatgtggtcgacggtgcgcgacaaggtccgtcagcgcagccgcaccaccgaggtgatgctggccggcgccaccgttcgggcgatcgaggacaacacgctggtgctcacgcatgaatcggcacccctggccaagcggctctgcgaacagcgcaacgccgacgtcatcgccgaggcgctcaaggatgcgctgggcgtcaactggcgggtgcgctgtgaggccggctcaccggcgccggcgacggccggcccgccgcaccccaagccggaacagcccgtccacgaaccggattcggcccgccgtgacgaggaagagcacatgctggccgaggcggtgcgcgacgagccggcggcgcgccgcgacccggaagaggccgcgctggagctgctgcagaacgagttgggcgcccgccgcatcgacgggagc

SEQ ID NO: 25762 - DNA, 348 bp, Mycobacterium avium
atgcaacccggacccggaggcgatatgtccgcgctgctggcccaggcgcagcagatgcagcaaaagctcatggaggcccagcagcaactggccaacgccgaggtgcacggtcaggccggcgggggtctggtcaaggtcgtcgtcaagggcagcggcgaggtggtcgcggtcaagatcgatccctccgtcgtcgacccgtcggacgtcgagaccctgcaggacctggtcgtcggcgccatggccgacgcgtccaagcaggtcacccggatggcccaggagcggctcgggtccctggccggcgggttcggcgcgccgcccgggcagcctccggcgccggcgccgggcgtt

SEQ ID NO: 25763 - DNA, 609 bp, Mycobacterium avium
atgtttgagggacccgtccaggacctgatcgacgagctgggcaagctgccgggtatcgggcccaaaagcgcccagcgcatcgcctttcatctgctgtcggtcgaaccgcccgacatcgaccggctgaccgcggtgctggccagggtccgcgacggggtgcggttctgcgcggtgtgcggcaacgtctccgacgacgagcgctgccggatttgctccgacccccgccgcgacgcgtcggtggtgtgcgtggtcgaggagcccaaagacgtgcaggccgtcgagcgcacccgcgaattccgcggccgctaccacgttttgggcggtgcgctcgatccgctgtccggggtgggccccgatcagctgcggatccgcgagctgctcagccggatcggggagcgggtcgacgacgtcgacatcaccgaggtgatcatcgccaccgacccgaacaccgagggcgaggcgacggccacctacctggtgcggatgctgcgcgacattcccggcctgaccgtgacccgcatcgcctccgggctgccgatgggcggcgatctggagttcgccgacgagttgacgctgggccgcgcgctggccggccgccgcgccatggtc

SEQ ID NO: 25764 - DNA, 705 bp, Mycobacterium avium
atggctgattcggtcgtgcggatcgggctggtgctgcccgacgtgatgggcacctacggcgacggaggcaacgcgctggtgctgcggcagcgactgcggctgcgcggcatcgacgcggagatcgtcgagctcacgctggccgacccggtgcccgagtcgttggacctctacacgctgggcggggccgaggactacgcgcagcggctggccacccggcatctgctgcgctacccgggcctgcagcgcgccgccgaacgcggcgcgccggtgctggcgatctgcgcggccgtccaggtgctcgggcactggtatgagacgtcggccggggagcgggtcgacggcgtgggcatgctggacgcgacgacctccccgcaggacgcccgccacatcggcgagctggtcaccaagccgctgctggccggcttgaccgagccgttgaccggtttcgaaaaccacaggggcggaacggttttgggccccgccgccgctcccctgggcgcggtggtcaagggtgcgggcaaccgcgccggagacggtttcgacggggtggtgcaggggtcggtggtcgccacctacatgcacgggccgtgcctggcccgcaacccgcagctggccgacctgctgctgggcaaggtggtcggcgggctgcccgagctgcagatgcccgaggtggagttgctgcgccgggagcggctggccgcccgc

SEQ ID NO: 25765 - DNA, 1248 bp, Mycobacterium avium
gtgctgaccacccgtgcccgcctggccctggccgcgggggcgagcgcgcgctgggcgtcccgggtgaccggccgcggcgccggcgccatgatcggcgggctggtcgcgatgacgctggaccgctcggtgctgcggcaactggccaccggccggcgcaccgtcgtcgtcaccggcaccaacggcaagtcgaccaccacccggatgaccgccgccgccctggccaccatgggatcggtggccaccaacgccgagggcgccaacatggacgccggcctggtcgcggcgctggccgccaaccgcggcgcccggctggccgccctggaggtcgacgagatgcacgtgccgcacgtgtccgacgccgtccgcccgggcgtcgtcgtgctgctcaacctgtcccgcgaccagctggaccgggtcggcgagatcaacgtcatcgagcggaccctgcgcgccggcctggcccggcacccggacgcggtcgtcgtggccaactgcgacgacgtgctgatgacctccgcggcctacgacagtccccacgtggtgtgggtggccgccggcggctcctgggcgaacgattcggtgagctgcccgcgcagcggcgaggtgatcgtccgcgagcaggggcattggtattccaccggcgccgacttcaagcggcccagcccgcactggtggttcgacccacaggacggtggcaacctgtacggccccggcggtgtggcgctgccgatgcggttggcgctaccgggcgcggtgaaccgcggcaacgccgcccaggccgtggcggccgcggtcgcgttgggcgccgatccggcggcggcggtgacggccgtgtcgacggtcgacgaggtcgccggccggtatcgcacggtgcgggtcggccggcacgacgtccggatgttgctggccaagaatccggcgggctggcaggaagcgctgtcgatggtggacccgcacgccgacggggtggtcatctcggtcaacggccgggtacccgacggcgaggacctgtcctggctgtgggacgtgcgcttcgagcacttcaacgacgcgttccagaccaccccggtggtggccgccggggagcgcggcaccgacctggcggtgcggctcgggtacgcgggtgtcgagcacaccctggtgcacgacaccgtcgccgccatcgagtcctgcccgcccgggcgggtggaggtcgtcgccaactacaccgcgttcctggcgctgcaacgagcgttggcgcgccatggc

SEQ ID NO: 25766 - DNA, 3381 bp, Mycobacterium avium
gtgttagcgaaagtcctggtcgccaaccgcggggagatcgcgatccgcgcgttccgcgcggcctacgagctggaaatggccaccgtggcggtgtatccctacgaggaccgcaattcggtgcaccggttgaaggccgacgagtcctaccagatcggtgaggagggccacccagtccgcgcctacctgtccgtcgacgagatcgtcggcacggcgctggcctgcggcgcggatgcgatctaccccggctacggcttcctgtcggagaaccccgatctggcggcggcgtgcgcggcggccggcatcacgttcgtcggccccagcgccgaggtgctcgagctcaccggcgacaagtcgcgggccatcgcggcggcgcgggccgcgggtcttccggtgctggcctcctcgccgccgtcgacctcggtgcaggagttgctgagcgccgccgagacgatgacgttcccgctgttcgtcaaggcggtcgccggcggcggcggccgggggatgcgccgggtcaccgatccgggggcgctggccgaggcgatcgaggcggccagccgtgaggccgagtccgcgttcggggacgcctcggtgtttctcgagcaggcggtgatcaatccgcggcacatcgaggtccagatcctggccgacacgcacggcaacgtgatgcacctctacgagcgggactgcagcgtgcagcgccggcaccagaaggtgatcgagatcgccccggcgcccaacctggatccggcgctgcgcgaacgtatctgcgccgacgcggtggcgttcgcacgcagcatcggctacacctgcgcgggcactgtggagttcctgctcgacgaacgcggcaaccacgtgttcatcgagatgaacccgcgcatccaggtggagcacacggtgaccgaggagatcaccgacgtcgacctggtgtccgcgcagctgcgcatcgcctccggccagacgctggaagagattggcctgagccaggattcggtcatctcacgcggcgcggccctgcagtgccggatcaccaccgaggaccccgccaacggtttccgcccggacaccggccgcatcaccgcctaccgcaccccgggtggcgcgggcatccggctggacggcggcaccacgctgggcgcggagatcagcgcgcacttcgattcgatgctgatcaagctgacctgccggggacgcgacttccccacggcggtgcggcgggcgcggcgcgcggtcgccgaattccgcatccgcggcgtctcgacgaatatcccgttcctgcaagcggttctggacgacccggattttcaggctgggcgcatcaccacctcgttcatcgaacagcggccgcagttgctcaccgcgcgcagttcggccgaccgcggcaccaagatcctcaactacctggccgacgtgaccgtcaacaagccgcacggcgagcgcccgtcggcggtgtacccgcatgacaagctgcccgacatcgacctggcggcgagcccgccggcgggctccaagcagcggttgaccgaactcgggccggagcgattcgcggcctggctgcgcgagtcgggcggcgtcggcgtcaccgacaccacgttccgcgacgcgcaccagtcgctgctggcgacccgggtccgcaccagcgggctgctcaaggtggcaccctacatcgcacggaccatgccgcagctgttgtcggtggagtgttggggcggagcgacttacgacgtggcgctgcggtttctcaaggaggacccgtgggagcggctgacggcgctgcgcgaggcgatgccgaacatctgccttcagatgctgctgcgtgggcgtaacaccgtggggtacacgccctatccggagacggtcacgacggccttcgtcgcggaggcgaccgagaccggcatcgacatcttccgcatcttcgacgcgttgaacaacgtcgactcgatgcgcccggccatcgacgcggtccgcgaaaccggaagcgccatagccgaagtggcgatgtcctacaccggcgacctgtccgatccggccgaaaagctttacacgctggactattacctgaagctggccgaccagatcgtcgaagcgggcgcgcacgtgctggcgatcaaggacatggccggcctgctgcgcgcaccggcggccgcgacgctggtgtcggcgctgaagtcgcggttcgacctgccggtgcacgtgcacacccatgacacgccgggcggacagctggcgacctacgtggcggcctggcaggccggggccgatgcggtcgacggcgccgccgcgccgctcgccggaaccaccagccagccggcactatcgtcgatcgtggccgccgcggccaacacggagtatgacaccgggttgtccctgccggcggtgtgcgatctggagccgtactgggaggcgctgcgaaaggtatacgctcccttcgaatccggtcttccggcgccgaccgggcgggtgtatcaccacgagatcccgggcggccaattgtcgaatctgcgtcagcaggcgattgcgctgggactcggcgaccggttcgaggacatcgaaaacgcctacgccggcgccgacgcgattttgggacacctggtcaaggtcacaccgtccagcaaggtggtgggcgacctggcgctggccctggtgggtgcgggtgtgggcgcgcaggacttcgccgaagacccctcccgctacgacatcccggattcggtgatcggctttctgcgcggcgagctcggtgacccgccgggcggctggccggagccgttgcgcaccaaggccttacagggccgggggccggccaagccggagcagccgctgacggccgaggacgaagcggcgttggccgccccgggtgcgcgacggcaggcagcgctgaaccggctgctgttcccgggaccgaccaaggagctcgaggagcaccgcgagcagtacggtgacacctcggggctgagcgccaaccagttcttctacggattgcggcagggcgacgaacaccgcgtcgaactcgagcgcggcgtggagttgctgatcggcctggaggccatctccgatcccgacgaacgcggcatgcgcaccgtgatgtgcattctcaacgggcagctgcggccggtggtggtgcgcgaccgcagcatcgccatcgacgtgcccgccgccgagaaggccgaccgcgccaacccggaccacatcgctgccccgttcgccggggtggtgacggtcgccgccgaggtcggccggcaggtcgaggccggccagaccatcgcgacgatcgaggcgatgaagatggaagccgcggtcaccagcccgaagtcgggcaaggtggcgcgaatcgccgtgtcgcggaccgctcaagtcgagggcggcgacctcctgatggtgatcgac

SEQ ID NO: 25767 - DNA, 1125 bp, Mycobacterium avium
atgagcaccctcgaagacaaccagccccgcatccacaagggcctggccggtgtcgtcgtcgacaccaccgccatctccaaggtggtcccggagaccaactcgctgacctaccgcggctacgccgtgcaggacctggcggcccactgcagcttcgaacaggtcgcctatctgctgtggtacggcgagcttcccgacgaccagcagctggcgctgttcagccagcgggaacgagccgcccgccggctcaaccgatcccagctgtcgctgttgcacaagctgcccgacacctgccacccgatggacgtggtgcgcaccttcatcagctccatgggcgccgaggaccccgacgaggacgacaacagcgcgtcggccaaccacgccaaggcgctgcggatgttcgcggtgctgcccaccatcgtcgcggccgacatgcgccgccggcgcggtctggaacctatcgccccgcacagccacatgagctatgcgcagaattttctgcacatgtgtttcggcgatgtgcccgagcaggtgatcgtcgacgcgttcgaacagtccatgatcctgtacgccgagcacagtttcaacgcttcgaccttcgcggcgcgcgtggtcacctccacccagtccgatatctacagcgcggtcaccgccgccatcggcgcgctcaagggttcgctgcacggcggggccaacgaagccgtcatgcacgacatgctcgaaatcgggacccccgaccgtgctgcggaatggttgcagggcaagctttctcgcaaggagaaggtgatgggtttcgggcatcgggtctacaagaacggcgactcgcgggtgccgaccatgaagcaagccctgcagcgcgtcgccgcggtgcgtgacggccagaagtggctggacatctaccagatcctggaaaggggaatggcgcgggccaacggcatcaaacccaacctcgacttccccaccgggccggcctactacctgatgggcttcgacatcggggcgttcacgccgattttcgtgatgagccggatcaccgggtggacggcacacatcatcgagcagaccgcctccaacgcgttgatccgtccgctcagcgagtatgtcggaccgccgcaacgcgctctatcg

SEQ ID NO: 25768 - DNA, 1263 bp, Mycobacterium avium
gtggcgctcgtcgtgcagaagtacggcggatcctcggtggccaacgccgatcggatccggcgcgtggccgagcgcatcgtcgccaccaagaagcagggcaacgacgtggtggtcgtcgtctccgcgatgggtgacaccaccgacgacctcatggacctggcccagcaggtgtgtccggccccgccgccgcgcgaactggacatgctgctgaccgccggcgagcggatctccaacgcgctggtggcgatggcgatcgagtcgctaggcgcccaggcgcgttcgttcaccggctcgcaggccggggtgatcaccaccggcacgcacggcaacgccaagatcatcgacgtcacgccgggacggctgcaggccgcgctggacgagggccgcatcgtgctggtggccgggttccagggcgtcagccaggacacccgggacgtcaccacgctgggccgcggcggctcggacaccacggccgtcgccctggccgcggcgctgggcgccgacgtctgcgagatctacaccgacgtcgacggcatcttctccgccgaccccaggatcgtgcacaacgcccgcaagctggacacggtgaccttcgaggagatgctcgagatggcggcttgcggcgccaaggtcttgatgctgcgctgcgtggaatatgcccgccgctacaacattccggtgcatgtccggtcctcgtactcggacaagaaaggcaccgtcgtcgtcggatcgatcaaggacaagcccatggaagaccccatcctgaccggagtcgcgcacgaccgcagcgaggccaaggtgaccgtcgtcggcatccccgacattcccggctatgcggcgcgggtgttccgggccgtcgccgacgccgacgtcaacatcgacatggtgctgcagaacgtctccaaggtcgaggacggcaagaccgacatcaccttcacctgctcgcgcgaggccgggcccaccgcggtggccaagctggacgcgctgaaggacgagatcgggttcacccagttgctctacgacgaccacatcggcaaggtgtcgctgatcggggccggcatgcgcagccacccgggcgtcaccgccaccttctgtgaggcgctggcgcaggtgggcgtcaacatcgagctgatctccacctccgagatccggatctcggtgctgtgccgcgacacggaactggacaaggccgtcgtggcgttgcacgaggcgttcgggctcggcggcgcggagaccgccacggtgtatgcggggacgggcaga

SEQ ID NO: 25769 - DNA, 1032 bp, Mycobacterium avium
atggttgctattggagttgttggcgccaccggccaggtcggccaggtgatgcgacggttgctcgacgagcgcgacttcccggcgacctcggtgcggttcttcgcgtcgtcgcgctcgcagggccgcaagctggaattccggggcgccgagatcgaggtcgaggacgccgcgacggccgacccgaccggtctggacatcgcgctgttctccgccggcaagacgatgtcgctggtgcaggcgccgcggttcgccgcggccggggtgacggtgatcgacaactcgtcggcgtggcgcaaggaccccgacgtgccgctggtggtgtccgaggtgaacttcgagagggacgcgcaccgtcgccccaagggcatcatcgccaacccgaactgcaccaccatggccgccatgccggtgctcaaggtgctgcatgacgaggccgggctgcaacgcctggtggtgtccagctaccaggcggtgtccggcagcgggatcgccggggtcgaggagctggccacccaggcgcgcgcggtcatcgacggcgccgagcagctggtgcacgacgggcgcgcggtgtcgttcccggcgccccagacctacgtcgcgccgatcgccttcaacgtggtgccgctggccgggtcgctggtcgacgacggctccggcgagaccgacgaggaccagaagctgcggcacgagagccgcaagatcctgggcgtccccgacctggcggtcagcgggacctgcgtgcgggtgccggtgttcaccgggcactcgctgtcgatcaacgccgaattcgcccggccgctgtccccggagcgggcccgcgagctgctcgacggcgcgcccggggtcaaggtggtcgacgtgccgaccccgctggcggccgccggggtcgacgaatccctggtcggccggatccggcgcgacccgggggtgcccgacgggcgcggcctggccctgttcatctccggtgacaacctgcgcaagggcgcggcgctgaacaccatccagatcgccgagctgctggccgctcagttg

SEQ ID NO: 25770 - DNA, 1092 bp, Mycobacterium avium
gtgatcgtcttcgacaacgtcagcaaggtgttcgcggacgggaccgccgccgtggaccggctcagcctgaccgtgcccaccggcaagctgaccgtcttcgtcggatcctccggcagcggcaagaccaccgcgctgcgcatgatcaaccggatgatcgagccgacgtccggcaccatcagcatcgacggtgtcgacgtgtccaccctcgacccggtcaaactgcgcctgggcatcggctacgtcatccagcatgccgggctgatgccgcaccagcgggtgatcgacaacgtggcaacggttcccgtgctgcgcggccagcgccggcgggccgcccgcacggcggcctaccaagtgctcgagcgcgtcgggctggacgtcaagctggcccggcgctatcccgcccagctctccggcggggaacaacaacgggtcggcgtggctcgcgcgctggccgccgacccgccgatcctgctgatggacgagccgttctccgccgtcgatccggtggtgcgtcacgacctgcaaaacgaaatactgcggctgcaaagcgaattgcacaaaaccatcgtgttcgtcacgcacgacatcgacgaggcgctgcggctcggcgaacgggtcgcggtgttcaagggcggcatgttgcagcagtgtgacgagcccgcccggctgctgtcccgcccggcaaacgacttcgtgtcgaggttcatcggcctgggccgtggctaccgatggctgcaactcatcgacgccgccggactgccggtgcacgacgtccgccgcctgttcgccgaaaacctgtcgggtgcagatgttttcgacggttgggccgtcgtggtcgacgaggccggggcgccgctgggctggatcgacgccgagggcctgcgccgacaccgcgacggcctggcgctgtccgacagcatgaccggcgtcggatcgctgtttcggccgcggggcaacctgagccaggcgctggacgccgcgctgtcgtcgccgtcgggaatcggtgtcgccgtcgacgacgacggcagggtgatcggcggtgtgctggccgccgacgtgctggccgcggtggaatcgcagcgaaagagccgc

SEQ ID NO: 25771 - DNA, 780 bp, Mycobacterium avium
gtgggcgcacgcggtgcgcggcggcgcccgccgctcggtcgtcgcgccggtggtggggggtgcccggtgaacttcgtgcagcgggccatcgcgtatctgctgagcgccgacaattggaccggcccggtcgggctggcggcccgcatcctcgagcatctcgagtacaccggcatcgcggtgggcgcctcggcgctgatcgccgtgcccgtcggcctgctcatcgggcacaccggccgcggcaccctgctggtggtgggcgccgtcaacgggctgcgcgcgctgcccaccctgggcgtgctgctgttcggcacgctgctgttcgggctgggcctgggaccctcgctggtggcgctgatgctgctgggcgtgcccgcgctgctggccggaacctatgccggcatcgccaacgtcgaacccaccgtggtcgatgccgcccgggcgatgggcatgaccgagtcgcaggtgctgctgcgcgtcgaggtgcccaatgcgctgccgttgatcctgggcgggctgcgcagcgcgacgctgcaggtggtcgcgaccgccacggtggccgcctatgccagcctcggcgggctgggccggtacctgatcgacgggatcaaggagcgcgagttccacctggccctggtcggggcgctgacggtggccgcgttggcgctggtgctcgacggtctgctggccgtggcggtgtgggcgtcggtgccgggtaccggccggctgcggcgcacataccggccacttccgcaccggttggcggggacgtcttacggtaga

SEQ ID NO: 25772 - DNA, 873 bp, Mycobacterium avium
gtgcaatcgacgttctgcgggcgtccggtcgccggtgatcgcgcgctgatcatggcgatcatcaaccgcaccccggactcgttctacgaccggggcgccaccttcagcgacgacgccgcccgggcggccgtgcaccgggcggtggccgagggcgccgacgtcatcgacgtcggcggcgtcaaggccgggcccggccaggacgtcgacgccgacaccgagatcgcccggctggtgccgttcatcgaatggctgcgcgacgcctacccggaccagctgatcagcgccgacacctggcgtgccgaggtggccaaggtggcctgcgcggccggcgcggacctgatcaacgacacctggggcggcgtcgacccggcgctgccggaggtggccgcggagttcggggcgggcctggtgtgctcgcacaccggcaacgcgctgccgcgcacccgcccgttccgggtgagctacggaaccagcacccgcggcgtggtcgacgacgtgatcgcccaggtcacggcggccgccgagcgggcggtcggctgcggcgtggcccccgaccgggtgctgatcgaccccacccacgacttcggcaagaacaccttccacggcctgctgttgttgcggcacgtcggcgatcttgttaacaccggatggcccgtgctgatggctttgagcaacaaggacttcgtcggggagactctgggtgtggaattgaccgagcggctggagggaacgttggcggccaccgcgctggcggcggccgccggcgcccggatgtttcgggtgcacgaggtcgcgcccacccgccgggtgctggaaatggtggcctcgatccagggcacccgcccgcccacgcgcacggtgagggggctcgca

SEQ ID NO: 25773 - DNA, 912 bp, Mycobacterium avium
ttgccgatctcggcgatccgcaccaggtggctgaacgccccgaacgggaccgcgcgttcggtcggcgtgccggtcacccagcggacccgggtgccggggtgcgcggcggcgaaccgctcggcggccacccgcgccaaggtggatttgccgatgccgtcggggcccaggaccaccgccccggccgcggcggcggtgtcggccaacgccgcgtccagccgctcggcggccgtcgcctgtcgggggacgttccatcgaatcggcacggccggattttatggcgcgcgggcccgccgccacggcgaaagccccagatatgacgggccgcgcggggttggtctacgtttgtcggatatgcccgcagaacgcgattcgtcggccgcgtgggcggtgtgcgtgtactgcgcgtccggcccgcagcatcccgaattgctcggtgtcgctgcggaactcggcgaggcgatcgccgagcggggctggacgctggtgtggggcggcggccgggtgtcggcgatgggcgcggtggccagcgcggcccgggcccgcggcgggcggaccgtcggtgtgatccccacggtgctgatgcgccgcgagatcgccgacgccgacgccgacgagctgatcgtcagcgacaccctgcacgagcgcaaacagatcatggaggaccgcgccgacgcgttcatcgcgttgcccggcggcatcggcaccctcgacgaggtgttggacgcgtggacgacggggtttctcgggctgcacgccaaacccatcgtgctgctggacccgatcggccactacgaggggctgtggctgtggctgtccggattgctggacagcggctacatcacccaggcggcgatggaccgggtggtcctggtcgacaaggtgggtgccgcgttggaggcgtgcgcgcccggc

SEQ ID NO: 25774 - DNA, 1512 bp, Mycobacterium avium
gtgacctccgacccaggctacgaccaagcaaaagacagcgccaaccggttggcgccgcgccccatctcgcgcccgcccgtcgaccccgcatcgcgccgggagttcggtcggcccgccgggctgcggggatcgttcgtggccgaacgcgtgcgtccgaagaagtaccgggagcagtcggagttccggccgagcgagcagtcggccgaccccgtgctgcaggaggcgttcagccggcccgacggcagcccggagacgctgcagcgccaccccgtcgacagcggcgcgctggcggccgagaaggacggggtggagcccgaccacgccgacgacccgtggcgtgacccgggggccccggccgcgttgggcacgccggcggtggcgccgtcgccgtcgcggtccgcgctaggctacggcggcaagctgggtgtgcgcgacgtgctcttcggcggcaaggtgtcctacctggcgttgctggttctgctgctgatcgcgctggtcatcggcctgatcggcggtgtggtcgggcgcaagaccgccgaggtcgccgaggccttcaccacgtcgaaggtgacgctgtcgacgaacggcaacggcgaagccccggccgggcgcttcgcgaaggtggcggcggccaccgcgggcgcggtggtcaccatcgagtccaagagcgaccaggagggcatgcagggctcgggcgtcgtcatcgacggccgcggctacatcgtcaccaacaaccacgtcatctccgaggcggcgaacaaccccagccagttcaagaccaccgtggtgttcaacgacggcaaggaggtgcccgccaacctggtcggccgcgaccccaagaccgacctggccgtgctgaaggtggacaacgtcgacaatctgtcggtggcccggctcggtgactccgacaaggtgcgggtcggcgacgaggtgctggccgcgggcgcgccgctggggctgcgcagcaccgtgacgcacggcatcgtcagcgccctgcaccgaccggtcccgctgtccggggagggctcggacaccgacacggtgatcgacgccgtgcagaccgacgcgtcgatcaaccacggcaactccggcggcccgctgatcgacatggattcccaggtgatcggtatcgacaccgcgggtaagtcgttgtccgacagcgcaagtgggctgggcttcgcgatccccatcaacgaggccaaggaggtcgcccagaccttgatcagggacggcaagatcgtgcacccgacgctgggggtcagcacccgctcggtgagcaacgcgatcgcctccggcgcgcaggtggccaacgtgaaggcgggcagccccgcgcagaagggcggcgtcctggagaacgacgtcgtggtcaaggtgggcaaccgcaaggtcgccgacgccgacgagttcgtggtcgcggtgcggcagctgaccatcggccaggattccccgatcgaggtggtgcgcgacggccgccacgtcaccctgacggtgaagccggacccggacggcagc

SEQ ID NO: 25775 - DNA, 942 bp, Mycobacterium avium
atggcaactgacggttttgcgcccatcgagatccgcgggctcaccaagaacttcggtgcggtgcgggcactggacggtctcgacctcaccgtgcgggagggagaagtccacggtttcctggggcccaacggcgccggcaagtcgaccacgatccgcatcctgctgggactggtgaaagccgacggcggcacggtgcggctgctgggcggcgacccgtggacccaggccgtcgaactgcatcgccaaatcgcttatgttccaggcgatgtcacgctgtggccgtcactgaccggcggcgagatcatcgacctgctggcccggatgcgcggcggcatcgacaagaggcgccgcgccgagctgatcgagcgcttcgacctcgacccgcacaagaaggcacgcacctactccaagggcaaccggcagaaggtttcgctgatttcggcgttctcgtcgcgcgcccggctgctgctcttggacgagcccagcagcggcctggacccgttgatggagaacgtttttcaacagtgcgtggcgcaggcccgcgaccggggcaccacggtgctgctgtccagccacatcctggccgagacggaggcgttgtgcgaaagggtgacgatcatccgggccggcaagaccatcgaaagcggttcgctgagctcgatgcggcatctgagccgcacctcgatcaaggccgaaatgaccggtgaccccggtgatctcaggcggatcaagggcgtcgaggacatcagcatcgagggcaacacgctgcgcgcgcaggtcgacagcgaaagcctcggtgagctcatccgggtgctcggggatgctggggtgcgcagtctggtcagccagcccccgaccctcgaggagctcttcctgcgccactacgacacctccgggaccgacggcgagcgcggagcccacgaggccgaggtgtcgctgtca

SEQ ID NO: 25776 - DNA, 1524 bp, Mycobacterium avium
gtggccgaattcgccgaattcatcgccgccatcgaccagggcaccaccagcacgcgctgcatgatcttcgatcaccagggtgccgaggtggcccgccatcagctcgagcacgagcagatcctgccccgggcgggctgggtcgagcacgacccgatcgagatctgggagcgcacctcctcggtgttgacgtcggtgctcaaccgggccaacctgtccgcggaaaaccttgccgcgctgggcatcacgaatcagcgcgaaaccaccctggtgtggaaccgcaagaccggccggccctattacaacgcgatcgtctggcaggacacccggaccgaccggatcgcgtcggcgctcgaccgcgacgggcgcggccaggtgatccgccgcaaggcgggcctgcccccggcgacctacttctccggggcgaagttgcaatggatcctggacaacgtcgacggggtgcgcgaggcggccgagcgcggcgacgcgttgttcggcaccgccgacagctgggtgttgtggcagctcaccggggggccgcggggcggggtgcacgccaccgacgtgaccaacgccagccggaccatgctgatggacttggagacgctggactgggacgacgagctgctgtcgttcttcaccatcccgcgcgccatgctgcccgagatcgggccgtcgtcgtcgccgcggccgttcggggtgacctcggacaccgggccggccggcggccggataccgatcaccgccgtgctgggggatcagcacgcggcgatggtgggccaggtctgcctggccgagggcgaagccaaaaacacctacggcaccgggaatttcctgctgctcaacaccggtgagagcatcgtgcggtccgagcacggattgctcaccaccgtgtgctaccagttcggcgacgccaaacccgtttacgcacttgagggttcgatcgcggtcaccggcgccgccgtgcagtggctgcgcgaccagttgggcatcatcagcggcgccgcgcagagcgaatcgctggcgcggcaggtcgacgacaacggcggcgtctatttcgtccccgccttttccgggctgttcgcgccctactggcgttcggatgcgcgcggcgcgatcgtcgggctgtcgcggttcgacaccaatgcccacctggcgcgggcgacgctggaggcgatctgctatcagagtcgtgacgtggtggacgcgatggcagcggattccggtgtgcgccttgaagttttgaaggtcgacggcggcatcaccggaaacgacctgtgcatgcagatccaggccgatgtgttgggcgtggacgtggtgcggccggtggtggccgagaccaccgcgctgggcgcggcgtacgcggcgggcctggcggtggggttctgggctgacccgggcgagctgcgggccaactggcgcgaagacaagcgctggacgccggcctggagcgacgagcagcgcgccgcgggttacgcgggctggcgcaaggcggtgcagcggaccctggattgggccgacgtcacg

SEQ ID NO: 25777 - DNA, 1131 bp, Mycobacterium avium
gtgagtcgggtcctgctggtaaccaacgactttccgccccgcccgggcggcatccagtcctacctcggcgaattcgtcgggcggctggccgccgccggctcgcatgagctgacggtgtatgcaccggactggaagggcgcgcaggctcacgacgaggccgtcggctaccgggtggtgcgccacccgggcacgctgatgctgcccgggcccgcggtcgacgcccggatgcggcggctgatcgccgagcacgtcatcgacaccgtgtggttcggcgccgccgccccgctggcgctgctggcccaacgcgcccgcgccgccggggcccgccgggtgctggccagcacgcacggccacgaagtggggtggtcgatgcttccggtggcgcgctcggtgctgcgccgcatcggcgaacagaccgacgtcgtcaccttcgtcagccgctacacccggtcccggttcgcgccggcgttcgggcccagggcgcggctggaatacctgccgtccggcgtggacaccgaccggttccggcccgatccggccggccgggcgcggctgcgggagcgctacgggttgggcgagcggcccaccgtggtgtgcgtgtcccggctggtgccgcgcaagggccaggacatgctcatccgagcgatgccctcgatcgtgcaacgggtcgacggcgccgcgctggtcatcgtcgggggcggcccgcacctgcaatcgctgcgcgccctggcccgcgactgcggggtggccgcgcaggtgaccttcaccggggggataccggccgccgagctgcccacccatcacgcgctggccgacgtgttcgccatgccgtgccgcacccgcggcgccggcctggacgtcgaggggctgggcatcgtctacctggaggcctcggccagcggtgtcccggtgattgccggcaggtccgggggagcaccggaaacggtgcagcacaacaagaccgggctggtggtggacggccgctcggtgaccgagatcgccgacgccgtcaccgaattgctcagcgacccggaccgggccgccgccatgggcgcggccggccgccagtgggtgaccagccagtggcgctgggacaccctggccgcccggctggccgggctgctgggcgac

SEQ ID NO: 25778 - DNA, 813 bp, Mycobacterium avium
atgacgctgccgcggctcatcgcctgcgacgtcgacggcaccctgttcgacgacgacgagcggatcacccctcgcacccgggccgcggtccgcgccgcggtggccggcggcgcgcggttcgtggtggccacaggccgcccgccgcggtggatccgcccggtggtcgacgcgctgggcttcgcgccgatcgcggtgtgcgccaacggcgcggtgatctacgacccggcgaacgaccgggtgctgtccgcccgcacgctggacgtcgacaccctggccgagctggccgagctggccacgcgggtcatcccgggggcggggctggccgtcgagcggatcggggaacgcgcccacgacacggcgacgccgcagttcatcagctcgccgggttacgagcacgcctggctgaatccggacaacaccgaggtgtcgatcgaggacctgctcagcgccccggcgatcaagctgctgattcgccgggccggggcgcgcagctccgacatagccgccgagctggccaagcacgtcggcctcgagggtgacatcacctactcgacggacaacggcctggtcgagatcgtgccgctggggatcagcaaggccaccggcatcgaagagatcgcccggccgctggagatcgcccgcgaggaggtggtggcgttcggcgacatgcccaacgatctgccgatgctgcgctgggcgggccacggcgtggcgatgggcaatgcccatcccgaggtgcaggccgccgccgacgagatcaccgccgccaacaacgacgacggcgtgggccgggtgctggaacgctggtggctt

SEQ ID NO: 25779 - DNA, 1275 bp, Mycobacterium avium
gtgatcgacctgaagctgctccgggaagaccccgacgccgtgcgccgctcccaacaaagccgcggcgaagacccgtcgctggtggacgccctgctggccgccgacgccgcccgccgggccgccatctcgaccgccgacacgctgcgcgccgaacagaagtcggccagcaagagcgtcggcgccgcctcgcccgagcagcgcccggccctgctggcccgcgccaaggagctggccgagcaggtcaaggccgccgaaaccgcccaggccgaggccgaggcggcgttcaccgccgcgcacctggccatctcgaacgtcgtcatcgacggcgtccccgccggcggcgaggacgacttcgccgtgctggacgtcgtcggggagccaacggcgctggaaaacccccgcgaccacctggaactgggcgagtcgctgggcctgatcgacatggcccgcggggccaaggtgtccggttcgcggttctacttcctgaccggcaagggcgcgctgctgcagctcggcctgctgcagctggcgctgcggctggccgtcgagaacggcttcgtgccgatgatcccgccggtgctggtgcgcccggaggtgatggccggcaccggattcctgggcgcgcacgccgaggaggtctaccggatcgaggccgacgacctctatctggtgggcacctccgaggtgccgctggccggctaccacgccgacgagatcctggacctgtccgccggcccgctgcgctacgcgggctggtcgtcgtgctttcgccgcgaggccggcagctacggcaaggacacccgcggcgtcatccgggtgcaccagttcgacaaggtcgagggcttcgtctactgcacgcctgccgacgccgaggccgaacaccagcggctgctgggctggcagcgcgagatgctggcccgcatcgaggtgccctaccgggtgatcgacgtggccgcgggcgatctcggctcgtcggcggcgcgcaagttcgactgcgaggcgtgggtgcccacccagcagacctaccgcgagctgacgtcgacgtcgaactgcaccaccttccaggcgcgccggctgtccacccgctaccgcgacggcggggacgccaagggcaagccgcagatcgcggccacgctgaacggcacgctgggcaccacccgctggctggtggcgatcctggaaaaccaccaacggcccgacggcagcgtgcgggttcccgaggcgctggtgccgttcgtcggcaccgagctgctcgagcccgtcggcccgcgcggt

SEQ ID NO: 25780 - DNA, 765 bp, Mycobacterium avium
gtggaaccggtgtacgggactgtcatacagcttgcccgcctgatctggcgcgtccagggcctgaagatcacgatcacgggcgtggagaacctgccgaagagcggcggtgccgtcatcgccatcaaccacaccggctacctggacttcaccttcgcgggtctgcccgcctacaagcagggccttggccgcaaggtgcggttcatggccaagcaggaggtcttcgaccacaagatcaccgggcccatcatgcgcagcctgcgccacatctcggtgaaccgccaggacggggccgcctcctacgaggcggcggtgcgcaacctcaaagacggcgagctggtcggggtttaccccgaggccaccatcagccgcagcttcgagatcaaggagttcaagtccggtgcggcccggatggccgtcgaggccggggtgccgatcgtcccgcacatcgtctggggcgcccagcgcatctggaccaaggaccaccccaagaagctgtggcggcccaaggtgccgatcatcgtgctggtcggcgagcccatccagccgaccctgggcgtcgaggagctcaaggggctgctgcactcgcggatgcagcacctgctggaacgcgcgcaggagatgtacggcccccacccggccggggagttctgggtgccgcaccggctgggcggcggcgccccgtcgctggccgaagcggcccggttggacgccgaggaggcggccgcgcgggcggcgcgccggggacagtccgcaggggcgccggag

SEQ ID NO: 25781 - DNA, 309 bp, Mycobacterium avium
gtggccgacacccgcggcggccagttgctggtgtacggcgtggatccgctgatcctgcgccaggcctacccggttcctcaggcgccctacggcctggccggttcccgcgcgttagcctgggtttcgcagaccgtttccaatatcgtcattggttacgatctgtccaccggaattcccgtcgaaaaggtgcgttacccgaccgtgcagcaaccgaactccctggccttcgacgaagcgtcggacaccctgtacgtggtgtccgggtccggcgcgggagttcaggtgatcgaccacgcggcgggtaaacgt

SEQ ID NO: 25782 - DNA, 642 bp, Mycobacterium avium
atgagcacactgcacaaagtcaaggcgtatttcgggatggccccaatggacgactacgaagacgagtactacgacgaccgcgcgccgtcccgcggtttcccgcggccgcgattcgacgacgggtacggccgctacgacggtgacgactacgacgacccgcgccgcgagccggccgactacccaccgcccgccggctaccgcggcggctacgccgaggagtcgcgctacggcgccgtccacccgcgcgagttcgagcgccccgagatgggccggccgcggttcgggtcctggctgcgcaactccacccgcggcgcgctggcgatggacccgcgccggatggcgatgatgttcgaagagggccacccgctgtcgaagatcaccacgctgcggcccaaggactacagcgaggcccgcaccatcggcgagcggttccgcgacggcaccccggtcatcatggacctggtctcgatggacaacgccgacgccaagcggctcgtcgacttcgcggccgggctggcgttcgcgctgcgcggctccttcgacaaggtcgccaccaaggtgttcctgctctcacccgccgacgtcgacgtgtcgccggaggagcgccgccggatcgccgaaaccggtttctacgcataccaa

SEQ ID NO: 25783 - DNA, 783 bp, Mycobacterium avium
atgacggcaggaacaccggccccggacagcgccggcgaccgcgaaacggaattgacgcacgccctggcggcggtgcgctcgcggctggcggcggccgccgaggcggcgggccgcaatgtcgcggaaatcgaagtgctgccggtcaccaaattcttcccggcgaccgatgtcgtgacgttgtcccgattgggttgtcgcgccgtcggcgaatcgcgcgaccaggaagcgacggcgaaggtggccgaagtcacgcgcctgttggcgacgtccgcgcggacgaacgtggcgattccgcgctggcacatggtgggccacatccagcggaacaaggcccggtcggtggcccgctgggcgcacaccgcgcactcggtcgacagcacccacctggtgtccgcgctcgaccggggagtggcggcggccctggccgacggcggccgcatcgacccgatgcgggtgtacgtccaggtcagtctcgacggcgacgagtcgcgcggcggcgtggacatctcccggcccggcgccgtcgacgaggtgtgcgcgcaggtcgcggcggcgaacaacctggacctggtcggcttgatggccatcccgccgctgaactccgatcccgacgaggcgtttgaccggctgcaatccgagcatcggcgggtgctcgagacgcatcgcaacgcggtggggctgtccgccggcatgtccgacgacttcgaaattgccgtcaaacacggttcgacatgtgtgcgtgtcggtaccgcgctattgggccgtcgcccgttaccgtcaccg

SEQ ID NO: 25784 - DNA, 1161 bp, Mycobacterium avium
atgatgacccccccgcacaactacctggccgtcatcaaggtcgtgggtatcggtggcggcggcgtcaacgccgtcaaccggatgatcgaacagggactcaagggcgtggagttcatcgcgatcaacaccgacgcgcaagcgctgttgatgagcgatgccgacgtcaaactcgacgtcgggcgcgactccacccgtggactgggcgccggcgcggaccccgaggtcggccgcaaggccgccgaggacgccaaggacgagatcgaggagctgctgcgcggcgccgacatggtgttcgtcaccgccggcgagggcggcggcaccgggaccggcggggcgcccgtcgtcgccagcatcgcgcgcaagctcggcgctttgaccgtgggcgtggtcacccggccgttctcgttcgagggcaagcggcgcagcaaccaggccgaggcgggcatcaacgcgctgcgggagagctgcgacaccctgatcgtcatccccaacgaccggctgctgcagatgggcgacgcggccgtgtcactgatggacgccttccgcagcgccgacgaggtgctgctcaacggtgtgcagggcatcaccgacctgatcaccacgccggggctgatcaacgtcgacttcgccgacgtcaagggcatcatgtccggcgcgggcaccgcgctgatgggcatcggctcggcccgcggcgagggccgctcgctcaaggccgccgagatcgccatcaactcgccgctgctggaggcctcgatggagggtgcgcagggcgtgctgatgtccatcgccggcggcagcgacctggggctgttcgagatcaacgaggcggcctcgctggtgcaggacgccgcccaccaggacgccaacatcatcttcggcaccgtgatcgacgattcgctgggcgacgaggtgcgggtcaccgtcatcgcggccggcttcgacgccgccgggccggggcgcaagccggtgatcggcggcagcgccgacaagggggagaagaccggcggcgcgcaccggatcgagtcggccaaggcgggcaagctcacctcaacgttgttcgagccggtcgacgcggtcagcgtgccgatccacaccaacggctcgacgctgaatatcggcggcgaggacgacgacgtggatgtgccgcctttcatgcgccgc

SEQ ID NO: 25785 - DNA, 645 bp, Mycobacterium avium
  misc_feature (4)..(4): n=g, a, t or c
atgntgatggtgaccatcctgctggtgatcgtcgggatcggtctggccctggtcctctacttcacgccggcgatgtcggcgcgcaacatcgtcgtcgtcggcaccggcgtggtgacccgggaagaagtgctggacgcggcgcgggtgcggctgggcacgccgctgctgcagatcgacaccggccaggtcgccgaccgggtggcggcgatccggcgggtggccagcgcacgagtgcagcgccagtacccgtccgcgctgcggatcaccatcgtcgagcgaatcccggtggcggtcaaagactttcccgacgggctgcacctgttcgaccgcgacggcgtggacttcgcgaccgggccgccgccgccggcgctgccctacctcgacgtcgccgacccggggcccaacgacccggcgaccaaggccgccctgcaggtgctgaccgcgctgcgacccgaggtcgagggtcaggtgggccggatcgcggcgccctcggtggcgtcgatcaccctgaccctgggcgacggccgggtggtgatctgggggaccaccgaccgcaccgacgaaaaggccgagaagctggcggcgctgctgacccagccgggcaagacctacgacgtgtccagccccgacctgccgacggtcaag

SEQ ID NO: 25786 - DNA, 780 bp, Mycobacterium avium
atgccgcttacaccagccgacgtccacaatgtggcgttcagtaagccaccgatcggcaagcggggctacaacgaagacgaggtggatgccttcctcgatctggtggaagccgagctgacgcgactcatcgaagagaacagcgacctgcggcaacggatcgaagagctggaccaggagctcgccgccggtggcggtgccgccgcgccggccgccgccgcgcccactcaggccattcctgtcgccgagcccgagccggtcaaggccgcgccggccgccgccgtcagcaacgaggagcaggccatcaaggccgcgcgggtgctgagcctggcccaggacaccgccgaccggctgaccagcacggcgcaggccgagtcggagaagatgctggccgatgcgcgggccaacgccgaccagatcctcagcgaggcccgcagcaccgccgagaccacggtcgccgaggcccggcagcgcgccgacgcgatgctggccgacgcgcaggcccgctcggaggcccagttgcgtcaggcccaggagaaggccgacgccctgcaggccgacgccgaacgcaagcattccgagatcatgggcaccatcaaccagcagcgcacggtgctggaaggccgcctcgagcagctgcgcaccttcgaacgcgaataccgcacccggctcaagacctacctggagtcccagctcgaggagctcggccagcgcggctcggccgcgccggtggattccagcgccgatgcgggcgggttcgaccagttcaaccggggcaacaac

SEQ ID NO: 25787 - DNA, 1050 bp, Mycobacterium avium
gtgggcctgcccaatgtcggcaagtcgaccttgttcaacgcgttgacccggaacaacgtggtcgcggccaactatccgttcgcgacgatcgagcccaacgagggcgtggtgccgctgcccgacccgcggctggacaagctggccgagatgttcaagtccgagcgcatcgtggcggcgccggtcaccttcgtcgacatcgccggcctggtcaagggcgcctccgagggggcggggctgggcaacaagttcctggcccacattcgcgaatgcgacgccatctgccaggtggtgcgggtgttcgccgacgatgacgtcacccacgtcgccgggcaggtggaccccaggtccgacatcgaggtcgtcgagaccgagctgatcctggccgacctgcagacgctggagcgcgcggcgggccggctggagaaggaggcccgcacctccaaggagcgccggccggtctacgaggcggcgctggccgcgcaggagacgctgaacgggggcaagacgctgttcagcgcgggcaccgacacctccctgctgcgcgagctgaacctgttgaccaccaagccttttctctatgtcttcaacgccgacgagtcggtgctgaccgatcccgcgcgcatcgccgagctgcgcgagctggtcgcgccggccgacgcggtgttcctggacgcggccatcgaatccgagctgatcgaactcgacgacgagtcggcggcggagttgctggagtcgatcgggcagaccgagcgcggcctggatgcgttggcgcgggccggttttcacacgctgaggctgcagacgttcctgaccgcggggcccaaagaggcgcgggcgtgggtgattcaccagggcgataccgcgccgaaggccgccggggtgattcacagcgacttcgaaaagggtttcatcaaagccgaaatcgtctcctacgacgacctgatcgccgcggggtcgatggcggcggccaaggccgccggcaaggtccggatggagggcaaggactacgtcatggccgacggcgacgtggtcgagttccggttcaacgtg

SEQ ID NO: 25788 - DNA, 1401 bp, Mycobacterium avium
atgttctatggggcctttccgccggagttcaactcgggccggatgtacagcggtccgggcgcggggtcgttcgtcgccgcggcgacggcgtggcagaacctggccgccgaattgcagtccgccgcggcgtcgtattcgtcggtgctgtccggcctgacggccgggccctgggtggggccgtcgtcgctggccatggcgtcggcggccgcgccgtacgtggcctggatgcagcagaccgccgcgcaggccgccgaaaccgcggcccaggccaccgcggcggccaccgcctacgagaccgcgttcgccgcgcacgtcccgcccgccgtgatcgccgaaaaccgggccctgctggcgcaattggtggcgacgaacatcttcgggcagaacaccgccgccatcgccgcgaacgaagcccagtacggcgagttctgggcgcaggacgccaccgcgatggacacctacttcgcggcgtcggcaaccgccgccaacaagttgacggagttcggcccggcgcccaagaccaccaacgaggcggcccaaccgatgcaggccgccgcggtgtcgtcggcggcgagcaccccggccgccaatgtcgcccagaccgcggccagcgcggccagcaccacgctgccctacagcggcccgttctccggcccggcgaacctggcgtatctgtaccagaccttcatgacgaatctgttcaacaccgtcccgggcggggccagcttctacaccagcatgtacaacgccgtgaaggtgccgctggggctgaccacccagttcaacggcgtcgggttgctggtcaacttcccgttgtcgcagtggctcaagttcgccccgccgatcggctacggcgcgttgcccaaggacgcgctcggggccgggctgggcgccctgggcttcggccgcggcacgctgtacagcgcgatcagcccggtcgccgggatgggcaacgccggcaccctggtgggcaagctgtccatcccgcccagctgggccacggccacgccgtcgatccggaccgtcgccgccgcgctgtcggccgccggggccgaggcagtgccggcggccgcgctgggcgagggcagcctgttcagttcgatggggctggccgggatgctgggcagcgcggtcggctccggcgggcccaccatggtgcggggcggcgtccgcaaccggatgaccgcgatcaaggacctcaaagacaagcaatcgccggaacagctgaaacgccttgtcgcacagatctccgagcagccggagagcgtgcagcaccacaacgtggaccaggagaacctggacacgctgctcgagcagctggccaagaaaccggggatccacgcggtgcacctgaaaaagggcgacaagtccaaggtcctgccggccgatgcccagttgggt

SEQ ID NO: 25789 - DNA, 1764 bp, Mycobacterium avium
atgtcatcaagaggtggggttatgcgtgacgactcaccccggatgagtccgcgccgccacatcatcgtcagcggtgacgacgtgctggcgaccaccatcgccgaggaactgaaccgcgcgggcgccaccatcgtcaagctgcccagcgaggaactcgccggcgccgacctcgcccgcgccagcgccatcgtgtgcgccgggcgcgacgacgccaagaatctcgaaatcgccttgctggcaaggaaaaccaacccgcacgtgcgggtggtcgcccggttgggcaacgacgtgctgcgcggggcggtggccgccgacaacggccccggcgccatcctcgacgtcgccgacctcgccgccccctcggtcgtcgaggcctgcttgtcgagcagcacccacccggtccgggcggccggcatcgacttcttggtgtcgggggccgaggcaccccgcgacgcgacgcttcgggagatctacggcgacctggcgccggtggcggtgatccacggcaacgacggcgccacccccggcgaggtggtgccctgtcccggccgggaccaccgggtgcgcgccggcgactggaccgccatgatcggcagcgccgacgaactggccgcgcgcggcatcagaacaccgcggccccccgcgacccgttctcgccagacgtggctgcggcgggtgttggacgccgcccgcgccatgcgcgacgacgtcaacccgatgctgttccccgcgatcctgctcgcactcaccctgctgctggtgtccacggtcatcgtgcacttctcctacaccaagccgcggctgtcctggctggacgccctgtacttcaccgccgagaccatcaccacggtgggctacggcgagttcaccttcgcccaccagtccgcctggctgcgaatcttcgccgtgggcctgatgttcgcgggcgtgacgaccaccgcgctgctcgtcgcgttcctggcggacctgctgctgtcgcggcgctttctgcagtcggccgggctgcggcgggcacgccacctgcgcaaccacatcatcgtggtcgggctgggatcgttcggcagccgcgtcgtcgccgacctgaccgccgccggttacgacgtcgcggtgatcgagcgcgacgagaacaaccggttcctgtccaccgcggccgaactcgacgtgccggtgatcttcggggatgcgacgctgcgccagacgctggagtcggcccgggtcgaccgggcccgggccgtcgcggtgctgacccaggacgacatggtcaacatcgagatcgggatcgtgctgcgcgagatgctggggccgcgggtgatgcccgaggtgaaccggcccgacgtgccgatcgtgctgcgcatctatgaccgcaccctgggcgatgcggtggccaagcggttcgggttcgaaaacgtccgatccaccgtcgacctggcggcgccctggttcatcggcgccgcgatgggcctgcaggtgctgggcacgttctcggtcgggcagcggtccttcatggtcggcgccatgcacgtggcggccggcagcgagctcgacgggctgcggatgttcgaaatgtccacccagacccgggtcatcgcgatcactcgtcgggacacgcccgtcgagctgcatccccgccgcgacgcctggctccgggccggcgacaccgtctacctggtgggtccgtatcgcgagctgctggagacgctgcgcaaggggcagccgccccagcagcccgccaacgaggagcggcccgcggacaaggcgacgacc

SEQ ID NO: 25790 - DNA, 553 bp, Mycobacterium avium
atgaatatcgacatggccgcactgcacgcgatcgaggtggatcggggcatctcggtcaacgagctgctcgagaccatcaagtccgcgctgctgaccgcctaccggcacaccgaaggccaccagaacgacgcccgcatcgagatcgaccgcaaaaccggcgtcgtcaaggtgatcgcgcgggagaccgacgaggacggcaacgtcatcagcgaatgggacgacaccccggagggtttcggccggatcgccgcgaccaccgcgcgccaggtgatgctgcagcgcttccgggacgccgagaacgagcggacctacggcgagttctccacccgcgagggcgagatcgtcgcgggggtgatccagcgggacagccgggcgaacgcgcgcggtctggtggtggtccggatgggcaccgagaccaaggcttccgagggcgtcatcccggccgccgaacaggtgcccggcgaaagctacgagcacggcaaccgggtgcgctgctacgtcatcggggtgacccgcggcgcgcgcgagccgctgatcacgctgtcgcgcaccc

SEQ ID NO: 25791 - DNA, 1416 bp, Mycobacterium avium
gtgagcacccgcgaggggtcgctgtggggcgggcggttcgccgacggcccgtccgacgcgctggccgccctgagcaagtccacccacttcgactgggtgctggccccctacgacatcgtcgcctcccgggcgcacaccgtgatcctgtaccgggccgggctgctgtccgaggagcagcgcgacgggctgttggccgggctggacagcctggcggaagacgtggccgacggcagcttcaccccgctggtcaccgacgaggacgtgcacgcggcgctggagcgcggcctgatcgaccgcgtcgggcccgacctgggcgggcggctgcgggccggccggtcgcgcaacgaccaggtggccaccctgttccggatgtggctgcgcgacgccgtgcgccgcgtcgcggccggggcgctggacgtggtgggggcgctggtcgcccaggccgccgcccaccccgaggccatcatgccgggcaagacgcacctgcagtccgcgcagccggtgctgctggcccaccatctgctcgcgcacgcccacccgctactgcgcgacgtcgaccgcatcgtcgacttcgacaagcgcgccgcggtgtccccgtacggctcgggggcgctggccggctcgtcgctgggcctggacccggacgcgatcgccgcggagctggggtttgccagcgccgccgacaactcgatcgacgccaccgcgtcccgggacttcgccgccgaggccgcgttcgtcttcgccatgatcggcgtcgacctgtcccggctggccgaggacgtcatcctgtggagctcgacggagttcggctacgtcaagctgcacgacgcctggtccaccggcagctcgatcatgccgcagaagaagaacccggacatcgccgagctggcccgcggcaagtcggggcggctgatcggcaacctggccgggctgctggccacgctgaaggcccaaccgctggcctacaaccgcgacctgcaggaggacaaggaaccggtgttcgacgcggtggcccagctggagctggtgctgcccgcgatggccggcctggtcggcagcctgaccttcgacgtgcagcggatggccgcgctggcccccgccggctacacgctggccaccgacatcgccgaatggctggtgcgccagggcgtgccgttccggtccgcgcacgaggccgccggggccgcggtgcgcgccgccgagcagcgggccgtcgggctcgacgagctgaccgacgacgaactggccgccatcagcccggccctgacgccgcaggtacgggaggttttgacgatcgagggctcggtgtcctcccgggacgcgcggggcggcaccgcgccggcgcgggtcgtcgagcagatcgacaccgtggcggccaccgccgcgcggctgcgcgagcggctcggcggcccggcc

SEQ ID NO: 25792 - DNA, 927 bp, Mycobacterium avium
atgaccccccggcatttcctgcgcgacgacgacctgtcgccggccgagcaggccgaggtgttggcgctggccgccgagctgaagaaggacccgttcagcgcgcgcccgctggagggcccgcgcggggtcgcggtgctcttcgacaagaactccacccgcacccggttctcgttcgaggtgggcatcgcccagctcggcgggcacgccgtggtcgtcgacgcccgcagcacccagctgggccgcgacgagacgctggaggacaccgcccgggtgctgtcccgctacgtcgaggccatcgtgtggcggacgttcgagcagcaccgcctcgaggcgatggccggcgccgcgaccgtgccggtgatcaacgcgctctccgacgagttccatccctgccaggtgctcgccgacctacaggccatcgccgagcacaaggggtcgctgagcggcctgcggatgtgctacctcggtgacggcgccaacaacatggcccactcgctgatgctgggcggggtcacggccggcatccacgtcaccatcgccgccccggacggcttcaccccggcaccggaattcgtggcagcggcccggcggcgcgccgaaagcaccggcgccacggtcactctcaccaccgacgcgcggacggccgcgcgcggtgtcgacgtcttggtcaccgacacctggacgtcgatggggcaggaggacgacggcctggaccgccgcacaccgttttggccgtatcagctcaacgccgacctggtgtccctcgcggatccggaagccattgtgctgcactgccttccggcccaccgcggcgaggagatcaccgacgaggtgatggacgggccgtccagcgtcgtctgggacgaggccgaaaaccggttgcacgcgcaaaaggcgctgctcacctggcttttggagcggcaggca

SEQ ID NO: 25793 - DNA, 768 bp, Mycobacterium avium
gtgggcggtgacccggtgaccgtctacttcatcggcgcgggcccgggcgccgcggacctgatcaccgtccgcggccaacggctgctgcaaagctgcccggtgtgcctgtacgcgggttcgatcatgcccgacgacctgctggcactgtgcccaccggacgcgagaatcgtcgacaccggcccgctgacgctggatcagatcatcaccgagctcagccaagcgcacgccgccggccacgacgtggcgcggctgcattccggcgacccctcgctgtacagcgcgctggccgagcaatgccgccggctcgacgcactgggcatcgactacgaaatcgtgcccggcgtaccggctttcgccgcggccgcggccgcgctcaagcgcgagctcaccgttcccggtgttgcgcagacggtgacgctgagccgggtggccaccttgtccacggcgatgccgcccggcgaagacctggccaccctggcccgaaccggcggcaccctggtgctccaactggccgccgcgcagatcgacagcatcgtcgggcaacttctcgacaacggccgtcaatcccagacaccctgcgcggtagtcgctttcgcgagctggccgcaggaaacggtgctgcgcggcactctcgacgacatcgccgcgcagatgcacgacgcccacatcaccaagaccgccgtcatcatcgtcggcgacgcgctgaccgccggcggattcaccgacagctacctgtattcgaccggccgcgcccgcggaagcaggcac

SEQ ID NO: 25794 - DNA, 1209 bp, Mycobacterium avium
atgagcgaaaagggtcgcctgtttaccagtgagtcggtgactgagggacatcccgacaagatctgtgacgcgatcagcgactcggtcctcgacgccctgctggcgcaggacccccgctcacgtgtcgcggtcgagaccctggtgaccaccgggcaggtgcacgtggtcggcgaggtgacgacgacggccaaggaggccttcgccgacatcaccaacacggtccgcgagcgcatcctcgacatcggctacgactcgtcggacaagggcttcgacggggcgtcctgcggggtcaacatcggcatcggcgcgcagtcgcccgacatcgcccagggcgtcgacaccgcccacgagacccgcgtcgagggtgccgccgacccgctggacgcgcagggcgccggcgaccagggcctgatgttcggctacgcgatcaacgacacccccgagcggatgccgctgcccatcgcgctggcccaccgcctgtcgcgccggctgacggaggtccgcaagaacggcgtgctgccctacctgcgccccgacggcaagacgcaggtgaccatcgaattcgaggacgacgtcccggtccggctggacaccgtggtcatctccactcagcacgcggccgacatcgacctggagaacaccctgacccccgacatccgggaaaaggtgctcaacaccgtgctcaacgacctggcgcacgacacgctggacacctcctcgacgcggctgctggtcaacccgaccggcaagttcgtcgtcggcggcccgatgggtgacgccgggctgaccgggcgcaagatcatcgtcgacacctacggcggctgggcgcggcacggcggcggggcgttctccggcaaggacccgtccaaggtggaccgctcggcggcgtacgcgatgcgctgggtggccaagaacatcgtcgccgccgggctcgcggagcgggtcgaggtgcaggtggcctacgccatcggcaaggccgcgccggtcgggctgttcatcgagaccttcgggaccgcgaccgtcgacccggtcaagatcgagaagatcgtcccggaggtgttcgacctgcgtcccggcgcgatcatccgcgacctggacctgctgcgcccgatctacgcgcagaccgccgcctacgggcacttcggccgcaccgacgtcgaactgccctgggagcagctgaacaaggtcgacgacctcaagcgcgccatc

SEQ ID NO: 25795 - DNA, 1290 bp, Mycobacterium avium
atgagcgtgttgctgcgcggagtccggttgtacggcgagggcgaccgggtcgatgtcctggtcgacgacgggcagatcgccgacatcggcgccgggctcgacatccccgacaccgccgacgtcatcgacgccaccggccaggtgctgctgcccgggttcgtcgacctgcacacccacctgcgcgagccgggccgcgaatacgccgaggacatcgaaaccggttcggccgctgcggctttgggtggctacaccgcggtgttcgcgatggccaacaccaacccggtcgccgacagcccggtggtcaccgaccacgtatggcaccggggccagcaggtcggcctggtcgacgtgcacccggtgggcgcggtcaccatgggtctggccggcaaggaactcaccgagatgggcatgatggcggcgggggccgcgcaggtgcggatgttctccgacgacggcgtctgcgtgcacgacccgctggtgatgcgccgcgccctggaatacgccaccggcctgggcgtgctcatcgcccagcacgccgaggagccgcggctgaccgtcggcgcggtcgcccacgaggggcccaccgccgcccggctgggactcgcgggctggccgcgggcggccgaggaatcgatcgtcgcccgcgacgcgctgctggcccgcgacgccggcgcccgggtgcacatctgccacgcctccaccgcgggcaccgtcgagatcgtgaaatgggccaagcagcaaggcatctcgatcaccgccgaggtcaccccgcaccacctgatgctggacgactcccggctggccagttacgacgggcgcaaccgggtcaacccgccgctgcgcgaggcggccgacgcggccgcgctgcgccgggcgctggccgacggcgtgatcgactgtgtggccaccgatcacgcgccgcacgccgagcacgagaagtgcgtggagttctctgcggcccgccccggcatgctggggctgcagacggcgctgtcgatcgtggtccacacgatggtccgcccagggctgctgacctggcgggacgtcgccaaggtgatgagcgaaaaccccgcgcgcatcgcaaatctgcccgatcacggccgcccgctggaggtgggggagccggccaacctgacggtggtggaccccgacgccagctggacggtggccgggtcggacctggccagccggtcggccaacaccccctacgaggcgatgacgctgccggccaccgtgaccgcgaccctgctgcgcggcaaggtcaccgcccgcgatgggaagtgcccggta

SEQ ID NO: 25796 - DNA, 1119 bp, Mycobacterium avium
gtgagtggcaaggcgcaactggtgctcgaggacggccgcgtcttcaccggcacaccgttcggggcgatcggccaaaccctgggcgaggccgtgttttccaccggcatgtccggctaccaggagacgttgaccgaccccagctaccaccgccagatcgtggtggccaccgcgccgcagatcggcaataccggctggaacggcgaggacgccgagagccgcggcgacaagatctgggtggccggctacgcggtgcgcgacccgtcgccgcgcgtgtccaactggcgcgccaccggaagcctggaggacgagctgatccgccagcgcatcgtgggcatcgctcgcatcgacacccgcgcggtggtgcgccacctgcggacccgcggttcgatgaaggcgggggtgttctccggtgacgccctggccgatccggacgaactggtgcagcgggtgcgcggccagcagtccatgctgggcgccgacctggccggcgaggtcagcacgccggacgcctacatcgtggaacccgaagggccgccgcggtttaccgtcgccgccctggacctgggcatcaaaaccaacacgccgcgcaacttcgcccgtcgcggcatccgcagccacgtgctgccctcgtcggcgaccttcgagcagatcgccgacctcaggccggacggcgtgttcctgtccaacgggcccggcgaccccgccaccgccgaccacatcgtggcggtcacccgcgaggtgctgggcgccggaatcccattgttcggcatctgtttcggcaaccagatcctgggccgggcgctgggcctgtccacctacaagatggtgttcggtcaccgcggcatcaacatcccggtgatcgaccacgccaccgggcgggtggcggtgaccgcgcagaaccacggcttcgcgctgcagggcgaggccggccaggccttcgacacgccgttcggcgcggcggtggtcagccacacctgcgccaacgacggggtggtggagggcgtgaaactcgctgacggacgggcattttcggtgcagtaccacccggaggcggcggccggcccgcacgacgcgaactacctcttcgaccaattcatcgagctgatggaaggggaccgc

SEQ ID NO: 25797 - DNA, 3351 bp, Mycobacterium avium
gtgccccggcgcaccgacctcaaccacgtcctggtgatcggctcgggcccgatcgtgatcgggcaggcctgcgagttcgactattccggcacccaggcctgccgggtgctcaaggccgagggcctgcaggtcagcctggtcaactccaacccggccacgatcatgaccgatccggagtacgccgaccacacctacgtcgagcccatcacgccggccttcgtcgaacgggtgatcgcgcagcaggccgagcggggcaacaagatcgacgcgctgctggccaccctgggcgggcagaccgcgctgaacaccgccgtcgcgctgtacgagaacggggcgctggaccgctacggggtggaactgatcggcgccgacttcgacgccatccagcgcggcgaggaccggcagcggttcaaggacatcgtcgccaaggtcggcggtgaatccgcccgcagccgagtgtgtttcaccatggacgaggtgcgcgagaccgtcgccgagctgggcctgccggtggtggtgcggcccagcttcaccatgggcggcctgggctcggggatggcgcgctccgtcgaggaggtcgaccggatggccggcgccgggctggccgaaagccccagcgccaacgtgctgatcgaggaatccatctacggctggaaggaattcgagctcgagctgatgcgcgacggcaacgacaacgtcgtcgtggtgtgctcgatcgagaacgtcgacccgatgggcgtgcacaccggcgactcggtcaccgtcgccccggcgatgacgctcaccgaccgcgaataccagcggatgcgcgacctgggcatcgcgatcctgcgcgaggtcggggtggacaccggcggctgcaacatccagttcgcggtgaaccccaaagacggccggctgatcgtcatcgagatgaatccccgggtgtcgcgctcgagcgcgctggcctccaaggccaccgggttcccgatcgccaagatcgccgccaagctggccatcggttacaccctggacgagatcgtcaacgacatcaccaaggagacgccggcctgcttcgagcccaccctggactacgtggtggtcaaggcgccgcggttcgcgttcgagaagttccccggcgccgaccccacgctgaccaccaccatgaaatccgtcggcgaggcaatgtcgttgggccgcaacttcatcgaggcgctgggcaaggtgatgcgctcgctggagaccagccgcgccggattctggaccaagcccgaccccgacggcggcctcgacgacgtgctggcccggctgcagacgcccaccgagggccggctctacgacctcgagctggcgctgcggctgggcgccccggtggaacgggtcgcgcaggccagcggcgtggacccgtggttcatcgcgcagatcggcgaactcgtcgcgctgcgcggcgagctgatcggcgcccccgtgctggacgccgacctgctgcggcgggccaagcaccacggcctgtcggaccgccagatcgccgcgctgcgaccggaattggccggcgagaacggggtgcggtcgctgcgcgaacgcctcggcgtgcacccggtgtacaagacggtcgacacctgcgcggccgagttcgaggccaagaccccctaccactacagcagctacgaactcgacccggccgccgagacggaggtcgccccgcagccgcagcggccgaaggtgctcatcctcggctcgggccccaaccggatcggccagggcatcgaattcgactacagctgcgtgcatgccgcgacgacgttgagccaggccggtttcgagaccgtgatggtcaactgcaaccccgagacggtgtccaccgactacgacaccgccgaccggctgtatttcgagccgctgaccttcgaggacgtcctcgaggtgttccgggccgagcagcagtccggcgccggcggcccgggcgtggtgggcgtcatcgtgcagctcggcgggcagaccccgctcgggctggcgcaacgcctcgccgacgcgggcgtgccgatcgtgggcaccccgccggaggccatcgacctggccgaggaccgcggctccttcggcgacgtgctgaccgcggccggcctgcccgcgccgaagtacggcaccgcaacgactttcgcgcaggcccgccggatcgccgtggacatcggctacccggtgctggtgcggccgtcctacgtgctgggcggccggggcatggagatcgtctacgacgaggagacgctgcgcgactacatcacccgcgccaccgagctctcacccgagcatccggtgctggtcgaccgcttcctcgaggacgcggtcgagatcgacgtggacgcgctgtgcgacggcaccgaggtgtacatcggcggcatcatggagcacatcgaggaggccggcatccactccggcgactcggcgtgcgccctgccgccggtgacgttgggccgcagcgacatcgagaaggtgcggcgcgccaccgaggccatcgcgcacggcatcggggtggtggggctgctcaacgtgcagtacgcgctcaaggacgacgtgctctacgtgctggaagccaacccgcgcgccagccgcacggtgccgttcgtgtcgaaggccaccgccatcccgctggccaaggcgtgtgcacggatcatgttgggcgccaccatatcccagcttcgcgcggaggaaatgctggccgcgtccggggacggcgcgcacgccgcgctgaacgccccgatcgcggtcaaggaggcggtgctgcccttccaccggttccgcaccgtggagggcgccggcatcgactcgctgctcggcccggagatgaagtccaccggcgaggtgatggggatcgaccgcgacttcggcagcgccttcgccaagagtcagaccgccgcctacgggtcgctgccggcccagggcaccgtgttcgtgtcggtcgccaaccgggacaagcgctcactggtgttcccggtcaaacggctggccgacctgggtttccgggtgctggccaccgagggcaccgcggagatgttgcgccgcaacggaattccctgcgacgaggtgcgcaagcacttcgaggacccgcagcccggccgccccgagatgtcggccgtcgacgcgatcaaggccggcgaggtcgacatggtgatcaacacgccctacggcaactccggcccgcgcatcgacggctacgaaatccgttccgccgcagtgtcggtcaacattccctgcgtgaccaccgtgcagggcgcctcggccgccgtgcagggcatcgaggccggcatccgcggcgacatcggggtgcgcagcctgcaggaactgcatagccagatcgcctcggacaaggggccgcgg

SEQ ID NO: 25798 - DNA, 3531 bp, Mycobacterium avium
atgaaccactcgtccttcgtgcacctgcacaaccacaccgagtattcgatgctggacggtgccgcgaagatcaccccgatgctcgccgaggtggaacggctgggcatgcccgcggtcgggatgaccgaccacggaaacatgttcggcgccagcgagttctacaacgccgccaccaaggccgggatcaagccgatcatcggcgtggaggcctacatcgcgccgggctcccggttcgacacccggcggatcctgtggggggatcccagccagaaggccgacgacgtgtccggcagcggctcctacacccacctgaccatggtggccgagaacgcggccggcctgcgcaacctgttcaagctgtcctcgctggcctcgttcgagggccagctgggcaagtggtcgcggatggacgccgagctgatcgccgaacacgccgacggcatcatcgccaccaccggctgcccctccggggaggtgcagacccggctgcggctgggccaggaccgcgaggcgctcgagtcggcggccaagtggcgcgagatcttcggcgccgacaacttcttcctcgagctgatggaccacggcctgtccatcgagcagcgggtccgcggcggcctgctggagatcggccgcaagctgaacatcccgccgctggccaccaacgactgccactacgtcacccgcgacgccgcgcacaaccacgaggcgctgctgtgcgtgcagaccggcaagacgctctcggacccgaaccggttcaagttcgacggcgacggctactacctcaagtcggccgccgagatgcgccagatctgggacgccgaggtgcccggcgcgtgcgactccaccctgttgatcgccgaacgggtgcagtcctacgcggaggtgtggacgccgcgcgaccggatgccggtcttcccggtgcccgagggtcacgaccaggccagctggctgcaccacgaggtgatggccgggctgcggcggcgattcccggacggggtcggccaggactacatcgaccgggccgaatacgagatcaaggtcatctgcgacaagggttttccgtcctacttcctgatcgtcgccgacctgatcaactacgcccgctcggtcgacatccgggtggggcccgggcgtggctcggcggccggctccctggtggcctacgcgttgggcatcaccaacatcgacccgattccgcacggcctgctgttcgagcggttcctcaacccggagcggccgtcggcgcccgacatcgacatcgacttcgacgaccgtcgccgcggcgagatggtgcgctacgccgccgacaagtggggctccgaccgggtcgcccaggtcatcaccttcggcaccatcaaaaccaaagcggcgctgaaggattcggcgcggatccactacggtcaaccgggcttcgcgatcgccgaccggatcaccaaggcgctgccgccgccgatcatggccaaggacatcccgctgtccggcatcaccgaccccagccatgagcggtacaaggaagccgccgaggtgcgcggcctgatcgagaccgaccccgacgtgcgcaccatctaccagaccgcccgcggtctggagggtttgatccgcaacgccggcgtgcacgcgtgcgcggtgatcatgagcagcgagccgctgaccgaggccatcccgctgtggaagcggccgcaggacggggccatcatcaccggctgggactacccgtcgtgtgaggccatcggcctgctgaagatggacttcctgggcctgcgcaacctgacgatcatcggcgacgccctggacaacatcaaggccaaccggggaatcgacctcgacctggagtcggtgccgctggacgacaaggccacctacgagctgctggggcgcggcgacaccctgggcgtgttccagctcgacggcgggccgatgcgcgatctgctgcgccgcatgcagcccaccgagttcaacgacatcgtggcggtgctggcgctgtatcgccccgggccgatgggtatgaacgcccacaacgactacgccgaccgcaagaacggccgccagccgatcaagccgatccaccccgagcttgaggagccgctgcgcgaaatcctcgccgagacttacggattgatcgtctaccaagagcagatcatgttcatcgcccagaaggtggcctcttacaccatgggtaaggccgatgcgctgcgcaaggcgatgggcaagaagaagctcgaggtgctcgaggccgagtacaagggcttctacgagggcatgaccgccaacgggttctccgagaaggcggtaaaagccttgtgggacaccattcttccgttcgcggggtatgcgttcaacaagtcgcacgccgccggctacgggctggtgtcgtactggaccgcgtatctgaaggccaactacccggccgagtacatggcggggctgctgacctcggtgggcgacgacaaggacaaggccgcggtctatctggccgactgccgcaagctgggcatcacggtgttgccgccggacgttaacgagtcgctggtcaacttcgcctcggtcggccaggacatccgcttcgggttgggcgcggtgcgcaacgtcggcgccaacgtggtcggttcgctgatcaagacccgcgaagagaagggcaagttcaccgacttctccgactacctgaacaagatcgacatctcggcctgcaacaagaaggtgaccgagtcgctgatcaaggccggcgcgttcgactcgctcaagcacgcgcgcaagggcctgttcctggtacacaccgatgcggtcgattcggtgctgggcaccaagaaggccgaggcgatgggccagttcgacctgttcggcggcgacggcggctgcaccgagtcggtgttcaccatcaaggtgcccgacgacgagtgggaggacaagcacaagctcgcgctggagcgggagatgctggggctctacgtgtccgggcatccgctcaacggggtggcgcatctgctggccgcgcaggtggacacccagatcccggccatcctggacggcgacgtgcccaacgagacccaggtgcgagtcggcggcatcctggcgtcggtcaaccggcgggtcaacaagaacgggatgccttgggcgtcagcgcaattggaggacctcaccggtggcatcgaggtgatgttcttcccgcacgcctactccacctacggcgccgacatcgccgacgacgccgtggtgctgatcaacgccaaggtggcgatccgtgacgaccggatcgcgctgatcgccaatgagcttgtggtgccggacttttccattgcccaggtggaccggccgctggcggtcagcctgccgacgcggcagtgcaccatcgacaaggtcaccgcgctcaagcaggtgctggcccgtcacccgggaacctcgcaggtgcatttgcggctgatcagcggcgaccggatcaccacgttggagctggacgcgtcgctgcgggtgacgccgtcgccggcgttgatgggcgacctcaaagagctgctcggccccggctgcctcggcggg

SEQ ID NO: 25799 - DNA, 735 bp, Mycobacterium avium
gtgttgtgtgggtcacattatggcgttgacggtctactgacaagcccccgtcgacaccggtcaaaacgtaaaccccgtcccgccaagccactgaaagccctggcaagccccgtgaacgcaccgatgtccatgcagccgaggagccggcggccgctgcgccgggcccagttgtccgacgaggtcgcggggcacctgcgggccgcgatcatgtccggcgcgctgcggccgggcaccttcatccggctcgacgagaccgcggccgagctcggcgtcagcgtcaccccggtgcgcgaggccctgctgaagctgcgcggcgagggcatggtgcagctggaaccgcaccgcggtcacgtggtgctgccgctcacccgccaagacatcgaggacatcttctggctgcaggcgaccatcgccaaggagctggccgccgcggccaccgaccacatcaccgacaccgagatcgacgagctggatcgcatcaacgacgcgctcgccgcggccgtcgggtccggcgacgccgagaccatcgcgggcctcgagttcggcttccaccgggtcttcaaccaggccagcggccggatcaagctggcctggttcctgctcaacgccgcccgctacatgccggtgctggtgtacgccgccgacccgcagtgggggcgggccgccgtcgacaaccaccggcgaccggtctgcgggcgacgcccgggccgtggtgcccgtcgacctcgccggcga

SEQ ID NO: 25800 - DNA, 3183 bp, Mycobacterium avium
gtggcacaggagacaacgcgcatcgtgaccgacaatctcgggttccaggctgaccgcgaggctcagccggcggattccgtccagacctacccgaagccggccggcggcgcgcccgacttcccggcgctcgagctcgaggtgctcgactactgggcccgcgacgacaccttccgggccagcatcgcccgccgcgacggcgccgaggaatacgtgttctacgacgggccgccgttcgccaacgggctgccgcactacggccacctgctcaccggctacgtcaaggacatcgtcccgcgctaccgcaccatgcgcggcaacaaggtggagcgccgcttcggctgggacacccatgggctgccggccgaactggaagtggaacgccagctgggcatcaccgacaaatcgcagatcgacgacatgggcatcgccgcgttcaacgacgcctgccgcgaatcggtgttgcgctacaccgacgagtggcgggcctatgtgacccgccaggcccgctgggtcgatttcgacaacgactacaagacgctcgacctgccctacatggagtcggtgatctgggcgttcaagcagctctgggacaagggcctggcctacgagggctaccgggtgctgccgtactgctggcgcgacgaaaccccgctgtccaaccacgaattgcggatggacgacgacgtgtaccagagccggcaggacccggcgctgacggtcgggttcaaggtggtgggcggcgagctggacggcgcgcacctgttgatctggacgacgacgccgtggacgctgccgtccaacctggccgtcgccgtccacccggaggtgacctatgtgcaggtgcgctccggcgaccgtcgtttcgtgctggcccagccgcggctggccgcctacgcccgcgagctgggccccgagcccgagatcctgggcagctaccggggcgccgagctgctgggcacccggtacctgccgccgttcccgtatttcatggacagccccaacgcatttcgggtgctggccggcgagttcgtcaccaccgaggacggcaccgggatcgtgcacctggcaccggcctacggcgaggacgacatggccgtcgccgacgccgcgggcatcgccccggtcacgccggtcgactccaacggacgcttcgacgccgccgtcccggattaccagggcctcaacgtcttcgacgccaacccgcagatcatccgggacctgaagaacggcagcggcgccgccgcggccaacgcgccggtgctgctgcgccacgaaacctacgagcacccttacccgcactgctggcgttgccgcaacccgctgatctatcgggcggtgtcgtcctggttcgtggcggtcacccgattccgggaccgcatggtcgaactcaaccagcagatcacctggtatcccgaacacgtcaaggacggccagttcggcaagtggctggccggcgcccgcgactggtcgatctcacgaaaccgctactggggcaccccgattccggtgtggaagtccgacgacccggcctacccgcggatcgacgtgtacggcagcctcgacgaactcgagcgcgacttcggggtgcggccggacaacctgcaccggccctacatcgacgagctgacccggcccaaccccgacgacccgagcggtcgcagcaccatgcgccgcatccccgacgtgctcgacgtctggttcgactcggggtccatgccgtacgcgcaggtccactacccgttcgagaaccgggactggttcgagacgcattaccccggcgacttcatcgtcgaatatatcgggcagacccgcggctggttctacaccctgcacgtgctggccaccgcgctgttcgaccggccggcgttcaaaacctgtgtggcccatggcatcgtgctgggctccgacggacagaagatgagcaagtcgctgcgcaactaccccgacgtgtcggaggtgttcgaccgcgacggctccgatgccatgcgctggttcttgatggcctcgccgatcctgcgcgggggcaatctcatcgtcaccgaacagggcatccgcgacggcgtgcgccaggtgctgctgccgttctggaacgcctacagcttcctggccctctacgcgccgaaagtcggtacctggcgcacggattcgacccaggtgctggaccgctacatcctggccaagctcgccgaactgcgcgacgacctgacccgggagatggacgcctgcgacatttcgcgggcctgcgagcagctgcgccagttcaccgaggcgctgacgaattggtatgtgcgacggtcgcgttcgcggttctggagcgaggacgccgacgccatcgacacgctgcacaccgtgctggaggtgaccgcgcggctggccgcgccgctgctgccctcggtcaccgagttggtctggcgcggcctgaccggcggacgctcggtgcatctgaccgactggccgcgcagcggcgagctgcccgccgacccgggcctggtcgcggcgatggaccaggttcgcgaggtgtgctcggccgcctcctcgctgcgtaaggcaaagaagctgcgggtgcgcctaccgctgccgaaactgactgtggcggtggagaatccgcaacacctggcgccgttcgtcgacctgatcgccgacgagctcaacgtcaagagcgtcgagttgaccgacgcgatcgacacctacggcaccttcgagctgaccgtcaacgcccgggtggccgggccgcggctgggcaaggacgtgcaggcggccatcaaggccgtcaaggcgggggagggcgtcgtcaacgcagacggcaccctgaccgcaggcccggccgtgctgcggcccgaggagtacagctcgcggctggtggccgccgacccggaattcaccgcggccctgccgaatggggccggcctggtggtcctcgacggcaccgtcaccccggagctagaggccgaggggtgggcgaaggaccggatccgcgaattgcaggagctgcgcaagtcgaccgggctggacgtctccgaccggatcagcgtggtgatgtcggtgcccgccgggcgggccgagtgggcgcacacccaccgcgacctgatcgccggtgaaatcctggccacccgtttcgaattcggggagccggccgaccccgtcgcgatcggcgacggcgtgcgggtgagcatttccaaagtc

SEQ ID NO: 25801 - DNA, 2517 bp, Mycobacterium avium
gtgtggggccagtgccattcgctggccttcgacttctcagtgtgggagatcttcggcgcgctcctgaacggcgggcgcgtgctggtggtgcccgacgacgtggtccgctcgccaaaagacctgcacgccttgctcgttgcggaacgcgtcgacatgttgacccagacgccgtccgaggtgggcgtgctctcacccgacggtctggagtcgacgacgctggcggtcgccggcgaggcctgcccggtcgaggtggtggaccgctgggcgcccggccgggtgatgatcaacgtctacgggcccacggagaccaccatcgtcgccgccgtcagcgcgccgctgacccctggccccgaggcgccgccgatcggtgcgcccgtgccggggaccgcgctgagagtgctcgacgcacacctgcggccggtgccccccggtgtggtcggcgagttgtacgtggccggcgccggggtatcgaccggctacctgggccggcccggcctgacggcgtcgcggttcgtggcctgcccgttcggcggcgccggcgagcggatgtatcgcaccggggacctggtccggtggggcgccgacgggcaactgcaatacctcggccgggccgacgagcaggtcaagatccgcggctaccgcatcgaactcggcgaaatccagtccgccctggccgcgctcgacggcgtggaccaggccgccgtcatcgcccgcgaggaccggcccggcgacaagcggctggtcggctacgtcaccgggaccgccgacctggcgcagctccgcaccgcgctggccgaacggctgcccggctacatggtgcccgccgcggtgctgatgctggacgcgctgccattgacacccagcggcaaactcgacaccggcgccctgcccgcccccgactaccagggccccgagggctacctggccccggccggcgcggtggaggagatcctggcctggctctacgcccaggtgctggggctgccgcggcgggtcggggtgcaggaatccttcttcgacctgggcggcgactcgctgtcggccatgcggctggtcgcggccatctacaacgcgctggacatccacctgccggtgcgggccgtcttcgaggcgccctcggtgcgcagcctgagccagcggctgaacgccgatcccgctgtggcgcaaggccttcgggccgacttcgcatcggtgcacggccgcgacgccaccgaggtgtacgccagcgacctgaccctggacaagttcatcgacgccgcgacgctgtccgccgcacccgcgctgcccggccccggcgccgaggtgcgcaccgtgctgctgaccggcgccaccggcttcctgggccgctacctggtgctgcaatggctggaacgcctggaactggccgacgggaaactcatctgtctggtgcgggccgcctcggacgacgacgcgcggcgccgcctcgagcgcactttcgacagcggcgatcccgccctgctgcggtacttccacgaactggccgccgaccacctcgaagtcatcgccggcgacaagggccgcgccaacctcggcctggacgatcggacctggcagcggctggccgacaccgtcgacctgatcgtcgacgcggcggccgtcgtcaacggcgtgctgccctaccaggaactgttcggccccaacgtcgccggcaccgccgaactgatccggctggcgctgtccaccagactcaagccgtacagctacgtgtcgaccgccaacgtcggcgaccagatcgagccgtcggcgttcaccgaggacgccgacatccgggtcgccgggccgatccgcaccatcgacggcggctacggcaacggctacggcaacagcaagtgggccggcgaagtgttgctgcgcgaggcgcacgacctgtgcgggctgccggtctcggtgttccgctgcgacatgatcctggccgacaccagctacgcgggccagctcaacctgccggacatgttcacccggctgctgttcagcgtggtggccagcggcgtggcgccgcgctcgttctaccggctcgacgcgcacggcaaccggcagcgcgcgcacttcgacgcgctgccggtcgagttcgtcgccgaggcgatcgccacgctgggcgcccaggtgggccgggacgccggcaccgggttcgcgacctaccacgtgatgaacccgcacgacgacggcatcgggctcgacgagtacgtcgactggctgatcgacgcgggttacccgatcgagcgggtcgacgacttcgaccagtggctgcaccggatggagaccgcgctgcacgccctgtcggaacggcagcgccaccagtcggtgctgcagctgctggcgttgcgcaacgcccggcacgtgccgccggccgacccggcccgcggctgcctggggcccaccgagcggttccgcgccgcggtgcaagaagccaaaattggcgccgacaacgacatcccgcacatcaccgccccggtcatcgtcaaatacgtgaccgacctgcagttgctgggcttgctc

SEQ ID NO: 25802 - DNA, 1551 bp, Mycobacterium avium
gtgtttgaatcgctgtccgaccgattgaccagtgcccttgcgggactgcgcggcaagggtcgactgaccgacgccgacatcgaggccaccacccgcgaaatccggctggcgctgctggaagccgacgtgtcgctgcccgtcgtgcgcgcgttcgtcacccggatcaaggagcgcgccaagggcgccgaggtgtccggcgcgctgaacccggcgcagcaggtcgtcaagatcgtcaacgaagagctcatcggcatcctgggcggcgagacccgccagctggcgttcgccaagactccaccgaccgtgatcatgctcgccggtctgcagggttccggtaagacgtcgctggccggcaagctggccgcctggctgcgcgggcagggccacaccccgctgctggtggcctgcgacctgcagcgccccgccgcggtgaaccagctgcaggtcgtcggcgagcgcgccggcgtcccggtgttcgcgccgcatccgggagcctcgcccgagtccgggcccggcgacccggtggcggtggccgcacagggcctcgccgaggcccgggccaagcaccacgacgtcgtcatcgtcgacaccgccggccggctgggcatcgacgacgagctgatggcccaggccgcggccatccgcgacgccatcgaccccgacgagatcctgttcgtgctggacgcgatgatcggccaggacgccgtcaccaccgccgaggccttccgcgagggcgtcggcttcaccggcgtggtgctgaccaaactcgacggcgacgcccgtggcggcgcggcgctgtcggtgcgcgaggtcaccggggtcccgatcctgttcgcctccaccggcgagaagctggaggacttcgacgtcttccaccccgaccggatgtccagccgcatcctgggcatgggcgacgtgctgagcctgatcgagcaggccgagcaggtcttcgacgccgaacaggccgaggccgccgcggtcaagatcggcagcggcgagctcaccctcgaggacttcctggaacagatgctcgccatccgcaagatggggccgatcggcaacctgctgggcatgctgcccggcgccgggcagatgaaggacgcgctggccgccgtcgacgacaagcagctggaccggctgcaggccatcatccgcggcatgacccccgaagagcgggccgacccgaagatcatcaacgcgtcgcggcggctgcgcatcgccaacggctccggcgtgacggtgtcggaggtcaaccagctggtggaccgcttcttcgaggcccgcaagatgatgtcgtcgatgctcggcggcatggggattcccgggctgggccgcaagtcggcgacgcgaaaagccaagggcgccaagggtaaagccaagaagggcaagaagggcgcgcgcggccccaccccgccgaaggtgcgcagcccgctggggcccgggatgccggccgggtaccccgacctgtcgcagctgcccgagggcctcaacgagctgccacccgggctggccgacttcgacctgtccaagctgaagttcccgggcaacaag

SEQ ID NO: 25803 - DNA, 717 bp, Mycobacterium avium
atgagaatcgacgtcgtcaccatctttccggcctacctggacccgctgcggcagtcgttgccgggcaaggcgattcagtccggcctggtcgatctgcgggtgcacgacctgcggcgctggacgcacgacgtgcaccgctcggtcgacgacgcgccctacggcggcggcccgggcatggtgatgaaggcgccggtgtggggtgaggcgctcgacgaaatcgcctccgcggaaacacttttggtggtccccacgccggccggcgcgctgttcgaccaggccaccgccgcccgctggagcgccgagcggcatctggtgttcgcgtgcggccgctacgagggcatcgaccagcgggtggtcgaggacgccgcccggcggatgcgggtcgaagaggtctccatcggcgactacgtgttgccgggcggggagtcggcggcggtggtgatgatcgaggccgtgttgcggctgctcgacggggtgctcggcaatcccgcgtcgcgccacgatgattcgcactcgccggcactggaccggcggctggaggggcccagctacacccggccgccgagctggcgcgggctggacgtgcccgaggtgttgctctccggtgaccatgcccggatcgcggcgtggcgccgggaggtctcgctgcagcgcacccgcgagcgccgaccggagctgctagccgatccggttgggccgcaagacggtccgggcctt

SEQ ID NO: 25804 - DNA, 525 bp, Mycobacterium avium
ttggagttgaccgtcgggcgcgtggtcaaagcgcacggcatcagcggtgagatcgtcgtcgagatccgcaccgacgatcccgccgcccgattcgcaccgggtaacacgttgcgcgccaagccttcccgtggcggcccggaacgcagctgcgtcatcgagagcgcgcgtgagcacggcgggcggctgctggtgcggctggccggcgtcaccgaccgggacgccgccgacgcgctgcgcggcaccctgttcgtcgtcgactccgccgagttgcccgacatcgacgagcccgacacctactacgaccatcaactcgagggcctgcaggtgcgcaccaccggcggccagcgggtcggtgcggtcgccgaggtgctgcacaccgccgccggcgagctgctggcggtgcgtgacgacgcggacggtgcgccgcgagaagtgttggtgccgttcgtcagcgcgatcgtcaccgcggtgtcgctggacgacgggctcatcgagatcgatccgcccgacggcctgctggacctg

SEQ ID NO: 25805 - DNA, 240 bp, Mycobacterium avium
atgagcacggttgtcgttgacgctgttgagcatctggttcgcgggattgtcgacaaccccgacgacgtccgggtggacatggtgaccagccgccgcgggcggaccgtggaagtccacgtccaccccgacgacctgggcaaggtgatcggccgcggcggtcgcaccgcgacggcgttgcgcacgctggtcgccggcatcggcggacgcgggatccgcgtcgacgtggtggacaccgaccag

SEQ ID NO: 25806 - DNA, 1269 bp, Mycobacterium avium
gtgctgctgtcggcggggccgaccacggtggcgaccatcgaggcgctcgaccgcaccgggctgtggggccggctgttgccggagtgggacgccatccgcgacctgccaccccgcgacgtcgcgcacaagtggacggtggaccgccacgtcatcgagaccacggtcaacgccgcgccgctggccacccgggtggcccggcccgacctgctcgcgctgggggccctgctgcacgacatcggcaagggccgcggtgtggaccacagcgtgctcggggccgggctggccctcgagatcgggccgcggctggggatggcgcccgccgatgtcgagctgctcgcgcagctggtccgccaccacctgctgctgccggtggccgccaccagaagcgacctcaacgacccgaaaaccattgagcgggtgtcgaaaaccctcggtgaggacccgctgctgctggaagtgctgcacgcgctgaccgaggcggactccaaggccaccgggcccggcgtgtggagcgactggaaggcgtcgctgatcgacgatctggttcggcgctgccggatggtgatggcgggggagccgcttccgaaggtcgaacctgctgcgccccaatacctttcgctcgccgccgaccgcggcgtgcatgtgcagatcaagcccggcggcggcgagcggctggacgtggtgatggccgcgccggatcaacgcggactggtgtccaaggccgccgcggtgctggcgctgaactcgctgcggatccactcggcctcggccagcacgcacgagggattcgcggtcgtcgaattcgtggtgtcgccgctgttcggttcgccgccggaggcgggcctgctgcgccagcagttcaccggcgcgctgggtggcgacgtcgacgtgctgggcacgctggagaagcgggacagcgacgccgtcggcgcggccaccaggcgggccggcgaggtccaggtcggggtgcccgtcacccgctcgaccgcgccgccgcgcatcctgtgggtcgacaccgccgcggccgaccagctgatcgtcgaagtccgcgccatggaccgactcgggctgctcgccctgctgacccgggcgctggagcgggccggcaccgacatcgtctgggcgaaggtcaacaccttcggctcgaccgcggccgacgccttctgcgtcacggccggcgacgccggcgcccgcgacgccgtcgagcaaagcctgctcacggtgctgggcggtccggccgtggaagtgctcgaggaaccggtcggcgac

SEQ ID NO: 25807 - DNA, 510 bp, Mycobacterium avium
atggctgtgaagatcaagctcacccggcttggcaaaatccgcaatccccagtaccgcatcgccgtcgccgacgcccgcacccggcgcgacggccgctccatcgagatcatcggccgctaccaccccaaggaagacccgagcctgatcgagatcaactccgagcgcgcgcagtactggttgtctgtgggtgctcagcccaccgagcccgtcctcaagctgctgaagatcaccggcgactggcagaagttcaagggtctgccgggcgccgagggccgcttgaaggtcgccccgcccaagcccagcaagctggagctgttcaacgccgcgctggccgaggccgagggcggaccgaccaccgaggccgccaagccgaagaagaaggccgcgacgtcgggcgccaagaaggccgcgaaggccgccgagccggaagccgccgcgccggaagcagccgagcctgaggccgccgcgccggccgagggtggcgagcaggccgagtcgagcaccgagagc

SEQ ID NO: 25808 - DNA, 441 bp, Mycobacterium avium
gtgcccacttacgcgccaaaggcgggtgacaccaccaggtcgtggtacgtcatcgacgccacggacgtggtgcttggccgccttgccgtcgcggcagccaacctgctgcgcggcaagcacaagccgacgttcgcccccaacgtcgacggcggtgacttcgtcatcgtcgtcaacgccgacaaggtcgccttcagcggccagaagctggacaagaagctggcttaccgccactcggggtaccccggcggtctgcgcagccgcaccatcggcgagctgatgcaaaagcacccggaccgggtcgtggcggacgcgatcgtcggcatgctgcccaagaacaagctgagccgccagatccagcgcaagctccgcgtctacgccggaccggagcacccgcacaccgcccagcagcccattccgtacgagatcaagcaggtggcccag

SEQ ID NO: 25809 - DNA, 498 bp, Mycobacterium avium
gtgaccgaaacgaccgaggccctggagaacccggacaacccggacgccgagaccgcagccgccgaggtgaccgaggccccggtcgaggccgtcccggcggagtcctacgtgttcgagcggcctatccagaccgtcggccgccgcaaggaggccgtggtgcgggtgcggctggtgccgggcaccggcaagttcaacctcaacggccgcaccctggagggctacttccccaacaaggtgcaccagcagctgatcaaggccccgctggtcaccgtggaccgggtggacagcttcgacatctacgcccacctgcacggcggcggcccctcggggcaggccggtgcgctgcggctgggcatcgcccgggcgctgatcctggcctcgccggacgaccggcccgcgctgaagaaggccggcttcctgacccgggacccgcgcgccaccgagcgcaagaagtacgggctgaagaaggcccgcaaggcgcctcagtacagcaagcgc

SEQ ID NO: 25810 - DNA, 1332 bp, Mycobacterium avium
atgggtcgactattcggcaccgacggcgtgcgcggggtcgccaatcgcgagttgaccgctgagctggcgctggcgctgggcgccgcggcggcgcggcagctggccagcgggtccgcgccgggccggcgggtcgcggtgatcggccgcgatccacgcgccagcggcgagatgctggaggccgcggtgatcgccgggctgaccagtcaaggcgtcgacgcgctgcgggtgggggtgctgcccacccccgcggtggcctacctgaccggcgcctacgacgccgacttcggggtgatgatctcggcgtcgcacaacccgatgcccgacaacggcatcaagatcttcggccccggcggccacaagctcgacgacggcaccgaggaccggatcgaagccctggtcggggacgccgggccgcggccggtcggcgcgggcatcggccgggtgatcgacgccgaggacgccgccgaccgctacctgcgccacctgagcaaggccagcacgctgcgcctggacgggctgaccgtggtggtcgactgcgcgcacggcgcggcctcctccgtggccccgcgcgcctaccgcgcggccggcgcgcgggtgatcgcgatcaacgccgaccccaacgggctcaacatcaacgacaactgcgggtcgacgcatctggattcgctgcgcgccgccgtcgtcgcccaccgcgctgacctgggcctggcgcacgacggggacgccgaccgctgcctggccgtcgacgccgacggcaacctggtcgacggcgaccacatcatggtggtgctcgcgctggcgatgcgtgaggccggcgagctggcgtccgacacgttggtgaccaccgtgatgagcaacctgggactgcacctggcgatgcggtcggccggaatcacggtgcgcaccaccggtgtcggcgaccgctacgtggtmgaggagctgcgcgccggtgactacagcytgggcggtgagcastccgggcacatcgtgatgcccgcgctgggctcgaccggcgacggcatcgtcaccgggctgcggttgatgacgcgcatggcgcagaccggctcgccgctgtccgatctggcgtcggcgatgcagacgctgccccaggtgctgatcaacgtgacggtcgccgacaaggccaccgccgccaccgcaccgtcggtgcagaccgccgtcggccaggccgcggccgaactgggcgacaccggccgaatcctgttgcgcccgagcggaaccgagccgatgatccgcgtcatggtggaagcacccgagaaagacatcgcgcagcgactcgccacccgggtcgccgaggcggtcagcgccgcgcgc

SEQ ID NO: 25811 - DNA, 1440 bp, Mycobacterium avium
gtgcctgacgccgcccaggatgccgagctgctgaccgccgccgcggtcgcgctcaacaagcatgcgccgatgctgcgtgagctgggttctgcgttcgacgccgcgggccaccagctctacctcgtcggcggttcggtgcgcgatgccctgctgggccggttgagccccgacctggacttcaccaccgacgcgcgccccgaccaggtgcagcaaatcctgcggcggtgggccgacaacctgtgggacaccggaatcgagttcggcaccgtcggcgtcggcaagggcgaccgccgcctggagatcaccacctttcgcgccgacacctacgaccaggtgtcccgaaatccccaggtgcgcttcggcaatcgcctcgaggacgacctggtgcgccgcgatttcacgaccaacgccatggcggtgcggatcacgcccgacggaccgggcgaattcctggaccccctgggcggattggcggcgctgcgccagcgggtgctggacaccccggccacaccggaggagtcgttcggcgacgatccgttgcggatgctgcgcgcggcccggttcgtgtcgcaactcggcttcaccgtcgcgccgcgggtgcgtgaagcgatcgagcggatggccccgcagctggcccggatcagcgcggaacgggtggccgccgagctggacaagttggtgctcggcgacgatccggtggccgggatcgatctgctggtgcacagcggaatgggtgaggtggtgctgcccgagatcggcggcatgcagatggccatcgacgaacaccaccagcacaaggacgtctaccagcactcgctgaccgtgttgcgtcaggcgatcgccctcgaagacgacggcccggatctggtgctgcgctgggccgcgctgctgcacgacatcggcaagcccgccacccgacgccacgagcccaacggtggcgtgagttttcaccaccacgaggtggtcggcgccaagatggtccgaaaacggttgcgtgccttgaagtattcgaagcagatggtcgacgacgtctcgcagctggtgtacctgcatctgcggttccacggctacggcgacggcaagtggaccgattcggcggtgcgccgctacgtcaccgatgccggcccgctgctgccgcggctgcacaaacttgtgcgcgccgactgcaccacccgcaacaagcgccgggccgcccggctgcaggcaagctatgaccggctcgaggcgcgcatcgccgagctggccgcccaagaagacttggcgcgggtgcgccccgatctggacggcaaccagatcatggagatcctgggcatcccggccggccctcaggtcggggaggcgtggcggttcctgaaggagctgcggctggagcggggaccgttggatcccgacgaggcgaccgcagaactgctgtcctggtggcgatctcgcgggaacggg

SEQ ID NO: 25812 - DNA, 1305 bp, Mycobacterium avium
atgggtctgcaagcaccattccgcagcggtggcggcacctcgcgcccgcagggccgggccgcaccccgcgcggtcgacctgcgccgcgaggtgcacgacgcggcgcggcgcgcccgggtggcttcccgggtgctggcgctgttgcccaccgtcgccaaggaccaggcgctgcgctcggccgcggatgcgatcgccggccacgccgaattgatcctgtcggccaacgccgaggacctcgagacggcccgggctgccggcacgcccagcgccatgctggaccgattggcgttggacaccaagcgggtcgagggcatcgccgccgggctgcgccaggtggccgggctgcccgacccggtcggggaggtgctgcgcggctacacgttgccgaacgggctgcagctgcgccagcagcgggttccgctcggcgtggtcggaatgatctacgagggccggcccaacgtcaccgtggacgcgttcggtttggcgctcaagtccggcaacgcggtgctgttgcggggcagctcctcggcgacgcggtccaaccaggcgctggtccaggtgttgcgggcctcgctggtcagcgaggacctgcccgccgacgcggtgcagctgctgtcggccgacgaccgcgccacggtgacgcacctgatccaggcccgcggcctggtggacgtggtgattccgcgcggcggggcgaacctgatcaacgcggtggtgcgcgacgcccaggttcccaccatcgagaccggggtgggcaactgccacgtgtacgtgcacgaaggcgccgacctggaggtggcggagcgcgtgctgctgaattccaagacgcgccggcccagcgtctgcaatgcggccgagacgctgctggtggacgccgccatcgcggaggaggcgttgccccggctcgtgaccgcgctgcaggacgccggggtgaccgtgcacggcggcttcgcccgcgacgccaccgaggacgacctgcggcgcgagtacctgtcgatggacatcgcggtggcggtggtcgacggcgtcgacgccgcgatcgcccacatcaacgagtacggcaccgggcacaccgaggccatcgtcacgacgaatatggctgcggcgcaacggtttaccgacggtgtcgatgccgccgcggtgatggtgaacgcgtccaccgcgttcaccgacggcgagcagttcgggttcggcgccgagatcggcatctccacccagaaattgcacgcccgcggtcccatggggctgcccgaattgacgtcgaccaaatggattgcgtggggagacggacagacccgtccggcc

SEQ ID NO: 25813 - DNA, 810 bp, Mycobacterium avium
ttgggcatcgtgcagcagcgcagcgacaaggccggcccggtgacggcggccgccggtgtgccgttgcaccgccagctgtttctggtgttgcacgacgaaatcgaccgcggcgtcatcgccccgggtgaggcgttgcccaccgagcagacgctgtgcgatcagttcggggtctctcgcatcacggtgcgacgggcgctggcggacctggccgcgcagggctacatcgagcgccggcagggcgtgggttcctttgtacgccagcatgatccggccgatgtgccgacagggcgctcatacctgcagggactgcggcagacccagtttgaaaccgaggccgaagtcgtcgagctgggggtgcggtccgcgccccgggcggtcgccgaggccctggggcgctccggcgagttgttacacatcgtgcgggtgcgccggcagcgccgcacccgcgagccgctgatggtgaccgacgcctggctgccgccggagttggccccggtgctgaccgagcgcgcgctgcggcgcgcgccgctgtatgagctgctgtcggcgaacggggtcgccgtggatcgggtgcggcacgagatcacggccgaaatcgccggtccgcgcaacgcgcaactgctcgacgtgccgatcggtgccgccctgctgagggtcaaccggctcgtctacgtcggcgaccgtccgcaccaccacgtctcggcgctgttgtcgccgagccgaagtcgggtgctgctcagccagtccgccgacgacatggagaccggcgacggcctgcggatcgcccacgacgtcggcggcccgcgcggc

SEQ ID NO: 25814 - DNA, 1503 bp, Mycobacterium avium
atgactgacaccacgatttcgaacggcgtgaccgaacaactggtgcatttcgatctggtgatcggaggggagtcagtcgcggccgaatcgggacgcacgtacgacagcatcgatccgtacaccgcactgccgtgggcgcgcgttcccgactgcgggcctgctgacgtggaccgtgcggtggccgccgcgcgcgccgcgttgcgtgggccatggggtcagttgaccggtacggcgcggggcaaattgttgtggcggttgggtgaactcatcgcacgcgaggcggagagcctggccgagttggaggtccgcgacggcggcaagctcgtccgcgaaatgatcggccagatgaaggcgctgccggactattacatctactacgccgggctcgccgacaagctgcagggcgaggtcgttccggtcgacaaacccaacttcttcgtctacacgcgccacgagccggtcggcgtggtcggtgcgatcacgccgtggaactcaccactgctgctgttgacgtggaagctcgcagcggggctggctgcggggtgcaccttcgtcgtcaagccgagcgaccacacgcccgcttcgacgctcgccttcgcgaagctgttcgccgaggccggttttccgcccggcgtcatcaacgtcgtcaccggttggggcccgcagaccggtgccgcgctggcggcgcatccggatgtcgacaagatcgcattcaccgggtccaccgcaaccggaatctcggtgggcaaggccgcaatcgacaacatgacccgcttcaccctggagttgggcggcaagtccgcacaggtggtgttcgacgatgccgacctcgacgctgcggccaacggcgtgatcgcaggcgtattcgccgcgacggggcagacctgcctggccggctcgcgcctgctcgtccacgagagcgtcgccgacgcgttggtcgagcgcatcgtcgcccgcgcgtcgaccatcaaactcggggacccgaaggatccggcgaccgagatgggtccggtatccaatcagccgcagtacgagaaggtgttgtcgcacttcgcgtctgctcgcgagcagggggccacggtggcctacggcggcgagccggccggcgagctcggcggcttcttcgtcaagccgacggtgctgaccggcgtcgaccgttccatgcgggccgtcgccgaggaggtcttcgggcccgtcctcgcagtgatgaccttcaccgacgaggacgaggccatcgctgcagccaacgacaccgagttcggattggccgccggcgtgtggaccaaggatgtgcatcgcgcgcatcgcgtcgcggcgcggttgaacgccggcacggtgtgggtcaatgcgtatcgcgttgtctcaccgcatgttccgtttggcggcatgggacatagcggcatcggccgtgagaacggcatcgacgccgtgaaggacttcaccgagacaaaggcggtgtgggtggaactgtccggggcgacccgggacccgttcacccttggc

SEQ ID NO: 25815 - DNA, 717 bp, Mycobacterium avium
atgtggctggcctcgggaagcggctacgtcaccgagatctgcgcagggtctggaatcgattgggtactgctggattccgagcatgcgcccaacgatctgcgcaccattctcgagcagttgcaagtgctttccgggtaccccgacgtcgacgtgcttgtgcgaccgccgtccgccgaccccgtgttcatcaagaggttgctcgacgtcggggcgcagaatctgatcgtcccgatgatcgacgacgcgggtgaagccgcaagggcggtggcggccacccgctacccacctgaaggcatccgcggcgtcggaagcgcgcttgcccgggcatcccggtggaaccgcatctccgactatctcgcgaccgcggacgcatcggtatcgctgaccgttcaagtggagtcgctggccgggatggaacatctgggcgatatcgcagaagtcgacggggtggacgcggtgttcatcggacccgccgacctggcggcgtcgatgggcaggctcgggcagccggagcacccagacgtggtgaacaccatcgagactgcgctggcagccatcgtggagctcggcaagagcgcgggggtcaacgcgttcaacaaggcgatcgcgcagcgatacctcgcagcgggggcgagtttcgttctggtcggtgccgacgtggcattgctcgcccggggcgccgagaagctggtcgacgagtacaaggagatgcgttca

SEQ ID NO: 25816 - DNA, 1884 bp, Mycobacterium avium
atgactcactacactccgctgctggtggcgctgccgctggcgggtgccgcgatcctgttgttcggcgggcgacgcaccgaccggtgggggcattggctgggttgcgccaccgccgtggcggcgttcgtggtcggcgtcggcctgctggatgagttgctcggccgtcccgccgaccagcgcgccatccacgaaagggtgttcagctggatcccggtcggccagctgcaggtggacctggggctgcagatcgaccagctgtcggtgtgtttcgtgttgctgatcaccggcgtggggtcgctgatccacatctactcggtggcctacatggccgaagatgccgaccgccgaaggtttttcggctacctcaacctgttcctggcgtccatgctgctgctggtgatcgccgacaactacgtggtgctctacgtcggctgggagggcgtgggcctggcgtcctacctgctgatcgggttctggtaccacaagccgacggcggccaccgcggccaagaaggcgttcgtgatgaaccgggtcggcgacgccgggctggcattgggaatgttcttgatgttcagcactttcgggacgctgtcctacgccggggtgttcgcgggggcgccggcggccggtcggggcgcgctgaccgcgatgggtctgctgttgctgctgggggcctgcgccaaatccgcacaggtgccgctgcaggcctggctgggcgacgccatggagggccccaccccggtgtccgcgctgatccacgccgccaccatggtgaccgcgggcgtgtacctgatcgtgcggtccaacccgctgtacaacctgtcgccggatgcgcaactggcggtggtgatcgtgggtgcggtcaccttgctgctgggtgccttcatcggctgcgccaaggacgacatcaagcgggcgctggcggcttcgaccatgagccagatcggctacatggtgctggccgccgggttgggcccggccggctacgcgttcgcgatcatgcatctgctgacccacgggttcttcaaagccggcctgttcctcggctccggcgcggtgatccacgcgatgcacgaggagcaggacatgcggcgctacggcgggctgcgggccgcgctgccggtcacgttcgtcaccttcgggttgggctacctggccatcatcggggtgccgccgttcgcgggcttcttctccaaggacgccatcatcgaggccgcgctggccgccggcggcgtccgcgggtacctgctcggcggggcggcgctgctgggcgccggcgtcaccgcgttctacatgacccgggtgatgctgatgaccttcttcggcgaaaagcgttgggccccaggcagccatccgcacgaggcgccggggctgatgacctggccgatgatcctgctggccgtcgggtcggtgttctccggcggactgttcgcggtgggcggcacgctgcagcgctggctggagccggtggtcggcaggcacgaagaggtgactcacgccgtcccggtgtggatcagcaccgcgctggcgctgggcgtcgtggccgtcggcatcgcggtggcctaccggctctacgccaccgcgcccatccccagggtggcgccgttgtcggtgtcgccgctgaccacggcggtccgtaacgacttctacggcgatgccttcaacgaggaggtgttcatgcgccccggcgcgcaactgacccacgcgctcgtcgaggtcgacgacgcgggcgtcgacggctcggtcaacgcactggcggcgttggtgagcgcgacgtcgaatcgcttgcggggcctgcaaaccggcttcgcccgcaactatgccctgtcgatgctgaccggcgccgtgctggtgatcgcgctgatcctggcggtgcggctgtgg

SEQ ID NO: 25817 - DNA, 1878 bp, Mycobacterium avium
atgaccaccccgcaacacctgtccgaccgctacgaactcggcgagatcctcggcttcggcggcatgtccgaggttcacctggcccgtgacgtccggctgcaccgcgacgtcgcggtcaaggtgctgcgcgcggacctggcccgcgatcccagcttttacctgcgcttccggcgcgaggcgcaaaacgccgccgcgctcaaccacccgtccatcgtcgccgtctacgacaccggcgaggcggagacgccctccgggccgctgccctacatcgtcatggagtacgtcgacggcgtgacgctgcgcgacatcgtgcacaccgacgggccgttgccgccgcggcgggccatcgagatcatcgccgacgcctgccaggcgctgaacttcagccaccagaacggcatcatccaccgcgacgtcaagccggcgaacatcatgatcagcaccaccaatgccgtcaaggtgatggacttcggcatcgcccgcgcgatcgccgacagcggcaacagcgtcacccagaccgcggcggtgatcggaaccgcgcagtacctctcgcccgagcaggcccgcggcgacgccgtcgacgcgcgctcggacgtctactcgctgggctgcgtgctgtacgaaatcctcactggcgagccgcctttcaccggcgactcgccggtggcggtggcctaccagcatgtccgcgaagacccggtgccgccgtcgcagcggcacgaaggcatctccgccgacctcgacgccgtcgtgctcaaggcgctggccaaaaacccggacaaccgctatcagaccgcggccgaaatgcgcgccgatctggtccgggtgcacaacggcgaaaagccggaagcgccaaaggttctcaccgacgccgagcgcagctcgctgttgtcgtccggtgccggggccgcgggtccgtcgcgcaccgatccgctgcctcgccaggtgctcgcggacagcggcgaggaccgcacggtgggttcggtgggccgttggatcgtggcggtggccgcgctggcggtcctgaccatcatcgtcgtcatcgcgttcaacaccttcggcggcggcgcccgcgacgtccaggtgcccgacgtgcgcgggcaggtgtccgccgatgccattgcggcgctgcagaaccgcggcttcaagacccgcaccctgcagaagccggactcggccatcccgcccgaccacgtcatcggcaccgaccccggcgccaacgcgtcggtcagcgcgggcgacgagatcaccatcaacgtctccaccgggccggagcagcgcgaggtgcccgacgtctcgtcgctgagctactccgacgcggtcaccaagctcaaggccgccgggttcagcaagttcaagcaggcgaactctccgtccacacccgagttgttgggcaaggtgatcgggaccaacccgccggccaaccagacgtcggcgatcaccaacgtcatcaccctcatcgtcggctcggggccggagaccaagcaggtgcccgacatcgccgggcaaaccgtcgacatcgcgcagaagaacctgaccgtctacggcttcaccaagatcacccaggtgcaggtggacagcccccgcccggccggcgaggtgatcggcaccaatccgcccaagggacaaacggttccggtggattcggtgatcgaactgcaggtgtccaagggcaatcagttcatcatgcccgacctgtccgggatgttttggaccgatgccgaaccgcggctacgggcgctgggctggacggggatcctggacaagggtcccgacgtcgacgccggcggcgcccagtcccaccgggtggtgtatcagaacccgccggccggggccggggtcaaccgggacgggatcatcacgctgaagttcggtcag

SEQ ID NO: 25818 - DNA, 1332 bp, Mycobacterium avium
atgaacgacccggtcgtcactgggctcctgaccgacaaatacgagttgaccatgttggcggccgcattgcgcgacggcagcgccggtcggcggaccaccttcgaactgttcgcgcgccggcttcccgagggacgccggtacggcgtggtgggcggaaccggccggctgctcgaggcgctgccgcagttcaccttcggcgacgaggcctgccagtcgctgcggcaattcctcgatcccgacacgctgcggtacctgcgcgattttcggttcggcggcgacatcgacggctacgccgagggcgagctgtatttccccgggtcgccggtgctgtcggtgaccgggaccttcgcggaatgcgtggtgctcgaaacgctggcgctgtcgatcttcaaccacgacaccgcgatcgcgtccgccgcggcgcgcatggtcagcgcggccaggggccggccgctgatcgagatggggtcacggcgcacgcatgagcaggcggcggtggccgcggcccgcgctgcctacatcgccggcttcgccgcctcctcgaacttggaggcccagcgctgctacggaattccggccgagggcacctcggcgcacgcgttcaccatgctgcacgcccgcaccgacgccgccgcggaatccactgaactggcggcgtttcgggcacaggtgcaggcgctcggcgtcgacaccacgctgctggtggacacctacgacgtgacgaccggggtggccaacgcggtgacggcggccggcaccgggctgggcgcggtgcgcatcgactccggcgagctgggcgtgctggcccgccaggtccgcgagcagctggacaggctcggagccacccgcacccgcatcgtggtctccggtgacctcgacgagttctccatcgccgcgctggccgccgagccggtggacagctacggcgtgggcacctcagtggtgaccggttcgggcgccccgacggcgaacatggtctacaagctcgtcgaggtggacggcctgccggtgcagaagcgcagcagccacaaggaatcccggggcgggcgcaaggaggcgctgcggctctcccgggacaccggcatcatcaccgaggagctggtctatccggccggccatcggccggacgtcgccgagccggcccgggcggtgacggtgccgttggtgcgcggcggcgagctggtgtccaaaccgaacctcgccgcggcgcgcgaactggtagcttccgggctgcgcagtctgccgtgggaggggctgaacctgtcccacggcgaacccgcgatcccgaccacccagatcccggccgaccggcgacggccgcccggcatcgac

SEQ ID NO: 25819 - DNA, 390 bp, Mycobacterium avium
gtgtccaccccggtccctcgaaagcgccgtcgccggcccgcgctgatcgctctggtgatcatcgcggcgtgcggctgcctggcgctgggctggtggcagtggaccaggtttcagtccgtctccggctcgttccagaacctcggctacgcgctgcaatggccgctgttcgcgtggttctgcgtgtacgcctaccgcaaattcgttcgctacgaagaggaaccgccccggccgcgcgacaccgccgccgtgacggagatacccgccgggctgctgcccgagcggcccaggcccaccccccggccgcccgacgacccggcgctgcgggagtacaaccgttatctggccgagctcgccgcccaggacgccgcacaacaggacaggacaaccaca

SEQ ID NO: 25820 - DNA, 825 bp, Mycobacterium avium
atgagctcggcactggcgcccgtcgggatcttcgactccggcgtcggcggactgaccgtcgcgcgggccatcatcgaccagctgcccgacgagcacatcatctacgtcggcgacaccggccacgggccgtacggcccgctgagcattcccgaggtgcgggcgcacgcgctggccatcggcgacgacctggtcggccgcggggtcaaggcgttggtgatcgcgtgcaacaccgcgtcggcggcctgcctgcgggatgcccgcgaacgctacgaggtgcccgtcgtcgaggtgatcctgcccgcggtgcgccgcgcggtcgccaccacgcgcaacggccgcatcggggtgatcggcacccaggcgaccatcaattcgcacgcctaccaggacgcgttcgccgccgcccgcgacaccgagatcaccgcggtggcctgtccccggttcgtcgacttcgtcgagcgcggggtgaccagcggccgtcaggtgctcgggctggccgagggttatctggagccgctgcagcgcgcgcaggtcgacacgctggtgctcggttgcacgcactacccgttgctgtcggggctgatccagttggcgatgggggacaacgtgacgttggtgtccagcgccgaggagaccgccaaggaggtgctgcgggtgctcaccgagcgggacctgctgcacccgcaccccgacgatccccgcgccgccggcccgtcccgggtgttcgaagccaccggcgaccccgaggcattcacccgattggcggcccgcttcctgggtccggccgtctcgggtgtccggcctgtccatcatgtgcgtattgac

SEQ ID NO: 25821 - DNA, 798 bp, Mycobacterium avium
atgatattcggacgtcgggcacccccggccgggggccaattcaagggaggcgtggtacaggtgtccttgctcagtggtcagaccgcggtcatcacaggtggcgcacaaggtttggggttcgcgatcgccgaacggttcgtcgccgaaggggcgcgggtcgtcctcggcgacgtcaatctggaggcgacgcaaaccgcggccaaacagctgggcggtgaccaggtggcgctggccgtgcgctgcgacgtcaccaagtcgtccgaggtcgaaacgctgatccagaccgccgtcgagcggttcggcggcctggacatcatggtcaacaacgccgggatcacccgggacgccaccatgcgcaagatgaccgaggagcagttcgatcaggtcatcgccgtgcacttgaagggcacctggaacggcacccggttggcggcggcgatcatgcgggaaaacaagcgcggcgccatcatcaacatgtcctcggtgtcgggcaaggtcggcatggtcggccagaccaactactcggcggccaaggccggcatcgtgggcatgaccaaggcggccgccaaggagctggcctacctgggtgtgcgggtgaacgcgatcgcccccggtttgatccgctcggcgatgacagaggccatgccgcaacgcatttgggactccaaggtggccgaggtgccgatgggccgggccggcgagcccagcgaggtcgccagcgtggcgctgtttttggcctccgacatgtcgtcgtacatgaccggcaccgtcatggagatcacgggcggccggcacctg

SEQ ID NO: 25822 - DNA, 612 bp, Mycobacterium avium
ttgagcccgctgctggtcgccagccgcaatcgcaagaagctggccgagttgcgccgcgtcctcgacgcggccggtgtgacggggttgacgctggtgtcgctcgacgatgtggcgccgttcgaggaggccccggagaccggtgcggtgttcgaggagaacgcgttggccaaggcccgggacgcgttcgacgcgaccggtctggcgagcgtggccgacgattccgggctggaggtggccgcgctgaacggcatgcccggcgtgctgtcggcccgctggtcgggccgccacggcgacgacgccgccaacaccgcgttgctactggcgcaattgcgggatgtgcccgacgagcggcgtgccgcgtcgttcgtgtccgcgtgcgcgctggtgtcggcgtcgggggaggtcgtcgttcgcggcgagtggccgggccgcatcgcctgcgagccgcgcggggacggcggcttcggctacgacccggtcttcgtccccgacgatgccgggggccgcaccgcggcacagctcagcccggcggagaaggacgcggtgtcgcatcgcggtcgcgcgctgcggctgctggtgccggcgctggaaacgctggcccgcgcgcggggt

SEQ ID NO: 25823 - DNA, 1179 bp, Mycobacterium avium
atgacgacgtcggtgatcgttgctggagcgcggacacccatcggcaagctgatgggttcgctgaaggatttctccgccagcgacctgggtgccatcgccatcgccggcgcgctggagaaggccaacgtcccggccgacctggtcgagtacgtgatcatggggcaggtgttgacggccggggccggtcagatgccggcccggcaggcggccgtggcggccggcatcggttgggacgtgccggcgttgagcatcaacaagatgtgtctgtccgggatcgacgccatcgccctggccgaccagctgattcgcgccggagagttcgacgtggtggtagccggcggtcaggagtcgatgaccaaggcgccgcacctgctgatggacagccgcgcgggctacaagtacggcgacgtgacggtcctggaccacatggcctacgacggcctgcacgacgtgttcaccgaccagccgatgggcgcgctcaccgagcagcgcaacgacgtcgacaagttcacccgcgaagagcaggaccagtacgccgcacggtcgcatcagcgggcggccgcggcgtggaaggacggcgtgttcaccgacgaggtggtgccggtgaacatcccgcagcgcaagggcgatccgttgcagttcaccgaggacgagggcatccgggccaacaccaccgccgagtcgctggccggcctcaagccggcgttccgcaaggacggcaccattaccgccgggtcggcctcgcagatctccgacggcgcggccgcggtggtcgtgatgagcaaggccaaggcccagcagctcgggctgagctggctggccgagatcggtgcgcacggggtggtcgccggaccggactccaccctgcagtcgcagccggccaacgccatcaagaaagcgctcggtcgcgagggcatctccgtcgaccagctcgacgtggtggagatcaacgaggcgtttgcggccgtggcgctggcctcgacccgcgaactcggcgtgaatcccgacatcgtcaacgtcaacggcggtgcgatcgcggtcgggcacccgatcgggatgtcgggggcgcggatcaccctgcatgccgcgctggaattgtcgcggcgcggctcgggctacgccgtcgcggccctgtgcggggccggcgggcagggcgacgcgctgattctgcgggcgggt

SEQ ID NO: 25824 - DNA, 450 bp, Mycobacterium avium
atggacagcacgggacgcaacctggtctatttctcctcggtctcggagaatacccaccgcttcgtgcagaagctgggcatcccggccatccggataccgctgcacgggcggatcgaggtggaccacccgtacgtcctgctgctgcccacctacggcggcgggcgggccacgcccgacctcaacgccgggggctatgtccccaaacaggtcatcgcctttttgaacaatgagcacaaccgttcgttgatccgcggcgtcatcgccgcgggcaacaacaacttcggcgccgaattcgcctacgcgggaaacgtggtctcgcgcaagtgcggcgttccgtacctctaccgcttcgaactgatgggaacccaggacgacgtggacgccgtccgagcgggcttagctgaattttggaaggaacagacgtgtcaccaaccgtcgctgcagagcctg

SEQ ID NO: 25825 - DNA, 2163 bp, Mycobacterium avium
gtgtcaccaaccgtcgctgcagagcctgtaaccgccggcgctcatggcttgcccgacgaaacggactaccatgcgctgaacgcgatgctgaacctgtacgacgcggacggcaagatccagttcgacaaggacgtcctcgccgcgcgccagtactttctgcagcacgtcaaccagaacaccgtcttcttccacaatcaggacgagaaactcgactacctgatccgcgaaaactattacgagcgtgaggttctcgaccagtactcgcgcaacttcgtcaaggcgctgctggaccgcgcctacgccaagaagttccgcttcccgacctttctgggcgccttcaagtactatacctcctacacgctgaagaccttcgacggcaagcgctacctggagcgcttcgaggaccgggtggtgatggtcgcgctcaccctggccgccggcgacaccgggctggccgagaagctggtcgacgagatcatcgagggccgtttccagccggccacgccgacgtttttgaactccggcaagaagcagcgcggcgagccggtgagctgctttctgctgcgcatcgaggacaacatggagtccatcgggcgttcgatcaactccgcgctgcagctgtccaagcgcggcggcggagtcgcgttgctgctgaccaacattcgcgagcacggcgcgccgatcaagaacatcgagaaccagtcctcgggcgtcatccccatcatgaagctgctggaggactcgttctcctacgccaaccagctcggggcgcgccagggggccggcgcggtgtacctgcacgcccatcaccccgacatctaccgcttcctggacaccaagcgcgagaacgccgacgagaagatccggatcaagacgctgagcctgggcgtggtgatccccgacatcaccttcgagctggcgaagaagaacgaggacatgtacctgttctcgccgtacgacgtggaacgcgtgtacgggctgccgttcgccgacatctcggtgaccgagaagtactacgagatggtcgacgacgcccgcatccgcaagaccaagatcaaggcgcgggagttcttccagacgctggccgagctgcagttcgagtcgggctacccgtacatcatgttcgaggacacggtgaaccgggccaatcccatcgacggcaagatcacccactccaacctgtgctcggagatcctgcaggtctccacgccgtcgttgttcaacgacgacctgtcgtatgccaaagtgggcaaggacatttcgtgcaacctgggttcgctgaacatcgccaagacgatggactcgcccgacttcgcccagaccatcgaggtggccatccgggcgctgaccgccgtcagcgaccagacgcacatcacctcggtgccctcaatcgagcagggcaacaacgattctcacgcgatcgggctcgggcagatgaacctgcacgggtacctggcccgcgagggcatcttctacggctccgaagagggcatcgacttcaccaacatctacttctacacggtgctctatcacgcgctgcgcgcgtcgaaccgcatcgcgatcgaacgcggcacgcacttcaagggtttcgagcgctccaagtacgcgtcgggggagttcttcgacaagtacaccgagcaggtgtgggagcccgcgaccgagaaggtgcgccagctcttcgccgacgccggcatccgcatccccacccaggacgactggaagcggctgaaggagtcggtgcaggcgcacggcatctacaaccagaacctgcaggcggtgccgccgaccgggtcgatctcctacatcaaccactcgacgagctcgatccacccgatcgtgtcgaaggtcgagatccgcaaggagggcaagatcgggcgggtctactacccggcgccctacatgaccaacgacaacctggagtactaccaggacgcctacgagatcggttacgagaagatcatcgacacctacgccgcggccacccagcacgtcgaccaggggctgagcctgacgctgttcttcaaggacaccgccaccacccgcgacgtcaacaaggcgcagatctacgcctggcgcaagggcatcaagacgctctactacatccggttgcgccagatggcgctggagggaaccgaggtcgagggctgcgtgtcctgcatgctg

SEQ ID NO: 25826 - DNA, 972 bp, Mycobacterium avium
gtgagcgaaaacatgaagctgattgaccgcctttcggcgatcaactggaaccggctgcaagacgacaaggacgccgaggtgtgggaccgcctgaccggcaacttctggctgcccgagaaggtgccggtgtccaacgacctgcagtcgtgggccaccctgaccgcccacgagaagcagatgaccatgcgggtgttcaccggcctgacgctgctggacaccatccagggcacggtcggcgcggtcagcctaatccccgatgcgctgaccccgcacgaggaggccgtctacaccaacatcgccttcatggagtcggtgcacgcgcgcagctacagcaacatcttctccacactgtgttcgaccgccgagatcgatgacgcgttccgctggtcggaggagaaccccaacctgcagcgcaaggccgagatcgtgatgcagtactacaagggcgacgagccgctcaagcgcaaggtcgcctccacgctgctggagagcttcctgttctactccggcttctacctgccgatgtactggtcgagccgggccaagctgaccaacaccgccgacatgatccggctgatcatccgcgacgaggccgtgcacggctactacatcggctacaagtaccagcgcggcctggcgctggtcgacgacgccaaacgtcaagagctcaaggactatacgtacgaattgctgttcgagctctacgacaacgaggtggagtacacgcaggatctctacgacgaggtggggctgaccgaggacgtcaagaagttcctgcgctacaacgccaacaaggcgctgatgaacctcggctacgaggcgctgttcccgcgcgacgagaccgacgtgaacccggcgatcctgtcggcgctgtcgcccaacgccgacgagaaccacgacttcttctccggctcgggctcgtcctacgtgatcggcaaggccgtcgtcaccgaggatgaggactgggacttc

SEQ ID NO: 25827 - DNA, 1038 bp, Mycobacterium avium
atgagcaccgtttcggcgtacgccgccacgtcggcgaccgaaccattgaccaagaccaccatcgagcggcgcgaccccggcccgcgcgacgtggccatcgacatcaagttcgccggcatctgccactccgacatccacaccgcgaaaggtgaatggggccacacgaattacccggtggtggtgggccacgagatcgccggcgtcgtcaccgaggtgggcgcagaggtcaccaagtacaaggtgggcgaccacgtcggcgtgggctgcatggtgaactcctgccggcagtgcagcagctgtacggccgggctggagcagtactgcaagcgcggcgcgaccttcacctacaactcgatcgacagggacggctcggtcacccagggcggctacagccaggcgatcgtggtcgacgaggacttcgtcgtgcgcatccccgactcgctgccgctggacaaggcggccccgctgctgtgcgcgggcatcacgctgttctcgccgctgcggcactggaaggccgggcccggcacccggttggcgatcgtcggcctgggcggcctggggcacatgggcgtcaagctgggtgcggcgatgggcgccgaggtgacggtgctgtcgcagtcgctgaagaagatggaggacgggctgcggctgggcgccaagcactaccacgccaccgccgaccccgacaccttcacgaagctgcgcggcagcttcgacctgatgctcaacaccgtgtcggcgaacctcaagctcaacgactatctgagcctgctcgacgtcgacggcacgctggtcgagctgggcatccccgagcacccgatggaggtgggcgcgttcccgctggcgctggcgcggcgcagcctgtccgggtcgaacatcggcggcatcgccgagacccaggagatgctggacttctgcgccgagcacaacgtgacgccggagatcgagctgatcgagcccgactacatcaacgaggcctacgagcgcgtgctggccagcgacgtgcgctaccgcttcgtcatcgacatctcgaagctg

SEQ ID NO: 25828 - DNA, 1455 bp, Mycobacterium avium
atggcaacttcaccgcaggcgaagctcgccgcagtgatcaaatccgcgcgcgactacatgcgcaaggacgccgggctcaacggcgaccttgaccgcatcccacaactggcttggctgctgttcctcaaagcctttgacggccttgaggaaaaccgcgagatcaccgaggagaacttccgtcccgcgatcgaggcgccgtaccgctggcgtgattgggcagcggacccgaacgggcggaccggcgacgcgctgctcaccttcgtcaacaacgagctgctgccatacctgcgcggcctgtccggcaccgggtcccacgatccgcgtgatgtcctcgccgccgtcttcaaagaaacctacaaccggatgctgtccggataccttctccgcgatgtcgtcaacaaggttaacgagatcaacttcgcctcatccgacgacatccacacgatggcgcacctctacgaatcgatgctgcgcgagatgcgcgacgctgcgggggattctggcgaattctacacaccgcggccgatcatccggttcatcgtccagcaggtcgacccacggctcggcgaggtcattctcgacccagcgtgcgggaccggcgggttcctcgtcgaagcgctcgaacacctcagcccgaaggtgaccacgacagcccaactccgagccctgcacgagaacctacgtgggatcgagaaaaagccgctgccgttcctgctcgggatgatgaacctcgtcctgcacggcgtcggtcagcccaacatcactcgcggcaatgcgctcgccgaatccatcacgcagatcagcaaggcgcggcgcgtcgacgtgatactcactaatcccccgtttggcggcgaggaagagaagtcgatccaagccaatttccccgccgacaaacagaccgccgaaactgcctggctgttcctccaactcgtcatccgcatgctcaaggacggcggccgatgcggcatcgtcgtgccaaacggtctgctattcggcggtggtgtcggtgcgcggatcaagaagcaactgctcaccgagtgcaacctgcatacgattgtccgcctgcctgacggcgccttcgcgccctacacggatattccgtcgaatctgctgttcttcgacaagactggccggacgaaagagatttggtactacgagatctcgccgcctgagggccgcaagaagtactcgaagtcaaagcccatgcgcttcgaggagttcgcggactgccaggtctggtggtcgaaccgcgtcgagaacgagcgcgcttggcgagtgccgatcgccgacatcgaggccaatgatatgtacaacctcgatctgcgtaatccgaaccgaggcgacgacctcgcccaccgcccgccagcagaactgctggctgaactgatcgacaccgaacgttcgatcttggcgcttttggatggcctccagcgcgaggtcactggggagggccca

SEQ ID NO: 25829 - DNA, 966 bp, Mycobacterium avium
atggaccagatcatgaccggcgaggcgagcccggcccagatcgcggccttcgcggtggcgatgcaggtgaaggtccccacctcggccgaggtcatcgagctggccgaggtgatgctgaaccacgccctgccgttcccggccggcgcgatccgcgacgacaccgtcgacatcgtcggcaccggcggcgacggcgtcaacaccgtcaacctgtccacgatggcggcgatcgtggccgcggccgcgggggtgccggtggtcaaacacggcaaccgcgcggcgtcgtcgctctcgggcggcgcggacacgctcgaggagctcggggtgcggatcgacctgggccccgagcaggtcgcgcgcagtgtcgccgaagtcggcatcggcttctgcttcgcgccgctgttccacccgtcctaccggcatacctcggcggtgcgccgcgagatcggcgtgccgacggtgttcaatctgcttgggccgcttaccaatccggctcgaccgcgggccggattgatcggctgcgcgttcgccgagctggccgaggtgatggccggggtgttcgccgcccggcgctccagtgtgctggtggtgcacggcgacgacgggctcgacgagttgaccaccacgacgaccagcaccatctggcgggtgcaggccggcacggtggaccggttgacgttcgatccggccgggttcggtttcccgcgggccgagctcgacgatctgttgggcggtgacgcgcagaccaacgccgcggaggtgcgggcggtgctggccggcggccagggcccggtgcgcgacgccgtcgtcctcaacgccgccggcgcgatcgtggcgcacgccgggttatccagccgcgccgaatggttgccggcctgggaggacgggctggcccgcgccagtgccgccatcgactccggcgcggccgaacagctgctcgcgcgttgggtgcggttcggtcagcagctc

SEQ ID NO: 25830 - DNA, 1053 bp, Mycobacterium avium
atgacccagctcgctgatcgcccgaccggccacggcgaaaccctcaccgcggcagtgcaggacgtcgcgctcggcgcgcaggcgttgaccatggtgcaggcgctcaaccgcgccctgcacgacgcgatggccgccgacgagcgggtgctggtgttcggtgaagacgtcgcggtccagggcggggtcttccgggtgaccgaagggctggcggaggcgttcggcgagagtcgttgcttcgatacgccgttggcggaatccgcgatcatcggcatcgcggtggggctggcgctgcgcggcttcgtgccggtgcccgagatccagttcgacgggttctcctacccggcgttcgaccaagtggtcagccatctggcgaagtaccgcacccggacccgcggcgcgatcgacatgccggtgacggtccgggtaccgtcgttcggcggaatcggtgccgccgaacatcattcggaatccaccgagtcgtactgggcgcacaccgccggcctgaaggtggtggtgccgtccaacccggccgacgcgtactggctgctgcgccacgccatcgcctgcccggacccggtgatgtacctggagcccaagcgtcgctaccagggccgcggcctggtggacgccggccggcccgaaccgccgatcgggcgggcgatggtgcgccgggcggggaccgacgtgaccgtcgtgacctacggcagtctggtcgccacggcggtcggagccgccgaagaggctcagcaccaacgcggttggagcctggaggtcatcgacctgcggtcgttggtgccgctggacttcgacaccatcgcgacgtccatccaccggaccggtcggtgcgtggtgatgcacgaggggccgcggaccctgggttacggagccgagctggccgcccgcatccaggaggagttgttctacgaactggaggcgccggtgttgcgcgcgtgcggattcgacaccccctacccgccggcccggctcgagaagtggtggctgccgggcccggaccggctgctggactgcgtcgagcgcacgttggagctgccg

SEQ ID NO: 25831 - DNA, 1164 bp, Mycobacterium avium
gtgagcgacgagcgcgtcaaaccgtttctggtcccggatctcggcgagggactcgaagaggtgaccgtgacgcactggaacgtcgcggtgggcgacgacgtcgagctcaaccaggtgttgtgcacggtggagacggccaaggccgaggtggagctgcccagcccgtacgcggggcggatcgtcgaaatgaacggcgccgagggcgatgtgctcaaggtgggcgcggtgctggtgcggctggacaccgcccccgagagcgccgagccgccggcggccgagacggcgcccacactggtcggttacggcgccgatgccgggatcgacaccagccggcggaccgcccgcccgctggctgcccctccggtgcgcaagctggccaaggagctgatggtcgacctcggctcgctgcggccccgctccggcgccgtcatcacccgcgaggatgtgctctcggcggcccacggcaccggcaacggggccgaggtccggccggttcagggcgtccaggcccggatggccgacaaaatgaccttgtcgcacaaggagattccggccgcgacggttagcgtgcaggtcgactgcaccgcactggtccggctgtccgagcggctgggtccggcggagcagaggataacgccgttcgtgctgacgctgcggctgctggtcatcgcgttgcgccgcaacgagatcatgaactcgacctgggtcgacaccccgcaggggccgcaggtgcgcatcgagcatcgggtgcacctgggcgtcgcggtggccaccgaacggggcctgctggtgccggtcatcgccgacgcacacaccaagacgactcgtgaattagcaagtcgggcagcagaattgatctccggcgcgcgtgccggctcgctcacgccgggggagctgcggggatcgacgttcaccgtgtcgaacttcggggcgctgggcgtggacgacggtgtgcccgtgatcaaccaccccgaagcggccatcctggggatgggtgcgatcaagccacgcccggtggccgtcggcacggaggtcgtggtgcgcccgaccatgtcgctcagcgccgtgttcgaccaccgcatcgccgacggcgcgcaggcggctcgattcgtttgcgagctgcgggatttgatcgaatcgccggaaaccgcgctgctggatttg

SEQ ID NO: 25832 - DNA, 2133 bp, Mycobacterium avium
gtgggacgatgggatcatcgacccggccgacaccagaacctttgtcgggcttgctctttcggtgtgcgcgcaggcgccgttggagcccgtcggctacggcgtcttccggatgtgagtgcagtgttcgaaacggtattggtggccaaccgcggcgagatcgcggtgcgggtgatccgcaccctgcgccggctgggcatccggtcggtcgccgtctacagcgatcccgacgccgctgcgcggcatgtgctcgaggccgacgaagcggtgcggctggggccggccgcggcccgagacagctacctgaacatcgacaaggtcgtcgagacggcgacgcgcaccggggcgcaggcgatccatcccgggtacggattcctctccgagaacgccgatttcgctgcggcatgcgaacgggccggggtggtgttcctcggcccgccggcacgggcgatccaggtgatgggcgacaagatcaccgccaagaacgccgtcgccgaattcgacgtcccggtggtgcccggggtggccgaaccggggctgggcgacgacgaattggtggccgccgccgacgagatcggctacccggtgctgatcaagccgtcggcgggcggcggcggcaagggcatgcgcctggtggaagaaccgggcaggctgcgcgaggcgctggtgggcgcgcggcgcgaggccgcctcgtcgttcggcgacgacacgctgtttctggaacggtttgtgttgcgccccaggcacatcgaggtgcagatcctggccgacacgcacggcaacgtcgtgcatctcggcgaacgcgagtgcagcctgcagcggcgccatcaaaaggtcatcgaggaggcgccgtcgccgctgctcgacccggagacgcgggcgcggatcggggcggccgcctgcaataccgcccgcagcgtcgactacgtcggcgccggcacggtggagttcatcgtctccgccgatcggcccgacgagttcttcttcatggagatgaacacccggctgcaggtcgagcatccggtcaccgaggcggtgaccgggctggacctggtggaatggcagctgcgggtggccgccggcgagaagctggtgttcgcccaggacgacatcgaactgcgcgggcacgcgatcgaggcccgggtgtacgccgaggatccggcgcggggcttcctgcccaccggcggccgggtgctcggcgtcttcgagccctccggtgacggcgtgcgggtcgactcgtcgctgctgcccggcaccgtggtgggcagcgactacgacccgatgctgagcaaggtgatcgcccacggggccgaccgcgacgaggcgctggccagactcgaccgggcgttgagccacaccgcgatcctgggcgtccagaccaacgtcgagttcctgcgcttcctgctggccgacgaacgggtacgcgccggcgatctggacaccgcgctgctcgatgcgcggctggccgacttcacgccgctgcccgcacccgacgacgtgctcgccgcggccgggctgtaccggcaatcggcgctggccgcccgggcccgccgcttcgccggcaacccgtgggcggcgccgacggggtggcgggccggcggtagcccggcgccggtccgcaccgacatgcgcaccgcgctgcgcaccgagacggtgtcggtgtgggggccacccgaggccgccgaagtacaggtcggtgccggcgaaaggcttgcggccagcgcgcatctcgggccggaccggatcagtgtgacgctggacggccggcgccgcgactaccgctgggccgaggccgaccggcacctgtggatcgccgacgagcgcggaacctggcacctgcgcgaggccgaacagaccaccattcaccgcgccgccggcccgcagcgggccgagatcctcagcccgatgccgggcagcgtgatcgccgtccaaaccccttcgggcagcgacgtttccgaaggcgacgtggtggtcgtcgtggaggcgatgaagatggagcactcactggccgcgccggtttccggacgggtggaggtgctggtctgcgtcggcgaccaggtgagcgtggaccaggtgctggcccgggtggtgcccgaggaatccgacccgccggccgattcgagtaaggacgagaca

SEQ ID NO: 25833 - DNA, 1065 bp, Mycobacterium avium
atgaccgtcgacctgcaaccggtgcaactcgtcgccgctgacggcaccccgacctccgaacatcgctacagccgtgagcttcccgcggagacgctgagctggctctacgagatgatggtgctcacccgggagctcgacggcgaattcgtgaacctcaaacgccaaggccagttggcgctgttcgcgtcctgccgcggtcaggaagccgctcaggtgggcgcgacggcctgcctgcgcaaaaccgactggttgttcccccaataccgggaactcggcgcctttttggtgcgcggcatcccgcccggcaacgtcggggcggtgtggcgcggaacgtggcacggcggactgggattcaccgacaagtgctgcgctccgctgtccatcccgatcggcacccaaaccctgcacgcggtgggcgcggcgatggccgcccaacggctgggcgaagattcggtgacgatcgcgttcctgggcgacggagccaccagtgtgggcgacgtgcacgaggcgctgaacttcgccgccgtgttccgaacaccctgcgtgttcttcgtgcagaacaaccagtgggcgatttccctgccggtcgccaaacagaccgcctcaccgtcgttggcgcacaaggcaattggctacgggatgcccggcatccgggtggacggcaatgacgtgctggcctgctacgcggtgacggccgaggccgccgcccgggcccgcgccgggggcggcccgacgttgatcgaggcgatcacctaccggctggggccgcacaccacctccgatgacccgacccggtaccggacacaggacgaggtcgaccactgggccgcgctggacccgatcccgcgctaccgcagctacctgcagggccagggcctgtggtcggagcgcttggaggagcgggtgatcgggcgcgccacgcggatgcgcgccgagctgcgcgacgcggtgttcgatgcgcccgatctcgacgtcgacgaggtgttcaccgcggtgtacgccgaaatcacgccggagctgcaggcgcagcgccgtgcgctgcggaccgaactcgagaaaagtgat

SEQ ID NO: 25834 - DNA, 777 bp, Mycobacterium avium
gtgactgattccggcgtcttccccgtgggcaccttcacccccaacccgcggcccagtgcggtgccgaaaatgcttgccgcgcaatacggtttggagctcaagctgttgctgcgcaacggcgagcagctgctgctgaccatgttcatcccgatcacactgctggtagggctcaccctgttgccgctgggctcgttcggccagcaccgcgccgccaccttcaccccggtcatcatggcgctggccgtgatctccaccgcgttcaccgggcaggccatcgcggtggccttcgaccgccgctacggcgcgctgaaacgtcttggggcgacaccacttcccgtgtggggcatcatcgcgggcaagtcgctggccgtcgtcacggtggtgttcttgcaggcaatcctgttgggggccatcggctttgcgctgggatggcggccggcgttggccgcgctggcgctgggtgcggcggtgatcgcgctgggcaccgcggtgttcgcggccctggggctgctgctcggtgggacgctgcgggccgagatcgtgctcgcgctggccaacctgatgtggttcgtcttcgccggcctgggcgcgttgaccgtggacagcggagtgatcccggccggcgtcaaatgggcggcccggttgacgccatcgggcgcgctcaccgaggcgctctcccgggcgatgaccctgtcggcggactggttcgggatggccgtgctggtcgcgtggggggcgctcggcgcgctgggggcgctgcgctggttccgcttcacc

SEQ ID NO: 25835 - DNA, 462 bp, Mycobacterium avium
atgtatcaggacgtgatcctcgatcactacaagcacccgcagcatcgcgggttgcgggaaccgttcggcgccgaggtgtttcacgtcaacccggtctgcggtgacgaggtcaccctgcgggtgacgctgtccgacgacggcgagaccgtcgccgacgtctcctatgacggccagggctgctcgatcagccaggcggccacctcggtgctcaccgagcaggtgatcggccgcagcgtcgaggaggcgctcgacaccatcggtgcgttcgccgagatggtgtcctcgcgcggcgctgtcgagggcgacgaggacgtgctcggcgacgggatcgcgttcgccggagtggccaaatacccggcccgggtgaaatgcgcgctgctgggctggatggcgtgcaaagacgcgctggcccaagcctattcgagaagagaggtgaccgatgagcgaaaccaccgcgccgga

SEQ ID NO: 25836 - DNA, 780 bp, Mycobacterium avium
atgaccactctggaaatcaaagacctgcacgtcagcgtcgtgaacccgaacgccgccgaatccgagcgcgagatccccattctcaacggggtcgacctgacggtgaaatccggtgagacgcatgccttgatgggccccaacggctcgggcaagtcgacgctgtcctacgccatcgccggtcaccccaagtacacggtgacctccggctccatcaccctggacggccaggacgtgctggcgatgagcatcgacgagcgcgcccgcgccggcatctttctggccatgcagtaccccgtcgaggtgcccggcgtctcggtgtcgaacttcctgcgctcggcggcgaccgcggtgcgcggcgaggcccccaaactgcggcactgggtcaaagaggtcaaggcggccatgggtgccctcgagatcgaccccgcgttcgccgagcgcaacgtcaacgagggcttctccggcggggagaagaagcgccacgagatcctgcagctggagctgctcaagcccaagatcgccatcctcgacgagaccgactcggggctcgacgtcgacgcgctgcgggtggtcagcgagggcgtcaaccgctacgcgcaggccgagcacggcggcatcctgctgatcacccactacacccgcatcctgcgctacatccaccccgaatacgtgcacgtcttcgtcggcggccggatcgccgaatccggtggctcggagctggccgacgaactcgagcagaacggctacgtgcgcttcacccaagcggcggcagcgggggcg

SEQ ID NO: 25837 - DNA, 765 bp, Mycobacterium avium
cccgacgtgcacgacgccgggacggtcacgctgctgcagacgctgcgcgccgcgatcggcgtgccggtgggctccggactgatgcgcgggacgatcaacgtggttttgccggtaccgggcgatgtgcgcgggctggcccccggcacccagttcgagcaggacgcgctggccgccggcgaggcggtgatcgtcagcaatccgcaccagcccggcgccgccgtcgggctggtccccgaattctgttacgccgacgacgacgatgggtcccaggactacgcgctgaccgaattgtgcgcgctgagctggacggtgtattcgctgcccggggcgccggtgctggaccatcacgagctcggcgacgccgagtacacgttgcgctccgcggtgcgctcggccgccgagacgctgggcgccatcggcctcggctcggccgcgtccgacgtcgacgacccgcgggggctggtcgagcagttgctggaatcggcacggcagcaccgcattccggatcacgcgccgtcgcgcgcgttgcgggtgctggagaacgccgcgcacgtcgacgccatcatcgcggtgagcgccgggctgagtcggtcggattcgccggaccgattcgccgcgccgatcgccgccggtctggaaccgcttggcacacaatcgtcgtcggaggcgcgcatcgccggcgacgcgctgcggccgctgaccgcggtggtgcgttcggcgcggatggccgcggtcaccgcgatcctgcattccgcctggggcgat

SEQ ID NO: 25838 - DNA, 807 bp, Mycobacterium avium
atggcaggactgctcgacggcaaacggatcctggtcaccgggatcatcaccgactcgtcgatcgcgtttcacatcgccaaggtggcccaggaggccggggcgcagttggtgctgaccggcttcgaccggctgcggctgatccagcgcatcgtcgaccggctgccggagaaggccccgttgatcgagctcgacgtgcagaacgaggagcacctgaacaccctggcccagcgggtgaccgccgagatcggcgagggcaacaagctcgacggggtggtgcactcgatcggcttcatgccgcagaccggcatgggcatcaacccgttcttcgacgcgccgtacgaggatgtctccaaaggcattcacatctcggcgtattcgtacgcctcgctggccaaggcgctgctgccgatcatgaaccccggcgggtcgatcgtgggcatggacttcgaccccagccgggcgatgccggcctacaactggatgacggtcgcgaagagcgcgctggagtcggtcaaccggttcgtggcgcgcgaggccgggccgcacggcgtgcgctcgaatctcgttgcggcgggcccgatccgcacgctggcgatggccgggatcgtcggcggcgtgctcggcgaccaggcggccgagcagatccggctgctggaggagggctgggatcagcgggccccgatcggctggaacatgaaggaccccaccccggtggccaagacggtgtgcgcgctgctgtccgactggctgccggccaccaccggcaccatcatctacgccgacggcggcgccagcacccaattgctg

SEQ ID NO: 25839 - DNA, 765 bp, Mycobacterium avium
gtgactgacacggccaccgagaacaccaccgaaagtgccgccgacttcggcagaccggcattcgtctcccgctccgtcctggtgaccggaggaaaccggggcatcggtctggcgatcgcccagcggctggccgccgacggccacaaggtggccgtcacgcaccgcggatccggggcgcccgacgggctgttcggtgtcgagtgcgacgtcaccgacaacgacgccgtcgaccgcgccttcacagaggtggaggagcaccaggggccggtcgaggtgctggtgtccaacgccggtatttccaaggacgcattcctgatccggatgaccgaggagcggttcaccgaggtcatcaacgccaacctgaccggggcgttccgggtgacccagcgcgcggcgcgcagcatgcagaaaaagcggttcggccgcatcatctacatcggctcggtgtccggcatgtggggcatcggcaaccagtccaactacgcggccgccaaggccggcctgatcgggatggcccgctcgatctcccgcgaactgtccaaggcgggtgtgaccgccaacgtcgtcgcgcccggctacatcgacacggagatgacccgcgccctggacgagcggatccaggcgggcgcgctggagttcatcccggccaagcgggtcggcaccgccgcggaggtcgccggggccgtcagcttcctggcctccgaggacgccagttacatcgccggcgcggtgatccccgtcgacggcggtatgggcatgggccac

SEQ ID NO: 25840 - DNA, 1830 bp, Mycobacterium avium
gtgggtaacgcactgacccggctgctgggccggggtaaggacaccaccaagaccgccgagccggccgacgacgacggcgcggcggccgacaccggcgccgtcccggacggcgcgccggaggccgacgacgagcaggaccagcaggtcaccgacgagcccacgaaggcgtcccagaaggcgtccaagaaggcgtccacgaaggcctccaaaaaggagtccaagaaggcgccgaaggacaagccgaaggacgggagctcgcacagccggttcggggcctggctcagccggccgatgacgtcgtttcacctcatcatcgccatcgcggggctgctgaccacgctgggtctgatcatggtgctctcggcgtccggggtgcgctcctacgacgccgacgggtcggcctgggtgatcttcggcaagcaggtgctgtggacggtgatcgggctgatcgcctgctacgcctcgctgcggatgtcggtgcggttcatccggcgcgtcgcgttcaccggctacgtcgtcaccgtcatcctgctggtgctggtgctggtgcccgggatcggcaacctggccaacggatcgcgtaagtggttcgtcgtcgccgggttttccatgcagccctccgagctggccaagatcgccttcgccatctggggcgcgcacatgctggcggcccgccgcctggaccgggccagcctgcgtgagctgttgatcccgctggtgccggccgcggtgatcgcgctggcgctgatcgtggcgcagcccgacctcgggcagacggtttcgctgggcatcatcctgctggccctgctgtggtacgccggcctgccgctgcgggtgttcatcacctcgctgctggcggtgttcatggccggcgcggtgctagcgatgtcggccggataccgctccgaccgggtgcggtcctggatgaacccggagaacgacccgcaggacaccggctatcaggcccggcaggcgaaattcgcgctggcccacggcgggatcttcggcgacgggctcgggcagggcgtggcgaaatggaattacctgcccaacgcgcacaacgacttcatcttcgcgatcatcggcgaggagctcggcttcatcggcgccttcgggctgctggtgctgttcggcctgttcgcctacaccgggatgcggatcgcccgccgctcggccgacccgttcctgcggctgttgacggccaccaccacgatgtgggtgctgggccaggcgttcatcaacatcggttacgtgatcggcatcctgccggtcaccggcattcagctgccactcatctccgcgggtggaacatccacggcggcaacgcttttcatgatcgggatcatggccaatgcggcccgtcacgagcccgaggcggtggccgcgctgcgcgccggccgcgacgacaaggtgaaccggctgctgcgactgccgctgcccgagccgtattcgccgacgcggctggaggcgttccgcgatcgcaagcggaccggtccgcagcaggccccgaaatcggccccgaaatcgcgcccggcgccgcgcaagggcgccaagccggccgggcgcaagcccacccgcaacgccggccgcaacgccacccgcaatgccggcttccatgccgacgcgccgctgccgcccccgctgccccgcacggccggccgggcgggccgccaatctgggggtaacacccgcgcccgggcaaggcatcatggatctggccagcgctatgccagtctgggagccaactccggagcaaacccggcagccagttcgcgcgccggccagcgtcagccacggcgcgcacgggcattggaaggtcagcgttacggg

SEQ ID NO: 25841 - DNA, 1224 bp, Mycobacterium avium
gtgaacgacacggtcaagaagccgaccggcgggcggggggacgatcctctgcccgccggtgccgcgttgtcggccgttgcacctcatgagccggtgtcggtggtgctggccggcggcggcaccgccggccacgtcgagccggcgatggccgtcgccgacgcgctgaaggccctcgacccaaacgtccggatcacctcgctgggcaccgcgcgcgggctggagacccggctggtgcccgagcgcggctatgacctcgagctcatcacgccggtgccgctgccgcgcaagcccaccggcgacctggcccggctgccgtcgcgggtgtggcgggcggtgcgcgaaacccgggccgtgctccacgccgtggacgccgacgtggtgatcggattcggcggctacgtggccctgccggcctacctggccgcccgcggcgtctcaccgcgcaagcccagggtgccggtggtgatccacgaggccaacgccagcgccgggctggccaaccgggtgggcgcccgcaccgcgcagcgggtgctgtccgcggtggccgattgcggcctgcccggcgccgaggtggtcggcgtcccggtgcgcgaggccatcacctcgctggaccgcgcggcggtgcgcgccgaggcgcgtcggcacttcggattcaccgacgacgcccgggtgttgatggtgttcggcggctcgcagggcgcggcctcgctgaaccgggcggtgtccggcgccgccgcgcagctggccgccgccggcgtgtccgtgctgcacgcgcacggccccaaaaacacgctcgacctgcgcgaaccgcagcccggcgacccgccctacgtggcggtgccctacctggaccgaatggacctggcctacgcggccgccgacctggtgatctgccggtccggggcgatgacggtcgccgaggtgtcggcggtggggttgccggccatctacgtgccgctgccgatcggcaacggcgaacagcggctcaacgcgctgccggtggtcaacgcgggcggcggcatggtggtcgccgacgccgacttgacgccggagttggtcgcccgggaggtggccggcctggtgggcgacccgccgcggctggcggcgatgacgacggccgccgcgcgggtcgggcatcccgacgccgcgcgccgggtcgcccaggcggcgctggacatcggcagaacggcgcggcgcgcccgcggcgcgaccgggggcaggccg

SEQ ID NO: 25842 - DNA, 1722 bp, Mycobacterium avium
gtgacggcggacgtgttgccggagcgggtgtttgacgccgggccgctgcgcccgttcgccgacgccggcatcttcgaagcagcggatatccatgtggcgcaacggcttaccgcgctcaccggcgagtccgacgatcgggtggcgctggccgtcgccctgctggtgcgcgcgctgcggggcggttcggtgtgcgtcgatctgcgggcggtgccggcacaggtcggcgcggcggacctgccctggcccgccgccggcgactggctggccgcggtgcgggccagcccgctgctcgggccgccgccggtgctgcggttcttcggcgatctgctctacttcgaccggtactggctggaggaagagcaggtgtgcaccgatctgctggccctgtcggcgccggcgggcgatgtcgaatcctcttgctacgaaaggcttttcccgcccggctacgaagaacagcgggcggccgcccggatcgcggtgtcccaggcgctcaccgtgctgaccggcgggccgggcaccggcaagaccaccacggtcgcgcggctgctcgccctgctggtcgagcaggccgagcgcgccggtgagccgcggccgagyatcgcgctggccgccccgaccggcaaggcggccgcgcggctggccgaggcggtggccgccgagatcgagcacctcgacccggccgaccgggcgcggctggccgggctgaccggcaccacgctgcaccggctgctggggccgcgccccgatacgtcggtgcggttcaagcacaatcgcggcaaccggctgccacacgacatcatcgtggtcgacgagacgtcgatggtgtcgttgaccatgatggcccggctggccgaagccgtccggccggacacccggctgatcctggtcggcgatcccgaccagttggcctcggtggaggcgggcgccgtsctggccgatctggtcgacgggctggccggccgcgccggggtgcgggtcgccgcgctggccaccccgcaccggttcggcagcgcgatcggcgcgctggccgcggcgatccgggccggkgacgccgaccgggtggtggagttgttggcggccggcggtgagcacatcgagtgggtggattccgaacgcccggccgaccggctgcgcgaggtgctggtgtcgcacgcgctgcggttgcgctcggcggcgctgctgggcgcggctcaggccgcgctggccacgctggacgagcaccggctgctgtgtgcgcaccgcgacgggccgcacggggcggtgcggtggaacacgttggtgcacaactggattgccgaagaaaccggtcagccggcctggtcgcaatggtatgccgggcgtccgctgctggtgacggcgaacgactacgggctgcgtctgtacaacggcgacaccggcgtgacggtggccggtgcggacgggctgcgggccgtcatcgccggtgcggccggcccgctggacttcgccaccagccggctgggcgaggtggagacgatgcacgccatgaccatccacaagagtcagggcagccaggccgacgaggtgacggtgctgataccgccggaggattcgcggctgctgacccgggaactgttctacacggcggtgacccgggccaagagcagggtgcgggtggtggggcccgaggcgtcggtgcgggccgcgatcgagcgccgggcgatccgggccaccggactgcggcagcggctgcgggtggtcggg

SEQ ID NO: 25843 - DNA, 1215 bp, Mycobacterium avium
gtggattatggggcgtttccgccggagttcaattcggcgcggatttattcgggtccggggtcgggttcgttggtggctgcggcgtcggcgtggagttcgttggcggcggagttgaatgcggcggcgttgagttatgacaaggtggtcacggcgctggccagtgaggagtggttggggtcggcgtcggcgtcgatggcgtcggcggtggcgccgtatgtggggtggatgagtacgacggcggcgcaggctgaggaggcggccagccaggcgcgggcggcggcggcggcgtatgaggcggcgttggcggcgtcggtgccgccgccgttgattgcggcgaatcggatgcaggtctcgcagttgcaggcgacgaatgtgttggggcagaacacgccgttgattgcgcagttggaggcgcagtatggggagtattgggcccaggatgcggcggcgatgtatagctatgcggggcagtcggcgtcggcgagtaaggtgacgccgtttcagaaggcgccgcaggtgaccaatccgtcggggcaggctgcccagagtgcggcggtcagcactgcgacggccaattccacctcgaccaacaccaccaaggcgttgcagtcgctggcccagccggcgtcgagttcgaccacggcgaccaaggcggccaccacggcggcctcgaccaccagcaccgatccgctctcggagatctggttcctgctcaccggccagacgacgttgccgaccagcctgggtagtgccgtcaacggctacagcccgttcgccagcctgttctacaacacggaggggttgccgtacttcagtactggtatggccaacacgttcacccagatcgccaagtcggtgggggccattggtggggcggctccggcggcggccaaggcgttgcccggcctgggggggttgggcggcatgctcggtggtggtgcggccgcggcgcatccggtggcggcgttgggcggtgcgggttcgatcgggggcaagttgtcggtgccggtggcctggtcgggtgccccggccacaccggcgttggggcatgccattccggtcagcagcatcagygcggcgcccgaggcggccgggggaccgggcaacctgctcggcggcatgcccctggcgggtgccggggcgggtggccacggtgccgccggacccaaatacggcttccgccccaccgtcatggcccgaccacccttcgccgga

SEQ ID NO: 25844 - DNA, 780 bp, Mycobacterium avium
gtgctgggcaagccgattgcccactcgaaatccccgcagctgcacctggccgcctaccgcgcgctgggcctgcacgactggacctacgagcgcatcgaatgcgacgccgaccagctgcccggcgtggtcggcgggttcggccccgagtgggtcggggtgtcggtgaccatgcccggcaaattcgccgcgctgcgcttcgccgacgagcgcaccgagcgggcgcggcgggtgggatcggccaacaccctggtgcgcaccgcgacgggctggcgggccgacaacaccgacatcgacggcgtcgccggcgcgctgggcgccgcttcgggatgggcgctggtctgtggatcgggcggcaccgcgccggcggccgtcgcgggcctggcccagctgggcgtcgccggcatcaccgtggtggcccgcaaccccgacaaggcggcccggctggtgcgcctcggcgacgagctgggcgtgccgacccggttctgcgccctggacggcgcggggctggccgacgaggtggccgcggccgaggtgctggtcagcaccctgccggcggaggtggccgaacgctatgccggcaccttggcgcgcgtcggcgtgctgctcgacgccgtctacgacccctggcccaccccgctggccgccgcggtgagcgccgccggcggccgggtgatcagcggcatgcagatgctgctgcaccaggccttcgcccaggtggaacagttcaccgggctgcccgccccgcgcgaagcgatgacttgcgcggcggccgacgcggat

SEQ ID NO: 25845 - DNA, 312 bp, Mycobacterium avium
ttgcgaggagatcctcatggacgtcactgctgccaccgaatacctgcccgctccaccacgctgaccagcgtcggcatcatcggctacatcatcatcggcggcctggccggtgccctggccagcaagatcgtccggggtagcggcgccggcatcctgatggacatcgtgatcggcatcgtcggcgcgctgatcggcggcttcatcctgagcttcttcgtcaacaccgcgggcggcgggctcatcttcaccttcttcaccgcgctgctcggttcggtgatcctgctctggatcgtcggcatggtgcgcaggacg

SEQ ID NO: 25846 - DNA, 3042 bp, Mycobacterium avium
atgtccccgaccgcgccggccggggacgaggtcgagatgcgccggatagccgatttcgtggtgcgctggccctggctggtgatcgggttctgggcggcattggcggtcgccctgccgctggccttcccgtccctggccgagatggcccagaagcatccgctggcgatcttgcccggcaacgcaccgtccaatgtcgccgcccgccagatgaccgaggcgttccacgaatcgggctcggatgacctgctgttggtggcgttgaccgacgagaagggtctgggccccgccgacgaagccgtctaccgcaggctggtggacgcgctgcgccgggacacccgtgacgtggtgatggtgcaggacttcatcagcgcgccgccgctgcgttcggccgtgaccagcaaggaccgcaaagcctgggtactgcccgtcggcatcgcgggcgagttgggcaccccgcagtcatacgcggcgttcaaccggatcgccggcatcgtcaaacagaccctggaaaaacatgaaaacggtccggccgcaacgtctttgacggtgagcctcaccggccccgcggcgaccgtcgccgacctcaccgtcgcgggcgagcgggatcgactgccgatcgagctggcgatcgccgttctggtgctcgtcgtcctgctggtcgtttaccgcagtgcggtcacgatgctgctgccgttggtgacgatcctgttgtcgctggtgatcgcgcaggcggccgtggcgggctactcgcaattgacgggctcgggcgtatccaaccagtccatcgtgttcctgagcgcgatcatggccggcgccgggacggattacgccgtctttctcatcagccgctatcacgactttctgcgccggggggacgatttcgatcaggcggtcaggaaggccctgatctcgatcggcaaggtgatcaccgcgtcggccagtacggtcgggatcacgtttctgctgatcggcttcgcccggatgggcgtgttcaagacggtcgggatctcgtcggcgatcgggatcggcgtggcctttctcgccgccgtgacgttgctgccggccatcatggtgctcgccgggccgcggggttggatcaggccgcggcgcgaactgaccaccgggctgtggcggcgttcgggcatccgcattgtgcgccggccgcgggcccacctggtggccagcgtgctggtgctgatcatcctggccagctgcgcgggcctggtgcgctacaactacgacgatcgcaaggcgttgcggccgtcggccccgagttcggtcggctacgccgcgctggagcgccacttcccggtgaatcagtccatcccggagtacatcctcatccggtcaccgcacgaccttcgtaccccgcaggccctcgccgacctggaacagctggccgatcgagtcagccaactgccgaacgtcagcgtggtcagcggcatcacccgccccaccgggaacgtgccggagcaattccgggccacgtatcaggccggcgcgatcggcagcatgctggccggcgggtccaccatgatcaacgaccagaccgacgacctcaaccgcctggcccggggggccggcaccctggccgacaacctcggcgacgtccgcggccaggtcaaccagctcgccgccagcgtgcgcgaactggagaatgccttctcgtcgacgaaaaaccagtacagcggcgacgcgctggtcaaccaggtcgacatcgcggcccggctggtcgaccacgtcaactcgctcagcaacgccatggggtggaacttcaccgccgccaagaacatgttcgcctggatcggcccggtgctggcggcgctgcagggcaacccggtctgcgacgccgactcgtcgtgcagcgccacccgcgcgacgttcgagcaattggtgggtccgcgcggtcaggccgacctcgacgcgatcgatgacctgtcccaccaactgcaggcctatcccgacaaacgggccctgaaagcatccaccgaccggctgcgcaacgccttcgccaaactcaacgacgtgctgcgggcgatgggaatggatcggcccggcggcctgcagtccaacctgaccaccctgcaaaacggcgccgaccaattcgccggcggcagccggcaggtggccgacgcggtggcccaactcgtcgacaaggtcaagcagctgggcgcggggctcagcgagtcggcggcgtttttgttgtcgttgaagcacgacgcggcccacccggcgatggccgggttcaacatcccggcgcagctgctgcgtctgccgcagttccaggaggccgccaaggtgttcatctcacccgacggccactcggtgcggtacctggtgcaaagcaaactgagcccgttcagcacccaagccatggatcaggtcgacgcgatcacggccacggcccggggcgcccagcccaataccgccttggccgatgccgaggtgtcgatggccggatacaccgtcggcctcaaagacacccgggactactaccagcacgacatcaaattcatcatcgcggtcaccctgctggtggtgctcctgacgttgatggcgctgctgcgcgcgatcgtcgcgccgctgtatctggttgccaccgtggtcatttcgtatttgtcggcggtgggcgtcggcgtgttggtcttccaatttttgctcggccagcaattgcattggagcgtgccgccactggcgttcgtggtgctggtcgcggtgggtgccgactacaacatgctgctggtctcccggatgcgtgacgagtcgccgcacagcatgcgctacggcatcatccgcaccctgagttccacgggtggagtgatcaccgccgcgggtctgatcttcgcggcctcgatgtccggtctgctgttctccagcatcggcaccgtggtgcagggcggtgtggtgatcggggtggggatcctgctggacaccttcctggtgcgcaccgtcaccgttcccgccatcgcggcgctggccggacgggccaactggtggccgtcacgcattgccgtccggcggaacccggttagcgggcagcca

SEQ ID NO: 25847 - DNA, 648 bp, Mycobacterium avium
atgggcggccgcgaaatgggttacatgggaccgggtttgccgggccagcggtcggtggcatcggccgccgaccgcgagttcgtcgaagacgtgtggggtgttccccgcggaaggctgcgcaccgaggtcggcaccggaaccatcgacatgttctcccggatggccgacgggcagatcaaggcatgctggatcatctgcaccaatcccgttgcctccgttgctaatcggaagaccgtgctggccgggctggagcgcgccgagttggtgatcgcccaggacgcctacctcggcacggagaccagcgaatacgccgacgtgttgttgccggcggcgctgtgggcggagaccgagggggtgatggtcaattctgagcgcaacatcacgctgtcccagccggcggtcgcggcgccgggtggggccatgcccgactggcagatcatcgcccggatcgcttgcgagatggggttttccgaggcgttcagctacagctgcgccgaggaggtgttcgaggagatcaagcggttctggaatccgacgaccggctacgacctgcgcggtgtgagctatgagcggctgcctgggcagcacgctgcaatggccgcgcccgccgcagagcacggccgaccgcaacccgatccgctacctcaa

SEQ ID NO: 25848 - DNA, 1296 bp, Mycobacterium avium
atgccggcaatcgtcctcatcggcgcccagtggggcgacgagggcaagggtaaggccactgacctgctcggtgggcgcgtgcagtgggtggtgcgctaccagggcggcaacaacgccgggcacaccgtcgtcttgccgaccggggagaacttcgccctgcacctgatcccgtccggggtgctcacgcccggcgtcaccaacgtcatcggcaacggtgtggtggtcgaccccggggtgctgctcgacgagctcaaggggctcgaagaccgcggcgtggacacctcgcggttgctgatctcggcggacgcgcacctgttgctgccgtatcacgtggccatcgacaaggtcaccgagcgctacatgggcaacaagaagatcggcaccaccggccgcggcatcggcccgtgctaccaggacaagatcgcccggatcggaatccgggtggccgacgtgctcgaccgcgaggtgctgacccacaagatcgaggcggcgctggagctgaagaaccagatcctggtcaagatctacaaccgcaaggcgctcgatccgcatcaggtggtcgaatgcctgctggagcaggccgagggtttccggcaccgcatcgccgacacccggctgctgctcaacaccgcgctggaggccggcgagacggtgctgttggaaggctcgcagggcaccctgctcgacgtcgaccacggcacgtatccctatgtgacgtcgtcgaatccgacggccggcggggccgccgtgggctcggggatcggcccgacccggatcaccgcggtgctgggcatcctcaaggcctacaccacccgggtggggtccggcccgttccccaccgagctgttcgacgagaacggcgaatacctgtccaagaccggcggcgaattcggggtcaccaccggccggcgccgccggtgcggctggttcgacgccgtggtcgcccgctacgccacccgggtcaacggcatcaccgacttcttcctgaccaagctcgacgtgctgtccagcctggagacggtgccggtgtgcgtcggctaccgcatcgacggggcgcgcatcaacgagatgccgatgacccagagcgatctgcaccgcgccgagccgatctatgaggagctgcccggctggtgggaggacatctcggcggcccgcgagttcgacgacctgccggccaaggcgcgcgactacgtgctgcggctggaagagcttgccggagcgcatgtttcgtgcatcggagtggggcccggtcgggaacagaccatcgtgcgccgcgacatcctggcggcgcgcccg

SEQ ID NO: 25849 - DNA, 984 bp, Mycobacterium avium
atgcgaatcatcaccgtcgaagagcacttccagcatcccgaggtcagcgcacgtgtggccgagctgaccgggccggccgtcgagggactcgccgagttcggaaacgcgttctcactcgacccggattccaccgcgcgccttggtggtaaccggctggcgcacatggaccaggtcggcatcgacgtccaggtcgtctcgcacggcaacggcagcccgggcaccctgcagcatcccgaagccgtcgagctgtgccggcgcgtgaacaacgacctggcggcacagatcgccgaaaatcccgaccggttccgcggattcgcgacgctgcccctctacgacccggccgcagccgccgaggaactgcgacgttgcgtcggtgatctcggattcgtgggcgccctgatcgccggcagctacgacgggctgtttctcgacgacgagcggttcgacccgatactgacggcggccgaggccgtcgatttcccgatctacgtccaccccggccttcccgaggcgcccgtctcccagcggtactacgccggcagctggcccgcttcggtgcacatgatgttctcggggccggccttcggatggcatgccgaggccggcatccacattgtgcggctgattctctccggcgccctggaccgccatcccacactgaaattactcagcggccactggggcgaactggctgccttctacctcgaacggctcgacgaaacgctgggcctgctgcccacggggctcgagcgcgcgcccagcgactactaccgccagcaggtgtggatcaccccgtcgggaatgtacaaccagaaccaattgaatttcatgacagccgaattgggtgctcagcgcatcatctattccgaggactttccctacgttgtacgcgacaacgtctcgaccttcctcgaacaggccgggctctccgaggccgacacccacgccatcgcccacaccaacgccgaagcgctcctacggatc

SEQ ID NO: 25850 - DNA, 1590 bp, Mycobacterium avium
atggcgaaggtagcatcgcgcaccgcgacgctgggcgcgatgctgtgcgtcctggcggcggggtgttccggccatcggcacaccgcgagcaccggacccacgggtccgccggtgcgcggcggcaccctgacctactcggacgtgcagttcgtcaccgacaccatggccgccaactacagcgccaacaacctgatgttccagctgctcgaccgggtggtctacgtcgacccgaaaaccgacgcggtgcgcgggtggctggcgaaaaccttctcccgcaaccagaacgccacccggtacaccttcaccatccgcgacggggtgagcttcagcgaccacacaccgctgaccgccgaggtggtcaaggcgaatttcgaccagctcggcaagggtgacccggccaagaagatgccggccttcgccgatttcgtcggctacgaccacagcgaggtcagcggcaacgtcgtcaccgtgttcctcgaccggcccaacaccaacttctacaaggtgctgtcctacagccgcgcgggcatccgcgcaccggccacgctggcgctcgactaccagcgccaggccaaggttgaaaacgtcatcggctcaggccctttcgtgtaccagtcgcagatccccgaccagcaggtggtgctcaccaggcgcccggactacgcgtggccgccgtcgtcgtggcccaaccaggggccggcctacgtcgacaaggtcgtcttccgggtgatcggcgagccgggcctgcgcgcgggcgcggtccaatcccatcaggtggacgtggcccgcggaatccagcccaccgacgaacccgcgctcaaacagggtggcctgcaggtgatcccggtggcggctcccgccgagaccgcgaacctggtcgggttccggatcaacaaccaggtcgtcgacgacgtccgggtgcgccgggcgctgcaactgggcatcgaccgtcgggcggtggtggacacggtgctctccgacagttatcgcgcggccgattccgtgctgggacacgacgatccgttgttcgccgatgtgagcgccgacatcgggtatcagccgcagcgggcggccggcctgctcgatgcggccgggtggaagccgggcggcgacggggtgcgcgaaaaggacggcaagaaacttgttctgacgctggcggcgtccaaccagagcgtggtgttccgcccggcgttcgagttcatcgaacagcagtggcgggagctgggcgtggtgctgcagaaccgggcaggcgacacgacgttcttcaatgcctccagcagtcaatcgtcaactccgttgttcggcaccaggatccagtacaacatcgggctgggcctgctgttcggccgcccgaaaagcaacctgacgttcgcgcagaacgacgcgttgctcgcgctgtccgaggaggaactgcggcagaccgacccgacgcggctcaaagacgtcgtcgcccgcgagcagcgcaggatcatcgacgaccagctggcgttggtgctgtgggatgaggtgcaggtgcacgcggccgcacccaacgtgcacgtggaattcacccgctacaccgagccgctgctgcagagcgcctggaaggcg

SEQ ID NO: 25851 - DNA, 2976 bp, Mycobacterium avium
gtgcgcaacgcaaccgagaccaacctgtggccggcgaagccgccgcgtcggcccttataccctgttcaggtgaccgaatccccgaccacttcgcccgccaccggctccggtgccgccgcgccggactccgacgcgccgccgtatcgctacaccgcggcgctggcgggccggatcgagggcagctggcaggacacctgggccaagctcgggacgttcaacgtgcccaacccggtcggttcgttggccccgacggacgggaccccggtccccgaggacaagctgttcgtgcaggacatgttcccctacccgtcgggggaggggctgcacgtcggccacccgctgggctacatcgccaccgacgtatacgcccgctacttccggatgaccggccgtaacgtgttgcatgcgttgggttttgacgctttcggcctgcccgccgagcaatacgcggtgcagaccggcacccacccgcgcaccaggaccgaggccaacgtggtcaacttccgccgccagctgggccggctggggctgggccacgacagcaggcgcagcttctccaccaccgacgtcgagttctacaagtggacgcagtggatcttcctgcagatctacaacgcctggttcgaccccgccgccaacaaggcccgacccatcgccgagctggtcgccgaattcgattccggcgcgcgcagcctcgacgacgggcgcaactggtccgagttgtcggcgggggagcgagccgacgtgatcgacagccaccggctggtctaccgcgcggactcgatggtcaactggtgtcccggactgggcaccgtgctggccaacgaggaggtcaccgccgacgggcgcagcgaccgcggcaacttcccggtgttccgaaagcggttgcggcagtggatgatgcggatcaccgcctactccgaccggctgctcgacgacctcgacctgctggactggccggagccggtgaagaccatgcagcgcaactggatcggccgttccaccggcgccaaggccctgttcgcggcgaccggcgccgacggcgcggcgctcgacatcgaggtgttcaccacccgaccggacacgctgttcggcgccacctatatggtgctggcccccgagcacgagctggtcgacgagctggtcgcgcccgcctggccggacggcaccgacccgcgctggacatacggcgccgccactccgggcgaggcggtcgccgcctaccggcgggcgatcgcctcgaagtcggacctcgagcgccaggagagcaaggccaaaaccggtgtcttcctgggcagctacgccaccaaccccaccaatggcaagccggttccgatcttcatcgccgactacgtgctggccggatacggcaccggcgcgatcatggcagtgcccggccacgaccagcgcgactgggacttcgcgcacgaattcggcctgcccatcgtggaagtcattgccggaggcgatatttcggagggggcctacgccggcgacgggctattggtgaactccggctacctggacggactggatgtggcggcggccaaggaggcgatcaccgcccggctggaagccgaaggccgtggctgcgcgcgggtcgaattcaagttgcgtgactggcttttcgcccggcaacggtactggggcgagccgttcccgatcgtctacgacagcgacgggcgtccgcatgccctcgacgaagccgctctgccggtggaactgcccgacgtgccggactattcgccggtgctgttcgaccccgacgacgccgacagcgaaccgtcgccaccgttggccaaggcgaccgactgggtgcacgtcgagctggacctcggcgacggcctgaagccctacagccgcgacaccaacgtgatgccgcaatgggccggcagctcctggtacgaactgcgctacaccgatccgcacaactcggaacgcttctgcgccaaggagaatgaggcctactggatggggccgcggcccgccgagcacgggccgcaggatcccggcggcgtcgacctgtacgtcggtggggccgaacacgcggtgttgcatctgctctacgcccggttctggcacaaggtgctctacgacctgggccacgtcagctcccgcgagccgtaccgccggctggtcaaccagggctacattcaggcgttcgcctacaccgactcgcgcggctcgtacgtgccggccgaggaggtcgtcgaacgcgacggccggtttttctaccgcggtcccgacggggagatcgaggtcttccaggaattcgggaaaatcgggaagagcctgaagaattcgatctcacccgacgagatctgcgacgactacggcgccgacacgctgcgggtctacgagatgtcgatgggcccgctggaggcgtcccgcccctgggcgaccaaggatgtggtgggcgctcaccggttcctgcagcgggtgtggcgactggtcgtcgacgagcagacgggcgagacgcgggtggtcgacggggccggacgggatctgcccaccggtaccctgcggctgctgcaccgcaccatcgccggagtctcggaagactatgcgggactgcgcaataacaccgccgtggccaagttgatcgagtacacgaaccatctcaccaaggaacatcgcgacgcggtgccccgcgcggcggtcgagccgctggtgctgatgctggcgccgttggcgccgcacatggccgaggagttgtggctgcggctgggccacaccacctcgctggcgcacggcccgttcccggtggcggacccggcgtacctcgtcgaggacaccgtcgaatacccggtgcaggtgaacggcaaggtgcgcgggagggtgacggtggcggccgacgccgatcgggacaccctcgaggccgccgcgctggccgacgagaaggtgctggcgttcctggccggcgcccagccgcgcaaggtgatcgtggtcccgggccggctggtcaacctggtggtg

SEQ ID NO: 25852 - DNA, 912 bp, Mycobacterium avium
gtgaccgacgtatctgaggacgaactggcgggcctgtccgaattcgcgctgttgcacgaaaacgccgagcaggccggggtatctggtcccctgcccgaggtcgcccgggtcgaatcgggcagcggcgacgccaaagtcagcgcgctgcgctggggcagcaccgatgcccgcatcgtgttcgtgcacggcggcgggcaaaacgcgcacacctgggacacggtgatcgtcggcgtcggcgagcccgcgctggcggtcgaccttcccggacacggacactccgcctggcgcgcggacggcgactactcgccgcagctgaacgccgacgccctactgccgatgctgcgcgagcacgccgccggcgccgacctcgtcgtcggcatgtcgctgggcgggctgaccgcgatccggctgggcgccgtcgcacccgatctggtcaaggaactggtgctgatcgacgtcaccccctcggcgctgcaacggcattccgagatgaccaaggagcagcagggcacggtggcgctgatgcacggcgaacgcgagttcgacagcttccaggccatgctggacctgacgatcgccgcagcgccgcaccgcgaggtgaaggcgctgcgccgcggggtgttccacaactcgcgcaagctggacaacggcaaatggacgtggcgctacgacgccatccgcaaattcccggacttcgacggcctgtgggcggacgtcgacgccctgtccgcgccggtcaccctggtccgcggcggttcctcgggcttcgtcagcgacgaggacgcggccgagctgagccgtcgcgcaaagcatttccgcaccgcgcacgtggtggcgaactcggggcactccgtgcaaagcgaccagccgcgcgcgctgatccacatcctgcgtggggtgctcgacgcgcgc

SEQ ID NO: 25853 - DNA, 1644 bp, Mycobacterium avium
atgaccacggctacgccccgcacgccggggggtgggcggcgcgcgccgtccgggcccgccccgggcgcccaccgctgggacctcatcacccgaagctcggcgcactcgcagaacccgtggaacccgctgtgggcgatgatgatcggcttcttcatgatcatggtcgactcgaccatcgtcgccatcgccaacccgaccatcatggccgacctgcacatcggctacgacaccgtggtctgggtgaccagcgcctatctgctggggtacgcggtcgtgctgttggtggccgggcgtctcggcgaccggttcggcaccaagaacctgtacctgatcggcctggcggtgttcaccgtcgcgtcggtgtggtgcgggctggccggcagcgccgccatgctgatcgcggcccgcgtcgtccagggtgtgggagccggcgtgatgactccgcagacgttgtcgacgatcacccggatcttcccggcggagcggcgcggcgtggcggtcagcgtgtggagcgccaccgccggggcggccagcctggcggggccgctggccggtggggtgctggtcgacgggctcgggtggcagtggatcttcttcgtcaacgtcccgatcggggtgctggggctggtcctggcgtactggctggttccggtgctgcccacccagtcgcaccgcttcgacctggtcggggtcgggttgtccggggtgggcatgttgctgatcgtgttcgggctgcagcagggccaggccgcgcactggcaaccctggatctgggcgctgatcgtcgcgggtgtcgggttcgtgacggtgttcgtgttctggcaatcggtcaatgtccgggagccgctgatcccgctggtgatcttctccgaccgcgacttcagcctgtgcaacatcggcgtggcgatcatctcgttcgccgcgacggccatgatgctgccgctgacgttttacgcccaggcggtgtgcggcctgtcgccgacccgctcggccctgctgatcgcgccgatggcgatcgccaatggggtgttcgcgccgttcgtcggcaagatcgtcgaccgctaccacccgcgcccggtgctcggtttcgggttttcgctgctggcgatcgcgctgacctggctcaccttcgagatgtcgccggcgacgccgatctggcggctggtgctgccgttcttcgcgatgggtgtggggatggccttcgtgtggtcgccgctgacggcgaccgcgacgcgcaacctgtcggcgcagctggccggcgccgggtccgcggtgtacaactcggtgcgtcagctgggcgccgtgctgggcagcgccggcatggccgcgttcatgacgtggcggatcggcgccgagatgccgggacagcccggcggcgggggtgaggactcggccgggccggtgctgcccgagttcctgcgcgggccgttcgcggcggcgatgtcgcagtcggtgctgttgccggcgttcatcgcgttgttcgggatcgtcgccgcgctgttcctggtgggttttcgcccgtgggcgcaccgcgacggcgggaccgacgcgttcgggccggacgactacggcggcgactatcacgacgactacgacgacgatgacgcgtacgtcgaactcatcctggtgcgtgaacccgaaccc

SEQ ID NO: 25854 - DNA, 693 bp, Mycobacterium avium
gtggcagccgcccgggtgtcggtcgtgctgcctaccgtcaccaccgtggcctccgacggtgcgactcagctgagcttcgccgacgtgggaccggcgttcggccccgaggaggtcgcgctgcgcgacaccaccttcgtggtggtcgacctggaaaccaccggcggacgcagcaccagcaccggggaaaccgcgcccgacgccatcaccgagatcggggcggtcaaggtgcgcgacggcgtggtgctcggcgagttcgccaccctggtcgacccgcagcgcagcatcccgccccagatcatgcgactgaccggcatcaccacggcgatggtgtcggacgcgccggccatcgacgcggtgctgccgatgttcctcgagttcgccggcttggaccgcggggcggtgctggtcgcccacaacgccggtttcgatgtcgggttcctgcgcgccgccgcgcagcagtgcgacatcgcctggccgcgaccgcgggtgctgtgcacggtccggttggcccgccgggtgctcagccgcgaggaggcccccagcgtgcggctggcctcgctggcccggctgttcgccgtgaccacccaacccacccaccgcgccctcgacgacgcccgggccaccgtcgacgtgctgcacgccctcatcgagcgggtcggcaaccagggcgtgcacacctacgccgacctgcgc

SEQ ID NO: 25855 - DNA, 2094 bp, Mycobacterium avium
gtgtccaggctgcacccccatgtcgccgaagccaatccgctgggcgaagacttcgactacgccgaggaattcgccaagctcgacgtcgaggcgctcaaggccgacgtgatctcggtgatgaccacctcgcaggactggtggcccgccgactacggccactacggtggcctgttcatccggatgagctggcatgccgcgggcacctaccgcatccacgacggccgcggcggcggcgggcagggcatgcagcggttcgccccgctcaacagctggccggacaacgtgagcctggacaaggcccggcggctgctgtggccggtcaagaagaagtacggcaacaagatctcctgggcggacctgatcatcttcgccggcaactgcgcgctggagtcgatgggattcaagaccttcggcttcgcgttcggccgcgaggacgtctgggagcccgaggagatcctctggggtgaagaggacgaatggttgggcaccgacaagcgctacccgggcaccggcgagcgcgagctggcacagccctacggggccaccaccatgggtctgatctacgtgaatcccgaagggcccgaaggcaagccggatccgatcgccgcggccatcgacatccgtgagaccttcggccggatggcgatgaacgacgaggagaccgcagccctgatcgtcggcggccacagcttcggcaagacccacggcgccggcgacgccgacctagtcggcccggagcccgaggcggccccgatcgaacaacagggtctgggctggaagagctcgtacgggaccggcgtgggcaaggacgccatcaccagcggcctggaggtggtctggacgcccaccccgaccaagtgggacaacaccttcctggagaccctgtacggctacgagtgggagctgaccaagagccccgccggggcctggcagttcaccgccaaggacggcgccggcgcgggcaccattcccgacccgttcggcgggccgggccgcgcgcccacgatgctggtcaccgacatctcgctgcgcgagagcccgatctaccgcgacatcacccggcgctggctcgaccaccccgaggagctggccgacgccttcgccaaggcgtggtacaagctgctgcaccgcgacatgggaccggtctcgcggttcctggggccgtgggtccccgaaccgcagctgtggcaggacccggttccgcccgtcgaccacccgctggtcgacgacaacgacgtagccgccctgaaggacaaagtgctcgcctccgggctctcggtcccgcagttggtcaagaccgcgtggtcggcagccggcagctaccgcaacaccgacaagcgcggtggcgcgaacggcggacggctgcgcctgcagccgcagcgcaactgggaggccaacgagccctcggagctggacaaggtgctgcccgtactggaaaagatccagcaggacttcaacgcgtcggcgtccggcggtaagaagatctccctggccgacctgatcgtgctggccggctcggccgcggtcgagaaggcggccaaggacgccggctacgagatctcggtgcacttcgcgcccgggcgtaccgacgcctcgcaggagagcaccgacgtggactcgttcgcggtgctcgagccgcgggccgacggattccgcaacttcgcgcggccgggcgagaaggccccgctcgagcagctgctgctggagcgggcctacctgctcggtgtgacgggccccgagatgacggtgctggtcggcgggctgcgcgccctcggcgccaaccacggcggcagcaagcacggcgtgttcaccgaccggccgggcgcgttgaccaacgacttcttcgtcaacctgctcgacatgggcaccgagtggaaggcgtcggagaccgccgagaacgtctacgagggacacgaccgggccaccggcgcgctcaagtggaccgccaccgcgaacgaccttgtgttcggctcgaactcggtgctgcgggcgctggccgaggtctacgcccaggacgacaaccagggcaagttcgtcgaggacttcgtcgcggcctgggtcaaggtgatgaacaacgaccgcttcgacctgaag

SEQ ID NO: 25856 - DNA, 1116 bp, Mycobacterium avium
atgaaatccagcggtgccggtgcggcgttcgccggcgcgtcagtggccgacgcggtgccgctggcgccgctgaccacgctgcgggtcggacccaccgcgcgccggctgatcacctgtgccagcagcgaacaggtgatcgccacgctgcgccggctggacaccgaaaggcttgccggacaacgtgatccggtgctggtgttcgccggcggctcgaacctggtgatctccgacgcgctgagtgacctgaccgcggtgcggctggccaacgacggaatcaccgtcgagggcaacctggtgcgcgcccaggcgggggcggtgtgggacgacgtcgtgctcaccgccatcgagcacggcctgggcggcctggaatgcctttccggcatcccgggctcggccggggccaccccgatccaaaacgtcggggcctacggcgccgaggtctccgacaccctcacccgggtcagggtgctggaccgcggcagcgggcaggtgcgctgggtgcccggcaccgagctggaattcggttaccgcaccagcgtgttcaaacgccgcgccgacgacgggctcgaaatcccttccgttgtactggaagtcgagttcgcgctcgatgcgtcggggcgcagcgcgccggtgcgctacggcgagctggccgccgagttggaggtgcccgtcggcgagcgcgccgacccgcgcgcggtccgcgaggcggtgctggcgctgcgggcgcgcaagggcatggtgctcgacgccgccgaccacgacacctggagcgtggggtcgttcttcaccaacccggtggtggcccccgacgtctacgagcggctggccgggtccgtcgacgggccggtgccgcactatccggccccgggcggggtcaagctggccgccggctggctggtggagcgggcgggtttcggcaagggctatccggtcccggacccgggcggcccggaagcgccctgccggctgtccaccaagcacgcgttggcgctgaccaaccgcggcacggcccgcagcgacgacgtgatcgccctggcccggaccatccgggacggggtgcggtctgtgtttggcatcacactggtgcccgagcccgtcctgctcggttgcaggctg

SEQ ID NO: 25857 - DNA, 1551 bp, Mycobacterium avium
gtgaccaccgcgacgcgttcattcctgccagttccaaccatcgaaacaaccttagtgaacgtgctaaattttgcgtgtgcacctcagcgctctgtccaacatcaccaccgccgcgtgtctgtgcgcggcgggtgcgtgttgttgctgcgcactttgccgctcctgaccccatgccaggtgtggccaagacggccagcaaaattcggacaaaggacgctcgtgcgcacgaataccctcacccatccccatcattcgcccggtcgcgccgtgggccacgcgcccggccccaagccccaccgcgcggtgcgccggcagatcgtgccgccggcactgcacatccccgaatccgcggcggcctccgtcttccgggccgtccggctgcgtggacccgtcggccgtgacgtcattgccaacgtcacctcgctgagcatcgccacggtcaaccgtcaggtcatcgcgctgctggaggccggcctgctgcgcgagcgcgccgacctggcggtctccggcgccatcgggcgcccgcgggtgccggtggaggtcaaccacgagccgttcgtgacgctgggcatccacatcggcgcgcggaccaccagcatcgtggccaccgacctgttcggccgcaccctggacacggtcgagacgcccacgccgcgcaacccggccgggcccgcgctggcgtccttggccgacagcgcccgccgctacctgcgacgctggcaccgccggcggccgctgtggatcggcgtcgcgatcggcggcaccgtcgacagcgccaccggccaggtggaccacccgcggctgggctggcggcaggcgccggtcggccaggtgctggccgacgcgctgggcttgcccgtgtcggtggcctcccacgtggacgccatggccggggccgagctgctgctgggcatgcgccggttcctgcccagctcgccgaccagcctgtacgtgtacgcccgcgagacggtcggctatgcgctggtgatcggcgggcgggtgcacgtgccgaccagcggcccgggcaccattgcgaccctgccggcgcactccgagctgctcggcggcaccgggcagctggaatcgaccgtcagcgacgaggcggtggtggccgtcgcccgccagctgcgcatcctgccgttcgccccggcgaaccgggccagcggatccgccgccgggatcgccgacctgctgcgggtggcccgggccggcaacgagcaggccagggagctgctcgcggagcggggccgcgtgctgggcgaggcggtggcgctgctgcgcgacatgctcaaccccgacgagctggtggtcggcgggcaggccttcaccgagtaccccgaggcgatggagcaggtggaggcggcgttcgcggcgcgctcggtgctggggccgcgcgacatccggctcaccgccttcggcaaccgggtgcaggaggccggcgccggaacggtgtcgctgagcgggctgtacgccgatccgttgagcgcgatgcggcgggccggggcgctggacgcccggctgcgcgaggtcgcgcgggacgagtcgtcggcc

SEQ ID NO: 25858 - DNA, 1284 bp, Mycobacterium avium
gtgtcccaaggtctttggatcgccgtcgcggtcctcgtcgtcatcgccgtcctggtcgtcatcgccgcactggtcctgggcctggcgcggtaccgccggcgccggatcagcttctcgacccgccccgaacccggggcgatcgaccggtccggcggatacaccgcgtcctcgggcatcacgttcagccaggcaccgaccgcccagccggctgagcggctcgacaccaccggcttgccggcggtaggcgacgacgccaccgtcccccgggacgcgccgcgacgcaccatctccgaggtcgagcttcccgaacccgagacgccggcggcgccggctccggaggcccccgctcccgagatcgaggagatcgcgcccaccgagggccggctggagcggctgcgcggccggctggcccgctcccagaacgcgctcggccgcagcctgctgggcctgatcggcggcggcgacctggacgaagacgcctggcaggacgtcgaggacaccctgctggtcgccgacctgggcccggtggtcaccgaatcggtcatcgcccagctgcgcggccggctggccagcagcgacgtgcgcaccgaggcggacgccaaggccgtgctgcgcgacgtgctgatcaacgagctgcggcccgacctggaccgctcgatccgggcgctgccgcacgccgaccacccgtcggtgctgctgatcgtcggcgtcaacggcaccggaaagaccaccaccgtcggcaaactggcccgggtgctggtcgccgacgggcggcgcgtcgtgctgggcgcggccgacaccttccgcgccgccgcggccgaccagctgcagacctgggcgtcgcgggtgggcgcggaggtggtgcgcggcgccgagggcgccgacccggcctcggtggcgttcgacgccgtcgaccagggcatcgccgccggcgccgacgtggtgctcatcgacaccgcgggccggctgcacaccaaggtcgggctgatggacgagctcgacaaggtcaagcgggttgtcacccgccgcgccgccgtcgacgaggtgctgctggtgctcgacgccaccatcgggcagaacgggctggcccaggcccgggtgttcgccgaggtcgtcgagatcaccggcgccgtgctgaccaaactggacggaacggccaagggcggcatcgtcttccgcgttcagcaggaactcggggtgccggtgaaactggtcggcctcggcgagggccccgacgatctggcgccgttcgagccggccgccttcgtcgacgcgctgctcggc

SEQ ID NO: 25859 - DNA, 366 bp, Mycobacterium avium
atggcggaactcaaatcccggctgcgggccgacctgaccgcggcgatgaaagcccaggacaagctgcgcacggccaccctgcgcatgctgctggcggcgatccagaccgaggaagtctccggtaagcaggccaaagacctcaccgacgacgaggtgatcaaggtgctggccaaggaatcccgcaaacgcgccgaatcggccgagatctacacccagaacgggcgcggggacctggccgccaacgagcacgccgaggcgcggatcatcgacgaatatctgcccaccccgctcaccgaggcggaggtggccgacgtcgtcgacaccgcgatcgcccaggtcgccgaggagatcggcgagcggccgtcc

SEQ ID NO: 25860 - DNA, 1179 bp, Mycobacterium avium
gtgccgcacgacgcacccgcccacaatctcgacctgccgcgcgagcagacctcgcgcggcaggtactggtgggttcgctgggtgatcctcggcgtggtggccatcgtgcttgccgtcgaggtctcgctgggctgggaccagctggccaaggcgtggatgagcatgtacgaggcgaactggtggtggttgctggcctcggtggtggccgcggccgcgtcgatgcacagctttgctcagatccagcgcacgctgctcaaatcggcgggggtgcacgtcaagcagctgcgctcggaggccgccttctacgccgccaactcgctgagcaccacgctgcccggggggccggtgttgtcggccaccttcctgttccgtcagcaacggctgtggggcgcctcgaccgtggtggcgtcctggcagctggtgatgtccggtgtgctgcaggcggtcgggttggctttgctgggcctgggcggcgccttcctgctgggcgccaagaacaacccgttctcgctgctgttcaccctgggcggcttcgtcgcgctgctgctgctggcgcaggccgtcgcgtcccggccggagctgatcgagggcatcggcagccgggtgctggcgtgggtcaactcggtgcgcggccggccggccgagaccggtttggacaagtggcgcgagacgctgatgcagctggaatcggtgagcctgggccggcgcgatctctcggtggcgttcggctggtcgatgttcaactggatcgccgacgtggcctgcctgggcttcgccgcctacgccgccggggaccacgcctcggtggccgggctgaccgtggcctacgcggccgcccgcgcggtcggcaccataccgttgatgccgggcgggctgctggtggtcgaggcggtgctggtgccggggctggtgtccagcgggatgtcgctgcccagcgcgatctcggccatgctgatctaccggctgatcagctggctgctcatcgccgcggtcggctgggtggtgttcttcttcgtattccgcaccgagaacatcgccgactccgacgacgagccgatcaccggcccgctgcccgtgctgcctacaccgggcggcccgccggacccgaccgacaccgccctgcaggggccgctgccgccggaccggagtccggccgatccgaatccggacaaagacgtc

SEQ ID NO: 25861 - DNA, 1074 bp, Mycobacterium avium
gtgagagtgcttgccgccatgagcggtggcgtcgactcgtcggtcgccgccgcccggatggtcgacgccggacacgacgtggtgggagtgcacctggcgctgtccaccgctcccggcacgctgcgcaccggttcgcgggggtgctgctcgaaggaggacgcctccgacgcacgccgggtcgccgatgtgctcggaatcccgttctacgtctgggatttcgcggagaagttccaagcggacgtgatcgacgagttcgtgtcggcctacgcccgcggcgaaacacccaacccctgcgtgacgtgcaaccagaagatcaagttctcggcgctgtcggccaaagccgttgcgctcgggttcgacgcggtggccaccgggcactatgcccggctgtccggtggacggctgcgccgcgccgtcgacaaggacaaggaccagtcctacgtgctggccgtgctcagcgccgagcagttgcggcacgcggcgttccccatcggtgacacccccaagccgcagatccgcgaagaggccgcgcggcgggggctggccgtcgccgaaaagccggacagccacgacatctgcttcatcccctccggcaacacccgcgcctttttgggtgagcgcatcggggtccgacgcggcgccgtcgtgaacgccgacggcacggtgctcgccgagcacgacggcgtgcacggcttcaccatcgggcagcgcaaagggctcggcatcgccgggccgggccccgacgggcggccgcgctacgtgacggcgatcgacgccgacaccgcgaccgtgcgggtgggggaggcggccgacctcgatgtgcgcgaaatgctcgggcgcgcagtggtattcacctcgggaacggctccgtccgggccgttcgagtgcgcggttcaggtgcgcgcccacggtgaaaccgcggacgcggtggccgaactggtcggcgacgagctggtggtgcgcctgcgcgccccgctgcgcggcgtcgcaccgggccagaccctggcgctctaccggcacgaccccgacggcgacgaggtgctcggcagcgcgaccatcgccggcacgtcgcgc

SEQ ID NO: 25862 - DNA, 258 bp, Mycobacterium avium
gtggccaacatcaagtcgcagcagaagcgcaacaagaccaacgagcgcgcccggctgcgcaacaagtcggtgaagtcctcgctgcgcaccgccgtccgcgcgttccgcgaggccgcccacgccggcgacaaggaaaaggccgccgagttgctggtgtcgaccaaccgcaagctggacaaggcggccagcaagggcgtgatccacaagaaccaggccgccaacaagaagtcggcgctggcccaggcgctcaacaagctc

SEQ ID NO: 25863 - DNA, 873 bp, Mycobacterium avium
atgcaggtctcgcagttgcaggcgacgaatgtgttggggcagaacacgccgttgattgcgcagttggaggcgcagtatggggagtattgggcccaggatgcggcggcgatgtatagctatgcggggcagtcggcgtcggcgagtaaggtgacgccgtttcagaaggcgccgcaggtgaccaatccgtcggggcaggctgcccagagtgcggcggtcagcactgcgacggccaattccacctcgaccaacaccaccaaggcgttgcagtcgctggcccagccggcgtcgagttcgaccacggcgaccaaggcggccaccacggcggcctcgaccaccagcaccgatccgctctcggagatctggttcctgctcaccggccagaccagcctgcccaccaacctcggcaccttggtcaacggttacagcccgttcgccggcctgttctacaacacggaggggttgccgtacttcagtactggtatggccaacacgttcacccagatcgccaagtcggtgggggcgattggtggggcggctccggcggcggccaaggcgttgcccggcctgggggggttgggcggcatgctcggtggtggtgcggccgcggcgcatccggtggcggcgttgggcggtgcgggttcgatcgggggcaagttgtcggtgccggtggcctggtcgggtgccccggccacaccggcgttggggcatgccattccggtcagcagcatcagcgcggcgcccgaggcggccgggggaccgggcaacctgctcggcggcatgcccctggcgggtgccggggcgggtggccacggtgccgccggacccaaatacggcttccgccccaccgtcatggcccgaccacccttcgccgga

SEQ ID NO: 25864 - DNA, 1620 bp, Mycobacterium avium
gtgcgcgaacagcgtcatcgacgagcacagcttcaggtcgtcgggcgagccgaagatctgcccgacggatcggccctgcacccgctcgaccagtcgggcgcattcgcgcagacgcggcccgagcagctcgtggcgcaagtaggcgcgggcctccggcagcgacgagatgccgtaccggtccgccatcgcgctgccacccaggccgcgcagctgcggaaagacgaaccacatccaatggcggcgttttcgcccggcacgcaactcgtcgacgacgtcggcgtagaccggctcctgggcgtccacgaagcgttcgagatcgaacgggtcggcggccgagtccatatgactacggtggcacatgtgggagtccaacggcgagtgcccagggtgcgcgacctcgcgccactgatgcagttcaagcggcccgagttcaacgcgaccaaacgccgcctgcgatccgcccacaccatcgaggacctgcgccgcatcgccaaacgccgcaccccgaaggcggccttcgactacaccgacggcgccgccgaggacgagctgtccatccagcgcgcccgacaagccttccgcgacatcgagtttcacccgacgatcctgcgtgacgtcagcaccgtgaccgcgggatgggatgtgctgggcgggccggtggcgctgccgttcgggatcgccccgaccggcttcacccggctgatgcacaccgagggcgagatcgccggtgtgcgggcggcggcgcgggcgggcatcccgttctcgctgtccaccctgggcacctgcgcgatcgaggatctggcggctgcagttccccagtcgcgcaagtggtttcagctgtacatgtggaaagaccgggaacgctcgatggcgctggtgcgccgggccgccgacgcaggtttcgacaccctgctggctaccgtcgacgtcccggtgtccggggcgcggctgcgggacaaccgcaacggcatgacgatcccgccgacgctgacgctgcgcaccgtgctggacgcggtgccgcacccgaaatggtggttcgacctgttgaccaccgagccgctggcgttcgcgtcgctggatcgctggcccggcaccgtcgcggagtatctgagcaccatgttcgaccccagcctcaccttcgacgacctggagtggatcaaggcgcggtggccgggaaagctggtggtgaaggggattcagacgctggacgatgcccgcgccgtcgtcgaccgcggcgccgacggcatcgtgttgtcgaatcatggtgggcgccaactggatcgggccccggtgccgttccacctgctgcccaccgtggcgcgcgagctgggcaagcacaccgagatcctgctggacaccgggatcatgtcgggcgccgacatcgtcgcggcgatcgcgctgggggcccgctgcaccctggtcgggagggcctatctgtacgggctgatggccgggggtgaggccggcgtgacccgggcgatcgagatcctggccgaaggcgtgatccggacgatgcggctgctgggcgtcacctgtctcgaggagctgtcgccgcggcatgtgacgcagctgcggcggctggcgccgctgccgcccgtcgagccgccagtgacgccggcg

SEQ ID NO: 25865 - DNA, 816 bp, Mycobacterium avium
atgacgtgggccgacgaggtgctcgccgggcatccctttgtcgttgcccaccgcggcgcgtcggccgcccggcccgaacacaccctggccgcctacgacctcgccctcaaggagggcgccgacggcgtggaatgcgacgtgcggctgacccgcgacggccacctggtgtgcgtgcacgaccgccggctggaccggacctcgacgggggccgggttggtcagcacgatgacgctggcgcagctgcgtgagctcgagtacggggcctggcacgacagttggcgcgaggacggcgcgcacggcgacaccagtttgctgacgctggacgcgctggtgtcgctggtgctggattggcgccggccggtgaagctgttcatcgagaccaagcacccggtccggtacggctcgctggtggagaccaagctgctggcgctgctgcaccggttcggcatcgccgcgcccgcctccgccgaccggtcccgcgcggtggtgatgtcgttttcggcgtcggcggtgtggcggatccggcgggccgcgccgctgctgcccaccgtgctgctcggcaagaccgcccgctatctgatcagcggggcgccgacggcggtcggggcgaccgcggtggggccgtcgctgccgacgctgagggagtatccgcagctcgccgaccgcgccatcgcgcagggccgggcggtctactgctggaacgtcgacgactaccaggacatcgacttctgccgcgacgtcggcgtggcctggctggccacacaccacccgggccgcaccaaggcgtggctgcagggccaccgcgacggcaacggc

SEQ ID NO: 25866 - DNA, 2889 bp, Mycobacterium avium
atgagtacccagcaattggagacccagcaggccgcgcgaccacgggtggcgcggatcattcaccgtttgtccgttcccatcattttgggctggctggcggttgcggtgctgatcaccatcggcgttccctcgctggagcaggtcgaggccgagcacgcggtgtcgctgagtcccattggggcgccgtcgttcaaggcgatggagcgcctcggcgaggacttcaaggaaaccaacaccggcgcgctggccatgatcctgctggagggccagcagcaactcggcgacgacgcgcacacctactacgaccgcctgattcggctgctggaaaacgaccacaagcacgtgcagcacgtgcagaacttctggggcgatccgctcacccgcggcgccgcgcaaagccaagacggcaaggccgcctatgttcaggtgaacctgaacggaaatgcgggcgcggccgccggtgacgaatccgtagcggcaattcggaagctggtccaggaggcttctcccccgccaggtctcaaggtttatgtcaccggtcccgcaccgatcgtcgcggacatgaacatcgcggggcaaaagacggtcatgctggtgacgctggccagcctgatcgtcatcttcgtgacgctgctgctggtgtatcgatcggtcataaccgtcattctgctgttgctgatcgtcggcctggaattgcagatcgcgcgcggaatggtcgcgctactgggccatctcggggtggtcggtctcaccacgttcgcggtcaacctcttggtggccgccgtcatcgcgaccggcaccgactacggcatcttcttcgtcggccgatatcaggaggcacggcaagcgggcgagagccgggaagaggccttctacaccacgttcaacggggtggccaaggtggtgctggcctccggcttgaccatcgccggtgcggtgctgtgcctgagcttcacccgactcccctacttccagccgctcggtatcccggttgcggtgggcatctcgatcgcggtcctggtcgcactgacgctcgggccggcgctgctggccgccggggcccggttcggcctgttcgagccgcgccgggcggtctcggcccggcggtggcggcgcatcggcaccgcgatcgtgcgctggccggcgcctattctcatcgccaccctggcggtctcgctggtcggactgctggcgctgccgaattaccggcccagctatgacgaccagaaattcattccggacagcatcccggcgaacgtgggctatgcggcggcggcgcggcatttccccgggcagcggatgcagatgccggagatcctgctggtcgagaccgaccatgatctgcgcaacccgacggacatgttggtgatcaacaaactcgccaagggtgttcttgcggtccccggcatcgccaccgtgcagacggtcacccgccccgagggagttccgttgcagcacacgacgattccctggatcatcagcatgggccaggccagtcagctgcagaacatggccttccagaaggaccggatgaacgacatgctcgtccaggccaacgagctgggcaagatgatcggcatcatgcagcacatgctggacctgatgcgcgagctcgtcgcaacgacgcaccacatggtccagacgacacatgaaatgcaggagatcaccggagaattgcgcgatcacatctccgatttcgaggacttctggcgtccgctgcgcagctacttctactgggagaagcactgctacgacattccgatctgtttctcgctgcggtccatcttcgacgcactcgacggcgtcgacgagatcaacgacaaactgggcgatctggtgaagaacctcgatcagcttgacgccatcctgccgcagctggtcatgcagatcccgccgatgatcgaaaccatgtcgggcatgcgcaccatgatgctgaccatgcacagcaccatgtccggcgttatcggccaaatggattccagcgcaaaggatcccagcgcgatggggcaggctttcgacgcctcccgcaacgacgactcgttctacctgccgccgggcatcatcaacggctccgactccttcaagcgggtggagaaggtgttcatgtcgccggacggcaaggacgtccggctgcttatcactcaacggggtgaccccgccacacccgagggtctgtcccgggtggaacagatcaagaccgcggccgaagaatcgctcaagggaacaccgctggagaattccaagatctatctgaccggcacggcggcgatcaccaaggacctggtggatggatcgaaattcgatctgttgatcgcaggcgtctccgcgctctgcctgatcttcatcatcatgctgatcatgacgcgcagcttcatcgcggccatggtgatcgtgggcacggtgttgctgtcgctgggggcgtcgttcgggttgtcggtgctggtgtggcagtacctgctgcacatgcagctgcactggaccgtgctgtcgacttcggtgatcgtgttgttggcggtggggtccgactacaacctgctactggtgtcccggatgaaggaggagctggcggccgggatccacaccggcatcatccgcgcgatgggcggcaccgggaaggtggttaccaacgccggtctggtgttcgcgttcaccatgggcgcgatggtggtcagcgacctgcgcagcatcggccaggtgggcacgacgatcggcctgggcctgctgttcgacacgttgatcgtgcgggcgttcatgacgccgtcggtcgccgcgttgctgggccgctggttctggtggccgcagctggtccgtccccgcccggccagcaccatgctgcgcccgaccggtccccgtccgttggtgcgttcactgctcctgaagcagccgcag

SEQ ID NO: 25867 - DNA, 987 bp, Mycobacterium avium
gtggttgacgattcaccggacttcgggcacgtgcccgtcctgctcgagcgctgcgtcgagctgctcacccccgcactgacccgtcgtcaccccgacggctcgggcgcggtcctgctggacgccaccctgggcgcgggcgggcacgccgaacggttcctgaccgacctgcccgggctgcggctgatcgcactcgaccgcgatcccagcgcgctcgagatcgcccgggaacgcctggcgcggttcgccgaccggatcaccctggtgcacacgcgttacgacggcatcgccgcggcactgaccgaatccggttacgccgcaaccgaatcggtcgacgggatactgttcgacctcggggtgtcgtcgatgcagctggatcgccccgagcggggcttcgcctacgcccaggacgccccgctggacatgcggatggacccgggatcgccgctgaccgcggccgacatcctcaacacctacgacgaggccgagctggcggacatcttgcaccgctacggcgaggagcggttcgcgcgccggatcgccgcgcagatcgtgcgccgccgcgccaaagagccgttcacctccactgcggacctggtttcccttctctaccaagccattccggcaccggcccggcgcaccggcgggcacccggccaaacgcacgttccaggccctgcggatcgccgtcaacgacgaactggacacgctgcgctgcgcgcttccggccgcgctggacgcgctcgccgtcgacgggcggatcgtggtgctggcctaccagtccctggaggaccggatcgtcaagcggttgttcgcccaggcggtcgcctcccgcaccccggtggacctgccggtcgaacttcccggccacgagccacggttccgcgccctgacccacggcgccggacgcgccgacgccgccgagatcgaacgcaacccgcgcagtgccgcagtgcgattgcgggccctgcaacgaacgcaagcaccgctg

SEQ ID NO: 25868 - DNA, 429 bp, Mycobacterium avium
gtgtttctcggcacctacacgcccaaactcgacgacaaggggcggctgacgttgcccgccaagttccgcgacgcactggcaggggggttgatggtcaccaagagccaggaccacagcctcgccgtctacccgcgggcggaattcgagcaactggcccgccgggcgagcaaggcctccaagagcaacccggacgcccgggcgttcctgcgcaacctcgccgccggcaccgacgaacagcatcccgacgcccagggccgcatcaccttgtcggccgaccaccgtcgttacgcgagcctgtccaaggactgcgtggtgatcggggcggtcgactacctggaaatctgggatgcccaggcctggcaggactaccagcagacccacgaagagaacttctccgcggcaagcgatgaagcactcggcgacatcatc

SEQ ID NO: 25869 - DNA, 348 bp, Mycobacterium avium
aggcgcgccgacatcgcggcggtgcgcggcgcggtcggcggcgccgtgctcaaggtgatcgtggagtcgtcagcgctgctggcgctggccgacgagcacaccctggtccgggtgtgccgcgccgccgaggacgccggcgccgacttcgtcaagacgtcgaccggattccacccgtccggcggcgcatccgtgcgggcggtcgccctgatggccgaggccgtcgggggccggctgggggtgaaggccagcggcggcatccgcaccgccgccgatgcgctggcgatgctggatgccggcgccacccggctgggattgtcgggcacccgggccgtgctcgacgggctgggc

SEQ ID NO: 25870 - DNA, 1239 bp, Mycobacterium avium
gtgaacatccaattgttcctcttgatcattgtcgtaatcacggcattggctttcgatttcaccaacggcttccatgacacgggcaacgcgatggccacctcgatcgccagcggtgcgctcaagcccaagaccgcggtcgcgctctcggcggtgctgaatctggtgggcgccttcatgtccaccgccgtcgccgccaccatcgccaagggcctgatcgactccaacatcgtcacgctggagctggtgttcgccggcctggtcggcggcgtggtctggaacctgctgacctggctgctgggtatcccgtcgagctcgtcgcacgcactgatcggcggcatcgtcggcgccaccatcgccgccgtcggcgcgcacggggtgatctggaagggcgtgatctccaaggccatcatcccggccatcgtctcggcgatactggccatcctggtcggcgcggtcgccacctggctggtctatcggatcacccgcggcgtcccgaagaagcgcaccgaggccggtttccggcgcggccagatcggctcggcgtcgctggtgtcgctggcgcacggcaccaacgacgcgcagaagacgatgggcatcatcttcctggcgctgatctcctacggctcggtcagcaagaccgcggccatgccgccgctgtgggtgatcgtcagctgcgcgctggccatggcgaccggcacctacctgggcggctggcggatcatccgcaccctgggcaagggcctggtggagatccagtcgccgcagggcatggcggccgagtcgtcgtcggccgcggtgatcctgctgtccgcccacttcggctacgcgctgtccaccacccaggtctgcacgggttcggtgctgggcagcgggctgggcaagcccggcggcgaggtccgctggggcgtggccggccggatgggggtggcctggctggtcaccctgccgctggccgggctggtcggcgccgtcacctactggatcgtgcacctgatcggcggctaccccggcgcgatcatcggcttcgcgttgctggtcgcggtgtcggccaccatctacctgcgctcgcgcaaggtgaaggtggaccaccacaacgtcaacgccgagtggaagggcgacctgaccaccgggctggaaggcgccgacgaccactccccgcccccggacgccgggcccccgttcggcgggccgggcgaccggtaccagtccgacgacccgacgctcaaggcgagcgcgtca

SEQ ID NO: 25871 - DNA, 765 bp, Mycobacterium avium
atgcggcggatcgggatcctgaccgggttgctgtcggtggtgctgattgccggtatgaccgggtgtggctccaaatctcagccgccgccgaccgcgggcaaactgatggtgttcgcggccgcgtcactgcgacccgcgttcacccagatcgccgagcggttcaaggcccaaaaccccggtaccggaatcgaattcgagttcgccggctcctccgagctggccacccagctgacccagggagcgacggccgacgtgttcgcctcggccgacaccgcgcagatggacgtcgtcgccaaggcgggcctgctcgccgccgacccgacgaacttcgcctccaacaccctggtcatcgtcaccgcgccgggcaacccgaagcggatcgggtcgttcgccgacctggcgaggcccgggctgaccgtggtgacctgccagcggccggtgccctgcggggcggcggcccaccgcgtggaggacagcaccggcgtgcacctcaaccccgtcagcgaggagcccagcgtcaccgacgccctcaccaaggtcaccagcggccaggccgacgccgcgctggtctacgtcaccgacgccaggaccgcggggagcaaggtggcgacggtgaacttcccggaggccgccggcgcggtgaacgtgtacccgatcggtgtgctgaagcaggcgccgcttgccacccaggcgcggaatttcgtcgacctggtgacctccccgcccgggcagcagatcctggcccaggccggcttcgccaaaccc

SEQ ID NO: 25872 - DNA, 975 bp, Mycobacterium avium
gcccggcgcaccggccaggccgtcgtcgagctgttgcgccgcggcatcaccgcccgcgacatcctcaccaaggaggcgttcgagaacgcgatcgcggtggtgatggcgttcggcggctccaccaacgcggtgctgcacctgctggccatcgcccacgaggccgacgtggcgctgtcgctcgacgacttcagccggatcgggtcgaaggtgccgcacctggccgacgtcaagccgttcggccggcacgtgatgaccgacgtcgaccacatcggcggcgtgccggtgatgatgaaggcgctgctggacgccgggctgctgaacggcgactgcctgacggtgaccggtgcgacggtggcgcagaacctggccgcgatcgccccgcccgacccggacggcaaggtgctgcgggcgctgagcgatccgctgcacccgaccggcggcatcaccatcctgcgcgggtcgctggcgcccgagggcgcggtggtcaagtccgccggcttcgattccgacgtgttcgaaggcaccgcaagggttttcgacggcgagcgggccgcgctggacgcgctggaggacggcaccatcaccaagggcgacgcggtggtgatccggtacgagggccccaagggcgggcccgggatgcgcgagatgctcgccatcaccggcgcgatcaagggcgccgggctgggtaaggacgtgctgttactcaccgacggccgcttctccggcgggacgacgggactgtgtgtcggccacatcgcgcccgaggcggtggacgccgggccgatcgcctttctgcgcgacggcgaccgcatccgcctggacgtcgccaaccgggttctggacgtactcgtcgatccggccgaattcgactctcggcgaacagctttcaccccgccaccgccccgctacaagaccggggtgctggccaagtacgtcaaactggtcggttccgcggcgatcggcgccgtctgcggc

SEQ ID NO: 25873 - DNA, 1038 bp, Mycobacterium avium
gtggccgcggtgactccagttttcgtcgatgtcgacaccggcgtggatgatgcgctggcgctgatgtacctgttcgccagcccggacgccgacgtggtcggcatcgcatcgaccggcggaaacgttgcggtggagcaggtttgcgaaaacaacctgggcctgctgcagctgtgcgggctgaccggcatcccggtgtccaaggggtccgggcagaccctgaccggcccgatgcggctgccgtcaaaagtccacggccccaggggattgggctatgccgagctgccgcccagcgaccaccgggtcaccgaccacgactcggcgagcgcctgggtgcgcgccgcgcacgcccaccccggggagctgatcggggtggcgaccgggccgctgaccaacctggcgctggcgctgcgggccgagcccgcgctgccgaccctgctgcgccggctggtgatcatgggcggctcctacgaccatcggggcaacaccaccgcggtggcggaatggaacatcagcgtggaccccgaggccgcggccgaggtgctggccggctggggtggcgccgacgtcgtgcgggagcggctgccgatcctgtgcgggctggacctgacccgcaaggtggcgatgacgccggatcacctgacgcggctggccaccgccgcggactccggcacccgcccgctgagcgccgacgacgaacccggaacccggtcggcggccgccaacccgctgatccgggtgatcgaggacgcgatgcggttctacctggaggcctatcacgacctcggccacggctatcaggcgcacatgcacgacccgttggccgccgccgtcgcgctggaccccacgctggtggccacccgtccggcgacggtggagatcgagctgaccggcaccctgacccgcgccatgacggtcaccgactggtcgggtcgtcgagaacccaacgcgctcatcgggattgatgtggactcggcggcattcttcgaccggttcatcgaacgggtggggccgttcgcccgccgggtgggcggcggccgg

SEQ ID NO: 25874 - DNA, 1041 bp, Mycobacterium avium
  misc_feature (894)..(894): n=g, a, t or c
gtgactggcacgcacggcaagacgacgacgacgtcgatgctgatcgtcgcgctgcagcactgcgggcgcgacccgtccttcgcggtcggcggcgagatgggggaggccgggaccaacgcccaccacggcagcggcgactgcttcgtcgccgaggccgacgaaagcgacggctcgctgctggagtacacgcccgacgtcgcggtggtcaccaacatcgagaccgatcacctggacttctacggcagcgccgacgcctacgtcgcggtgttcgacgcgttcgtggagcggctggcccccggcggcgcgctggtggtgtgcgtcgacgacccgggcgcggccgcgctggcccggcgcaccgccgaactcggaattcgggtgctgcgctacggatccgggccgcacggccaagccccgtccggcgaaccgctggccgccaccctggtgtcctggcagcagcagggtaccgaggcggtcgcccagatccggctggccggcgagcagcaacacccgctggtgatgcggctctcggtgccggggcggcacatggcgctcaacgcgctgggcgcgctgctcgcggcgatcgagatcggcgcgccgaccgaggcggtgctggacgggctggccggcttcgagggggtgcgccgccgcttcgaactggtcggcaccgccggtgggtcggcccccagctcgacggtgcgggtgttcgacgactacgcccatcaccccaccgagatcgccgccacgctggcggcggtgcgcaccctgctcgaacagagcggcggtggtcgcagcatcgcggtgttccagccccatttatattcgcgcacaaaggctttcgccgaggagttcggtcacgccctggacgccgcggacgaggttttcgtgctggacgtntacggcgcgcgcgaacagccgctggccggtgtcagcggagccagcgtcgccgagcacgtcagcgtgccggtgcgctacctgccggacttctccgcggccgccgagcaggtcgccgcggccgccgcgcccggcgatgtcatcgtcacc

SEQ ID NO: 25875 - DNA, 261 bp, Mycobacterium avium
ggttggctgctgagcctgtccggcaccgtgagcttccgcaacgcccgcgccctgcgcgaagccgtgccgttgataccgcccgggcagctgctggtggaaacggatgcgccgtttttgaccccgcacccgcaccgggggacggccaatgagccctactgccttccttatactgttcgggcgatcgccgaactggtggatcgccgccccgaagagctggccgcggtgacgacggacaatgctcgacgggtgtacggactggcc

SEQ ID NO: 25876 - DNA, 1368 bp, Mycobacterium avium
atgcttcccgacggcccggttttgcgcgaatcggctgctctaccctcgatcactatgcccgcggcgaaggccgggctgacgcccgagcagatcagcgcgatcgacgccgcgcacctgtggcacccttacagcaccatcggcgccgaatccgtcgccccggtggtggcggtcggcgcccgcggcgcctggctgaccctgatccgcgacggcgccgaggtccgggcgctcgacgccatgagctcctggtggaccgcgatccacggccacggccacccggtgctggacgcggcgctgtccgaccagctcgccgccatgaaccacgtcatgttcggcgggctcacccacgaacccgcggcgcggctggcccagctgctggtgagcatcaccccggccgggctggacaccgtgttcttcagcgactcggggtcggtgtcggtcgaggtggcggtgaagatggcgctgcagtactggcgcagccgccaccggccggccaagcaccggctgatgacctggcggggcggctaccacggcgacaccttcaccccgatgagcgtctgcgaccccgagggcggcatgcattcgctgtggaccgacatcctggcccggcaggtgttcgccccgcaggtgccccgtgactacgacccggcctacagcgcggcgttcgaggcgcagctggcccggcacgccgacgagctggccgcggtgatcgtcgagcccgtcgtgcagggtgccggcggcatgcggttccacgacccgcggtatctgcgcgacctgcgcgaggcctgcacccggcacgacgtgctgttgatcttcgacgagatcgccaccgggttcggccgcaccggcgagctcttcgccgccgaccacgcccgggtcagccccgacatcatgtgcgtcggcaaggcgctgaccggcggatacctcagcctggccgccaccctgtgcagcaccgacatcgcgcaggccatcagcgccggcgaggccggggcgctgatgcacgggcccaccttcatggccaacgcgctggcctgcgccgtgtcggtggccagcgtcgaggtgctgctcgggcaggactggcggtcgcgggtcgccgagatctccgccggcctggcggccgggctggaacccgcccgggagctacccggcgtgaccgacgtccgggtgcgcggcgccatcggcgtcatcgaatgcgaccggcccgtcgacctggccgtcgccaccccggcggcgctggaccacggcgtctggctgcgcccgttccgcaacctgatctacgccatgccgccctacatctgcccgcccgacgagatcgcccggatcgcctcggcgatggtgcaggtcgccgcgcgcctcggctctcgtaggctc

SEQ ID NO: 25877 - DNA, 1143 bp, Mycobacterium avium
atgaaagcacccatcgaggtttccccgctggcctggctggacgcggtcgaacagcagcgccgcgcggccgggctgcgccgctcgctgcggccgcggccgcccgtggccaccgagctggacctggcctccaacgactacctcgggctgtcccagcaccccgacgtgatcgacggcggggtcgccgcgctgcgcctgtggggcgccggggcgaccgggtcgcggctggtcaccggcgataccgagctgcaccagcagttcgagtccgagctcgccgactacgtcggcgcggccagcgggctgctgttctcgtcgggctacgcggccaaccttggggccgtcgtgggcctgtcgggccgcggggcgctggtggtctccgacgcgtactcgcacgcctcgctggtggacgcctgccggctgtcgcgggcgcgggtggtagtgacgccgcatcgcgacgtcgacgcggtgctggcggcgctggcggaccgcgacgaggaacgcgccgtcgtcatcaccgagtcggtgttctccaccgacggcgccctggcgccgctgcgcgagctgcacgaggtgtgccgccggcaccgggccctgctgatcgtcgacgaggcgcacggcctgggggtgcgcggcggcgggcgcgggctggtgttcgaggccggcctggccggcgcgcccgacgtggtcatgaccaccacgctgtccaaggcgctgggcagccagggcggcgcggtgctggggccggcggcggtgcgggcccatctgatcgacgcggcgcgcacgttcatcttcgacaccggcctggccccggcggcggtgggcgcggcgcgcgccgcgctgggcgtgctgcgcgccgaaccctggcgggtcggtgcggtgctgcgccacgccggcgtgctggccgaggtctgccgggttcgcgaggtgccgcagtcggcggtggtgtcggtgatcctgggcgacccggacgtggcggtggccgccgcgaccgcctgcctggatgccggtgtgcgggtgggctgctttcgtcccccgacggtgcccgccgggacgtcgcggctgcggctgaccgcccgcgcgtcgctggacgacgccgaactggaggtcgcgcgccgggtgctcaccgatgtgctcgccgggctcggc

SEQ ID NO: 25878 - DNA, 777 bp, Mycobacterium avium
atgagtgctgctgagccggccctggccccgctgtcgccgggggcgccggtgctggtggccggcggcgggatcaccggcagggcggtgctggcggcgctgaggagattcggcgcggcgccgaccctgtgcgacgacgaccccgccaccctgcgcggatacgtggattccggagtcgacaccgtctccacatcggcggccgccgaacggatttcgcgctatgccctggtggtcaccagccccgggttcgcgccgaccgcaccgctaccgctggccgccgcggcggcgggggtgcccgtgtggggggacgtggagctggcctggcgcctagacgccgccggacactacgggccgccgcgccgctggctggtggtcaccgggacgaacggcaagaccaccaccacgtcgatgctgcacgccatgctgaccgcggcgggccggcgaagtctgttgtgcggcaacatcggtagcccggtgctcgacgtgctcgaccaacccgccgagctgctggccgtcgagctgtccagcttccaactgcattgggcgccctcgctgcggccggaggggggagcggtgctcaacatcgccgaagaccacctcgactggcacggcacgctggccgactacgccgcggccaaggcccgggtgctcgacggccgggtggccgtcgtcgggctggacgacagccgggccgcggcgctgctgagcaccgcccgggcgccggtgcgggtcggtttccggctgggcgagccggccgccggggagctcggtgtgcgcggc

SEQ ID NO: 25879 - DNA, 1077 bp, Mycobacterium avium
atgagacagatcctcatcgccgtcgccatcgcgctgaccgtgtcgatcctgttgaccccggcgctgatccggttgttcacccggcagggtttcggtcaccacacccgcgaggacggcccgcccacccaccacgccaagcggggcacgccgtcgatgggcggggtggcgatcatcgcgggcatctgggccggctatctgggaacgcacctggccgggctggccttcgacggcgagggcatctccgcgtcggggctgctggtgctgagcctggccaccgtgctcggcatcgtcggattcctcgacgacctgatcaagatccgcaggtcgcgcaacttgggcctgaacaagaccgccaagaccatcgggcaggtcgcggccgcggtgctgttcggtgtgctggcgttgggattccgcaacgccaacggcctgacgccggccagcgccgacctgtcctacgtgcgcgagatcgccaccgtcacgctggcgcccgggctgttcgtgttgttctgcgtggtcgtcgtcagcgcctggtccaacgcggtcaacttcaccgacggcctggacgggctggccgccggcagcatggcgatggtcaccgcggcctacgtgctgatcacgttctggcagtaccgcaacgcgtgcgtcaccgcgcccggcctgggctgctacaacgtgcgggacccgctggatttggcgatcgtcgccgccgccaccgcgggcgcctgcatcggctttctgtggtggaatgccgcgcccgccaagattttcatgggcgacaccggatcgctggccctgggcggcatcatcgccggcatctcggtcaccagccgcaccgagatcctcgccgtcgtgctgggctcgctgttcgtcgccgaggtgagctcggttgtgttgcagatcttgacctttcgcaccaccgggcgacgggtcttccggatggcgccgtttcaccaccatttcgagctggcgggctgggccgagaccaccgtcatcatccggttctggttgctcaccgcgatcgcctgcggcctgggcgtggccctgttctacggtgagtggctggccgcgatcggtgcc

SEQ ID NO: 25880 - DNA, 981 bp, Mycobacterium avium
gtgggggtggtgctcaacgtcggcaccgcacacctgggcgagttcggctcgcgggaagccatcgcacgcaccaaatccgaactgccgcaatcggttccagcgtccggcgtggtggtcctcaacgtcgacgaccccaccgtggcggccatggccgaggtgaccgccgcccgggtggtcagggtcagccgcgccgagcacaccgaggccggccccagcgacgtgtgggccgggccggtgtcgctggacgagttggcccggccggggttcacgctgtatcacagccacgccggtgggacacgacaggcgcgggtgcaactcggcgtctccggcgaccaccaggtcggcaacgcgctgtgcgcggccgcggttgcgttggagtgcggcgcgacggtcgagcaggtggtggccgcgctcgccggggcgggcccggtgtcgcggcaccggatgcaggtcagcacccgcggcgacggcgtcacggtgatcgacgacgcctacaacgccaatcccgattcgatgcgggccgggctgcaggccctggcctggatcgcccgcggcggggcggaaccgggcgccccggcccggcgcagctgggcggtgctgggcgagatggccgaactcggcgacgacgcgatcgccgaacatgatcgcatcggccggctggcggtgcgcttagatgtgtctcgactcgttgtcgtgggaactgggaggtcggtgagcgccatgcaccacggtgcggtcatggagggttcctggggttcggccgacaagggagccgtcaacgtgcccgacgccgaggcggcgcttgagctcttgcgggccgagctgcaacccggtgacgtggtgctggtcaaggcatccaacgcggccgggctgggcgcactcgccgacgcgctggcccgtgacgatcgcgagggcggcgcagccggacgaagcgggtcgtcaccattggcccgtgacgactcagccggcgggacccgccga

SEQ ID NO: 25881 - DNA, 546 bp, Mycobacterium avium
atgacacgcgttgtcttatccattggctccaatctgggggaccggctggcgcggctgcagtccgtcgtcgacgggctcggcggcgcggtgcgcgccatctcgccggtgtacgaaacccaaccctggggccgggtggatcaggcgccgtttctcaacgcggtgctgatcgccgacgacccggcctgcgacggccagggctggctgcgccgggcgcaggaattcgagcgggccgcgggccgggtgcggggcgaacgctggggcccgcgcaccctcgacgtcgacctgatcgcctgctacggcgacggcgaggtgatctcccgggagaacaacctgaccctgccgcatccgctggcgcatctgcgggccttcgtccttatcccctggctggccgtcgacccggacgcgcggctgacggtggccgacgggccgcaaccggtcgcccgcctgctggcccagctggaccaagccgaccgggacggtgtccggccgaccggcctgacgctgacaccgcccgcgggctcgtcggccgattcgggggcgggcagc

SEQ ID NO: 25882 - DNA, 333 bp, Mycobacterium avium
gtgatgccgccgcggggcagccagatcggcaggggtgaaacgacgatgaccaacgaacacgggtactcgcagcagaaggacaactacgccaagcggctgcggcgcatcgagggccaggtgcgcggcatcgcccggatgatcgaggaggacaagtactgcatcgacgtcctcactcagatcagcgccgtcaacagcgcgctgcgctcggtcgccctgaatttgctcgacgagcacctgggccactgcgtcacccgtgcggtggccggcggcggcgacgacgcggacgagaagctcgccgaggcgtccgccgccatcgcgcgcctggttcgctcc

SEQ ID NO: 25883 - DNA, 1242 bp, Mycobacterium avium
atgactgtgatgactgccgaaaccgccaacgcagccgcgcggacgtggaccccacggatcgcggctcagctcgccattctcgccgccgcggccttcacctatgtcaccgccgagatcctgccggtcggcgcgctgcccgcgatcgcccgcaatctgcaggtcagcctggtcctggtgggcaccctgctgtcctggtatgcgctggtggcggccctgaccacgatcccgctggtgcgctggaccgcgcacctgccgcgccgccgggtgctggtggcgagcctgacctgcctgaccgcctctcagctgatctcggcgctggcgcccaacttcgcggtgctggccgccgggcgggtgctgtgcgcgatcacccacggcctgttgtggtcggtgatcgcgccgatcgccacccggctggtgccgcccagccacgccgggcgcgccaccatgtcgatctacgtcggcaccagcctggcgctggtggtgggcagcccgctgaccgcggcgctgagcctgatgtggggctggcggctggccgtcgtgtgcgtcaccgtcgcggccgccgtcgtcaccgtcgcggcccggctgatgctgccggagatggtgctcaccgagcatcagctggcgcacgtcgggccacgctcgcggcaccaccgcaacggccggctgatcaccgtgagcctgctggccatggtggcggtgaccggccatttcgtgtcctacaccttcatcgtcgagatcatccgcaacgtggtcggggtgcgcgggccgaccctggcctgggtgctggccgcctacgggctggccgggctgctgtcggtgccgctggtcgcgcggccgctggaccaccggcccaagagtgcggtgatcctgtgcatgacgggtctgacggccgccttcgcggtgctgaccgcgctggcgttcggcggcccgaccggggcgactaccgcgctgatcgggaccgccgccatcgtgctgtggggagcgatggccaccgcggtgtcgccgatgatgcagtcggccgcgatgcgcaacggggccgacgacccggacggcgcctcggggctgtacgtgacggccttccaggtgggcatcatggccgggtcgctgctgggcgggctgctctatgagcgcagcgtcatcctgatgctgagcgcttccggggtgctgatggcggtggcgctggtcggcatcgccgccaaccggcggatgctggacgttgccccgacaagctcacgcgattca

SEQ ID NO: 25884 - DNA, 1560 bp, Mycobacterium avium
gtggtgtcggtgcccacggggttgcgccccagcgccgtccccggcgtgcggctgcccgcgctggccgaccaggtcggcgcggtgatggccggcccggaccggcgcgctgctgtccccgacgtcaccgtcaccggcgtgaccctgcgcgcccaggacgtgctgcccggcgacctgttcgccgcgctgcccggtgcgacgacgcacggcgcccggcacgccgccgaggcgatcgagcgcggcgcggtcgcggtgctcaccgatgccgcgggtgtcgcgcagctgaccggcggccggaccacgccgacgctgctgcaccccaggccccgcagcgtgctcggggagctggccgccgccgtgtacgcgcacccgtccgagcggctgaccgtcatcggcatcaccggcacgtccggcaagacgaccacgacgtatctggtcgaatcgggtctgcgcgccgccggccgcacggcggggctgatcggcacggtcggcatccgcatcgacggcgccgacatccccagcgcgctgaccaccccggaggcccccgccctgcaggcgctgctggccgcgatggccgaacagcgggtggacaccgtcgtcatggaggtctccagccacgcgctggcgttgggccgggtggacggaacccgtttcgcggtcggcggtttcaccaacctgtcgcgtgaccacctcgactttcaccccaccatggccgactacttcgaggccaaggccttgctgttcgacccgaactccccgctgcgggcgcaccgcgccgtggtgtgcatcgacgacgaggccgggcgcgaaatggctgcccgcgccggtgatgcggtcaccgtcagcgccgagggacaaccggcgcactggcgggccgtcgaggtggcgccgctggggaccgggggacagcagttcaccgtgatcgatcccgccggcgtccagcaccgggcgggcattcggctgcccggccactataacgtcgccaattgccttgtggcgctggcacttctggatgcagtgggagtgtccccggagcaagcggcgccgggactgctgcagaccagggtgcccggccggatggaggagatcgacgccggccaggactttctggcgctggtcgactacgcccacaagccgggcgcgttgcgcgcggtgctgagcagcctcaagcgcccggatcgccggctggcggtggtgttcggcgccgggggcgagcgcgacccgggcaaacgggcgccgatgggcgcgaccgccgccgagctcgccgacctggtggtcgtcaccgacgacaatccgcgcggtgaggaccccgcggcgatccgccgcgaaatcctggccggtgccaccgaaagtggttgcgccgcagaggttatcgagatcggcgaccggcgtgcggcgatccgccacgccgttgcctgggcgggaccgggcgacgtggtgctggtcgcgggcaagggtcatgagaccgggcagcgcaccggcgagcacacccgcccgttcgacgaccgggtggagctggccgaggcgctgcgcgaggccgtcgggcctcgaaaggcgcaggga

SEQ ID NO: 25885 - DNA, 1989 bp, Mycobacterium avium
gtgagccgcggcgactcggcacgggcccgtcggtcccagtcggtgcggccgacgcgtgggccgcgtaaggacgtgcagggcaaggcgattcgccagcccaaacgccgcggcaaggccaacccggccgaggccgcacccgggcactcggcgcggcagcggcgcacccgtcagatcgcgcaattgacctctcggggcggatcgttcgtgttccgtcaccgcgccggcaacgtggtgatgctggtggcgatggtggtggccgccgcccagttgttcgtcctgcaggtgaccaacgcgtcggcgctgcgcgcccaggcggccggacagctcaaggtcaccgatgtggaaaaggcggtgcgcggcagcatcatcgaccggcacaaggatcagctcgccttcaccatcgagtcgcgggcgctgaccttccagccgaagcggattcacaagcaactggaggaggccaagtccaagaacccgtcggctcccgacccccagcagcggctgcgcgacatcgccaaggaggtgtccggccggctgggcaacaagcccgactccgcgaccgtgctgaagaagctgcaaagcgacgagaacttcgtctatctggcgcgcgccgtggatcccgctgtggccagcgcgatctcggacaagttcccggaggtcggctccgagcgtcaagatctgcggcaatacccgggcggatcgttggcggccaacatcgtcggcggcatcgactgggacggccacgggctgctgggtctggaagagtcgatggactcggtgctgtccggaaccgacggctcggtcacctatgaccgcggctccgacggcgtggtgatcccgggcagttaccgcaaccggcatcgggcggtcaacggcgcgatggtgcagctgacgctggacgacgacatccagttctacgtgcagcagcaggtgcaacaggccaagaatgtgtctggcgcgcacaatgtttcggctgtggtgctggacgccaagaccggcgaagtgctggccatggccaacgacaacaccttcgacccgtcccaggacatcggccgtcagggcgacaaacagctgggcaacccggcggtgtcctcgccgttcgagcccggttcggtgaacaaggtgatcaccgcgtcctcggtcatcgagtacggcctgtcgaatcccgacgaggtgttgcaggtgcccggctcgattcagatgggcggggtgtccatccacgacgcgtgggaccacggcgtgatgccctacaccaccacgggtgtgttcggaaagtcctccaacgtcggcactttgatgctggcgcagcgggtcgggccggagcgcttctacgacatggtccgcaagttcgggctgggccagcgcaccaacgtgggcctgcccggtgagagcgcggggctggtgccgccgatcgaccagtggtcgggcagcaccttctcgaacctgcccatcgggcaaggtctttcgatgacactgctgcagatgaccggcatgtaccagacgatcgccaacgacggggtgcggatcccgccgcggatcatcaaggccaccatcgcgcccgatggcacccgcaccgaggagccgcgcccggagggcgtgcgggtggtatcgccgcagaccgcgcagactgtgcgcaacatgctgcgcgccgtcgtgcagcacgacccgatgggttaccagcagggcaccggcccggccgccgcggtgaccggctaccagatggccggcaagaccggcaccgcccagcagatcaaccccgcctgcggctgctacttcgacaacgtctactggatcaccttcgccgggatggccaccgtcgacaacccccggtatgtcatcggcatcatgatggacaacccggagcgcaacgccgacgggacgccgggccactccgcggccccgctgttccacaacatcgccggctggctgatgcagcgggagaacgtgccactgtcgccggaccccggcccgccgctgaccctgcaagccacc

SEQ ID NO: 25886 - DNA, 1263 bp, Mycobacterium avium
atgtcttccgggatcctcgacgagctgggctggcgcggcctgatcgcgcagtccaccgacctcgacgcgctggccgccgaagcccggccgatgaccgtgtacgccggcttcgaccccaccgcgccgagcttgcacgccggacacctggtgccgctgctggcgctgcgccggttccagcgcgccggccaccgcccgatcgtgctggccggcggcgccaccggcatgatcggcgacccgcgcgacgtcggcgagcgcaccctcaacgaggccgacaccgtcgccgagtggaccgagcggatccgcggccagctggagcgcttcgtcgacttcgacgaatccgccaccggcgccgtcgtcgtcaacaacctggactggacccgccaactgtcggcgatcgagttcctgcgcgacctcggcaagcacttctcggtcaacgtcatgctggaccgcgacaccgtccggcgccggctggagggcgacggcatctcctacaccgagttcagctacatgctgttgcaggccaacgactacgtcgagttgcaccggcgctacgggtgcgtgctgcagatcggcgggtccgaccagtggggcaacatcatcgccggggtgcggctggtccgtcagaagctgggcgcgacggtgcacgcgctgacggtgccgctggtgaccgccgccgacggcaccaagttcggcaagtccaccggcggcggcagcctgtggctggaccccgcgctgaccaccccgtacgcgtggtaccagtacttcttcaacaccgcagacgccgacgtgatccgctacctgcgctggttcaccttcctgagcgccgacgagctgggcgagctggagcgggccaccgccgagcgcccccagcagcgcgccgcgcagcggcggctggcccgcgagctgaccgtgctggtgcacggcgaggctgccaccgaggcggtcgagcacgccagccgggcgctgttcggtcagggagagctggagcgcctcgacgcggccacgctggcggcggcgctgcgcgagacgtcggtcgccgagctcaaacccggtgcgcccgacgggatcgtcgacctgttggtggccagcggcctgtccgagagccgcaaggccgcccggcgcaccctcggcgagggcggcgtctcggtcaacaacgtgcgcatcgaccgcgaggactgggcgccgcaaccgtccgacttcctgcacggcaaatggctggtgctgcgccgcggcaagcgcaccatcgccggggtggaaaagctg

SEQ ID NO: 25887 - DNA, 480 bp, Mycobacterium avium
atgaccacccgatcggcccgcgtcatcatcgcctccacgcgtgcgtcgtccggagagtacgaggaccgctgcgggccgatcatcaccgaatggcttgcccagcaaggcttttcgtcggcgcagccggaggtggtcgccgatgggtcgccggtcggtgaggcgctgcgcaaggccatcgacgacgacgtcgacgtcatcctcacctccggcggcaccggcatcgcgcccaccgacagcaccccggatcagaccgtggccgtcgtcgactacctgattcccggcctggccgaagcgatccgccaatcgggtctgccgaaggtgccgacgtcggtgttgtcccgcggtgtgtgcggggtggccgggcagaccctgatcgtcaacctgccgggttcgccgggcggggtgcgcgacggcctgggcgtgctcgccggtgtgctcgaccacgccctcgaccagctcgccggtaaagatcacccgcga

SEQ ID NO: 25888 - DNA, 1200 bp, Mycobacterium avium
gtgacgaccaacgttcccaccgccgccggaggcgagaccgtcagcctgcgtgacccctacccgttcttcgcccgcaaacgccgcgaggccggcgtgttcgccggcacggtgatggactactccaagacgccggagtccctgatgcccaagcaggaatactccgcggtgtccttcgacgcggtcaacaccgtgttccgcgacggccgggtgttcagttccaagccgtacgacaagaccatcgggctgttcatggggccgacgatcctggcgatggagggcaagaagcaccgggaccaccgcaacctggtgtcggcggcgttcaagtccaaggcgctggcccggtgggagcccaccattgtgcgcccgatctgcaacgcgctgatcgacgacttcatcgatgccggaaccgccgacctggtaaggcaattcaccttcgagttccccacccgggtgatcgctcggctgctcgggctgcccgacgaagacctgccgatgttccacacccgcgcggtgcagttgatcagctaccacgtcgactacgaacgggccttcgaggcgtcggcggcgctcaaggactacttcctcgagcagatcgaacaacgcaagtccaagcccaccgaggacatcatcggcgacctggtcaccgcggagatcgacggcgaaaagctcagcgacgaggccatctactcgttcctgcggctgctgttgccggccgggctggaaaccacctaccggtcgtcgggaaacctgttgtatctgctgctgacccacccggaccagttcgccgcgctgcaggccgatcgcgagctgctggcgccggcgatcgaggaggggttgcgcttcgagacaccgctgaccaccgtgcagcggttcaccaccgaagacaccgaactgcacggcgtgcggattccggcgcgttcggtgatcggcgtgtgcatcggttcggcgaaccgcgacgagcggcgctgggagcgttccgaggaattcgacatcttccgtaaacacgtgccgcacatctccttcgccgccggcgagcacacctgcctgggcctgcatctggcgcggctggaaacgcgcgtcgcgatggaatgcctgctgaatcggctgaccaacgtcaccctgctcagcgacggcgacccgcacatccacggtcagccgttccggtctccgacggcacttccggttaccttcgacgccaag

SEQ ID NO: 25889 - DNA, 1902 bp, Mycobacterium avium
atgctggctggactcgcctttggctcagagatcaaacgcttccggcgtagccgattgacgcgcgcggccatcgtcgtgctgatgctgctccccctggtgtacggggcgctgtacctgtgggccttctgggatcccttcggccacaccaacaagatgccggtggcgctggtcaactccgaccggggcgccgtcgtgtccggccagcagttcaacgccggtgcggagatcgccaagagtctgaccgccgacggcagcctggactggcacgtcgtggacttaccggaggcacgcaacggagtcgaccacggcaagtactacttcatggtcgagctgccgccggacttcagcgcggcgatcgcgtcgccggtgaccgggcaacccaagaaggccaacctgattgccgtctacaacgacgccaacaactacatctcgacgagcatcggtcgtaccgccatcgagcaggtactcaacgccgtctccagccggatctcgggacaggccgtcaatcagatgctgtcggtggtggtttcgtccggatcgggtatcaagcaggccgcagacggggcggcccgactcgacgacggcgccggtcagctggcagccggcctggacagtgcgcggaccggctcggcgacgctcgccgccggcgccaagcaactgtccgacggaatcaaccaggccaccgacccgctgctcgcggtgaccaaggcggtatcgcagatcggcggcagcacagagcaattgcagcagggcgccaccgcgctcgcgcaggccaacgatcagctcggcgccatcgccgcggcgcaggacgccgccgcgagctcgctgacgtcggtgatcgaccagctctccgcgcgagcggatccgctggcgaacaacctgcgcggcatccaggatcaactccggggtcaccagttcacgccccagatccgccagcagctcaccgatgcgcagaacgcggcgatcgccatgacttcggggttgcggaccccgggcagtccgctcgcgtcggcgctcgatcagctcggcggcaagggccaggagctgaccaacaagctcacccagctgcgcgacggggcgcagcaagtcgccaccggtaacgccgaattggccggcggcatcgccaagctcgacgacggcgccggccaactcaaagcgggatcggccgagctggcgacgaaactcgccgagggcgccaggcaggtgccgaactggaccacccagcaaaaggaagcggtcgccgacaccatcggcggcccggtgcaactcgaggcttcccatgagaacgccgcgcccaacttcggcaccggtatggccccgttcttcctcaccctcgccctgttcttcggcgccttggtgctgtggatggtgttgcggcccttgcaatatcgtgcgatcgccgcggaggtgatcgcgatccgcgtggtgctcgccagctacctgcccgccgctgcgatcgcgctgttccaggccgtcgttctctactgtgtggtccggttcgccctcggcatgcacgccgtccacccggtggcgatgctggggttcatggtgctgatttccgccgcgttcgtggccgcgacgcaggcgatcaacgctcttgtcggtccggcggtgggccgggtgctgatcatggccctgctcatgctgcagctcgtcagcgcgggcgggatgtatcccgtggaaaccacgtctcggccgttccaggtcctgcaccgcttcgacccgatgacgtacggtgtcaacggactccggcagctcatcctcggcggcatcgacgcccgactgtggcaggcgatcatcgtgctggccgcgataacggccgtcgcactggcgatctcgtgtctgtcggcgcgcagagaccggctgtggaacctcagcaggctgttccccgcgatcaagatt

SEQ ID NO: 25890 - DNA, 1476 bp, Mycobacterium avium
atgcctcggttcgtcgaccgcgtcgtcatccatgcgcgcgccgggtccgggggcaacggctgcgcctcggtccatcgcgagaagttcaagccgctgggcggcccggacgggggcaacggcggccgcggcggcagcatcgtcttcgtcgtcgacccccaggtgcacaccctgctggacttccacttccatccgcacatcagcgcgccgtccggcaaacagggcatgggcaacaaccgcgacggcgccgccggcgccgacctggaagtcaaggtgcccgacggcaccgtcgtgctcgacgagaacggccggctgctggccgatctggtgggcgcgggcacccgcttcgaggccgccgcgggcggacgcggcggcctgggcaacgccgcgctggcgtcgcgggcccgcaaggctcccgggtttgcgctgctgggcgagccgggcgaaacccgtgagctgacactggaactcaagaccgtcgcggacgtcggcttgatcggcttcccctcggccggcaaatcgtcgttggtgtccgcgatctcggcggccaagcccaagatcgccgactacccgttcaccacgctggtgcccaacctgggcgtggtgtcggccggcgagcacaccttcaccgtcgccgacgtgcccggactgatcccgggcgcatcggcgggccgcggcctgggcctggacttcctgcggcacatcgagcgctgcgcggtgctggtgcacgtcatcgactgcgccaccgccgatccgggccgcgacccgatctccgacatcgacgcgctggaagccgaactcgccgcctacacgcccaccctgcaaggcgacgtgacgctgggtgatctcaccgagcggccccgcgcggtggtgctcaacaagatcgacgtgcccgaggcgcgcgagctggcagagttcgtccgtgacgagatcgccgagcgcggctggccggtgttcctggtgtcgacggtggctcgagaagggttgcagcccttgatcttcgggctgtggcagatgatctccgagtaccagtccgcccagccggagatcgtgccgcggcgctcggtgatccgcccggtacccgtcgacgacagcggttttcgggtggaacccgatccgcggcagccgggcgcgttcgtggtcagcggtgcgcggcccgagcgctgggtgcgccagaccaacttcgacaacgacgaggcggtggggtatctcgccgaccggctggcccgcctcggcgtcgaagaggagttgctgcggctgggcgcgcgacccggctgcgcggtcaccatcggggacatgacgttcgactgggagccgcaaacgcctgccggacaacaggttgtgctgtccggccgcggtaccgacgcgcggctggagcgcaccgagcgggtcggcgccgccgagcgcaaggccgcccgcaggcagcgccgcaccggcgacgatgcagagcgcggaaccacagaacgcggtgagaacacg

SEQ ID NO: 25891 - DNA, 264 bp, Mycobacterium avium
atggcacacaagaagggcgcttccagctcgcgcaacggccgggattccgccgcgcagcggctcggggtgaagcggttcggcggccagatcgtcaaggccggcgagatcatcgtccgccagcgcggcaccaagttccacccgggcaccggcgtcggccgcggcggcgacgacacattgttcgccaagcaggccggcgccgtcgaattcggcatcaagcgcggccgcaagaccgtcaacatcgtggcggccgggcaagccgccgac

SEQ ID NO: 25892 - DNA, 2778 bp, Mycobacterium avium
ttgagagttcattcgctggcccgaacgctgggaaccaccagcaagcgggtgctggacgcgctcagcgagctggacggccgcgtgcgcagcgcgcactccacggtggaccgcgaggacgcggtccgggtgcgtgacctgctcgccgcccagccgtcggcagaactggagccggctgccgaggacgcggcgagcggcggaccggacgccgggatcaccggcgaacccgaatcccggctgctgctggaaacccccgacgctaccgagcggccgcattacatgccgctgttcgtcgcgccgcagccgctggaaagcagcgacgacgacggcgatgccgacgagaccgccgactccgacgactcggacggcgacgacgacgagcaggccgaccggccgtccagccggcggcgccgccgcggccgtcgcggacgcgggcgaggccgcggcgagcagggcggatccgacgggccgggcgacggcgacaacgacgagccgcaaaaccggggcaagaagggcggccagtcggacggcgacgacgactccgacggccaggacgccgaggacgccgacgactccgacaccggtgacgacggctcggccgacggcggtaatcgccgccgccgccggcgccggcgccgcaaatccgggtccggcgacgacaacgaggacgggccctcgcccgacgatccgcccaacaccgtcgtgcacgagcggcctccccgcaacggcaaaaacggcggggacgacggcaacggcagctcgagcagcgagatcaagggcatcgacggctcgacccggttggaggccaagcggcaacgacgccgggacggccgcgacgccggccggcgccgcccgccggtgctgaccgaggccgaattcctggcgcgtcgcgaggcggtcgaacgggtcatggtggtgcgcgaccggatccgcaccgagccgccgcatcagggctcgcggtacacccagatcgcggtgctcgaggacggcatcgtggtcgagcacttcgtcacctcggccgcttcggcgtccctggtgggcaacatctacctgggcatcgtgcagaacgtgctgccctcgatggaggcggccttcgtcgacatcggccgcggccgcaacggggtgctctacgccggcgaggtcaactgggaggccgccggcttgggcggatccgaccgcaagatcgagcaggcgctcaaacccggcgactacgtcgtcgtccaggtcagcaaggatccggtcgggcacaagggcgcccggctcaccacgcaggtgtcgttggcgggccgctacctggtttacgtgccgggggcgtcctcgacgggcatcagccgcaagctgcccgacaccgaacgccagcggctcaaggagatcctgcgcgaggtggtgccgtcggacgccggggtgatcatccggaccgcgtccgagggtgtcaaagaggacgacatccgcggcgacgtcacccggctgcaggagcgctggaagcagatcgaggccaaggcgatcgagatcaaggagaaggcggccggcgcggcggtggcgctctacgaagagcccgacgtgttggtcaaggtcatccgcgacctgttcaacgaggacttcgccggcctgatcgtctccggcgacgacgcctggaacaccatcaacgaatacgtgaattccgttgcgcccgacctggtttcgaaggtcaccaagtacgagccggccaccggcccggacggcacgccggggccggacgtgttcgcggtgcaccgcatcgacgaacaactcgccaaggcgatggaccgcaaggtgtggctgccgtcgggcggcacgctggtgatcgaccgaaccgaggccatgacggtgatcgacgtcaacaccggcaagttcaccggctcggggggcaacctggagcagacggtgaccaagaacaacctcgaggcggccgaggagatcgtgcgccagctgcggctgcgcgacatcggcggcatcgtggtcatcgacttcatcgacatggtgctggagtccaaccgcgacctggtgctgcgccggctgaccgaggcgctggcccgcgaccgcacccgtcatcaggtgtcggaggttacgtcgctcgggttggtgcagctgacccgcaagcggttgggcaccgggctggtggaggccttctcgacgtcctgcccgaactgcggcggccgtggcatcctgctgcacgccgacccggtggactcggccccgtcgaacgggcggaagtccgagtccggggggcgccgcggccggcgcaagaagagcaaggccgaggagccggtggtggccaaggtgccggtccactcgcccggcgagcatccgatgttcaaggcgatggccgccggctcgtccacgcaggcggcttccgacgaggacgaatccgccgccgaggaggccggtgacgagctcgagcggaagaaggcggcgcgcgccgaggagctcgaagcggccgaggacaccgaggacctcgaggacaccgaggacgacgacgaggactccgacgactccgacgactccgatgatgaggacctcgatgacgaggacatcgacgacgaggaagatctgggcgacgacgacgaggacctcgagctggacgacgacgacctggacaccgaggactccgacgactccgacgactccgacgactcggaggattccgacgattccgaagaccagcgggacccggcggccgagtgcccgggcgtttcggcactcggccggccacggcgccggcgcgcggccggccggccggccggaccgccgatccacgcggac

SEQ ID NO: 25893 - DNA, 2469 bp, Mycobacterium avium
atgggccacgcgctggagcacaccatgatggacgccctgacccggcgcaagcggatgcagggctacgaggtgctctggcagcccggcatggatcacgccggcatcgcgacccagagcgtggtggaaaagcagctcgccgtcgacggcaagaccaaagaggacttcggtcgcgagctgttcatcgagaaggtgtgggactggaagcgcgagtccggcggcgccatcggcggccagatgcgccggctgggcgacggggtggactggagccgcgaccggttcaccatggacgagggcctgtcccgggccgtgcgcaccatcttcaaaaggctctacgacgccgggctgatctaccgcgccgagcggctggtcaactggtcgccggtgctgcagacggccctctccgacatcgaggtcaactacgaggaggtcgagggcgagctggtgtcgttccgctacggctcgctcgacgactcgggccctcacatcgtggtggccaccacccgggttgagacgatgctgggcgacaccgccatcgcggtgcatcccgacgacgagcgctaccggcacctggtcggcagcagcctgccgcacccgttcgtggaccggcagctgctgatcgtcgccgacgagcacgtcgaccccgaattcggcaccggcgcagtcaaagtcacgcccgcgcacgaccccaacgacttcgagatcgggctgcgccaccagttgccgatgatctcgatcatggacacaaagggtcgaatcgccgacaccggaacacaattcgacggcatggaccggttcgcggcccgggtcgcggtgcgcgaggcgctggccgcgcagggccgcatcgtcgaggagaagcgaccctacctgcacagcgtcgggcattccgagcgcagcggcgagccgatcgagccgcggctgtcgctgcaatggtgggtccgagtggaatcgctggccaaggccgccggtgacgcggttcgcaacggcgacacggtgattcacccgaccagcatggaaccgcgctggttcgcctgggtggacgacatgcacgactggtgcatctcgcggcagctgtggtggggccaccgcatcccgatctggtacgggcccaacggcgaacaacgctgcgtcggcccggacgaaacaccgcccgagggctgggagcaggaccccgacgtgctggacacctggttctcctcggcgctgtggccgttctccaccctgggctggccggagaagacgccggagctggaaaagttctatcccacaagcgttctggtcaccggctacgacatcctcttcttctgggtggccaggatgatgatgttcggcaccttcgtcggcgacgacgacgccatcaccctggacggccggcgcggcccgcaggtgccgttcaccgacgtcttcctgcacggcctgatccgcgacgagtccggtcgcaagatgagcaagtccaagggcaacgtcatcgacccgctggactgggtggacatgttcggcgccgacgccctgcggttcaccctggcccgcggcgccagccccggcggcgatctggcgatcggggaggatcacgtccgggcgtcgcgcaacttctgcaccaagctgttcaacgccacccgctatgcgctgctcaacggcgcgcagctggcgcagctgccgccgctcgacgagctgaccgacgccgaccgatggatcctggggcggctggaagaggttcgcgcggaagtcgattcggcgttcgacaactacgagttcagccgggcctgtgaatcgctctaccacttcgcctgggacgaattctgcgactggtacgtcgaattggccaaaacacaactggccgaagggattacgcataccacggcggtgctggcaacaacactggacacgctgctgcggctgctgcacccggtgatcccgttcatcaccgaggcgctgtggcaggccctgaccggcaacgagtccctggtgatcgccgactggccgcggtcgtccggcgtcggcctggatcaggttgccacgcaacggatcaccgacatgcagaagctggtgaccgaggtccgccggttccgcagcgaccaggggctggcggaccggcagaaggtgccggcccggctggccggtgtcacggaatccgacctggacacccaggtgagcgcggtgacctcgctggcctggctcaccgacgcggggcccgacttccgcccgtcggcgtcggtggaggtgcggctgcgcggcggcaccgtggtcgtcgagctcgacacctcgggcagcatcgacgtcgccgccgagcggcgccggctggaaaaggatctggccgccgcccacaaggagctggcgtcgaccaccgccaaactggccaacgaggacttcctggccaaggcgcccccgcacgtcgtcgacaagatccgggaccgacagcggctggcgcaggaggaaagcgagcggatcaacgcgcggctggccgtgctgcaa

SEQ ID NO: 25894 - DNA, 930 bp, Mycobacterium avium
atgagcatcgccgagaacgtcacgcagctgatcggaaacaccccgctggtccggttgaaccgggtcaccgaaggtgcggtcgccgacgtcgtcgccaagttggaattcttcaacccgggcaacagcgtgaaggaccgtatcggggtggccatgatcgatgcggccgagcaggcgggcctgatcaaaccggacaccatcattctcgagccgacgagcggcaacaccggtatcgcgctggcgctggtggccgcggcgcgcggctaccgctgcgtgctcaccatgccggagacgatgagcgtggagcggcgaatgttgttgcgcgccttgggcgccgagatcgtgctgacgccgggcgccgacggcatgccgggcgcgatcgccaaggccgaggaattggccaagagcgacgaccggtatttcgtgccgcagcagttcgagaacccggccaacccggcgattcaccgcagcaccaccgcggaggaagtgtggcgcgacaccgacggcaaggtcgacatcttcgtcgccggcgtcggcaccggcggcaccatcaccggtgtcgcccaagtcatcaaggaacgcaagccgtcggcgcagttcatcgccgtggagccggccgcgtcgccggtgttgtccggcggccagaaggggccgcatccgatccagggtctcggcgctgggttcgtgccgccggtgcttgccatggatctggtcgacgaggtcatcgccgtcggcaacgaggagtcgatcgcgctggcccgccggctggccgccgaggaggggctgctggtcggcatctcctcgggggcggcgctggtggccgccctgcaggtggcccgccggcccgagaacgccggcaagctggtggtcgtcgtgctccccgacttcggtgagcggtacctgagcacgccgctgttcgccgacctggccgat

SEQ ID NO: 25895 - DNA, 687 bp, Mycobacterium avium
atgctggcagccattcgtcgtgacatcagggcggcccgggagcgcgatccggccgctccgaccacgctgcaggtgatcttcgcctacccgggcgtgcacgccatctggggtcaccgcgtcaaccactggctgtggcggcgcggcgcccggctggccgcgcggatctgcgccgagatcacccggattctgaccggcgtcgagatccaccccggcgccgtgctggggccggggttgttcatcgatcacgcgacgggggtggtgatcggggaaaccgccgaggtcggcgaggacgtgaccatctaccacggtgtcaccctgggcggcagcggccgcgacaccggcaagcggcatccgaccatcggcgaccgggtgatcatcggggccggggcaaaagtcttgggcgccatcaaaatcggcgacgacagccgcatcggcgccaacgccgtggtggtcaaggaggtgccctccagcgctgtggtggtgggcgtgcccgggcaggtcatcgcccgcacccatcccggccccggcggtccggacgactcgctgatgcccgatctggtcggggtcagcctgcaatcgctgctgacccgggtgaccaagctcgaggcgaaggtcgacggatcacagaccggtcgggtcatccgcccgcccgaagcgggcgtctggtacggcgaggacttttccatc

SEQ ID NO: 25896 - DNA, 234 bp, Mycobacterium avium
atgaggcgtgtcctcagttcgaaggccaggttcaaggagggtgctgtgcgggtgatcgtggaccgtgaccggtgcgaaggtaacgcagtgtgcttgggaattgccccagatatcttcgacctcgacgacgaggactacgccgtggtgaagctggacccgattcccgccgatcaggagcagttggccgagcaggcgatcgccgaatgcccgcgcgcggcgctgtcgcgcggcgac

SEQ ID NO: 25897 - DNA, 1581 bp, Mycobacterium avium
gtgaaccaaccgttcggatgggacttcccgtacgcctggccccgcaagccggtcctggccgacaacgtggtgtgcacatcgcaaccgcttgccgcccaagcgggtctgcggatgctcgccgagggcggcagcgcggtcgacgcggccatcgccaccgccatcacgctgaccatcgtggaaccggtttccaacggaatgggctccgacgcgttcgccatcgtctgggacggcgagaaggtgcacggcctcaacgcctccggccgctcaccggcggcgtggaccccggaatacttcggcggcaacgccgttcccgtcctcggctggaattccgtcaccgtgcccggtgcggtgtcggcgtggaccgaactgcacgcccgcttcggcaagctgccgttcgagcggctgttcgcaccggcaatatcctacggccgcaacggctttccggtatcgcccgtggtcgcggagcaatgggtggcgcaggtgccgctgttcgccggacagccgggtttcgccgaggcgttcgcacctgagggtcgggcccccaggcccggggagcggttccggctgcccgcgcacgcggacacgctcgaggccatcgcggcgagccgcggcgaggcgttctaccgcggcgcattggccgcccgcgtcgcggagcacgcggcggccaacggcggcgccatgacggccgacgacctggccgcccaccgcgccgactgggtggagacgatcaccggcgactaccgcggctacaccgtgcacgagattccgcccaacggccacggcatcgtcgcgctgatcgcgctgggcatcctcgagcgattcgacatggcttcgctgccagtcgattccgccgacagcgtgcatttgcagatcgaggcggtgaagctggccttcgccgacgcccaggcctacctcgccgatatcgagcacatgccgttgcgaccggaacacctgctggacaccgaatacctcgagcgacgggcggcgctgatcgaccccgcccgggccaagccggtgtcggcgggcgcgccggcgggcggaacggtgtatctgaccgcggccgacgccgcggggatgatggtgtcgatgatccagtcgaactacatgggcttcgggtcgggcgtggtggtgccgggaaccgggatctcgctgcagaaccgaggcgcgaatttcactgcggggcttggtcatccgaacagtgtcggcccgaacaagcggccctaccacaccatcatcccgggcttcgtgaccaagggcggcgcgcctgtgatgagcttcggggtgatgggcggcatgatgcagccgcagggacacgtgcaggtcatggtgcgcatcgccgaccacggccagaacccgcaggcggcctgtgacggcccccggttccgctgggtgcagggcacgcaggtgagctgtgaaaacggtttcccggccgcgacgctggacgagttacgccggcgcggacacgatctggtggcggtcgacgactacaaccagttcggcagctgccaggcgatctggcggatggataccggctacgtcgcggccagcgacccgcgccgcgacggccaggccgccgcgttt

SEQ ID NO: 25898 - DNA, 918 bp, Mycobacterium avium
atgatgacccgcatgcccgacttgagccgacgcgccgtgctccgtctcggcgccggtgccgccgtgggcgcggtgggcgcctacgggctcgacatcctgttacaaccccgggcatctcaggccatgccggcggccggcaccgggacgccactggcgcccccaccgcccgccccgggtccgccccgcgatccggctccgccggcggcggccgcccccaccatggtcaccggctcgttcgtgtcggccgcgcgcggcggggtcaacaccaactgggccatcgcgcgtccgccgggtcagaccaaaccgctgcggcccgtgatcgcgctgcacggcaagggcagtgacgccgcgaccgtgatggccggcggcgtcgagcagggtctggcccaggccgtcaatgccgggctgccgccgttcgcggtggtcgccgtcgacggcggcggcagctactggcacaagcggtcttccggcgaggacagcggcgcgatggtgctcgacgagctcatcccgctgctgggcaaccagggcttggacacctcgcgggtggcgttcctgggttggtcgatgggaggttacggcgcgctgctgctcggcggccggctggggccggcgcggacggcggcgatctgcgcggtgagcccggcgctgtggctatcctcgggtgcggccgcgccgggggccttcgacggacccgacgacttcgcggccaactcggtgttcgggatgcccgcgctgggatcgatcccgatccgggtggattgcggcgacagcgacccgttttacgctgcgacaaagcaattcattgcacagctgcccaatccgcccgccggcgggttctcgcccggcggccataacccggaattctggagttcgcagttgccggccgagctgagctggatggccccgctgctgacggcc

SEQ ID NO: 25899 - DNA, 1422 bp, Mycobacterium avium
atgtctgtgagcattccgaatgtgctggctgcccggtacgccagtgccgagatggttgcgatctggtcgccggaagccaaggtggtcgccgagcggcggctgtggctcgcggtgctgcgcgcgcagcaacagttgggtgtcgcggttcccgccgaggcgatcgcggactacgagcgggtgctcgaggacgtcgatctggcctcgatcgcggaccgcgaacgcctgctgcgccacgacgtcaaggcccgcatcgaggaattcaacgcgctggccggccacgagcacgtgcacaagggcatgaccagccgggatctgaccgagaacgtcgagcagctgcagatccggcgctcgctggaactggtcttcgcccacggcgtcgcggtcgccgcgcggctggccgaacgggcggtggcctaccgcgacctggtgatggccgggcgcagccacaacgtcgccgcccaggccaccaccttgggcaagcgattcgcctcggccgcccaggagacgctgatcgcgttggcccggctgcgcgagttgatcgaccgttacccgttgcgcggcatcaagggcccgatgggcacgtcgcaggacatgcttgacctgctcggcggcgacccggccaagctcgccgaactcgagcggcgggtcgccgaattcctgggtttctcaacggttttgaccagcgtcgggcaggtgtacccgcggtcgctggaccacgacgtgatctccgcgctggtgcagctgggcgcgggcccctcgtcgatggcgcacaccatccggttgatggccgggcacgaactggtcaccgagggattcgcgccgggtcaggtcgggtcgtcggcgatgccgcacaagatgaacacccgcagctgcgaacgggtcaacggcctgcaggtggtgctgcgcggctacgcctcgatggccgccgaactggccggcgcgcagtggaacgagggcgacgtgttctgctcggtggtgcgccgagttgcattgccggacagcttctttgccatcgacgggcagatcgagacgtttctgacggtgctcgacgagttcggcgcctacccggcggtgatcggtcgcgagctggaccgctacctgccgttcttggccaccaccaaggtgttgatcgccgcggtgcgcgccgggatgggccgcgaggccgcgcatcacgtgatccgcgagcacgcggtggccaccgcgctggcgatgcgggaacacggcgccgagcccgacctgttggagcggctggccgccgacgagcggctgccgctggaccgggcggccctggacgccgcgctggccgacaggcgggcgttcaccggcgccgccgccgaccaggtggacgaggtggccgcccaggtggacgccctggtgagccgctacccggacgcggccaagtacaccccgggggccatcctg

SEQ ID NO: 25900 - DNA, 1791 bp, Mycobacterium avium
atgtccaaacaagaggtttccgactatctgctcgagcgtttgcgggcgtggggcgtcgagcatgtattcgggtaccccggcgacggcatcaacgggctgctcgccgcatggggccgcgccgacaacaagccgcagttcatccagtcgcggcacgaggagatgagcgccttccaggcggtcggctacgcgaagttcaccggccgggtgggcgtgtgcgcggcgacctccggccccggcgccatccatctgctcaacggcctctacgacgccaaactcgaccacgtcccggtggtggccatcgtcggccagaccaaccgcaccgcgatgggcggcaactaccagcaagaggtcgacctgctcagccttttcaaggacgtcgccagcgactacgtccaaatggtcaccgtgcccgagcaactgcccaacgtgctggaccgcgcgatccgcatcgcgatgacccagcgggccccgacggcgctgatcatcccggccgacgtgcaggagctgccgtactcgccgcccgagcacgcgttcaagatggtgccctccagcctgggcatcgaatgcccggccatcgccccggaggacgccgccatcgcccgcgcggccgagatcctcaacgcgggcaagaaggtggccatgctggtcggcaccggcgcccgcggggcgcaccaggagctggccgaggtcgccgacctgctcggcgccggcgcggccaaggcgctgttgggcaaggacgtgctgtccgacgaattgccttgggtcaccggctctatcgggcttttgggcacgcggcccagctatgagctgatgcgcgactgcgacacgttgctcacggtcggatccagcttcccctacacgcagttcctgccggagtgcgggcagtgtcgggcggtgcagatcgacatcgacggccggctcatcgggatgcgctacccctacgaggtgaacctggtcgccgacgcgaaggccgcactgcgcgcgctgattccgcacctgaagcgcaaggaggaccggtcctggcgggaaggcatcgagaagaacgtggcccgctggtgggagaccatggacaaggaggcgatggtcggtgcggacccgatcaacccgctgcggctgttctccgagctgtccccgctgctgcccgacaacgccatcgtgacagccgattccggctcgtcggccaactggtacgcccgcaatctgcgcttccgcggcaacatgcgcggctcgctgtcgggcacgctggcgacgatgggccccggggtcccgtacggcatcggcgccaagttcggccagccggaccggcccgtcatcgtgttcagcggtgacggcgccatgcagatgaacggcatggccgaactgatcaccgtcaagcggtactggaacgaatggaaagatccgcggctgatcatcgcggtgctgcacaacaacgacctcaaccaggtcacctgggagatgagggcgatggccggagcgccgaaattcgctgagtcgcaaagccttccggatgtcgacttcgccgcgttcgcggccgggctggggttgaacgcgatggccatcaaggatcccgacgagttgtccgacgcgtggcgcagcgccctgtcggccgaccgtcccaccgtgctggacgtctacaccgatcccgacatgccgccgatcccgccgcacgccacctgggagcagttcaagtcggcgaccgcggcggtgctctccggcgacgaggaccgcaccggcttcgtcaaggtcggcctgaaaaccaagatgcaggagttcttgccgcacaagaaaagc

SEQ ID NO: 25901 - DNA, 408 bp, Mycobacterium avium
gtggtggccaccggcgcctgcttcgacctgctgcacaccgggcacatccggctgctccggcaggcccgcgagctgggcgacgccctgatcgtgctggtcaattccgacgcgtcggtgcgcgcgctgaagggcagcgggcgtccggtgatgcgcgatgcggaccgggcccgcgtcctggccgcgctggcctgcgtcgacgcggtggccgtcttcgacggcctcacccccgaacgcatgctggaggatttgcgtcccgacatctgggtcaagggcggcgactacgtggccgccgagctgccggaggccgacgtggtgtaccggcacggcggcgaggtggtgatcctgcccacggtggccggttattcgtcgtcccgcttgatcgccgcggcggccacccgccgcccagag

SEQ ID NO: 25902 - DNA, 276 bp, Mycobacterium avium
gtggtgtcaaccacccacaaccagcaggcctatgtccgcgacacgttggacggcttcctcgcccagcgggtcgactttccgatggaggtcatcgtcgccgacgatgcctcgaccgatgccacaccccgaatcatccaggactacgccgaccgccatccgaacctcttccggccctttccagcacactggcaagcttggcgtaatcatggtcatagctgtttcctgtgtgaaattgttatccgctcacaattccacacaacatacgagccggaagca

SEQ ID NO: 25903 - DNA, 723 bp, Mycobacterium avium
gtgagggcgggtcggtgccgtacgccgtcgccgccaaccccgccgcccaggacctcggcatccgggccaacgatctggtcaagcagctggcggcgccagtcgacggccgcggcggggctcaaggcggacctggcgcagggatcgggcaaggatccggccggcatcgacgcggcgctggacgccgtgcgttccgagatcgccgcgatagcgcgggtcggttgggtggtcttgacacagcaccgcgtccccgaccggcccggcgaccctgaccaggaccccggccggggccggcggctcggcatcgacgtgggcagcgtgcgcatcggggtggcctgcagcgaccccgacgccgtgctggccaccccggtggagaccgtgcgccgcgaccgctccggcaaacacctgcgccggttggccgcgctggtcaccgagctcggggccgtcgaggtcgtcgtcgggctgccgcgcaccctggccgaccgcaccggcgcgtcggcgctggacgccatcgacctggccgaccagttggcccggcggatcgcgcccaccccggtgcggctggccgacgagcggctgaccaccgtggccgcgcagcgctcgctgcgcgccgccggggtgcgcgccaaggaacagcgtgcggtgatcgaccaggcggcggcggtggccatcctgcagagctggctggaccagcgccgcgcggcggtccgggaggccggcgatggt

SEQ ID NO: 25904 - DNA, 735 bp, Mycobacterium avium
  misc_feature (238)..(238): n=g, a, t or c
gtgaacgcaccgatgtccatgcagccgaggagccggcggccgctgcgccgggcccagttgtccgacgaggtcgcggggcacctgcgggccgcgatcatgtccggcgagctgcggccgggcaccttcatccggctcgacgagaccgcggccgagctcggcgtcagcgtcaccccggtgcgcgaggccctgctgaagctgcgcggcgagggcatggtgcagctggaaccgcaccgcggtnagcgtggtgctgccgcatcacccgccaagacatcgaggacatcttctggctgcaggcgaccatcgccaaggagctggccgccgcggccaccgaccacatcaccgacaccgagatcgacgagctggatcgcatcaacgacgcgctcgccgcggcggtcgggtccggcgacgccgagaccatcgcgggcctcgagttcggcttccaccgggtcttcaaccaggccagcggccggatcaagctggcctggttcctgctcaacgccgcccgctacatgccggtgctggtgtacgccgccgacccgcagtgggggcgggccgccgttcgacaaccaccggcaactgatcgccgcgtctgcgccgccgcgacaccgccgcggtgatcgagcacacggtctggcagttcaccgacgcggcggggcggctgaccgcgatgcccgaccgcaccgggacgccgagcaaccgggggttagttcccggccaactgctcggcgcgctgct

SEQ ID NO: 25905 - DNA, 180 bp, Mycobacterium avium
taccgggccaccggcgcgctcaagtggaccgccaccgcgaacgaccttgtgttcggctcgaactcggtgctgcgggcgctggccgaggtctacgcccaggacgacaaccagggcaagttcgtcgaggacttcgtcgcggcctgggtcaaggtgatgaacaacgaccgcttcgacctgaag

SEQ ID NO: 25906 - DNA, 540 bp, Mycobacterium avium
atgtgctggaaaaggcatggccgccccgaaagtaatccgaaaaacgcaaacggccatggaccgcacgacgcgagcctggacagcggctccgaccaccatttgccccttcacccgcttgactcggatgatttagctgcactggcccactacactggacccggataccaagaactgaatttcgccctaagggaaggcgcgttggacgtatctcaacaggcacgtgttgacgctctacagaaagcgttggagaaactcccggtgtacgaaggcgccgtggtgcggggtacgaatctgcccgccgatgtgctcgaacagtaccggcctggcgaagtaattaccgaagccgcttttaccagcacctcaaccgaccataccgtagctcaatcatctgctttcgctggaaacaccgaattcaggatctggtcgactacgggacgagatgtttcatcagtgtcgatgtatcctgatgagaaggagatattatttccagccgggtcaaaattctatgttgtaagcaagacagtagacccgcagacagtg

SEQ ID NO: 25907 - DNA, 207 bp, Mycobacterium avium
atgccatcgccccggttcaagcggctcgacggcttcgacgtgcgattcctgaccggcaccgacgagcacggcctcaagatggtcgagaccgcggcggccgagggcatcggcacggccgagctggcccggcgcaattccgatgtgttccagcggctgcaggagcggttgaacatctgccttcgaccgcttcgtccgcacgaccgacct

SEQ ID NO: 25908 - DNA, 551 bp, Mycobacterium avium
gtgagtcgctcccgaacacgtcctggagggtcggtcccggggcttgggctcgctcacccctgggcgttgctggaacggcgggggcccacgttctaccgccccttggggatcatttcggttccggcccaaacgggttgccgcaaacggttcgccgaacactcgcacagcgaaatccagcgcctgaccgtgctcaaccgcgacgtgctgacgctgcgccgcgacgagctggccgagccgccgaccgcggtggtggccaatctgccctacaacgtcgcggtcccggccctgctgcacctgctcgccgaattcccgtccatccggacggtgaccgtcatggtgcaggccgaggtggccgaacggctggccgccgagccgggcggcaaggagtacggcgtgcccagcgtcaaggtccgccttcttccggccggggtccgcccggttcggcaatggtgtcgcccgaccggggttctgggcccgattcccccggggtgttattccgggggtgggtgcgcaatcgaccggctattccgaacctcccccggttgggccag

SEQ ID NO: 25909 - DNA, 1326 bp, Mycobacterium avium
atgctcgataggccgttcggacggcgcagcctgctgcgcggtgcgggcgcgctttccgcggcggcgctcgccccatggtcggccggctgcggctccgacgacgacggcgcgctgaccttcttcttcgcggccaatccggaggagcgggacgcgcggatgcgcatcatcgacgagttcgcgcgccgccatcccgacatcaaggtgcgggcggtgctgtccgggcccggcgtgatgcaacaactttcgacgttttgcgtcggcggcagatgccccgacgtgctgatggcgtgggaactgtcctatgccgaactcgccgaccgcggtgtgctgctggatctgggcccgctgctggcgcgggacaaggcgttcgcccagcagctgcaggccgacagcatccccgcgctgtacgagaccttcaccttcaacggcaagcagtacgcccttcccgagcaatggtcgggcaactacctgttctacaacaagcggctcttcgacgaggccggagtgccgtcgccgcccacggcgtgggaacgcccttgggacttcagcgaattcctcgacacggcgcgcgcgctgaccaagcgcgacgcctccggccgggccgcccagtacggattcgtcaacacctggggctcctactactcggccgggctgttcgccatgaacaacggcgtgccctggtcggatccgcggctgaacccgacccacttcaacttcgacaacgccgccttccaggaggcggtgcagttctacgccgacctggccaacaaataccgggtcgcccccaatgcctcggagacacagtcgatgtcgacgcccaacctgttcgccgtgggcagggccgccatggcgctcggcgggcactggcgctaccagacctacctccgcgccgagggccttgatttcgacgtcgctccgttgccggtcggtccggcggtcggcaaggggcagcccgcctgttccgacatcggcgccaccgggctggctatctcatcgagcagcccgcgcaaggagcaggcctgggagttcgtcaagttcgccaccgggcccgtcgggcaggcgctgatcggtgaatcctgcctgttcgttccggtgctgcgctcggcgctcaaatcggacggattcgccagggcgcaccggcgggtcggcaacctcggcgtgctgaccgacggaccggctttctcccagggcctgccgatcaccccggcgtgggagaaggtcaatgcgttgatggaccgcaacttcgggccgatcctgcggggcagccggcccgcgacgtcattggccgggctgtcccgctccgtcgacgaagtgctgcgcagccca

SEQ ID NO: 25910 - DNA, 2163 bp, Mycobacterium avium
gtggtactcccccacggtcgaaagggtcgaaaggagaggcaacacatggccaccgaccacacttcggatgcgcccgatcccaagcagcgcgatctggagtccgcgcggttccgccgcgacacgggatacctgaccacgcagcagggcgtgcgcgtcgaccacaccgacgatgcgctcaccgtcggcgagcggggtccgacgctgctcgaggatttccacgcccgggagaagatcacccacttcgaccacgagcgcatcccggagcgtgtggtgcatgcgcgcggggccggcgcctacggctatttcgaaccgtacgacgaccggttggcgcagtacacggcggcgaaattcctgacctcgccgggcaccaggacgccggtgttcgtgcgtttctcgacggtcgccggatcgcgcggttcggccgacaccgtccgcgacgtgcgcgggttcgccaccaagttctataccgaacaaggcaattacgacttggtgggcaacaacttcccggtgttcttcatccaggacggcatcaagttccccgacttcgtgcacgcggtgaaacccgagccgcacaacgagattccgcaggcgcagtcggcgcacgacacgctgtgggacttcgtgtcgctgcagcccgagacgttgcacgccatcatgtggctgatgtcggaccgggcgctgccgcgcagctaccgcatgatgcaggggttcggggtgcacaccttccggctggtgaacgcccgcggcgaggggactttcgtgaagttccactggaagccccgactcggcgtgcactcgctgatctgggacgaatgccagaagatcgccggcaaagaccccgattacaaccgccgcgacctgtgggaggccatcgaatccggccagtacccggagtgggagctgggcgtgcagctggtcgccgaggacgacgagttcagcttcgacttcgatctgctggacgctacgaaaatcattccggaagaacaggttccggtattgccggtgggcaagatggtgttgaaccgcaaccccgacaactttttcgccgagaccgagcaggtcgcgttccacaccgccaacgtggtgccgggcatcgatttcaccaacgacccgttgctgcagttccgcaacttctcctatctggacacgcagctgatccggttgggcggccccaacttcgcgcagctgccggtcaaccgcccggtggcgcaggtgcggaccaaccagcacgacggttacgggcagcacgcgattccgcagggccggtccagttacttcaagaacagcatcggcggcggttgtcccgcactggccgacgaggacgtgttccggcactacacccagcgggtggacgggcagacgatgcgcaagcgcgccgaggcgttccagaaccactacggccaggcgcggatgttcttcaagagcatgtcgccggtggaggccgaacacatcgtggctgccttcgccttcgaactcggcaaggtggagatgcccgaaatccgttccgcggtggtggcacaactcgcccgcgtcgatgaccagctggccgcccaggtcgcggcgaaactggggctgcccgagccgcccgaggagcaggtggacgaatcggcaccggtttccccggcgctttcgcaggtcaccgacggcggcgacaccatcgcgtcgcgccggatcgcggtgctggccgccgacggcgtcgacgtggtgggcacgcaacgcttcaccgagctgatggagcagcgcggcgcggtggtcgaggtgctggccccggtggccggcggcacgctggcgggtgggtccggcggcgagctgcgggtggaccggtccttcacgacgatggcgtcggtgctctacgacgcggtggtggtggcgtgcggaccgcggtcggtgtcgacgctgtccgacgacggctacgccgtgcacttcgtcaccgaggcctacaaacacctcaagccgatcggcgcctacggggccggtgtcgacctgctccgcaaggccggcatcggcaaccggctcgccgaggacaccgacgtgctcaacgaccaagcggtggtcaccaccaaggccgccgccgacgagctgcccgagcgcttcgccgaggaattcgccgccgcgctcgcgcagcaccggtgctggcagcggcgcaccgacgcggtgccggcc

SEQ ID NO: 25911 - DNA, 465 bp, Mycobacterium avium
atgcgcaccgactactacaacgaccccaacgccccacggcctaacagtgtcgtcccctcggcttcggcgatcgtcgctgacgaacgcggtcgaattttgctgatcaaacgccgcgacaacaccctgtgggcgctacccggcggcggacacgacatcggcgagaccatcgaacaaaccgctgtgcgcgaagtcaaagaggaaaccgggctcgacgtcgaaatcaccggcctggtcggtgtctacaccaacccgcggcacgtcgtggcattcaccgatggcgaagtccgccaacaattctccttgttgttcaccaccagggtgctcggtggtgagctggccatcgaccacgaaagcaccgacatcgcctggactgatcccgacgacatcgccgacctggacatgcatccctcgatgcgtctgcggatcgagcactacctgcaacaccgcgacagcccctacctctgc

SEQ ID NO: 25912 - DNA, 228 bp, Mycobacterium avium
ttggcggccagcctgtttcgttggttcgacgggcgccggccgggccgcgtcggtgagagcaagccgcgaccgcccgccgaacggctatcctgggtgatggttcgggatttcgctccgcggcagaacgcctgttattgtcgcctacgcggtctcggccgaccacaagcgccgttagctcagttggtagagcagctgactcttaatcagcgggtccggggttcgaaaccc

SEQ ID NO: 25913 - DNA, 1293 bp, Mycobacterium avium
gtggccgacaccgacgacatcgccactttgaagtacccgggcggggaaaccgacctggagatcgtcagcgccaccgagggcgccgacggcatcgcgctgggttcgctgttgtccaagaccggctacaccaccttcgacaacggcttcgtcaacaccgcctcgtgcaagagcgcgatcacctacatcgacggcgacgccggcatcctgcgctaccgcggctacccgatcgagcaactggccgagaagtcgaccttcctcgaggtgagctacctgttgatctacggcgagctgccggacaaggaccagctggccgagttcaccaagcggatccagctgcacaccatgctgcacgaggacctgaagcggttcttcgacggcttcccccgcaacgcccacccgatgccggtactgtccagtgccgtcaacgcgctgtccgcctactaccccgattcgctggacccgatggacaccgaggacgtcgagctgtccacgatccggttgctggccaagctgccgaccatcgccgcgtacgcctacaagaagtcggtcggccagcccttcctctacccggacaacaagctgagcctggtggagaacttcctgcgcatgacgttcggcctgcccgccgagccgtatcaggccgaccccgaggtggtccgcgcgctggacatgctgctgatcctgcacgccgaccacgaacagaactgctcgacgtcgacggtccggctggtggggtcctcccaggccaacctgttcacctccatctccggcggcatcaacgcgctgtgggggccgctgcacggcggggccaaccaggcggtgctcgagatgctggagaagatccgccaaagcgacgacgacgtcagcgaattcgtgcgcaaggtgaagaaccgcgaggccggggtgaagctgatgggcttcggtcaccgggtgtacaagaactacgacccgcgggcgcgcatcgtcaaggaacaggccgacaagatcctggccaagctcggcggcgacgacgacctgctcgacatcgccaagcaactcgaagaggccgcgctgaccgacgagtacttcatcgagcgcaagctgtaccccaacgtcgacttctacaccggcctgatctaccgggcgctgggcttcccgacccggatgttcaccgtgctgttcgcgctggggcgcctgcccggctggatcgcgcactggcgcgagatgcacgacgagggcgacagcaagatcggccgcccgcgccagatctacaccggctacaccgagcgcgactacgtcaccatcgacgcccgc

SEQ ID NO: 25914 - DNA, 984 bp, Mycobacterium avium
ttgaagaccatcacattcggcaagacggggctcgaggtttcccggttggcgttcggcacctgggagttctgcagtgactggggccatgccgacgaggacgccgcgatcaccatgatccgcagcgcccgcgacctcgggatcaacttcttcgacaccgcccagcagtacggcttcggggcgtctgaacgcctgctgggcaaggctttgcgcgacgacctcgcccgcgcgcgcgacgaggtggtgatcgccaccaagggtggattgcgcgccaccgacagcggactggtccgcgatgccagcccacaatggctgcgcaagggcgtggagtccagcctgaccgcgctgggcatcgaccacatcgacgtgtacctggtgcactggcccgacccccggatgccggccgccgaaaccgccggggcgctcgcggaattggtgtcggagggcaagattcggcatgtcggggtgtccaactacgacaccgcgcaggtggaggagttttcggccacgctgccggtggaggtcgtgcagccgccgtatcacctgttccggcgtgacatcgaggacacgctgctgccgtatgcccgcgagcacgacatcggggtgatggtgtacggcccgctggcgcacggtttgctgaccgggacggtcaagccggacacccggttcgccccgcaggattggcgcgccaagagcgacatcttcagcggtgacggcttcctgcgcaacctggaagtcgttgcgcagcttcaggaattggcgtccgacctgggggtgacgatcagccagctggcgatcgcgcgggtgctggcgcagccgggtgtgcacgtcgccatcgtgggcgcccagcacctgcactacctgcaggagagcgcccgcgcggccgacgtcacgctgtcggatgccgacctggccgccgtcgacaacgtcctggcggcggcgacaccggtcggcgggccctatcccgagatgcaccagaaggcgagc

SEQ ID NO: 25915 - DNA, 1017 bp, Mycobacterium avium
gtgacggtccgggtaggcatcaacggcttcggtcgaatcgggcgcaacttctaccgggccttgctggctcaacaggagcagggcaccgccgacatcgaggtggtcgcggtcaacgacatcaccgacaacagcaccctggctcacctgctgaaattcgactccatcctgggccggctgccctacgacgtcagcctggagggcgaggacaccatcgtggtgggcccggccaagatcaaggcgctagaggtgcgcgagggcccggccgcgctgccctggggcgacctgggcgtcgacgtcgtcgtcgaatccaccgggctgttcaccaacgcggccaaggccaagggccacctggacgccggcgccaagaaggtgatcatctccgcgccggccaccgacgaggacatcaccgtggtgctgggcgtcaacgacgacaagtacgacggcagccagaacatcatctccaacgcgtcgtgcaccaccaactgcctggcgccgctgaccaaggtgctcgacgacgagttcggcatcgtccgcggcctgatgaccacgatccacgcctacacccaggaccagaacctgcaggacgggccgcacaaggacctgcgccgggcgcgcgccgccgcgctgaacatcgtgcccacctccaccggcgcggccaaggcgatcgggctggtcatgcccaacctcaagggcaagctggacggctacgcgctgcgggtgccgatccccaccggctcggtcaccgacctgaccgccgagctgaagaagccggccagcgtcgaggacatcaacgcggcgttcaaggccgccgccgagggccggctcaagggcatcctgaagtactacgacgcgccgatcgtctccagcgacatcgtcaccgacccgcacagctcgatcttcgactccgggctgaccaaggtgatcgacaaccaagccaaggtggtgtcctggtacgacaacgagtggggctactccaaccgcctcgtcgacctggtcgccctggtcggcaagtcgctg

SEQ ID NO: 25916 - DNA, 1614 bp, Mycobacterium avium
gtggacgtggccgaccgaccgacaccggtgaccctgctggtcaacggccgggtgcacaccccggcggcgccggacgcgaccgcgatggccgtccgcggcggtgtcatcacctggctgggcggcgacgacgtcggccgcagcctgttcccggatgccgacgtcgaggacctcgacggcggtttcgtcacgcccggcttcgtggacagtcacatccatctgaccgccaccggcctgaccctgtgcgggctggacctgcgcccggcccgctcccgcgcccactgcctgcaactgatcgccgaccacgccgccgcccaccccggccggccggtctggggacacggctgggacgaaacgtcgtggccggagcgcaccccgcccagcaccgccgagttggacgccgtgctcggcgaccggccggcctacctgacccgggtggacgtgcactccgcgctggcctccaccgggctgcgacggcgcgtcgcccaactcccgtcggccaccggtttcagccccgaccggccgctggtcggccacgcccaccacgcggtccgggccgccgcgcggaacctgctgaccgccgagcaactcgccgaagcccgcgccgcggcgttgcatgccgccgcggcggccggcatcgtggcggtgcacgaatgcgccggacccgagatcggcggcatggacgactggctgcaattgcgggccctcgaccacggtgtggaggtcatcggctactggggtgagccggtgagcaccgccaccgacgcgcgggcgctgatcgaggccaccggcgcccgggggctggccggcgacctgttcatcgacggggcgctcgggtcccgcaccgcctggctgcgcgagccgtacgccgacgcgcccgaccgcaccgggacctgctacctggaccccgacgccgtcgaggcgcatctgcttgcctgcaccgaggcggagatcaccgccgggttccacgtcatcggcgacgcggccgtcgccgcggcggtggacgccttcgagaaggtcgccgcccggctcggcccggtcgccgtcgcccgctgcgggcatcgcctcgaacacgtcgagatgatcgacgccgagcaggccgccaagctgggccgatggggcgtcatcgccagcgtgcaacccaatttcgacgcgctctggggcggcgccgacggcatgtacgcgcagcggctcggggccgagcgaggcagtcagctcaatccgtttgcgctgttagcatcccaaggcgtgcccctcgcgctaggttccgacgccccggtcaccgggcttgacccctggacgagcgtgcgcgcggcggcccaccatcgcaccccgggcagcgcgatctcggtgcgcgccgcgtttgctgcggccacccgcggcggctggcgggcggccggcgtccgcgacggcatgaccggcaccctggtgcccggcgcgcccgcctcctacgccgtctgggacgccggcgacctggaggtgagcgccccgcgcgacacggtcgcgcgctggtcgaccgatccgcggtcccgggtgcccgcgctgccgcgattgggcccgaccgacgccctgccgcggtgccggcgaacggtgcatcggggcgctgtcatccatggc

SEQ ID NO: 25917 - DNA, 4581 bp, Mycobacterium avium
atgacgcccaagcgcgccgggttgtacaaccccgcgttcgagcacgacgcgtgcggggtagccatggtcgtcgacatgcacggccgacgcagccgcgacatcgtcgacaaggcgatcaccgcgttgctcaacctcgaacaccggggtgcccagggcgccgagccgcgcagcggtgacggcgccggcatcctgatccaggttcccgacgccttcctgcgcgaggtggtggacttcgagctgccgcccgagggcagctacgccaccggcatcgcgtttttgccgcagtcgtccaaggacgccgcgaccgcttgtgccgcagtggaaaagatcgccgaggccgagggcctgacggtgttgggctggcgcaacgtccccaccgacgactcgtcgctgggcgcgctgtcgcgcgacgccatgcccaccttccggcaggtgttcatggccggcgcctcggggatgacgctggagcgccgcgcctacctggtgcgcaagcgcgccgagcacgagctcggcaccaagggcccgggtcaggacggtcccggacgcgaaaccgtttacttcccaagcctttccggtcagaccttcgtgtacaagggcatgctgaccaccccgcagctcaaggcgttctacctcgacctgcaagacgaccggttgaccagcgcgctgggcatcgtgcactcccgcttctccaccaacacttttccgtcgtggccgctggcgcacccgttccggcgcatcgcgcacaacggtgagatcaacaccgtcaccggcaacgagaactggatgcgggcgcgcgaggcgctgatcaagaccgacgtgttcggcaccgaggccgacgtcgagaagctgttcccgatctgcaccccgggcgcctcggacaccgcgcgtttcgacgaggtgctcgagctgctccacctcggtgggcgcagcctggcccacgcggtgttgatgatgatccccgaggcctgggaacggcacgagtcgatggaccccgcccggcgggcgttctaccagtaccacgcctcgttgatggagccctgggacggcccggcgtcgatgaccttcaccgacggaaccgtcatcggcgcggtgctcgaccgaaacggcttgcgcccctcgcggatctgggtcaccgaggacggcttggtggtgatggcgtcggaggccggtgtgctggatctggacccggccacggtggtgcgccggatgcggttgcagcccggccggatgttcctggtggacaccgcccagggccggatcgtctccgacgaggagatcaaggcggagctggccgccgagcacccctaccaggagtggctggaccgcaacctggtcccgctcgacgacctgccgcagggcgactacaagcggatgccgcacgaccgactggtcaagcggcagcagacctttggctacacctacgaggaactgaacctgttggtggcgccgatggtgcgtaccggcgccgagccgatcgggtcgatgggcaccgacaccccggtcgcggtgctctcgcagcggccgcggatgctctacgactacttccagcaactcttcgcgcaggtgaccaacccgccgctggacgccatccgcgaggaggtggtgaccagcctgcagggcaccaccggcggcgagcgcgacctgctcaccccgaccgagctgtcgtgtcaccagatcgtgttgtcccagccgatcctgcgtaaccgtgagctggcgaagctggtcaacctgaaccccgacgacgaggtcaacgggcgcccacatggcatgcgttccaaggtgattcgctgcctgtacccggtggccgagggcggcgccgggctggccgcggccctggaggacgtgcgcgcgcaggcctcggcggcgatcgccgacggcgcgcgggtgatcatcctgtccgaccgcgaatccgacgagaagatggcgcccatcccgtcgctgctggcggtggccggggtgcaccaccacctggtgcgcgaccgcacccgcacgcacgtcggcctggtggtggaaagcggtgacgcccgcgaggtgcaccacatggccgccctggtcggcttcggcgccgcggcgatcaacccctacatggtgttcgagtcgatcgaggacatgctcgaccgcggcgtcatcgagggcatcgaccgcaacaccgcgctgaacaactacgtcaaggccgccggcaagggtgtgctgaaagtgatgtccaagatgggcatttcgacgctggcctcctacaccggcgcgcagttgttccaggcggtcggcatttccgaggacgtgctcgacgagtacttcaccgggctgagctgccccatcggcggcatcaccctggacgacatcgccgccgacgtcgccgcccggcacgcgctggcctacctggaccgccccaacgaacgcgcgcaccgcgagctcgaggtgggcggggaataccagtggcgccgcgagggcgagtaccacctgttcaacccggagacggtgttcaagctgcagcacgccacccgcaccggccagtacaagatcttcaaggactacacccggctggtcgacgaccagagcgagcggatggcgtcgctgcgcggcctgctcaagttccgcgccggggtgcggccgccggttccgctggaagaggtcgagccggcgagcgagatcgtcaagcgcttctcgaccggggcgatgagctacggctcgatctccgccgaggcgcacgagacgctggccatcgccatgaaccggctgggcggacgatccaacagcggcgagggcggcgaggacgtcaagcgcttcgaccgcgaccccgacggcagctggcggcgcagcgccatcaagcaggtcgcctcgggccggttcggtgtcacctcgcactacctgacgaactgcaccgacattcagatcaaaatggcccagggcgcgaaacccggtgagggcggccaacttccggggcacaaggtgtacccgtgggtggccgaggtgcggcactccacccccggtgtcggcctgatctcgccgccgccgcaccacgacatctactccatcgaggacctggcccagctgatccacgacctgaagaacgccaacccggccgcccgggtgcacgtcaagctggtctcggagaacggcgtcggcacagtggccgcgggcgtgtccaaggcgcacgccgacgtggtgctgatctccggtcacgacggcggcaccggcgccaccccgctcacctcgatgaagcatgccggcgcgccctgggagctggggctggccgagacgcagcagacgttgctgctgaacggattacgcgaccggatcgtcgtccaggtcgacggccagctcaagaccggacgcgacgtaatgatcgcggcgctgctgggcgccgaggaattcggcttcgccaccgcgccgctggtggtgtccggctgcatcatgatgcgggtctgccacctggacacctgtcccgtcggcgtggccacccagaacccggtgctgcgggaacggttcaccggcaagcccgagttcgtggagaacttcttcatgttcatcgccgaagaagtccgggaatacatggcgcagttgggattccgcaccctcaacgaggccgtcggccaggtgaagtcgctggacaccacgctggcgcgggcgcattggaaggcgcaccggctggacctgggcccggtgctgcacgagccggaatcggcgttcatgaaccaggacctgtactgcagctcacgccaggaccacggcctggacaaggcgctcgaccagcagttgatcgtgatgagccgcgaggcgctggactccggcaagccggtgcggttctccaccacgatcagcaacgtcaaccgcacggtgggcaccatgctcggccacgaggtgaccaaagcctatggcggccaagggttgccggacggcaccatcgacatcaccttcgacgggtcggcgggcaacagcttcggcgcgttcgtgccgcgcggcatcaccctgcgggtctacggcgacgccaacgactacgtgggcaagggcctgtccggtggccggatcgtggtccggccgtcggacaacgcgccggccgactacgtcgccgaggacaacatcatcggcggcaacgtgatcctgttcggcgccaccagcggggaggcgtacctgcgcggtgtcgtcggcgagcggttcgcggtccgcaactccggggcgcacgccgtcgtcgagggcgtcggcgaccacggctgcgaatacatgacgggcggcaaggtcgtcgtgctcggccgcaccggccgcaacttcgcggccggaatgtccggcggtgtggcctacatctacgacccgcccggcgaattcccgcaacatctcaacgcggagatggtcgagctcgagagcttggacgacgatgacatcgagtggctgcacggcatgattcaggcacacgtcgacgccacggattccgctgtgggccagcggattctgggcgactgggcgcaacagcagcggcacttcgtcaaggtgatgccgcgcgactacaagcgggtgctgcaggccatcgccgaagccgaacgtgacggcggcgatgtcgacaaggcgatcatggcggccgcgcatggc

SEQ ID NO: 25918 - DNA, 1515 bp, Mycobacterium avium
gtgacggcggcgatgtcgacaaggcgatcatggcggccgcgcatggctgatccgagcggcttcctgaaatacacgcatcgggaactgccgaagcgccggcctgtcccgctgcggttgcgcgactggcgagaggtctacgaggaattcgaccacgggaccctgcgcgagcaggccactcgatgcatggactgcggtattccgttctgccacaacggttgtccgctgggcaacctgatcccggagtggaatgacctggtgcgcaccgggcggtggcgcgacgccatcgagcggctgcacgccaccaacaacttcccggacttcaccgggcggctgtgcccggctccgtgcgagccggcctgcgtgctcggcatcaaccaggacccggtgacgatcaagcagatcgagctggagatcatcgacaacgccttcgacgagggctgggtgcagccgctgccgccggacaagctgaccggcaagaaggtcgccgtggtcggctccggcccggcgggtctggccgccgcccagcagctgacccgggccgggcacagcgtcaccgtcttcgagcggtccgacaagatcggcgggctgctgcgctacggcatcccggaattcaagatggaaaagcgggtcctggaccgccggctggaccagatgcgcgccgagggaaccgaattccgcgccggcgtcaacgtcggtgtcgacatcaccgcggaccagctgcgcgccgatttcgacgccgtcgtgctggccggcggcgccaccgcctggcgggatctgcccattcccggccgggagctggacggcatccaccaggcgatggagttcttgccgtggggcaaccggcaagcctcgggcgacctggacgaggccgacatggacgccgacgggcagccgccgatcaccgccaagggcaagaaggtcatcatcatcggcggcggcgacaccggcgccgactgcctgggcaccgtgcaccggcagggcgccaccgaggtgcaccagttcgagatcatgccgcgtccgccggacacccgcgccccgtccaccccgtggccgacctacccgctgatgtaccgggtgtcctcggcgcacgaggagggcggcgaacgggtgttctcggtcaacaccgaggagttcgtcggcgagaacggtcgcgtcacggcgctcaaggcgcacgaggtgaccatggaggacggcaagttcgtcaaggtcgagggctcggagttcgaactcgaggccgacctggtgctgctggcgatgggattcgtcggccccgagaaggagggcctgctcaccgacctcggggtgaagttcaccgagcgcggcaacgtcgcgcgcggcgccgatttcgacacttcgattccgggcgtgttcgtggccggggacatgggtcgcggccagtcgttgatcgtctgggcgatagctgagggccgggcggccgcggcggcggcggatcggttcctgatgggcgccaccgcgctgccggcgccggtcaaacccaccgcggtaccactgcag

SEQ ID NO: 25919 - DNA, 1605 bp, Mycobacterium avium
ttgaccgtgaagcgccccaacttcctggtgatcgttgcagacgacctcggcttctccgacctcggcgcattcggcggggagatcgagacgcccaacctcgaccgcctggcctacgccgggatccggctcaccgatttccattcggcgccggcctgctcgccgacccgggcgatgctgttgaccgggaccgaccaccacatcgccggcatcggcaccatgctcgaggtcgcggccccgcaattccacggcgcacccggctacgagggctacctgaacgaccgggtggtcgcgttgcccgaactgctgcgcgacgccggctacctgaccctgatgtcgggcaaatggcacctgggcgccaccatcgagacgtcgccgtgggcgcgcggcttcgagcgctcgttcgccctgctgccggccggcgccagccactacggcggctcgggggcgcgcgggttttcgccggtgccaacgctttacaccgaagacgatcggttcgtcagcgtcggcgacgacttctactcgtcggactcctacaccgacacgctgttgcggtatctggacgaacgtgcccccgacgacgaccgcccgttcttcgcctatctgccgtttcaagcgccgcactggccgctgcaggcgcccgacgagtcgatcgcgaaataccggggccgctacgacgaggggccggacgtgctgcgggccgaacggctggccgcactcaagcggctggggctgtgcccacccgacgtcaccccgcacccggtggtcgccgacggcgcgccggagtgggccgacatgaccgacgaggagcgggcccgctcggcccgcaccatggaggtctacgccgggatggtcgaccgaatggactacaacgtcgggcgggtgatcgactacctgagccgttccggcgaactcgacaacaccgtcgtcatcttcctgtccgacaacggcgccgagggcgccatcgtcgaggcgatgccgctgcgcggcccgcagatcgccgcgcagatcgaaaagcattgcgacaacagcctggacaacctcggccggcccacctcgttcatctggtacggcccgcgctgggcgcaggcggccaccgcgccgtcgcggctgcacaaggcgttcaccacccagggcggcatccgggttcccggcttcatcacctggcccggcttcgcccggcagggccagatcggcaccgcgttcagcaccgtcatggacatcgcgccgacgctgctggaactggccgggaccagccatccgggcaccgcctaccggggccgcgaggtggcgcccatgcgcggccgctcattggtcgggtatctgtccggcgccgcggacaccgttcacgacgccgacaccgaaaccggatgggagctgttcggccgccgcgccatccgtcagggcaactggaaggcgctgcatctgccggccccctacggtccgggcagctggcagctgtacgacctggcgtccgaccccggcgaggtcgacgatctggccgccgcgaggccggacaagctggccgagctgctggccctgtgggaccgctacgtcgaagagaccggcgtgatcctcgatcccatctcggtgttcgacgccgagctc

SEQ ID NO: 25920 - DNA, 1170 bp, Mycobacterium avium
gtgacctcagcactcgccggtggcggggccgcttggcggtccccggtaacgttgtcggctgtggaacccgaccgtcaagccgacatcgccgccctcgactccacccttaccacggtggagcgggtgctcgatgtggacggtctgcgcgcccgcatcgagaagctcgagcacgaggcgtccgatccgcagctgtgggatgaccaggcccgcgcccagcgggtgaccagcgagttgtcccacgcccagggcgagctgcgccgcatcgaggagctgcgcgcgcggttggacgatctgccggtgctctacgagctggccgcggaggagggcgagggcgccgccgaggcgctggcggaggccgacgccgagctcaaggcgctgcgggccgacatcgaggccaccgaggtgcgcaccctgctgtcgggcgagtacgacgagcgcgaggcgctggtcaccatccggtccggcgcgggcggggtggacgccgccgactgggccgagatgctgatgcgcatgtacatccggtgggccgagcagcacaagtatcccgtcgaggtgttcgacacgtcctacgccgaagaggccggcatcaagagcgcgacgttcgccgtgcacgccccgttcgcctacggcacgctgtcggtggagcagggcacgcaccggctggtgcgcatcagcccgttcgacaaccagagccggcgtcagacgtcgttcgccgaagtcgaggtgctgccggtggtggagaccaccgaccacatcgacatcccggaaggcgatgtgcgcgttgacgtttaccgctccagcgggccgggcggccaatcggtgaacaccaccgactccgcggtacgtttaacgcacatcccaacgggtatcgtcgtgacttgccagaacgaaaaatcgcagttgcagaacaagatctcggcgatgcgggtgcttcaggcaaagttgttggagcgcaagcgatccgaagaacgcgctgagctggacgcgttaaaaggcgagggtggcagttcgtggggcaaccagatgcgctcctacgtgctgcacccctatcagatggtcaaggatctgcgaaccgagtacgaggttggcaatcccgcggccgtcctggacggagacatcgacggcttcctggaagcgggaatccgttggcgcaacagaaaagatgacgaa

SEQ ID NO: 25921 - DNA, 960 bp, Mycobacterium avium
atgacgacagcggcgcaccgctggcatgacttctggcggggggaactcggtgagtggatcatcaccaggggtctgcggatcgtcatggtgctgatcgcggccgtgctggcggcccggttcgtcaactgggtggccctgcaggtgagccgccagctcaccaccggcttcgttgagagcgacgcgctggtgcgctcggaagcctccaagcaccgtcaggccgtggcgtcggtgatctcctgggtgtcggtcgtgatcatcggcatctgggtgatgctgcagatcgccagcatcctgcagttctcggtgggcgggctggtcgcgccggcaaccgtggtcggtgccgcgctgggtttcggtgcccagcagttggtgaaggatctgctgtccggcttcttcatcctcgccgagcggcagtacggcttcggggacctggtcaccctgaccgtcgtcgccgccaccgaggccagcggcaccgtcgagaacgtgacattgcgggtcacccggctgcgatccccggacggcgaggtgctgaccatccccaacgggcagatcgtcaaggtggtcaacctgtccaaggactgggcgcgcgcggtggtggacatcccggtgtcgaccagcgccgacctgaaccgggtgaacgaggtgctgcaccaggaatgcgaccgcgcgatggacaacccggtgctgggccagctgctgttggactcgccgacggtgatgggtgtggaaagcatcgaggtcgacaccgtcaccctgcggttggtggcgcgcacgttgcccggcaagcagttcgaggtgggccggcagctgcgcgtgctggtgattcgggcgctggcccgtgccggcatcgtcaccgcggccgacgcgcgggtggggctggtggaagacgccagcgtgccggccgcccaggccgccgaacagcaatccgacgatgacgtccaaggtgcggtgcagaagcgt

SEQ ID NO: 25922 - DNA, 756 bp, Mycobacterium avium
atgaccggcccacaggggcagccggtgttcctccggctcggcccgccgcccgacgagcccaacgcgttcgtggtcgagggcgcgcccacgtcctacccgcccgaggtgcgggcccggctcgaggtcgacgccaaggagatcatgggccgctaccccgacaaacgctcggcgctgctgccgctgctgcacctggtccagtcgcaggactcctacctgaccccggcggggctggagttctgcggcgagcagctgggtttgaccggggccgaggtgtcggcggtggccagcttctacaccatgtaccggcgtgggccgaccggtgactacctcgtcggggtgtgcacaaacacgttgtgcgccatcatgggtggcgacgccatcttcgatgcgctgaaggaacatctgggcatcggcaacgacgagaccacgcccgacgggtcggtcacgctgcaacacatcgaatgcaacgcggcctgcgactacgcgccggtggtgatggtcaactgggagttcttcgacaatcagacacccgagtcggcgcgcgaactcgtcgactcgctgcgcgccggtaagccccggcaccccacccgcggcgcgccgctgtgcgtcttccgggagacctcgcgcatcctggccgggctgcccgacgagcgccccgaccaggggcagggcggcgccggcgcggcgaccctggccgggctgaaggtcgccaaggaacacggcatgcaggcaccgtacccgccggaaggccagcaa

SEQ ID NO: 25923 - DNA, 534 bp, Mycobacterium avium
atgacgaccttggagacactgctgcacgatccggagatggccggcgtgtggaacctggtgccggaccgctcggccatcactttcagcatcaagaacatgtgggggctgctgaccgtccggggccgcttcaccgacttcaccggtgacggccaactgaccggcaagggagcggttttcgggcgcgtcgacatccgggccgcatcgctggacaccgggatcggccgccgcgaccagcacctgcgctcgcccgacttcttcgacgtcgaacgcttcgagaagatcagcgtggtggtcaccgggctgcagcctaccaagggcaaaaacgccgacctgcgcaccgacttcaccgtcaagggcgtcagcgcacaactgccgctgcccgtcacgatcctcgagctcgacgacggctcgatccggatcaccggcgaaaccacgctcgatcgcgcccgattcgacctgggctggaaccggttcggcatgatcggccgcaccgcgacggccgcggccgacgtcatcttcgtccgagattcgcaa

SEQ ID NO: 25924 - DNA, 906 bp, Mycobacterium avium
atgagccgccggcagttgatccggcacacggcgtggttcggggcggcggtggggttcgccgtgaccgggggcgaggtgatctcccacgtcgccggccgggcggccgcacagcacacccgcgcccagcccaccctgcggttcgcccagatcagcgacagccacctcggtttcaccggcgcccccaaccccgacgtggcgggcaccttcggccgggccatcgaccaggtcaacaacctgggctacaccccggatttcgtcatccacaccggcgacctcacccacctgtccacccccgagcagttcgaccaggccaagcagatgatgagcgcgctgaagaccccgcacgtgttcaccgtgcccggcgagcacgattcggtcgacgacgcggggcagaagtaccgcagcgtcttcggggcgggttcggccggtgacggctggtacagcctcgacgtggccggtgtgcacctgatcgcgctggtcaacacgctgaatctgcgcaagctcgggcacctgggcgccgaccagttggagttcgtcaaaaaggacgtcgccggcctgtccagcgacactcccatcatcgtgttcagccacatcccgttgttcgcgatgtacccgcaatggggttggggcaccgacgacgccgcgcaggcactgagttatctgcgccggttcgcctccgtcacctgcctcaacggccatgtgcaccaactgttctccaaaaccgaggacaacgtgacctttcacagcggcaccaccaccgcctacccgctcccgcacccgggcgacgggccggcacccaagccggtcaccctgcccgccggcaggctgcgcgacgcgctgggcgtgcgcgaggttgcctacagccggggcgacaccgttctggcactgaaagagctgaccctgcaa

SEQ ID NO: 25925 - DNA, 1422 bp, Mycobacterium avium
gtggcggcaccccaatcgtcggtcgcgtccggcggcgacgacgccgttcgcggtggcatcggcgcactgacggccatggcagccaccttgcccgcgccggcgcccgccgggctcgccgacggccatccgctcgacgaatccgccgagcagcagcgccgccggctgcgcatcgtggtggccgccagcctgctgggcaccaccgtcgagtggtacgacttcttcctgtacgccacggcggccgggctggtcttcaacaaggtgttcttcccgaacgaaagttctttggtgggaacgctattggcgttcgcgacgtttgccgtcggattcgtcatgcggcccatcgggggcctggtgttcggccacatcggcgatcggatcggccgcaagcgcagcctggcgctgaccatgctcatcatgggcggcgcgaccgcgctgatcggggtgttgccgacggccgcgcagatcggggcctgggcgccggtgctgctgctggtgttgcgggtgctgcaggggttcgcgctcggcggcgagtggggcggggcggtgctgctggccgtcgaacacagcccgggcgaccggcgcggccgctacggggcggtgccgcaggttgggctggcactcggattggctttgggcacaggcatattcgctttcctgcagatcgtgctgggcccggcccggttcctgtcctacggctggcgcatcgggttcctgttgagcgtgctgctggtggcgatcggcatcgtggtgcggttgcgggtggaagagacaccggcgttccgggaactgcaggacctgcaggccgcgtccaccgtgccgatccgggacatcctgcgcgagaggcgttcccggcgcaacacggtgctggggctgctgtcccggtgggccgagggctcggcgttcaacacctggggcgtgttcgccatcagctacgccaccggggcgctgggactcaaccgggtctcggtgctgatcgcggtgaccatcgccgcattgctgatggcagtgctgctgccggtgtccggcgtcctgaccgaccgattcggtgcccgccgggtgtacctggccggcatcgcctgctacggcctggccgcgtttccggccttcgcgttgttcggcaccaagaagctgctgtggttcgggctggcgatggtcatcgtgttcggcgtcgtgcacgcgctgttctacggtgcccagggcaccctgtattccgcgctgtacccgaccaacacccgctacaccgggctgtcgttcgtctaccagttctccggcgtgtacgcctccggggtcaccccgatgatcctgaccgcgctgatcgccgcgctgggcggcgcgccgtggctggcgtgcggctacctggtggccaccgcggtcatcagcgtgctggcgaccgcgctgatccgcgatcgcgatctgtacctc

SEQ ID NO: 25926 - DNA, 3342 bp, Mycobacterium avium
atgaccgcgtcgctggaggtgccgacggccaccagcgtgcgcgccatcccggccaaactgctgatcgacaaccggatcgtcatcaacaaccagctcaagcgcacccgcggcggcaagatctcgttcactcacctgttgggctacgcgctggtgcaggcgatcaagaagttcccgaacatgaatcggcactacgccgagatcgacggcaaacccaccgcgatcaccccggcgcacaccaacctgggcctggccatcgatctgcagggcaaggatggcaagcggtcgttggtggtggccggcatcaagaactgcgagaccatgcggttcgcccagttcgtcaccgcctacgaggacatcgtgcggcgggcccgcgacggcaagctgaccgccgaagactttgccggcgtgacgatttcgctcaccaaccccggcaccatcggcaccgtgcactcggtgccgcggctgatgaacggccagggcgcaatcatcggcgtgggcgcgatggagtaccccgccgaattccagggggccagcgaggaacgcatcgccgaactgggcatcggcaagctgatcacactgacctcgacctacgaccaccgcatcatccagggcgcggaatccggtgacttcctgcgcaccatccacgagatgctgctgtcggacgcgttctgggacgacatcttccgcgagctgagcatcccgtacctgccgatccggtggagcaccgacaacccggactcgatcgtcgacaagaacgcccgggtgatggagttgatcgcggcctaccgcaaccgcgggcacctgatggccgacatcgacccgctgcggttggacggcagccggttccgcagccaccccgatctggagatcctcaaccacggcctgacgctgtgggacctggaccgggtgttcaaggtcaacggcttcgccggggcggagtacaagaagctgcgcgacatcctgggcctgctgcgggatgcgtactgccgccacatcggcgtggagtacacccacatcctcgaccccgagcagcaggaatggctgcagcagcgggtcgagaccaaacacgtcaagccgacggtggccgagcagaagttcatcctgagcaagctgaacgcggccgaggccttcgagaccttcctgcagaccaaatacgttgggcagaaacgcttttcgctggaaggcgcggaaagtgtgatcccgatgatggacgcggcgatcgatcagtgcgccgagcacgggctcgacgaagtggtgatcgggatgccgcaccgcggccggctcaacgtgctggccaacatcgtcggcaagccgtactcgcagatcttctccgagttcgagggcaacctcaacccggcgcaggcgcacggctccggcgacgtcaagtaccacctgggcgccaccggcgtgtacctacagatgttcggcgacaacgacattcaggtgtcgttgaccgccaacccgtcgcacctggaggccgtcgacccggtgctggagggtctggtccgggccaagcaggacctgctggaccacggcgccgacgaccagggagacgagaaggccttctcggtggtgccgatgatgctgcacggcgatgccgcgttcgccggccagggcgtggtggccgagacactgaacctgacccatctgcccggctaccgggtcggcggcaccatccacatcatcgtcaacaaccagatcggcttcaccacggcgccggagcactcgcgctccagcgagtactgcaccgacgtcgccaagatgatcggggcccccatcttccacgtcaacggcgacgacccggaggcctgcgcgtgggtggccaagctggccgtcgacttccggcagaaattcaagaaggacgtcgttatcgacatgctgtgctaccgcaagcgcgggcacaacgagggcgacgacccgtcgatgaccaacccggccatgtacgacgtcgtcgacatcaagcgcggggtgcgcaagagctacaccgaggcgctgatcggccgcggcgacatctcgatgaaagaggccgaggacgcgctgcgcgactaccagggccagctggagcgggtgttcaacgaggtccgcgagctggagaagcacggcgtggggcccagcgagtcggtggaggccgaccagatgctgccggcgggcctggccaccgcggtggacaaggcgctgctggcccgcatcggcgacgcgttcctggcgctgccggagggtttcaccgcccacccgcgggtgcagccggtactggagaagcgccgggagatggcctacgagggcaagatcgactgggccttcgccgaactgctggcgctgggctcgctggtggccgagggcaagctggtgcggctgtccgggcaggacacccggcgcggcaccttctcgcaacgacactcggtgatcatcgaccgcaacaccggcgaggagttcaccccgctgcagttgctggcgaccaaccccgacggcaccccgaccggcggcaaattcctggtgtatgactccccgctgtcggagtacgcggccgtcggcttcgagtacggctacaccgtgggcaacccggatgccctggtgttgtgggaggcgcagttcggcgacttcgtcaacggcgcgcagtcgatcatcgacgagttcatcagctcgggtgaggccaagtggggtcagctgtccaacgtcgtgttgttgctgccgcacgggcacgagggccagggccccgaccacacctcggcgcgcatcgagcgcttcctgcagctgtgggcggaggggtcgatgacgatcgcgatgccgtccaccccgtccaactacttccacctgttgcgccggcacgccctggacgggatcaagcggccgctgatcgtgttcaccccgaagtcgatgctgcgcaacaaggccgcggtcagcgacatcaaggacttcaccgagatcaagttccgctcggtgctcgaggagccgacctacgaggacggcatcggcgatcgcggcaaggtcagccgggtgctgttgaccagcggcaagctctactacgagctggtcgcgcgcaagaacaaggacaaccgcgacgacgtggcgatcgtgcggatcgaacagctggccccgctgcccaagcgccggctgggcgagacgctggaccgctacccgaacgtgcgcgagtacttctgggtgcaggaggagccggccaaccagggggcctggccgcgattcggcctggagctgcccgagctgctgcccgacaagctgaccgggctcaagcggatttcccgccgggcgatgtcggcgccgtcgtcgggctcgtcgaaggtgcacgccgtcgagcagcaggagatcatcgacaccgccttcgcc

SEQ ID NO: 25927 - DNA, 1245 bp, Mycobacterium avium
atgggttcgggccacgccgtcggataccctaagcaaccgatgaccgctcgtttcgatcttttcgtcgtcggctctggattcttcggactgaccattgccgagcgcgtcgctacccagctcgggaagcgcgtgctcgtggtggaacgccgcccgcacatcggcggcaacgcctactcggaacccgagccgcacaccggcatcgaggtgcacaagtacggcgcccacctgttccacacctctaataaaagggtctgggactacgtgcggcagttcaccgacttcaccgactaccggcaccgggtctttgccatgcacaacggccaggcctaccagttcccgatgggcctgggcctggtgtcgcagttcttcggcaagtacttcagccccgaggaagcccgcaagctcatcgcagagcaggccgccgagatcgacaccgccgacgcgcagaacctcgaggagaaggcgatctcgctgatcggccggccgctctacgaggccttcgtcaagggctacaccgccaagcagtggcagaccgaccccaaggaactgccggcgtccaacatcacccggctgccggtgcgctacaccttcgacaaccgctacttctccgacacctacgaggggcttccggtcgacggctacacggcctggctgcagaacatggccgcccacgagaacatcgaggtccggctgaacaccgactggttcgacgtgcgcgacgggctgcgcgcgggcagccccgaggcgccggtggtctacaccggcccgctggatcgttacttcgactacgccgagggccgattgggttggcgcacactggatttcgaggtcgaggtgctgcccatcggggacttccagggcaccccggtgatgaactacaacgacctcgacgtgccctacacccgcatccacgagttccggcacttccacaccgaacgcgactacccgaccgacaagacggtgatcatgcgggagtactcgcggttcgccgaggacgacgacgagccctactatccgatcaacaccgaggccgaccgcgccctgctggccgcctaccgggcccgggccaaggccgagaccgcgtcggcgaaggtcctgttcggcggccggctgggcacctaccagtacctggacatgcacatggccatcgccagcgcgctgaacatgtatgacaacgtcctcgcgccgcacctgcgcgacggcgcatccctgacagaagcccagagcaaacaggagagcggcgcc

SEQ ID NO: 25928 - DNA, 423 bp, Mycobacterium avium
gtgcgtgacggcgcggatgcaccacaatggacggcgatggatcaggtgagcttttacgacgcggtcggcggtgccgagacgtttcaggcgatcgtgtcgcggttttacgcccaggtgcccgaggacgagatcctgcgcgagctctatccgctcgatgacctcgagggcgccgaggaacggctgcggatgttcctcgagcagtattggggcggcccgcgcacctactccgaccggcgcgggcatccgcggctgcggatgcgtcacgtgccgttccggatcactcccctggcccgcgacgcctggctgcgctgcatgcacacggcggtggcgtcgatcgactcgaagacactggacgacgagcaccgtcgcgagctgctcgactatctggagatggccgcgcactcgctggtgaattctccgttg

SEQ ID NO: 25929 - DNA, 201 bp, Mycobacterium avium
atggcacagggaactgtgaaatggttcaacggtgaaaagggcttcggcttcatcacccctgacgacggcacgaaggacctcttcgtccactactccgagatccagggaagcggctatcgctcgctcgacgagaaccagcgtgttcagttcgacgttgagcagggagccaagggaccccaggcggtaggagtcagcaccgtc

SEQ ID NO: 25930 - DNA, 1458 bp, Mycobacterium avium
atggcaccttcaggagagcaccgtccggagaacctcggacaggccgcggttcacgccgctgccgtcgcgaccggcaactcggccaccacgctgcgccaacaggtgaagaacctcaacgcccacgcgtccggcaagaccatcaccgagcagtgcgagctgctcacgaagcaggcaggcatcgcggagaaggtttccgcagacttgggcatcgtcgccgcagcactgaagatccgcgaggacgccgcgagggcgtggaaccgcgacgcgcccaaggactcggagatcgcggctgcgaagaaggcggtggccgacgcgaagaaggcactcatggatgcctctgccgccagcggcgacaccagcgcggcctccccgaagctcgaggccgcacagaagaagttgggtgagctgatccggaggcgccgtgacgcagacaaggcgtatgacgccgcggagaagcgcgcggatgcgaagctcaaggagatcagcgggcagtacgccccccatggcggcggccgtgggcacaccgcggacggaacccccgagacccctgctccctcccccggctctccctcccccggcgccggctctccctcccccggtaccggcaagccctccgccggcgccccgggcaagaccgcctccggtaccgcgaagccgtccgccactcccgccgctaccccctcgtcgaccaagccgaccgagaccgagaccaagagcggcgacgacttgtccggcttgctcacccagctcgcctcccagcagcaacagcagccgcagtccgctcagcaggcacagccgaccgcgcaggcgacaccggccgcggccaccccgcagcagcagcccgagaaggataaggacacggcgcagggcaaggccagccccctcgaccggatcctcggcgcggacggcatcctcgacaccggcgacctcgcgaccctcggcgttggcgcacccctcaccctcggcggtggcagctcgcacgccacccccgccgcggccgtcacgccgagcgcgccggcgtcggctgcaccttcgagcacgggcctgagcgccagtgccaccgcgaacgcacagcccgtcaccagcggcacgtcggcgcagggactccacacgtcgaccgatgtcacgggcaggtcgggtgagccgcgctccgccttctccgtgggcccggagacgaagacgagtggcgcttccggtgcgacgggcaccagcgctgctccggctcatgccgctggtacacgccccatgggtgccggaggcatgcccatgatgccgatgggcggcatgggcggtcccgccggcggcgctggatcgtcgaaggacaaggagtccaccacgctcgcttccggcagcgcggagagcgacctgctccacggccgccacaccgctgcggaggcagtgcccggcgggaccatcgcccagaaggatcacccgcgccggcggggcgaggacgcggcg

SEQ ID NO: 25931 - DNA, 1023 bp, Mycobacterium avium
gtggtgtcaaccacccacaaccagcaggcctatgtccgcgacacgttggacggcttcctcgcccagcgggtcgactttccgatggaggtcatcgtcgccgacgatgcctcgaccgatgccacaccccgaatcatccaggactacgccgaccgccatccgaacctcttccggcccatcctgcggtcgagaaacgtcggcctcaacgccaacctcaccggtgccctgtccgccgcgcgtggcgagtacatcgcgctgtgcgagggcgacgactactgggtcgacccgttgaaactgaccaaacaagtggcgttgctggacgaagatcccgacaccacggtgtgtttccacccggtgcaggtggtctggacccacgagtgcgcggaggacgagaaactcgtccacaccctgtatcgcaagttcgaagagatcttcctgcccaagtttccgccgccctttcgggcgggtgacctcagcttcgagacgctgatctcgcgcaacttcatccagaccaactcggtgatgtaccgccgcctcccccgctacgacgacatcccggccgatgtcatgcccctggactggtacctgcacgtccggcatgccgccgaaggcgccatcgccatgctgccggagacgatggcggtctatcgccgccacccgcgcggcatgtggtacaagtcgatcaccgatccggccaccttctggcggatgcagggtcccgggcatgcggcgacattggacgccatgctcgacgtcgtctccggcgaccccgtgcacgaatccatcgtggccaaaaacgccgactgggtgctgggggcaatcgccaagcaggtcccggaccccgagggccagcaagtcctgacgcagaccaccgccaagtacccgcggatcgccgcgctggcgctgcgcaaccgctgcaccaagacgctcggcggacgggtgaaacggttgcggcgcaagctttctcgcaatgccactgcaccgaacagcgatgccgagcgccgaatcgacgagccactgagcgcc

SEQ ID NO: 25932 - DNA, 459 bp, Mycobacterium avium
atgggcggggtgaaagcacgcacggacgtaacctccgagctgttcggtgtggtcggccggtttcgccgccaactgcgcaggtcggccggtcgcgcgttcgatccggcccggctctcggagtcccagtcggaattgctgtggctggtcgggcggcggcccgggatctcggtcagcgccgcggccgccgagctcggcctggtgcccaacaccgcctcgaccctggtcaccaagctggtgtcgggcggattcctgctgcgcgccgccgcggacaccgaccgccgggtgtgccagctgcggctcaccgagtccgcgcagcagatcgtcgacgagtcccgggccgcccggcgggcattgctgtccgaggtggtcgacgaactcaacgacgaccaaatcgaggctttgacaagaggattagaggtcctcgacatgatgacccaaaaactgcgggagcggcgacca

SEQ ID NO: 25933 - DNA, 546 bp, Mycobacterium avium
gtgggcaggccccggtcggacacccgagagcgcatccaacaggtcgctcgagaactgttttcccaacgcggggtgcagcgcaccagcctgcaggacatcgccgaccggctgggcatcaccaaacccgcgctgtactaccactttccgtcccgcgaggacctggtgcgcagcatcctggtgccgctgatcgaggagggcgagcggttcgtcgccgagcatgagagccgcgagcacaccgaggcgcgcgagttgctggagggctatttcgacttccactaccggcaccggagggatctggtgctgctgttgaccgagttgtccacgctgatcgacctcgacctgatcgacaccgtgctggcgtggcgggaacggctggccaggctggtgttcggcaagaggcccacgctcgcccaatccacgcgcgccgtcgtcgcgttcggcgggttacaggactgctgcgtgcagttccccgacgcgccgcaggccgagctgcgcgacaagtcggtcgccgccgcgctcgacgcgctgggagagcggccccggcgg

SEQ ID NO: 25934 - DNA, 252 bp, Mycobacterium avium
atgacctctgccccgctcaccgtttacaccacgtcgtggtgcggctactgccaccggctgatgaccgtgctcaagtccaacggcatcccctacgaggcggtcgacatcgaacacgaccccgccgccgccgagttcgtcagctcggtcaacggcggcaacaagacggttccgacggtgaagttcgccgacggttccacactgaccaaccccagcgccgcgcaggtgaaggccaagctggccgaagtcggcaac

SEQ ID NO: 25935 - DNA, 489 bp, Mycobacterium avium
gtgtctgaaccgctgcacgtcacgttcgtctgcaccggcaacatctgccggtcggtgatggccgagaagatgttcgccgaccagctgcgccgccgcggcatggccgatgccgtgcgggtgagcagcgccggcaccggcaactggcatgtcggcgagtgcgccgacgagcgggccgccggcgtgctgcgcgcccacggctacccgaccgagcaccgcgccgcgcaggtgggcgccgagcatctgtccgccgatctggtggtggcactggaccgcaaccacgcccggatgctgcggcacctgggcgtcgacgaggaccgcatccggatgctgcggtcgttcgatccgcgcaccggcgcgcacacccccgacgtcgacgacccctactacggcgacagcaaagacttcgaacgcgtctacaccgtcatcgaggccgcgctgcccggcctgcacgactgggtcgacgaacggctggcgcagaacggatcgtcg

SEQ ID NO: 25936 - DNA, 735 bp, Mycobacterium avium
atgaaagccgatgtggcacagcagcgttcactactggagctggcgaacgtggatgccgagctgtcccggctggcgcaccgggccgagcatctgcccgagcagcaggcctgcgagcggatgcagcaggagtacgacgccgccggtgaccggctgggggcggtgcgaatcgccttggaagacatcgatgctcacgtgcggcggctggaagccgaggtcgacgcggtgcgccagcgcgaagaccgcgaccgctcgctgctgcagtccggagcgatcgacgccaagcagctggccgaccttcagcacgagctggagaccctgcagcgtcgccagaccagcctggaggattcgctgctggaggtgatggagcggcgcgaggagctgcaggcccagctggacggcgagcagcagacgctcaaggagcttgaggccgcgatggccaccgcgcggcgcgatctggacgccgcgcgcggcgagatcagcgagtcccgtgcgctgcattcgtcgcggcgcgaggcgctgagcgccgaactggaccccgagctgttcgccctctacgaacggcaacgcgcccggggcgggccgggcgccgggcagctgctgggacggcggtgcggcgcctgccggctggaaatcgaccgcggggagctgtcccggatctcggcggcggccgaggacgacgtggtgcggtgcccggaatgcggggcaatcctgctgcgggtcaaggggcccggtcag

SEQ ID NO: 25937 - DNA, 1182 bp, Mycobacterium avium
atgactgagacactggccgccctgctgcatcggctgagtcggccggaggtgaccatcgccctcggcgatggagtgggtgggctgacgaccttggacagtggtgtttcgatcggcgagacggtcagccgttttgccgccgacaccggcgcggtttcactgatcctcggctggtgtccggtgccaccccagggactgtgcgctgacgccttcgcgcgcatcgtcaccctgatgccgggttggggaatgcgcgagttgttgtccagccacgtagtccattcgattccgaccagcatggccgcgattccggggctgcttgccgggcacctgcgtcccgacgccctgatcactcgtatggcccacagcggcgacggtctgcagttctgctccgaagtgtcctggcagcaggcgttagtcgatgccggggtgccgctatgggcggtgctcgacgactccgcacccaaagcaagtgcggaggcgcctattccgctggatgcggtcaccatcatcgggcgtgccggttcgggcactgccgaaatccctgtccgctcagcggattcgatccacgacgaccttgcagaccgagtgctgcggttcattcccgccggagcgcgcctgcaatacggaccgggccaactcggcaccgcactattgcggcgcacgaagattcccctgtcgatcgataccggattgctcactgacgcggtcatcgatttggaacgccggggtctgctggtgggccaaccgtcggccacctacctgctgggcagcgccgaactgtatcgatgggccgaccgcagaccgatcctgcgcggcgtcggctatacccacgacgtttcccgcctgtcccgcggagcgccgttcgtagccgtgaacaccgctatcgagatcgacccctacggccagatcaacgtcgagggcatcgccgacaaggtggtgggtggtatcggtggacaccccgactactgcgtggcggcacgactgagccgaaacggtctgtccatcattgccgttccggcccgcttcaacggacgctcgccgctggtcgaacggctcagccggcccgcgtcgacaccggcgcacgacgtcgacatgatcatcaccgagcacgcacatgtcgacctgcggggcgcggactggtgtcaacgccaccgactgatcagcgagctgtttgaccgcgccgcc

SEQ ID NO: 25938 - DNA, 2628 bp, Mycobacterium avium
gtgaagctgcaccggctgaccctgacgaactaccgcggcatcgcgcaccgggaaatcgaattccccgaccacggtgtggtggtggtgtgcggcgccaacgagatcggcaagtcgtcgatgatcgaggccctggatctgctgctggaggccaaggaccgctccaccaagaaggaagtcaaacaggtcaagcccacccacagcgacgtgggtgccgaggtttcggccgaaatcagttgcggcccataccgattcgtctaccgcaaacggttccacaaaaagtgtgagacggagctgacggtgatcacgccgtaccgcgaacagctgaccggcgacgaagcccacgaacgggtccgggcgatgctggccgagacggtggacagcgacctgtggcatgcccagcgcgtgctgcaggcggcgtcgaccgccgcggtggatctgtcggggtgcgacgcgctgtcccgcgcgctcgacgtcgccgccggcgacagcggcgggctgtgcggcaccgagccgttgctcatcgaacgcatcgacgccgaatacgcgcgctatttcaccccgaccggacgcccgacgggggagtgggccgccgcgatcgcccggcttgccgacgccgaggccgccgtcgccgaatgcgcggccgccgtcgccgaggtcgacgagcgggtgtcccgccacgccgcgttgaccgaacaggtggccgacctgtcccagcggcgcatcgccgccggcccgcgagtgacggccgcgcggcaggccgccgaccggatcgccgagctcaccgcccagcgccgggaagcccagctggtcgccgaggccgcggcggccaccaaagccgcggcggcccaggcccactccggccggctacaactgctcgccgacatcgacacccgggccgccgccgtcacgcagacacatgctcaggtccagcaggccgcggccgaccacgcggtggcccaggccgacgcgcaggcctgcgacaccgcgctgcagcacgccaccgaggccctggccgagctggagcgccgggtgcaggaggcgcagcgcaccgtcgagcggtcggccggccgcgaggaggccgaccggttggccgcccggctggacaaaattgatgccatccagcgcgatcgcgagcgcatcagcgccgagctgagcaccatcgcggtcaccgaggagttgctgcgccgcatcgaggacgccgccgccgcggtcgaccgcatcggcgaccagttggcgtcgacgtcggcggccgtcgaattcaccgcggtagccgacattcacctggtgatcggcgaccggcaggtgtccctgccggcggggcagagctggtcgatcaccgccgtcgggcccaccgcggtcgaggttcccggtgtgctgaccgcccgcgtcaccccgggcgcgaccaccctggatgtgcaagcgaaacacgctgcggcgcaacaagaactggccgcagcgctgacggcgggtgccgttgccgaccttggcgccgcccgatccgccgaccagcggcgccgcgagctgcagggcactcgcgaccagctcggcgccaccctggccggattgtgcggcgacgagccgctcgacgagctgcggtcgcggctggcccggctgcgcgccgagcatccggagcagccggccgcgccgacgggtggggccgccgacctcgccgccgcccgcaccgaactcgaagcgctcgcgcaggcccgcgcctgcgcgtcggccgaatgcgtcacgcgccgtcaggccgccaccgcagcggccgccaggcttgccgaaaccgccacggcggcaacggttctgcagaacaggctggacaccctgcgggccgagctggacgcggccaccggtcggctggccgccgagcgcgcgtcggtcggcgacgaggagctggcggcgtcagccgatgcggcgctgcgcgccgagcaggccgccgaacgtcgggtcgccgaactcgccgacgccctggccgcggcgtctccggactccgtcgccgccgaattagccgatgccacacaggaatccgagtcgctgcgggagcgctacgaagaagcggccggcgcgctgcgcgaggtgacgatcgagctgtccgtcttcggcagcgaggggcgccagggcaagctcgacgccgcggaaacggagcgcgagcacgccgccagcgagcacagccaagtcggccgccgggcccgcgccgcccagctgctgcgctcggtcatgacgcggcaccgcgacaccacccggcagcgttacgtcgagccctaccgcgcggaattgcagcggctcggccgtccggtgttcggccccaccttcgaagtcgacatcgacagcgacctgtgcatccgcagccgcaccctcaacggcatcaccgtgccctacgagtccctgtccggcggcgccaaggagcagctgggcatcctggcacggctggccggcgccgcgctggtcgccaaggaggacgccgtcccggtggtggtcgacgacgcgctcggtttcaccgacccggaccggctggccaagatggggcagctgttcgacagcgtgggaagccacgggcaggtgatcgtgctcacctgcagcccggaccggtacgacggcgtcaagggcgcgcaccgcatcgacctcagcgct

SEQ ID NO: 25939 - DNA, 723 bp, Mycobacterium avium
atgcgctgcacaagccgccgaaatcccatcctagagcggcggcccgtcccaacggtcgcaggcgatcacttcctggatcggccgccgccgcgcgggccggaaggtgcgcccggcccgcagccggcccaccggcagcagacagccctggacgtaggtcggcggaatgccgagcagctgtgcgacttcatcttcgtgatgcagatgcagcgtggtgatgcacgtcccgtatccccgggtgtgcagggccagctgaaagttccacaccggcgggaagatcgagccgtacagcgtggccaggtggaaggattcgtcgccgtcgatgcgcggcaagtaaggctcgtagcaagggattaccagcatgggcaccctggccaggttctcgaccagccactcggtcgacgacatgatgcggctctcgggtgttccggcgggcatcaggccggcgagcaaccgtccgccgacccgccgcagataggcgtcgcgatacagctcggcgatccgggcgcgcagcgccggatcgctgaccaccagccagcgccacgactgcgcgttcgacccgttcgcggcctgcaggccgatgcgcaggcactcgcggatgtcgccgggttcgaccggggcgtccaggtccagcgacttgcgcgccgacggcgtggcggtgagcaggtactcgacattcatcacggactgcctctcttggcaaggcgcgcaccgacttcggtgagg

SEQ ID NO: 25940 - DNA, 762 bp, Mycobacterium avium
gtgacaaaccggtggacacagcgcatcggcgacggcgacccgcgcatcggcatgtgggtggcctcgggcagcggttacgtcaccgaaatctgtgcaggatccgggatcgactggctgctgttggatcaggagcacgcgcccaacgatctgcgcagcaccctcggacagctgcaggtgctggccggctacccggatgtcgacgtgctggtgcggccgccctcggctgacccggtgttcatcaagcaattgctcgacatcggggctcagaacatcatcgtcccgatgatcgatggccctggtgaggcagtcgcggcggtttccgccacgcgttatccgcccaacggcatccgcggggtcggcagcgcgttggcccgagcgtcccgttggaaccgcatttctgactatctcgtcaccgctgacacggccgtgtcgttgaccgtccaggtggagagtgtggccggtctggcacagctcggagagatcaccgacgtcgacggagtggacgccgtcttcatcggaccggccgacctggcagcctcgatgggcaaacttgggcagccggaggatccagacgtcgtgagcaccatagaaaccgcgctggcgaccatcgtggaacacggcaagcgcgctggggttaatgcgttcagcgagccactggcgcgccgctacatggcggccggggcgagcttcgtgctcgtaggagcggacgtggcactgctggcccgcggcaccgagcagctggcagcgaggtatcgccgccaa

SEQ ID NO: 25941 - DNA, 1002 bp, Mycobacterium avium
atggccagctacgtcgccgggtcgggggagttcacccgcgacaccgactacatcaccacccgcatcaccgccgacggccgcgacggctacccggtcgagcccggccgctatcggctggtcgtggcgcgcgcctgcccgtgggccaaccgggcgatcatcgtgcgccggctgctgggcctggaaagcgttctgtccattggcttttgcggccccacccacgacgagcgcagctggacgttcgatctcgatcccggcggcgtcgacccggtcctcaagattccccggctgcaggacgcctacttcaagcggttccccggctaccccaagggcatcacggtgcccgccatcgtggacgtcgggaccggggcggtggtgaccaacgacttcgcgcagatgacgctggatctgtcgacggagtggaccgcgtaccaccgcgacggtgcgcccgagctgtaccccgagcggctgcgcgccgagatcgatgaggtgaacaagcgggtgtacaccgaaatcaacaacggtgtgtaccgatgcggctttgccggttcgcagcaggcctacgaggcggcctacgaccggctgttcaccgcgctggactgggtgagcgatcggctggccgatcggcgatacctggtgggcgacaccatcaccgaggccgacgtgcggctgttcaccaccctggcccggttcgacgccgtctaccacggccacttcaaatgcaaccgcagcaagctgagcgagatgccggtgttgtgggcctatgcccgggacctgttccagacgccgggcttcggcgacaccgtcgacttcgtccagatcaagcagcactactacatcgtccactccgacatcaaccccaccgggatcgtgccgaaggggcccgacctcgccggctggctgacaccgcatgggcgagaagcgttgggcggcaggccgttcggcgacggcacgccgccgggcccgccggtcgaagcggagcgggtgcccgccggccacggcgcc

SEQ ID NO: 25942 - DNA, 402 bp, Mycobacterium avium
atgccggcagccaccgacggcgacatgggaccggagccgggcctgcccgcccacgaccacgacgggctcgccgccgcgggccaccccggtccggccgactaccccgtcccgccgccgcgggacatcctcgacgccgccggcgagctgttgcgggcgctggcggcgccggtgcggatcgcgatcgtgctgcagttgcgccagtcccatcgctgcgtgcacgagctggtcgacgcgctcggggtgccccagccgctggtcagccagcacctgaagatcctcaaggcggccggtgtggtcgccggggagcggtccggacgcgaggtgctctaccggctcgccgatcatcacctcgcgcacatcgtggtcgacgccgtcgcccacgccggcgaagagccgcgccca

SEQ ID NO: 25943 - DNA, 1374 bp, Mycobacterium avium
gtgaaaccaaacggcgcacccgatctcgtcggagaaacccgctaccaggccggcgctaccgccaccgctgtcgtcgtcgacgggcgactgcagtgggaggtgcgccgccacggcgacgaccacgtccgctacaccgaccgcctcgcacacatcagccactggtcaaccgaacgtgaactgtccgcgctgcggcgctcgccggtcgccgacttcccgcgcctcggcggcccggccggcggcacgttgttctacccggactgctccaacaacaactggaactccgagcaggacgcggtcgacttcgtcaaccagctgatcccgcagggcttttcgggcatgtgccacaaggtttccgagggcgactactacgaggatccgttctggccggtcgtccttcaggcctgccgggacgccaaccttccggtgctgggctaccactacgtcaccaccaacaaccttggcgcccaggcgcagacctacctggcggccggcggcctgcccaacgcgatgttcgactgggaggccaacggcggcgacctcgccaactactacgccgtcgcctcggcgttcaacgccgccggcatcaccgtcggggtcggctactgtccgcgctggtatttcgacgaggtcggaggcggcgacctgtcccaggccggcgcgatcgtctcctcggcctacccgggcggcactggttacgcctcacagatttacgaagccgcgggcggtgacgaaggctccggctgggcgccctacgggggcgtcacacccacctgctggcagttcaccgaccaagccctggtcgccgggatcaccgtcgactgcaacgccttcaaaggcaccgaagaccagctcgcacaactgtttacaggaggaaccgtgacacagccagaatccaccgagcagcaagaaatcgacgcgatcgctgggcagctcggcgcgtggccgcagctggccggcaagcccgacgccctggcggtgctggcgcagaagatcgccgacggcgacgatctgaccctggtcgatgcggtcgccgcgcacatcttcggtttgctgccggtgcaaaccccggcgaagctcggcgccatgagcccgaatgcgggagcgatcgcgcagaccgtcatgtgcgcgctggccggcatcgacgcccaaaccggggcgccgctgtcctaccgtcaggtcgaccagctccacgagtacgaaggcccgggcgtctacttcccgcccgaggcgcccggccagaccacctcgtcggtgctcgacgtcgagacgaccagcggcaaagtcgggctgcgcctgtacaaggggctggactggttcgacatgatcgtcgcgctgtaccagcaggccggcgagcccaccccgaaggccgcgtcg

SEQ ID NO: 25944 - DNA, 1131 bp, Mycobacterium avium
ttgcgtatcggccccatcgagctggccagcccggtggtgctggctcccatggccggggtcaccaacgtcgcgtttcgcaccctgtgccgtgagctggagcgggagctggtcgggacggtcagcggactctacgtctgcgaaatggtgacggcacgcgcgctcgtcgagcggcacccggccaccatgcacatgaccacgttcgccccggacgagtcgccgcggtcgctgcagctctacaccgtcgacccggccaccacctacgcggcggccaagatgatcgccaacgagggcctggccgatcacatcgacatgaacttcggctgtccggtgcccaaggtgaccaagcgcggcggcggctcggcgctgccctacaaacgacgcctgttcgggcagatcgtggccgcggcggtgcgcgccacgcagggcaccgagataccggtgaccgtcaagttccgcatcggtatcgacgaagagcaccacacgcatctggatgccgggcgcatcgccgaggccgagggtgccgcggcggtcgcgctgcacgcccgcaccgcggcgcagcggtattccggcaccgcggactgggaacagatcgccctgctcaagcagcaggtgcgcaccattccggtgctgggcaacggcgacatctacgacgccagcgacgcgctgaccatgatggccgccaccgggtgcgacggcgtggtcatcggccgcggctgtctgggccggccgtggctgttcgccgagctgtcggccgcgttcaccggcagcccgccgcccacgccgcccaccctggggcaggtggccgacatcgtgcgccggcacgggcggctgctggccgcccacttcggcgaggacaagggcatgcgcgacatccgcaagcacatcgcctggtacctgcacggcttcccggccggttccgagctgcggcgcgcgctggcgatagtcaagacgctcgacgagctggaccgcctgctcgaccggttggacggctcggtgccgttcccggacgaggcgaccgggccccgggggcggcagggttcacccgcccgggtggtgctgccggagggctggctcgacgacccggacgactgcacggtgccggccggcgccgacgtcatgcactccggcggc

SEQ ID NO: 25945 - DNA, 2103 bp, Mycobacterium avium
atgagtgacgccgagagcgacggcactcgtaacggtcggcacggaccgggcgcggctcacgttcaaccgatcccggtcggcccgtcgcccagcttggccgccgctccctgggagcgcttgttcgaacccccgcccgacgaccgcctgcaccggtggcggccggacgccgccgccctcgagcccgtcgccgcacccgaggacgacgacgagccgggcggatgccacaccggcggcggcgtcaccgtcgccgatctgatcgccaaggtcggcgccccgaaccggcccgtgcaccgtcgcgcggctccggaggagaccgagccgttcgaacctgagcctgtcgaacccgagcccgtcggatccgagccgcccgggcccgcgtcggggctgccgctcgagctgcagcagacccaggtgatcgacgacctggcctactcggtggacgcggtctccgagcttcgcgagctgatggccaccgactacccgaacgacggggactccgaccagcagagcgccgacgccgccggggaaccccggcgccggcgccgtccgatgctgatggccgggcggtcggtggcggccctggccgctgtgctcgccctggcgacgaccggcggggcgtggcagtggagcgcgtcgaaaaacgcccggctcaacacgatcaacgcgctcgaccgcaattccagcgacatccgggacccgggcggacagtacggcgacgaagactttttgatcgtcggcctggactcgcgcgccggcgacaacgccaacatgggtgccggcagcaccgacgacgccgacggcgcccgctcggacaccgtgatgctggtcaacatcccggccaaccgcaaacgcgtggtggcggtgtcgttcccccgcgacctggcgatcaccccgatgcagtgcgaggcgtgggaccccagcaccggcaagtacgggcccatctatgacccgaagaccaagagctggggcccgaagatggtctacaccgagaccaaattgaactcggcgttcgcgttcggcggccccaagtgtctggtgaaggaaatccagaagctctccggcctgagcatcaaccacttcatcgccgtcgacttcgccgggttcgcgaagatggtcgacgccctgggtggtgtcgaggtgtgctcgagcaccccgctgcacgactacgagctgggcacggtgctcgagcacggcggtcgccaggtcctcgacggcgacacggccctgaactacgtgcgggcccgccaggtcaccaccgaggtcaacggcgactacggccgcatcaaacgccagcagttgttcctgtcctcgctgctgcggtcgctcatctccgcggacaccctgctcgacctcaacaagctcaacaacgtcgtcaacctcgtgatcaacgacaccgtcgtcgacaacgtgaagtccaaggacctcgtccagctcggccagtcgttgcagggcatggcggccggccacgtcaccttcgtgacggtgccgaccggcgtcaccgaccaaaacggcgacgagccgccccggatgtcggacatgcgcgcgctgttcgacgccatcatcaacgacgacccgctgcccgaggaaaacgaccagaacgcgcagaatttgagcgcttccggttcgaccaccggcgcgccgaaggcgcccaccacccgcaagtcgcccaccccgacgccggagccgcagcgcgagcaggtcaccacgacctcgccgagcggtgtgacggtgcgggtttccaacgcgaccacgcagagcggactggcggccacggcgaccagccagctcaagcgcgacggcttcaacgtgatgacccccgatgactatccgagttcggtgaacacgacgacggtgttgttctcgccgggcaacgaggaggcggcggcgacggtggcgtcctcgttcgccaacgcgaaggtgcagcgggtgtccggctacggacaggtcgtgcaggtggtgctgggccccgatttcaagtcggtcaccgctccctcacccagcggctcgacgatgagcctgcagatcgaacggggctcgagcaacgcgccggccaagctgcccgaggacctgacggtcaccaacgcggccgacaccacctgcgag

SEQ ID NO: 25946 - DNA, 774 bp, Mycobacterium avium
gtggccaaacggttggacctcaagggtgtcaacatctactacgggtcgtttcacgccgtcgcggaggtgacgctgtcggtgcttccgcgcagcgtcacggcgttcatcggcccgtcgggttgcggcaagacgacggtgttgcgcaccctcaaccggatgcacgaggtggtgcccggcgggcgggtcgagggaagcgtgctgctcgacgacgaagacatctacggccccggtgtcgaccctgtcggggtgcgccgggccatcggcatggtgttccagcggccgaacccgttccccgccatgtcaattcgcgacaacgtggtcgcgggcctgaagctgcaaggggtccgcaatcgcaaggtgctcgacgagacggccgagtactcgctgcgcggcgccaacctgtgggacgaggtcaaggaccggctggacaggcccggcggcggactctcgggcgggcagcagcagcggttgtgcatcgcgcgggccatcgcggtgcaaccggatgtgctgctgatggacgagccgtgctcggcgctggacccgatttcgacgatggccatcgaagagctgatcagcgagctgaagcaggactacaccatcgtcatcgtcacccacaacatgcagcaggccgcccgggtcagcgactacaccgcgtttttcaacctggaagccgtcggaaagccgggacgactgatcgaggtcgacgacaccgagaagatcttctccaaccccagccagaaggcgacggaggactacatctcgggccgcttcggt

SEQ ID NO: 25947 - DNA, 3669 bp, Mycobacterium avium
atggaattcatcatgaccgcaccgggggctgctcgcccagaaaccccgatcgcggggctcgttgaattggcgctcaccgcgccgaccttccagcagttgatcgacaccgcggccgcatcgccggccgacctgagcctggtgggtccagccagcgcgcgactgttcgtcgccagtgcgctggcgcggttgggccctttgctggtagtcaccgcgaccgggcgcgaagccgacgacctgaccgctgaactgcgcggcgtcgtcggcgatgccgtggccgtcttcccgtcctgggagacgctgccgcacgagcggctctcgccgggcgtcgacaccgtcggcgcccggttgacggtgctgcggcggctggcccaccccgacgacgcgaggctggggccgcccctgcaggtggtggtgaccgcggtccgctcgctgctgcagccgatgaccccgcagctgggtctggtggagccggtgacgctgagcgtgggccaggagatcgaattcgagcacgtgatcgcgcggctggtcgagctggcctacagcagggtcgacatggtgggccggcgcggcgaattcgccgtgcgcggcggcattctcgacgtcttcccgccgaccgccgagcacccggtgcgggtcgagttctggggcgacgaggtcagcgagatgcggatgttctcggtcgccgaccagcgttccatccccgagatcgcggtcgacaccgtgatcgcggtgccctgccgcgagctgctgctcaccgaggacgtgcgggcccgcgccgcggagctggccgcccagcacccggcgagcgagccggccatcaccggcagcgtcagcgacatgctggccaagatcgccgacggcatcgcggtcgacggcatggaggcgctgctgccggtgctgcggcccggcaagcaggtgctgctcaccgatcagctggccgagcgcaccccggtgctgctgtgcgacccggagaagatccgcacccgggccgccgacctgatcaagaccggccgcgagttcctggaggcctcctggtcggtcgcggcgctggggatcttggagaatcaagcgccgatcgacgtcgagcaactgggcggatcgggcttcgccgagctggacgaggtgcgggcggcggcggtccggggcgggcacccgtggtggacgctgagccagctgtccgacgagtcggcggtggagctggacgtgcgggcggcgccgtcggcgcgcggccatcaacacgacatcgacggcatcttcgcgatgctgcgcgcccacgtcagcaccggcggccacgccgccgtcgtcgcgcccggcaccgggaccgcacaccgggtggtggaacggctggccgaatgcgacaccccggccgccatgctggaatccggcgcggcgccccgggccggcgtcgtcggggtgctcaagggaccgctgcacgacggcatcgtcatccccggcgcgaacctggtggtgatcaccgagacggatctgaccggcagccgggtcgccgccgtggagggcaagcggctggcagccaagcggcgcaacaccgtcgacccgctggcgctgacggccggtgacctggtggtgcacgaccagcacggcatcggccggttcgtggagatgaccgagcgcacggtcggcggggcgcggcgcgagtacctggtgctggagtacgcgtcgtccaagaggggcggcggatccgacaagctgtatgtcccgatggattcgctggaccagctgtcgcggtatgtcggcgggcaggcgccggcgctgtccaaactcggcggcagcgactgggccaacaccaagaccaaggcgcgccgcgcggtgcgcgagatcgccggcgagctggtctcgctgtacgccaagcggcaggccagccccgggcacgcgttctccccggacaccccgtggcaggccgagatggaggacgccttcggctacaccgagaccgtcgaccagctgaccgcgatcaccgaggtcaaatcggacatggaaaaaccgatcccgatggaccgggtgatctgcggcgacgtcggctacggcaagaccgagatcgcggtgcgggcggcgttcaaggcggtgcaggacggcaagcaggtcgccgtgctggtgcccaccacgctgctggccgaccagcatctgcagaccttcaccgaccggatggccggcttcccggtgaccgtgaagggcctgtcccggttcaccgacgcggccgaatcccgcgcggtgatcgaggggctggccgacggctcggtcgacatcgtgatcggcacgcaccggctgctgcagaccggggtgcgctggaaggacctcggcctggtggtggtcgacgaggagcagcgattcggcgtcgaacacaaggagcacatcaagagcctgcgcacccacgtcgacgtgctgaccatgagcgccacgcccattcccaggacgctggagatgagcctggccggcatccgcgagatgtcgacgatcctgaccccgccggaggagcgctacccggtgctgacctacgtcggcccgcacgacgacaagcaggtggcggcggcgttgcggcgcgagctgctgcgcgacgggcaggccttctacgtgcacaaccgggtcagctcgatcgaccgggcggcggcccgggtgcgcgagctggtgcccgaggcgcgggtggtggtggcgcacgggcagatgcccgaggagcggctggaacgcaccgtgcaggggttctggaaccgcgagtacgacatcctggtgtgcaccacgatcgtggagaccgggctggacatctccaacgccaacacgctgatcgtcgagcgcgccgacacgttcgggctctcgcagctgcaccagctgcgcggccgggtggggcgcagccgcgaacggggttacgcctacttcctgtatccgccgcatgccccgctgaccgagacggcgtatgaccggctggccaccatcgcccagaacaacgagctcggcgcgggcatggcggtcgcgctgaaggacctggagatccgtggcgcgggcaacgtgctgggggtggagcagtccgggcacgtcgccggcgtcggcttcgacttgtatgtgcggctggtgggcgaggccgtcgaggcgtaccgggccgcggcggacggccagaccgtcaccaccgccgaggagcccaaggacgtgcggatcgacctgccggtggacgcgcacctgccgccggactacatcgccagcgatcggctgcggttggaggcgtatcggcggctggccgccgcgggctcggacgacgagatcgacgcggtggtcgaggaactcgtcgaccgctacggggcgctgcccgaaccggccctgcggctggtggcggtcgcccggctgcggctgctgtgccgcgccgccggcatcaccgaggtgtcggcgccgtcggcggccaccgtccggctctcgccgatcacgctgcccgattcggcccaggtgcggctgaagcggatgtatccggccgccagctaccgggccaccacgtcgaccgtgcaggttcccatcccgcgcgccggcggggtgggcgcgccgcggctgcgtgacgtcgagttggtgcagatggtggccaacctggtgacggcgctgcagggtaaaccgcagacggatgtcggcaccggcgcgccggtggcggcgatggccagtgaggaggggcgcggg

SEQ ID NO: 25948 - DNA, 1002 bp, Mycobacterium avium
gtgattgtgatcttgtgcgacccgcgccggccgtcgctggtgccggtcgaggccgtcgagcatctcaccggcgaggtgcagtacaccgaggagatgccgatcgcggtgccctggtcgctgccggcggcgcgcccggtgcactccggcgaccccgatgacccggcgccggtgctgctgtcgtcggaccgcgaccaccccgccgtcaccgcccggctggccgccggggcgcggctgatctcggcgccggacgccccgcgcggcgaacggctggtcgacgcggtggcgatgatggacaagctgcgcaccgccggaccgtgggaaagtgagcaaacccacgagtcgctgcgccggtttctgctggaggagacctacgagttgctggacgcggtggccggcggcaacgccgaggcgttgcgtgacgagctcggtgacgtgctgctgcaggtcctcttccacgcccgcatcgccgaggacgccccgcagtcggccttcaccatcgacgacgtcgccgccgcgctgatccgcaaactgggcaaccgggtgccgggagtgcttgccgggcaaaccatttcgctcgaagagcagctggcgcagtgggaagagcgcaaggcggccgagaagccgcggaaatcggtgatggacgacgtgcacaccgggcaaccggcgctggcgctggcgcagaaggtgatcgggcgggccgagaaggccggtctgcccgccgacctgatcccgccgcaggtcacctcgatcgcaatatcggccgacgtggacgctgaaagtgctttgcgcacagcggttttggatttcgtggcaaccgtccgcggtgtcgagcgctcgatcgcggcggcgcgccgcggcaccagtgtccccgacgagttcgacatcgccccgctcggtgagatctccgagcaggagtggcggcagcactggccggcgggcgacaccgatcccgagccggcccccgccgagcagctcaccgacgacgccggcggcgacgagaac

SEQ ID NO: 25949 - DNA, 1287 bp, Mycobacterium avium
gtgccgattatcgagcaggtcggggcccgcgagatcctcgactcccgcggtaacccgacagtcgaggtcgagatcgccctgaccgacggaacgttcgcccgcgcggcggtgccgtccggggcgtcgaccggtgagcacgaggctgtcgaactgcgcgacggcggggagcggtacggcggcaagggcgtgcagaaggcggtgcaggccgtgctggacgagatcggcccggcggtgatcgggctgaacgccgacgaccagcgcctggtggaccaggcgctcgtcgacctggacggcaccccggacaagtcgaggctgggcggcaacgcgatcctgggcgtgtcgctggccgtggccaaggcggccgccgattccgcggagttgccgctgttccgctacctgggcgggcccaacgcgcacatcctgccggtgccgatgatgaacatcctcaacggcggtgcgcacgccgacaccgccgtcgacatccaggagttcatggtcgccccgatcggcgcgccgagtttcgccgaggcattgcgctggggtgcggaggtgtatcactcgctgaagtcggtgctgaagaaggagggcctgagcaccggcctgggcgacgagggcggcttcgcccccgacgtggcgggcaccaccgcggcgctggacctgatcggccgggccatcgaatcggccggcttcaaactcggcaccgacgtggcgctggccctcgacgcggcggccaccgagttctacagcgacggcaccggctacaagttcgagggcagcacccgcaccgccgagcagatggccgagttctacgccgggctgctcggcgcgtatccgttggtgtccatcgaagacccgctgtccgaagatgattgggacggctgggcggcgctgaccgcgtcgatcggcgaccgggtgcagctcgtcggcgacgacgtcttcgtcacgaaccccgaacgcctggaagagggtatcgagaagggcgtcgcaaatgcgttgctggtcaaggtgaatcagatcggcacgctgaccgagacgctggacgccgtcgcgctggcccaccacagcggctaccgcacgatgatgagccaccgcagcggtgaaaccgaggacaccacgatcgccgacctggcggtggccgtcggcagcgggcagatcaagaccggagcgccggcccgcagcgagcgggtggccaagtacaaccagctgctgcggatcgaggaggcgctcggcgacgccgcgcgttacgccggcgacctggccttcccgcggttcgcgttggagaccaga

SEQ ID NO: 25950 - DNA, 852 bp, Mycobacterium avium
gtgcgcgtgagctccaaccgacgagaacgacaagccccgcccgccccggagccgctggcgcccctgatcgacgcccacacccacctcgacgcctgcgccgccggaccggagacgggagccgccgacgtgcgggccatcgtggaccgcgcggcggcggtgggggtgcaggcggtggtcaccgtcgccgacgacctggactcggcgcgctgggtcacccgcgcggcggagtgggatccgcgggtgtacgcggccacggcgctgcatcccacccgcgccgacgcgctggacgacgcggcgcgcgccgagatcgagcggctggtggcccacccccgggtggtggcggtcggggagaccggcatggacctgtactggccggggcggctggacggctgcgccgagccggccgtgcagcgcgaggccttcgcctggcatatcgatctggccaaacggtgcgggaaaccgctgatgatccacaaccgggaggccgacgccgaggtgctcgacgtgctggccgccgagggtgccccggacgtggtgatcttccactgcttctcgtcggatgcggccatggcccgccgctgcgtggacgccggttggctgctgagcctgtccggcaccgtgagcttccgcaacgcccgcgccctgcgcgaagccgtgccgttgataccgcccgggcagctgctggtggaaacggatgcgccgtttttgaccccgcacccgcaccgggggacggccaatgagccctactgccttccttatactgttcgggcgatcgccgaactggtggatcgccgccccgaagagctggccgcggtgacgacggacaatgctcgacgggtgtacggactggcc

SEQ ID NO: 25951 - DNA, 831 bp, Mycobacterium avium
gtgcacgacgccaacacggtgcgccgggtggtgtcgacgtccggggtgagtcgctccgaccacgtcctggaggtcggtcccgggcttggctcgctcacgctggcgttgctggaccgcggcgcccacgtcaccgccgtggagatcgatccggtgctggccgagcggttgccgcacaccgtcgccgaacactcgcacagcgaaatccagcgcctgaccgtgctcaaccgcgacgtgctgacgctgcgccgcgacgagctggccgagccgccgaccgcggtggtggccaatctgccctacaacgtcgcggtcccggccctgctgcacctgctcgccgaattcccgtccatccggacggtgaccgtcatggtgcaggccgaggtggccgaacggctggccgccgagccgggcggcaaggagtacggcgtgcccagcgtcaaggtccgcttcttcggccgggtccgccggtgcggcatggtgtcgccgacggtgttctggccgattccccgggtgtattcggggctggtgcgcatcgaccgctatccgacctcgccgtggcccaccgacccggccttccgccggcaggtgttccagttggtggacatcgccttcggccagcggcgcaagacctgccgcaacgccttcgtcgactgggccggctcgggcaacgagtcggcggatcggctgctggccgccagcatcgacccggcgcgccgcggcgagacgctgtccatcgacgacttcgtccggctgctgcagcggtccgccgatcggggcgggagcgaccgcgagggaaccagcccgccgaccgccggacagggcgccccggcctgc

SEQ ID NO: 25952 - DNA, 657 bp, Mycobacterium avium
atggccaagcaagcactcaaccaactgacggccgcggtgcgaaccgagaccggcaagggcgcgtcccggcgggcccgccgcgccggcaagatccccgccgtcctctacggccacggcaccgatccccagcacctggagctccccggccacgacttcgcggccgtgctgcggcacgccggcaccaacgcggtgctcaccctcgacatcgacggcaaggaacagctggcgctgaccaaggcgctcgacatccacccgatccgccgcaccattcagcacgccgacctgctggtggtgcgccgcggcgagaaggtggtcgtggaggtcaccgtcgtcatcgagggcgacgccgcgcccggctcgctggtcacccaggaggccagcaccatcgagatcgaggccgaggccctctcgattcccgagcagttcaccgtgtcggtcgaagacgccgaacccggcacccagttcaccgccgggcagatcgccctgcccaagggcgtcaacctgatctccgacccggagttgctggtggtcaacgtggtcaacgccccgacggccgaggaactcgccgaggagggcgctggcgaggtcaccgaggagcccgcggcggccgaggcggaagaggccggcgaagaagaggccgccgaagccgagtccgag

SEQ ID NO: 25953 - DNA, 1851 bp, Mycobacterium avium
gtgccacgcagcctggacctggtggtcacctccgtcgccaccgcgctgatggaggccacggcgtccacggcacgctcggtcagcgaaacggtgctcgcgcagctcgtcgagcagttcgatgtggacgccagcttcctgcaccaccacgacgccgcgggcccggtgccggtggccgagtggccgcggcgaaccgatgccgcgggcccgatggccgcgctgcgatccgaggacgtcgaatcggtactggcccaatgcgagcggcagcgccggccggtggtcagcagcccggaccaggccgacggttggctgcgccgctggctgcagcgcgacaaggcagccggcgcgccctcggtggccgccgcaccgctggtgtccggcgacgccaccaccggtgtgctcggcttcgtcaagttcggcgcccgcaggtggaagccggaggagatcaacaccctcgaggcggtcgccgcgctgttcgcgcagctgcaggcccgcatcgccgccgaggaacggcttcgctacctcgccgagcacgacgacctgaccggtgtgtacaaccggcgggcactggtcgcgcatctgaccgaacggctggcggccggaaaccccgggccggtggcggtgttctatctcgacctggaccggctgaagccgatcaacgactacctcggccacaccgcgggagactggttcatccgggtgttcgcgcagcgcatcgaggaatgcgcgggcgagcagagcatgatcgcccggctgggcggcgacgagttcgtggtcatcccgcaccagccgatggcgtccgaggccgccgaggcgttcgcccgccggctgtcgacgctgctgtgcgaccggctgaccatcggtgggcacgtgatcagccggaccgtcagcatcgggctggcggtgggcacacccggggcggacaactgcaccgacctgctgcggcgggccgacgaggcggtgctgaccgccaagcgcgccggcggcaaccagaccgcggtgtccaccgatgacatgtcgctgaagcgggccttccgcaacgacatcgagctgcacttgcagggcgacatcgaaagcgagggcctgctgctgcactacctgcccgaggtcgacctgtggaccggcgccgtcgtgggggccgaggcgctggtgcgctggcggcacccgatctgggggctgctgctgccggactcgttcatcggggtcgccgaatcgaccaacctgggcgccgagctgggcgggtgggtgatgcgcagcgcctgcgccgatttcagccggtggcgggccaacggcgtgggccacggcgcgatgttgcgcatcaacgtctcgcccatccagctgatcagccggggcttcgtggaaaccgtcgccgacacgatcggcgagttcggcatcgacgcgggctcggtgtgcctggagatcaccgagcgcgcggtggtgcacgacaccgagaccacccgaaagacgttgtcggagctcaaggaagtcggtgtgcagatcgccatcgacgacttcggcaccggctacgccgtgctgtcccacctgaagtcgcttcccgtcgacatgctcaagatcgacgccgggttcgtccgggaggtgggcaccgacgccggggacctggcgatcgtgcgggccatcatcgggctggccgaggcgttcggcctggaagtggtcgccgagggcgtcgaaacaccggctgccgcattgactttgatgcagcacggctgtcaccgggcgcagggttttctgctgtcgcgcccgatccccggcgaggcgatggaagcgctgctgtccgcgcgctggatgccgatgccgtttctcgccgaccgcgaggcgtcgtcgatgggctcgatc

SEQ ID NO: 25954 - DNA, 1536 bp, Mycobacterium avium
atgagttatatcgactgcttttcgcgagtcgtcgctcggcgccgcatgcgggctcttccgctgagtaacgccaccctgcccctgcattcgcaacgaatcgacgtgccgacctatgacaggtcggcactgcaacgtggtgtggtgcacatcggagcgggcaattttcaccgtgcccaccaagccgtctacttcgatgaccttgcctgctcgggcatttccgatcagtggggtgtcagcgcgatcagccttcgctcgcacgacgtgaaggatctgctgtccgcccaggacggtctctacaccgttgtgcagcgcggccacgatcaccaaaccgcgcgcgtcgtcggctcgatcggctctgtccactacgcaccgaatgacggcgcagcggtccgcgcggcgctgaccgatccgcgcacccgcatcgtcagcctgaccatcacccccaacgggtacttcctggatccggtcacccgcgagttcgacgccgaccaccccgatgtgcgcgccgaccttgtcgcgtcgggctgctacggcacggcgtggggatacctgaccgaggcgctcgagcagcgtcgccgcgcgggcatcgcgccgttcacggtgctgtgctgcgacaacattcccgacaacacccaggcggcgcgcaccgccctggtgtcgttcgccgcgctgaagaacccggggctggcccgctggatcgaccggcatgtcgcgttcccgtcgaccatggtcgaccgcatcacgccgcagacgtcggactcggagcgcgaattcgtcgagcgcaccttcggtgtcgccgacaactggccggtgctcaccgaaccgcacagtcagtggatcatcgaggacagcttcagcgacggccgcccgccgctggacgaggtcggcgtccagttcgtgacggatgtcagcgaccacaagctgatcaagacccggctgctcaacggaacccatatcgcgctggcctgtctggccacgctggccggctaccggcgcaccgacgaagcgatgaaggatccgatcatcttcgactacgtcgagcggctcatgcgcgacgaggtgcagccgctactgcccccggtgcccgggatgaacacgcccgactaccgcgacacgttgctcacccggctgggcaatccccgcatgagcgaccagttgtcccggttggcgcggcggggatcgacgaagatcgcctcgttcctgctgccgtcgctgcacgaggcgatcgcgcaggaccgaccgcacacgctactgatgttggcgctggccggctgggcgcgctacctgcgcggctacgacctcaacggtcgcaagatccgcatcgacgacccggaggcggacctgctgaccaagctggcgaacatggccggcaacaaccccgatccgttgctacggcacgagatcctggccgatctccggttggtgcccggattctccgagcgcctcggcgagatggtcgccagcatcgacgagcacggcgtgattgccacgctgcgccaatcgttgcaggacgattcccgggagttggtggcgcga

SEQ ID NO: 25955 - DNA, 1410 bp, Mycobacterium avium
atggaggctgacgggataaacctgaacaacgcgacgctgcccacgctgcccatcgaggcgcccaactacgaccgcggcagcgtgaccgtcggcatcgcgcacatcggtgccggacatttccaccgcgcgcatcaggccatgtacatcgaccggttgctgcaggccggcctggcccgggagtggggcatctgcggggtgggcgtgatgcccgccgactggacgatgcgcgacgtgctcaacgaccaggacgggctctacacgctgatcctggagaagccggacggcagccgcgacgcccacgtgatcggctcgatcatcgactaccgctacgcgcccgacgatcccgagtcggcgctggaagtccttgcggcgccgaccacccggatcatctcgctgaccatcaccgagggcggctaccgcgacccggaggggccggcgttcgcgttcatcgtcgaggccctggaccggcgccggcgccgcgggatcgccgcaccgaccatcgcgtcgtgcgacaacatcgagaacaacggcgagatcgcgcggcgcgccgtgctggcgaacgcggaggcccgcagccccgaactcgccgagtgggtcgacgaacacgtgtgcttcccgagttcgatggtcgaccggatcacgccgtccaccaccttgcagatggccgccgaggtgcggcgggacttcggcgtcaacgaccgctggccggtggtggccgagccgttcaccgcctgggtgctcgaagacaagttcgccgacggcaggccgccgctggagcgggccggcgtgctgctggtcgacgacgtcgcgccctacgagctgatgaagctgcggatgctcaacgcgggccatcagtgcctggcctacttcgcgcatctgtgcgggttcgagttcgtccacgaagccgcgcgcgacccgttgttcgccgaatacctgtgggcctatttcgaatccgaggccatcccgacgctgccgccggtgcccgggatcgacctgtacgactacggtcaccggctgatcgagcggttcaccaacccgggcgtgcgcgacaccatcgcgcggctgtgcgccttctcctcggatcgcatcccgaaatggctgctgccggtgatcaacgacaacctggccaacgacggctcggtgcggatcgcggccgcggccgtggccagctgggcccgctacgccgagggcaccgacgagtggggtaagccgttcgaggtggtggaccagctggcggactcgctgatcccgatcgcccgctcgcagtacgagaatcccacggcgttcatcgagatcgcgggggtgttcggggacctggcgcaccagccccggtttgtgcaggcctacagctgggccctggaatcgttgcaccgcaagggagctcgcgcgacgctcgaagagttggtgcga

SEQ ID NO: 25956 - DNA, 1224 bp, Mycobacterium avium
ttggcgcagcgcacccagggctcgctcaagggcaactggtacctgctcgggcccgcgttcgtcgccgccatcgcctacgtcgacccgggaaatgtcgcggccaacgtcagcgccggctcgcaatacggctacctgctgctgtgggtgatcgtggccgccaacgtcctggccggcctggtgcagtacctgtcggccaagctcgggctggtgaccgggcgctccctgcccgcaaccatcggcaagcgaatgagccgtccggcacggctggtctattgggttcaggccgagctggtggccatcgccaccgacgcggccgaggtggtcggcggggccatcgccttgcacatcctgttcgggttgccgctgctggccggtgggctgatcaccggcgtggtggcgctgctgctgttgggcatccaggaccggcgcggccagatcctcttcgaacgggtcatcaccggcctgctgctggtcatcgcgatcgggttcgcggccagtttcttcgtcaagaccgcgcccccggaggcggtgctgtccgggctgctcccgaggttccgcggcaccgagagcgtgctgctggccgccgccatcctgggcgccaccgtcatgccgcatgcggtgtacatgcattcggggctggtcctggaccggcacgggcaccccgacgaggggccacaccgccgcctgctgctgcgcgtcacccgctgggacgtggtactggcgatggcggtggccggcaccgtgaacgccgcgatgctgctgatcgccgccaccaacctgcagcaccgcgacgtgagcgcctcaatcgagggcgcgtacgccgcgatccacaacacgctgggcgcgaccatcgcggtgatgttcgccgtggggttgctcgcctccgggctggcgtcgtcgtcggtgggtgcctacgccggcgccatgatcatgcaggggctgctgcaccgctcgattccgatggtggtgcgccggttgatcacgctgtgccccgcgctgctgatcctggcggtcggatacgacaccacccgcgccctggtgctgtcccaggtggtgctgtcgttcgggataccgttcgcggtgctgccgttgatcaagctgaccagcgaccgcgagctgatggggtccgacgccaaccaccgcatcacgacgatccttggctggggcgtcggcatcttgattagtctgctgaacatggtgctcatctggctgacggtgaccggc

SEQ ID NO: 25957 - DNA, 678 bp, Mycobacterium avium
gcggcccgcggccggctgctgatctcggcgatggccgcgggcgccgccgcggccgccgcccacaccgccaccagccacgccgacaccccgaagaccgacgcggtgctgaccgccaacgcgtcctcgctcaccggcggggcgggcggaagcaacaccgtccgcggcccccaggtgatcgcggcggagccggcggccaccgacgccctgcacaaccaggagctggccaagggcgtcgccttcgccaacgaccgcgcgcagcgcgaggcacgcctgcagcaaccgctctacgtgatgccgaccaagggcatcttcacctccaacttcggctaccgctggggggtgctgcacgccggcatcgacctggccaactcgatcggcaccccgatctacgcggtgtccgacggcgtcgtcatcgaggccgggccggcgggcgggtacgggatgctggtcaagctgcggcacgccgacggcaccgtcacgctctacggccacatcaacaccgcgctggtcagcgtcggcgagcgggtgatggccggcgaccagatcgccaccatgggcaaccggggcaactccaccggcccgcacctgcacttcgaggtgctgcagggcggcaccgagcgcatcgacccggtgccgtggctggctaagcgtggccttatggtcggcaactacgctggt

SEQ ID NO: 25958 - DNA, 1662 bp, Mycobacterium avium
atgacatccgtgcacaccctgcccgacatcaccgccaccccggcgtgggacgccctgcgcaaacatcacgaccgcatcggcgacacccaccttcgccagttcttcgaggaagatcccgaccgtggccgcgagctgacagtgaccgtcggtgacctctacatcgactacagcaagcaccgcgtcacccgagaaaccttgcggctcttggtcgatctggcccgcacggccaaactcgaagagcgccgcgaccagatgttcgccggggtgcacatcaacacctcggaggatcgcgcggtgctgcacaccgcgctgcgactgccccgggacgcggaactgatcgtggacggccgcaacgtcgtcgcggacgtgcacgaggtgctcgacgccatgggcgagttcaccgaccggttgcgcagcggtgaatggaccggagcgaccggcaagcggatcagcaccgtcgtcaacatcggcatcggcggatccgacctcggcccggtcatggtgtaccaggcgttgcgccactacgccgacgcgggaatctcggcgcgcttcgtgtccaacgtcgacccggccgacctgatcgccaccctggccgacttggaccccgccacaacacttttcatcgtcgcgtccaagacgttctcgacgctggaaaccctcaccaacgccacggccgcccgccgctggatcaccgacgccctcggcgacgccgccgtggcgcaccatttcgtcgccgtctccaccaacaaacgcctggtcgacgacttcggcatcaacaccgacaacatgttcgggttctgggactgggtgggcggccgttactcggtggactcggcgatcggcctttcggtgatggccgtcatcggccgggaggccttcgcggatttcctgtccgggttccatatcgtcgaccggcatttccagaccgcgccgctggaatccaatgcccctgtgctgcttgggcttatcggcttgtggtactccaacttcatgggcgcgcagtcgcgtgcggtgctgccgtattccaacgacctggcccggttcgcggcctatctgcagcagctgacgatggaatccaacggcaagtccacccgcgcggacggcagcccggtcaccaccgacaccggcgaaatcttctggggcgaaccgggaaccaacggtcagcacgccttctatcagttgctgcaccagggcacccggttggtgccggccgacttcatcggtttcagtcaaccgatcgacgacctgcccaccgccgaaggcagcggcagcatgcacgacctgttgatgagcaacttcttcgcccagacccaggtgctggcgttcggcaagaccgccgaagagattgcggccgaaggcactccggccgacatcgtgccgcacaaggtgatgcccggcaaccgcccgtcgacctcgatcctggccaaccggctcacgccgtcggtgctgggccagttgatcgcgctctacgagcaccaggtcttcaccgagggcgtgatctggggcatcgactctttcgaccaatggggggtggagctgggtaagacccaggcaaaggcgctgcttccggtgatcaccgcggacaactcgccggcgccgcagtcggacagctccaccgacgccctggtgcgccgctaccgcagcgaacgcggccgcaccagc

SEQ ID NO: 25959 - DNA, 1092 bp, Mycobacterium avium
atgacgctgaccgcgctgggtctgccgaccatgccgagccgcttcgacggcccggccgccgacggcgcgcttgccgcgccggcgccgtcgagcggcccgctgcgcgacacctatgggcgcatcgccaccgatctgcggatctcgctgaccgatcgctgcaacctgcggtgcagttactgcatgcccgccgagggcctcgactggctgcccggcgaacagctgctgacctccgacgagctgaccaggctgatgcgcatcgcggtcacccggttgggggtcaccagcgtgcggttcaccggcggcgagccgctgttggcccgccatctcgaagaggtggtggccgcggcggccgcactgcggccccgcccggagatctcgctgaccaccaatggcgtgggactggcacgccgggccgccgtgctggcccgcgccggactggaccgcgtcaacatctcgctggacagcgtggaccgggaacattttgcggccatcacccgccgcgaccggctcgccgacgtgctggccggcttggccgccgccaaagaagcgggtctgacgccggtgaaggtgaacgcggtgctcgaccccggcaccggacgcgaggacgtcgtgcagttgctgcggtactgcctcgaatacggctaccagctgcgcgtcatcgaacagatgccgctggacgcggggcaccaatggcggcgggacgccgcgctgagtgccgacgcggtgctggcggtgctgcgcaagcattttcggctgcgtcccgaccccgcaccgcgcggatcggctccggcccagctgtggctggtcgacaccggcccgggaacgcccggcgggaaattcggtgtcatcgcgtcggtctcgcacgcgttctgctcgacctgcgaccgcacccggttgacggccgacgggcagatccgcagctgcctgttctcgacgcgggagacggacctgcgcgggctgctgcgcggcggcgcagccgacgacgccgtcgaggcggcgtggcgcgccgcgatgtgggccaagcccgccggtcacggcatcaacgacccgaacttcatccagcccgaccgcccgatgagcgcgatcggtggc

SEQ ID NO: 25960 - DNA, 1470 bp, Mycobacterium avium
gtgagtcgtatcacggctggtcaactacgcgatgcggtgctggacgaaaattccttcctccgctgggacagcgagccgctggccgtgccggtcagcgcggcctacgcgcaagagctggctgacgcccgcgccgcgacgggtctcgacgagtcggtgctgaccggcgagggccgcatcttcggtcgccgggtcgcggtggtggtgtgcgagttcggctttctcggcggctcgatcggggtggccgcggccgaacggatcaccgccgcggtgcagcgggcgacggccgaggggctgccgctgctggcctcgccgagctcgggcggcacccggatgcaggagggcacggtcgcgttcctgcagatggtgaagatcgcggcggccgtccgcctgcacaagcaggcgcacctgccctacctggtttatctgcgcaatccgaccaccggcggggtgttcgcgtcgtggggttcgctgggtcatgtcacggtcgccgagccgggcgcgctgatcggcttcctgggcccgcgggtctaccagcagctctacggcgagccgttccccgagggcgtccagaccgcggagaacctgcagcggcacggggtgatcgacggcgtcgtcccgctcgacgagctgcgccgcacgctggaccgcgcgatgaccgtcatcgccgacgcccccgagccgctggccgcgccgccgccgcccgagccgatacccgacgtcgcggcgtgggactcggtggtcgcctcgcgacgtccggaccgcccgggtgtgcggctgttgctgcggcacggcgccaccgaccccgtgctgttgtcggggaccggccagggcgaggcggcgaccacactgttggcgctggcccggtttgccggccagcccgtggtggtgctcggccagcagcgcctgaccggcgggttggtgggccccgcgtcgctgcgcgaggcccgccgcggcatggccctggccgcggaactgcggctgccgctggtgctggtgatcgacaccgcggggccggcgttgtcggccgaggctgaacagggcgggctggccggccagatcgcccagtgtctggccgagctggtcaccctggacaccccgacggtgtcggtgctgctggggcagggcagcggcgggccggcgctggcgatggtgcccgccgaccgggtgctggccgcgctgcacggctggctggccccgctgccgccggagggcgccagcgcgatcgtcttccgcgacaccgaccacgccgcggaactggctgcggcacaaggcatccggtcgcgcgatctgctggcgtcgggcatcgtcgacgtgatcgtgcccgagcatcccgatgccgccgacgagccggtcgagttcgcgcgacggttggcgctcgccgtcgccgccgaggtggctgcgctgcgcgagatacccgccgacgagcggctggccgcccggttgcggcgctaccggcgcgtcggcttgccc

SEQ ID NO: 25961 - DNA, 1272 bp, Mycobacterium avium
atgacggcgacgccgcgggcctgcaaccgggaccgggtcgcgctgcaggccgtgcacttcttcatggccgacatggaggccggcatgggcccgttcctgggcgtgctgctgcaaagccgcggctggaccacgggcgccatcggcgcggcgatgacgctgggcgcgatcgtcggcatggtcacggtggcccccgcgggtgcactcgtcgacgccacccggcacaagcgtggctgcgtcatcgtcgtcgggctggccgccgtcgccgcctcggcggtgatcctgacctcccggcagttctggacggtcgccaccgcgcaggccgtcatgtgcatctccggggcgacgatcgcccccgcgatgatcggcatcaccctcggggtggtcggccaggccgcgttcacccggcagaacggtcgcaaccaggcctacaaccatgccggcaacatggcgggcgccgccctcggcggggtggccggctgggtgttcggctacgccggaatcttctggctcgctgcgggtttcgcggtcgcgaccatcgcggcggtgctggccatcccgggcggcgacatcgaccaccacgtcgcccgcggcgaggcgcgggccgccggcgaggccccggtcaaggcgatgcgggtgctggcgcggtcccgcccgctgctggtgctcgcggcggccatggtgctcttccacctgggcaacgcggcgatgctgccgctgtacggcctggccgtcgtcgctacccacgccaacccgttcaccaccgtggccagcaccgtcgtcgtcgcccaggccgtgatggtcccggcgtcgctgctcgccatgagaatcgcggcgacgcgcggctattggcccgcgatcctgatcgcgctgaccgcgctgccggtccgcggtgtgctcgccgccagcgtcatcaccagctggggggtgatcccggtgcaggtgctcgacggcatcggcgccggcatgctgtcggtggcggtgccgggcctggtggcccgcatcctggacggcaccggccacatcaacgtcggtcagggcgccgtcatggccgcccaggggttgggcggcgccctcagcccggtgctgggcggggccgtcgcccaacatctgggtttccgcgccgccttcttgttgctggccgggctgtcgctgggcgcgctgatcatctgggtcaccttcgccccgatgctgcgccgcgcggcccggttgcccgccgcgccatccgaccgggccggtgctcctcccacagccacggccgacaatcaggcaaaa

SEQ ID NO: 25962 - DNA, 1947 bp, Mycobacterium avium
atgacggccgcggcggcgcccgcgggcacccgcggactggcggcccggccctgcgcctgcactaccctgagcagaatgtgcggaatcgtcggctacgtcgggcagcagcccgcctgcgcggtcgtcatggccgcgctgcgccgcatggagtaccgcggttacgactcctcgggagtcgcgttggtcaacggcgacggcaccctgacggtgagccgccgcgccggccggctggccaacctcgaggaggcggtggcgcagctgccgccgtcggcgctgaccggcaccaccggcctgggccacacccggtgggccacccacggccggcccaccgaccgcaacgcgcacccgcaccgcgacgccgccggcaaaatcgccgtggtgcacaacggcatcatcgagaactacgccggcctgcgccacgagctggaggccgacggcgtggagttcgccagcgacaccgacaccgaggtcgccgtgcacctggtggcgcaggcctaccggcacggcctgacggccggcgacttcgccgcgtcggtgctcgccgtgctgcgtcgcctcgacggccacttcaccctggtgttcgccaacgccgacgaacccggcaccatcgtcgccgcccgccgctccaccccgctggtgatcggcatcggcgacggcgagatgttcgtcggctccgacgtggcggcgttcatcccgcatacccgcaacgccatcgagctcggccaggaccaggccgtggtgctcaccgcggacggctaccgcatcaccgacttcgacggcaacgacgacctggggcccggggcgtaccgcgaattccacatcgactgggatctggccgccgccgagaagggcggctacgagtacttcatgctcaaggagatcgccgagcagcccgccgcggtggccgacacgctgctcggccatttcgtcgacggccgcatcgtgctcgacgagcagcggctgtccgatcaggaactgcgcgaggtcgacaaggtgttcgtggtggcctgcggcaccgcctaccactccgggctgctggccaagtacgcgatcgagcactggacgcggctgccggtggaagtggagctggccagcgaattccgttaccgagacccggttttggaccgcagtaccctggtggtcgccatctcgcagtccggcgagaccgccgacaccctggaggcggtgcggcacgccaaggagcagaaggccaaggtgctggcgatctgcaacaccaacggcagccagatcccgcgcgaatgcgacgccgtgctctacacccgcgccggaccggagatcggcgtcgcctccacgaagacgttcctggcccagatcaccgccaactacctggtcggcctggcgctggcgcaggcccgcggcaccaaataccccgacgaggtcgagcgggaataccacgagctggaagccatgccggacctggtggcgcgggtgctggcgacgatcaaaccggtggccgcgctggcccagcggttcgcccagtcgccgaccgtgctgttcctgggccgccacgtcggctacccggtggcgctggaaggcgcgctcaaactcaaggaactggcctacatgcacgccgagggattcgccgccggcgagctcaagcacgggcccatcgcgctgatcgaggacgacctgccggtcatcgtcatcatgccgtcgcccaaagggtcggccgtgctgcacgccaagctgctgtccaacatccgcgaaatccaggcccgcggcgcgatcaccatcgtgatcgctgaggagggcgacgacacggtgcggccgtacgccgatcacctgatcgaaatcccctcggtgtcaacgcttctgcagccgctgctgtcgaccatcccgctgcaggtgttcgccgcgtcggtggcccaggcccgcggctacgacgtggacaagccgcggaacctggccaagtccgtcactgtggaa

SEQ ID NO: 25963 - DNA, 1173 bp, Mycobacterium avium
atggccgccgtggccgttacgccgatatccctgaccccgggcgtcctcgccgaggcgctggtcgacctgggcgccatcgagcacaacgtgcggctgctgtgcgagcaggcccgcggcgcgcaggtgatggccgtggtcaaggccgacggctacggccacggggccgtgcagacggcgcgtgccgcgctggccgccggggccgccgagctgggcgtggccaccgtcgacgaggcgctggcgctgcgcgccgcggggatcagcgcgccggtgctggcctggctgcatccgcccggcatcgacttccggcccgcgctgctggccggcgtgcagatcggcctgtcctcgcagcgccagctcgacgagctgctgaccgcggtgcgcgacaccggccggaccgccacggtcaccgtcaaggtcgacaccgggctgaaccgcaacggcgtgccgccggcgcagtacccgtcgatgctgaccgcgctgcgccgcgccgtcgccgagcaggccatcgtgccgcgcggcctgatgtctcacatggtgtacgccgaccaacccgccaacccggtgaatgacgttcaggcgcaacggttcaccgacatgctggcccaggcgcgcgagcagggggtgcgcttcgaggtggcccacctgtcgaattcgtcggccaccatgtcgcgtcccgacctggccttcgacatggtgcgccccggtatcgcggtgtacggcctcagccctgtccccgagctgggcgacatgggcctggtgcccgcgatgacggtgaaatgtactgtggcactggtgaagtcgatacgtgcgggggaaagcgtgtcatacggacacacctggacggcgcagcgcgacaccaacctggcgctgctgccggtgggctacgccgacggcatcttccggtcgctgggcgggcggctgcaggtgtcgatcaacggccggcggcggccgggcgtcggccggatctgcatggaccagttcgtcgtcgacctgggcccgggccgccccgacgtggccgagggcgacgaggcgatcctgttcgggccgggcagcaacggtgaacccaccgcccaggattgggccgatctgctcggcactatccactacgaagtggtgaccagcccccgcgggcggatcaccaggacctaccgcgaggcgcacaccgttgagtcc

SEQ ID NO: 25964 - DNA, 339 bp, Mycobacterium avium
atggaggagacgtctgtgacgtacacgatcgccgaaccctgtgtcgacatcaaggacaaggcctgtatcgaggagtgcccggtcgactgcatctacgagggcgcccggatgctctacatccaccccgacgaatgcgtcgactgcggggcgtgcgagcccgtctgccccgtcgaagcgatctattacgaagacgatgtgccggaccagtggagccagtacacgcagatcaacgccgacttcttcgccgagctgggttcgcccggcggggcggccaaggtcgggctgaccgagaacgacccgcaggtggtcaaggacctgccaccgcaaggcgaaggcgac

SEQ ID NO: 25965 - DNA, 519 bp, Mycobacterium avium
ttgacgcccgcgcccgccacccaagccgtccgcatagtcacgacggaatccgttgacgttcaacagcttgcggacctggccgcgcgcacgttcccgttggcgtgcccgacgtcggcggcgccggaggacatcgcggcgttcatcgacgccaacctgtcggccgagtgtttcgcccggtatctggccgacccgcaccgcgcggtcctggccgccgagctcgacggccgaatcctcggctacgccatgctcattcacgacctcgccggcgacgcggccgagctgtcgaagatctacgtcgcacccgaacagcacggcgccgggaccgcggccgcactgatgcgcctggcgctggacactgccggccgctggggcgccacccgggtgtggctgggcgtaaaccagaaaaaccaacgcgcacaacgcttttacgccaagcacggcttcacggtcagcggcaccagaacctttcagctgggcgccggccgggaggacgactacctcatgagccgtacgcttcgt

SEQ ID NO: 25966 - DNA, 549 bp, Mycobacterium avium
ttgggtgctggggtttcggtgcgtacgttgtttgaggcgcctacggttgcgcagttggcgcctcgggtgcgcggtggtggccgcacgcttgctcgggtggtggcgggtgagcggccggcggtggttccgttgtcgtttgcccagtcccggttgtggttcctcgaccaactgcacgggccgtccccggtgcacaacatggccatcgcgctgcacctgcgcggatcgttggataccgacgccatgggcgccgcgctgctcgacgtggtgggccggcacgagagcctgcgcaccgtgttcgccgtctgcgacggcacaccccaccaggtcgtgatccccgccgaacaagccgacatcggctggcgggtgattgacgccaacggatggccggcgagccggctgaacgacgccatcgacgcgatagcccgccaccgattcgacctgtgccacgaaatccctttggcggcaacggtttttcccgcctccccggaggaacgagcatgtgcttgtgggcggtggcccatcaaatcgcccgccgaacgggatggtcgc

SEQ ID NO: 25967 - DNA, 804 bp, Mycobacterium avium
atggcgccgggttctggtcctcatatcgagacgcgcaacgcgtgggtggagtttcccatcttcgacgccaagtcgcggtcgctgaagaaggccttcctgggcaaggcgggcggcacgatcgggcgtaacaactccaacgtggtggtggtggaagcgctgcgcgatatcaccatgtccctcgagcttggcgaccgcgtgggcctggtcggccacaacggggccgggaaatcgactctgctgcgcctactttcgggcatctacgaacccacccggggctgggcccaggtcaccgggcgggtggcgccgatcttcgatctgggcgtcgggatggacccggagatctccggctacgagaacatcatcatccgcggcctgttcttggggcagacccgcaaacagatgctggccaaggtcgacgagatcgccgagttcaccgagctgggcgactacctgtcgatgccgctgcgcacctactccaccggcatgcgggttcggctggcgatgggcgtggtcaccagcatcgaccccgaaatcctgctgctcgacgagggattgggcgcggtggacgccgacttcatgaagaaggcccagtcgcggctgcagggcctcgtcgagcggtccggaatcctggtgttcgccagccactccaacgaattcctggcccggctgtgcaagacggcgatgtggattgaccacggcgagatccgcatgtccggcggcatcgaggacgtggtgcgcgcgtacgagggcgaggacgccgcccggcacgtgcgcgaggtgctggccgagaccgccgaacagcca

SEQ ID NO: 25968 - DNA, 1488 bp, Mycobacterium avium
atggccgacaccatcgtcggagtgctcgacgaggccgcggcgagccgaccggctcggccgctgttgcgcgattgcgacggagcgacactgaccgtcgccgagacggccgcgctgtcggctgcgggcacacggtggttgtgggatgccggaatccggccgggtatgaccatcgcgtggcaactgccctcgcatgtctcggcggcactgctgatgctggcactggcacgctgctcagtcacacaggcgccggtgttgcacctctaccggcagcgggaggcctgcgcggcgctcgccgtcgccggggttgacaccctgatcgtcgacgagtcgacgaccgccaacgtgccgcccggggcccgggtggtcaagctgccagacggtttcgtcgaactcctgcgcgcgctgcctaccgatccgcagcccgagctcgcgcaaagccaccgcgccgacgacgcccggtggatctacttcacgtcgggcaccaccggacgtccgaagggcgtgcgtcacaccgatgccacattgctggccgccgctcgcggatacgcccagtatctgggtctgggtgagcatcccaatgaagtcggcacgatcgcctttcccatcgcgcatatcggcggcatggtctatctggccagcgcgctgatcgcggacttccccgttttgatggtgcccaaggtcgacgtcgaaaccctgccgcgactgctggcccagcacgacgtcaccgtgaccggggcgagcaccgcgtattaccagatgctgctctcggcacaggttgccagcggaagcggcgagcccgtcgttccctcactccgcatgctgatcggtggtggcgccgcctgcccgcccgagctccacaaacaggtacgcgagcagatgggcgtgccgatcgtgcacgcctacggcatgacggaagcggcgatggtgtgtgtcagcccggccaccgacaccgaagagcaacagagcaactcgtcgggccgcccgattccgggctcagacgtccggatcagcgaaaccggggaagtcgagttgcgtggcgccaacctgacgccgggctacgtggatgccgagcaatggaagtcggtgttgacgtcagacggctggttccgtaccggtgacaggggttatctccggcccgacggccggatcgtgatcaccggtcgcaccaaggatttgatcatccgcaagggcgagaacatcgcaccggacgagatcgagaacgagctactcgcgcacccactggttgacgaagtcgccgtggtgggacaacccgatgacctacgcggcgagatggtgtgcgctgttgtgcgccgctcacctcgtcaccgcgacgtcactctcgacgagctgtgtgcctttctggaccaacgcgggatgatgaagcagaagtggccagagcgcttgttcttcgtcgacgagtttcccctgacgggcctcggcaaggtcgcgaaagcggaactggtgcaacaaatctcaggagggcgtcga

SEQ ID NO: 25969 - DNA, 1188 bp, Mycobacterium avium
gtgacaacggctttcaccgactcggggttagccactgccctacgtgcccgaatcagccccggtagcaccatcgcgatcggcgacggcgtaggcggactgcgctacctggacgacgggacatcggtgggtgcggtcgtctcggcggtcgcccgcgatgtcggctcggtacggctgattctgggctgggtaccggcaccgctcgacgaccttgaagcggacgcattcgcagagattgtcgcgttgatgccaggttggggactacgcgacgtattggccgggccgacagcgcgtttcgtgccgacccgactaagcggaatacaagcgctactgaccggggtgctgcggcccgacgtgctcgtcacacgggtcgtcgaccggagcggcgggttgcgattcagcactgaggtgtcctggcaacgagaagtcgtggacgccggtgtgccggtgctcgcgatcctcgacggaaccgcaccctgcgccgacgcgggcccacctctggcccccgggatggtgcacgtgtctggctgtagcagcgaaggtccggcacgcatgccgcgaaaggaccccgaaccggtccacgacgccctcgccgatgcggcgctgcggttcgtccccgagggtgcgcgactgcagtacggcccgggtcaactcgggaccgccttgttacgacgcacagccatgccgctgcgggtcgacaccgggttgctcaccgacgctgtggttgacttggacaaacgcggacttctcatcgacataccctcggccacttacctcttcggtagcgaagagctgtacgactgggctgacggcaagtcgatcctgcgaggcatcgactacacgcatgacatctcccgactggccggaggcgaaacctttgtcgcggtcaacaccgccatcgagatcgacccatacggccaggtcaacgtcgaaggcctcggggagaaagtggtcggcggtatcggcggacatcccgactactgcgcagccgcccggatgagccacagcgggctctcgatcatcgcgaccccgacagaagtcaacgggcgctcgccattggtggagcagctcagccgacccgcctcgacgcccgcccacgacatcgacctgattgtcaccgaatccgggtatgccgacctacgcggcgcggactggtcgcagcgacggcggctcatcaccacactgtttgag

SEQ ID NO: 25970 - DNA, 750 bp, Mycobacterium avium
gtggaggtcgatgtggaggtcaccagccttcgggagccgaaaatggccgatcgggtggccaccgtgctgcgcaggatgttcatccgaggcgagatccccgagggcaccatgctgccgcccgaatctgagctcatggagcgattcggggtgtctcggccgacgctgcgcgaagcgttccgggtattggagtccgagtcgctcatcgtggtgcagcgcggcgtgcgcggcggtgcacgggtcacccggccgcggcgtgagacgctggctcgctacgccgggctcatcctcgagtacgagggcgtgacactcaaggatgtctatgacgcgagggtgacgttggaaacgccgatgattgtccaactcgccaaagaccgcaatccggcggtgatcgccgaactcgagcagatcgtggagcgcgaagccgagctgaaaccaggcagcgacaccgtcgaccaactaaccgactttcacgccgcgatcgcccggttgtcgggcagcaagacactgcagatcgtcagcgacatgctccaccacatcgtggagaaggccaatcggtccttgcaaccgaccgagggcactcgcgccgcgcaggcggtgagtcgttcggcgaagacccatcgcatggtgttggacatgatcaaggcgggcgaggcggagaaggccggcgagctgtggaaaaagcacttgcagaaggccgaggcgttcgttctgtctggcgccgaattgtcaacggtcgttgatcttctcgaa

SEQ ID NO: 25971 - DNA, 612 bp, Mycobacterium avium
atgccgcagtcgccagaacgtctcgatcccaccgccgtcgccgtcgtttgtgtggaatgccaaaacggcgtacttggcgccgattccgttttgccggcactggccgctgactgcgccggcgtcgtcgcgaatttgcgccgtctcctcgatgccgcgcgtccccgcggcgtgcgggtggttcacgccacctacgaaggaacgttgggcggtgaccacacgggtactgctcgactgtggcgtgctttgggcccagccaccgcaagttgggcccctggaagcgtcgcaacccaggtcatgccagagcttctggcggacagcgaccttgtgctgccgcgtcaccacggactgtttccgacactggattccgagctgctgccggtgttgaaaggcttcggtgtgcacaccgtcgtccttaccggggtctcgcttaatctggcgttgccgatcactgccggacacaccacccaggccggattccacctcgtagttccccgcgacgcggtcggcggcacaccgtccggctatggataccaggtgttggacaacaccattgcggtgttgggccgcataactaccgtcgacaaactgatcgccgaatgggccgccaaagac

SEQ ID NO: 25972 - DNA, 1080 bp, Mycobacterium avium
atgaccttacgggtgggcatcatcggcgtgggttggggtgcgcatgtgcaggtgcccggtttccgggcagccaagggttacgagccggtggcgctgtgcgcccgcacccccgagcggcttgaacgggtggccgacaagctcggcatcgaagagacatcgacggattgggagtcgttcgtcacccgagatgatctcgacgtcatctcggtagcgacgccgacggtgctccaccgcgacatgacgttggcggcgctggccgcgggcaagcccgtactgtgcgagaagcccctcgccggcgacctcgacgcggctcgcgacatggtgcgcgccgccgcagaggccaacgtcccgaccgcgtgctgcttcgagaaccgttggaacccggactggttggccgtcgcggaccgggtgcgttcgggtttcctgggcacccagtacctggcacgcgtgagtcgcagcgcgtcgtactggcatccgagccatccgcttcaggcgcactggatgtacgaccgcgagcagggtggaggctacctggcgggcatgctcgtgcacgatctcgatttcctgtgcagcctgctcggtcgcccggtgtcggtgtgcgcggaggtgcgtaccagtgacccggttcgcgaactgcccgacggcggaaccctgcacgtcaccgcggacgacaccgccgccgtgctgatgcgcatggagtccggggtgaccgccgtcctgagcgtctcggtgatgggcgcccacgccgaccactaccgactggagttgttcggttccgacggcaccatcatcggtgacggcgacttgcgttccgcggcatacagtcttggcgcggccaccgacgacggactgaggtcgctggcggtggacgaacgcgagcccgcgcaccccgaccggttgcctcgtggactggccggtcacgccagtcgggcgatggcgctgatgctgcaggactggctccctgcgttcgacggcgcaccgagcaacgtggccaccttcgaggacggtctgttgtcgctggcgatcatcgacgcggcgcgtcgctccgccgaaggcggcggctgggaacccgtgcaagca

SEQ ID NO: 25973 - DNA, 1413 bp, Mycobacterium avium
atgggcgaagtgcagaacagggtgctgatcttctcggccgatgggcatgtcggcgcaaagcgaatggcggactatctgccctatttcgacccggatgtgcgcgacatcgtcaaggacctgctagccgaggaggagcaggcatatcggcgaatgctggctccggatttcagttccggaccacccgaggaaccggcacccgagttggacccgcgctgggcccccgccttcccggaccggttcggcggctgggacatcggcgtacgcatggaacagttggaccgcgagggggtcgcgggtgagatgttggtgccagggcaccagttctcgtcactgccgctgttcagcgtggtgaacaagcccttcgaggcgaacttgcgcgacgcaggcatgcgcgcttaccagcggtggctggccgacttcatgtccggcggcgacgggcgcctctacggaatggcggacccgggttcgtgccacgacatcgatgcctcggttcgcgaactgcattgggcgcgtgagaacggtttcgtcagcgtcggcgtaccaggcatcatcgaggaccccaccctgccgtctatcgacagtgaccactacgagccattctggaaggcatgtgtcgacctcgacctcacgctcgcggtccatgccggttggggattcccgcaaggtcgctatcaggagttcatctcggcgttcgtggccacacaccttggcggtgcggaggcaagccagatgatggccgcgcagcagcgactcgacgaggaggcccgcgaggcgcttcagaaggaattcgccgagtccccggcgtcgccgttccggttggattacggtccacggcgactgctctggcaattgatgatcggcgggatcttcgaccggtacccacagttgcggttcgtcctgaccgaggtgcgctcggattggctgccggtcacgctgcagatcctcgactcctggtacgagcagcgggaaacttcgctcaagatgcgcccgagcgaatactgggagcgccactgctttgcgaccccgtcgtcgatccacaaggtcgaagtcgatgcccgcgacgagatcggcgtggaccggctgatgctgggaatcgactacccgcatccggaagggatgtggcccgacacctggaactggatcaaggtggcattcgctggagttccggagaatgaggcgcgaatgatcctgggggagaatgcactacgtgctttcccggtggacggcaatcacctgcgggcgatcgcagaccggatcggcccagacccgagcatcctgctgagcggcggtgacgcggtaccgaccgaacacgtcgagcactaccaccggcggggcggcttcctgcgccccaccgaacgggtcgatcaagacgcgattctccgattcgccgacgaggatcttcagatcacccgc

SEQ ID NO: 25974 - DNA, 1878 bp, Mycobacterium avium
gtggcgaggtcccactccaaatacggctctaaatcggcgaattcagcgggcagcgacgtggccattgttctggtactccttcacgtaatcgccggtcgtcttgtgcaggtgacggatcaggacttcctggtcgcacagcaggaactccttgacggcccgggtgccgatcatggtctgggtcgcttccagggtgttggcgtcctgcagcgcgtactccttgaacgtcaccgcggccagctcctgggccaggcgttcccgcgcgttgcgcggcggcacgaagtacagcgtggactcgaagatgtgccggtccaccgcggtgggccagtagtggtaggtcaaaaaccagccgggctcccagatcagcagcatgaagttcgggtagaacagccacgagtcgatgccccactgcggcacccgcttgacgttgacacccggtggcaggtccagcttttcgatgatctccggcttgtcccacggaccgaacaacccgctgcgcaacacctggtccatcggcttgaccatggacatgtccgggggcggtgcctgaccaccccaggtcgactgcaggctgtgcggcccggccagctcgtagtgcagtgcctcgtagccgaacttctggatcttggcggcttcctccttggtgtactgcccctggtgcaggatcggcgcgtggtagaactcgacgaacgcgtcgatgaacagcttccagttgctgcccacctcggcccgataggaatacgtctcggtcatctccccgaaggggtagccctcgatgctcttggccagcggcccgaggtagtcggtgagcggggccgcgttgtcgtcgaagttgatgaagatgaagccttcccacacctcgcaacgcaccggcgccaggccgtagttgctcttgtcgaggtcgaagaactcctcttcctgttgcacgaaggtcaggtcgccgtccaggctgtagcgccaggcgtggtatttgcaggtgaactggcggcaggtgccggacgtctcctcgttgggaaagtcgttccacaccaacttgtttccgcgatgacggcagacgttgtggtacgccttgaccgacccgtccttggtcttgacgatgatcaccgaggtgcccttgccggccgacgggagctcccgggtgaagtagctgccggtgcggggcagtcgattgacgcggccgacgttgagccaggtcttcttgaagatcgcctcgcgttcggcttcgaagaaggccgggtcgatcgagtcggtgtaatcgactgggccggttccgagttcggggtagttctctgtccagctgcctgcggctggcttggggaagtgaggcaccgttgttactcctctttctcagtgctgttcggcatgttcgagctggatgccaaaagtgttgaaggccatggccagcagggtgtagcagcccaccgtgaagacgtagtccatgcgttgccggtcgtcgaggcgctcgcccagcgccgcccaggtccggtcggacagttccgatttctcgtcgagctcgtcgaccccggcgagcaccgcgtggtcgaacgcgtcgaatgggccggcgccgtcgccggcaaaacagcgaaccgccgcgatctgctcgtccgtgattccctcgtccttggccatgccgacgtgatgggaccactcgtaggcgcactgccgacgatgggccacccgcaggatggccagttcgcgcacccgcggcggcagcgtggaagccgtcagcaggtggacgttgaatcgaagaaacgccttggccagcgccgggtggtgggccagcgtggacagcgcgttgttggtgtcggctccgcgcatcgccgcgagcgcctgccgggtcgcctcgtcccactgctcggcggggagcggctgcaagcgcat

SEQ ID NO: 25975 - DNA, 978 bp, Mycobacterium avium
ttgagccacgactggaccgataaccgcaaaaatctgatgctcttctccggtcgtgcgcacccggagctggccgagcaggtggccaaggaactcgacgtccacgtcaccgcccagaccgcgcgcgagttcgccaacggcgagatcttcgtgcggttccacgaatcggtgcgcggctgcgacgcgttcgtgctgcagtccgccccggcgccggtgaacagctggctgatggaacagctgatcatgatcgacgccctcaagcggggcagcgccaagcggatcaccgcggtgatgccgttctacccgtacgcccgccaagacaagaagcaccgcggccgcgaaccgatctcggcgcgcctggtcgccgacctgctcaagaccgccggcgccgaccggatcgtgaccgtcgacctgcacaccgatcagatccagggcttcttcgacgggccggtcgaccacatgcgcgggcagaacctgctcaccggctacatccgcgacaactaccccgacggcaacatggtcgtcgtctcccccgactccggccgggtgcgcatcgccgagaaatgggccgacgcgctgggcggcgtgccgctggccttcatccacaagacccgcgatccgcgggtgcccaaccaggtggtgtccaaccgcgtggtgggcgaggtggccggccggacctgcgtgctgatcgacgacatgatcgacaccggcggcaccatcgccggcgcggtcaagctgctgcgcgacgagggcgccggcgacgtgatcatcgccgcgacccacggtgtgctctccgatccggccgccgagcgcctggcctcctgcggcgcccgggaggtgatcgtgaccaacaccctgccgatcggcgaggaaaagcggttcccgcagctgacggtgctgtccatcgcgccgctactggcaagcaccatccgggcggtcttcgaaaacggttcggtcacagggcttttcgacggggacgcc

SEQ ID NO: 25976 - DNA, 984 bp, Mycobacterium avium
gtggtcgtgacacgaggaacagcaaccgcgcagctgcccgcaccgacgacgctgaacgcgcgggtatcgcggcggggcgaccggctgttcaaggcgatcgccgccgccgccgggttcacgatcgtggtcgcgatcgcgttgatcgcggtgttcctgttgctgcgtgccgttccgtcgttgcgcgtcaaccacgcgaacttcttcaccagcgcccagttcagcaccagcgacccgcatcggctcgcgttcggcatccgcgacctgctcatggtcacggtgctcagttcgctcagcgcgctggtgctggccgtccccatcgcggtcggtatcgcggtgtttctcacccagtacgcgcccagacgactggcccgcccgttcggcgcgatcgtcgacctgctcgccgcggtgccgtcgatcatcttcgggctgtgggggattttcgtgctggccccccagctcgagccggtggcggcgttcctcaaccgccacctgggatggttcttcctgttcaaaaccggcaacgtgtcgttggccggcggcggcaccatcttcaccgccggcgtcgtgctctcggtgatgatcttgccgatcgtcacgtcggtgtcccgcgaggtctttcggcagaccccgcacatccagatggaagccgcacaggccctgggcgccaccaagtgggaggtggtgcggatgacggtgctgccgttcggccgcagcggcgtgatcgcggcctcgatgctcgggctgggccgggccctgggcgagacggtggccgtgctgatcatcttgcggtcggcggcccgcccggggcactggtcactgttcgacggcggctacaccttcgcctccaagatcgcctcggcggccgcggagttcagctcgccgctgcccaccggcgcctacatctcggcgggtttcgcgctgttcgttttgacgttcatcgtcaacgcgctcgcgcgggcgatcgccggcggcaaggtcaacgga

SEQ ID NO: 25977 - DNA, 921 bp, Mycobacterium avium
gtgactgtcgcacccgagggacgcaaactgctgcgcctggaagtgcgcaacgccgacaccccgatcgagcgcaaaccgccgtggatccgggtgcgggcccggatggggccggaatacaccgagctcaagagcctggtccggcgcgaggggctgcacacggtctgcgaagaggccggctgccccaacatcttcgaatgctgggaggaccgcgaggccaccttcctgatcggcggcgaccagtgcacccgtcgctgcgacttctgccagatcgacaccggcaagcccgccgagctggaccgcgacgagccccgccgggtggccgacagcgtgcgcacgatggggctgcgctacgccacggtcaccggggtggcccgcgacgacctgcccgacggcggcgcctggctgtacgccgagacggtgcgcgccatcaaggagctcaacccgtcgaccggtgtcgagctgttgatccccgacttcaacggccggcccgaccggctcgccgaggtgttcgggtcgcgcccggaagtgttggcgcacaacgtcgaaacggtgccgcggatcttcaaacggatccgcccggccttcacctaccggcgcagcctggacgtgctgaccgcggcccgcgaggccgggctggtcaccaagagcaacctcatcctcggcctgggcgaaacccccgacgaggtgcgcaccgcgctggccgacctgcgcggcgccggctgcgacatcatcaccatcacccagtacctgcgcccgtcggcccgccaccacccggtcgagcgctgggtgaagccggaggaattcgtcgagttcgcgcggcatgccgaagagctgggcttctccggggtgctggccgggccgctggtgcgctcgtcgtaccgcgctgggcggctctaccggcaggccgcccgcgcccgcgcc

SEQ ID NO: 25978 - DNA, 396 bp, Mycobacterium avium
atgtcagccggcgcccggacggcggcttcgccgtcaacgccgaccgcacccaggcgccctcggggcgccggctacgcgctggccgatcggcgggtggtggcgcacgcgattcccgacctgtacgagcggatcgcgccgcggcccaccacaccgttcgcgcaggctctgcggctggcgctgatcgacgcggcgcccgacgtcgcccaggacccggtggtagtggtgctgtcgccgggcatctactccgagacggcgttcgaccaggcctatctggccaccctgctgggtttcccccctgtgagagaacccccaccttgttggtgcccaacggcccttgttgttggatgcgttcggctgggcacccagaaaacgggtcgacgtggtgctgcgccgggt

SEQ ID NO: 25979 - DNA, 411 bp, Mycobacterium avium
ttggcatccgaaaccgagggggctcagaccaagcggcccgaaccccgactcgcccagggccgcgagcacgtcgtcgccacggtagacgaaatcccgccgggcacacacaaactggtgccgatcggtcgccacggcgtcggcgtgtacaacgtcaacggaaccttttacgcgatcgcgaactactgcccacaccagggcggcccgctgtgttcggggcggccccgggggcgcaccatcgtcgacgagaccgcgcccggtgactcggtcatggtgcgcgacctggagtacatctactgcccttggcaccaatggggtttcgagctggcgaccggaaccaccgcggtcaagccggagtggagtatccgcacctacccggtgcgcgtcgtcggcaacgacgtcgtggtgcaggcc

SEQ ID NO: 25980 - DNA, 852 bp, Mycobacterium avium
gtgggtcgccaaatactcagggacgtaatggtattcgcccgggtgggtgaggctggccaggtcgatgtccaggccgcggcgccgccagccctccacgaaggcccgctcggcctccagctgcagcggatcccaggtgggcaggtggtcggcggccaaccggctgcccgcggcgctggccgcggtgagccggcgcagcagccggttctgctcggcgggcttcaggtagccgaccagcagctgctcggcgacccacgccgtgggctgggccgcgtcgaaacccacccgccgcaacgccgccggccagtcgtcgcgcaggtcgatgccgaccgcgcaccggttggtggccagccgggcgtccagcccgcgcagcaccccggctttgaaatcgagcacccgcggccggtcgatctcgtagaccgtggtcccgcgcggccaccacagccggtacggccgggtgtccaggcccgatgccaggatcaccacctggcgaatgcccgcgcggcccgcctcggcgaggaattcgtccacgaaccgggtgtgggcggccagcgcatccagcagcgacgtcaccgccgggtcgtcgccgaccggcgattcatcggccgcgaacgtgtggtcggcgatcgcgcgggtgaggtagtcgatgccgacggcgcccagcagcggctcggcgtacgggtcgttgagcaacccctgccgggtggcgacggcccgggcggcggcgcccaaggttgcggtcacccccacctcggctgtcgctgccatcgtcgtcccgggcgtcgtctcaggcgtcggagcggcgccgcagggtcagcccggcggccacccgccagccgagcaacaccagcgcgg

SEQ ID NO: 25981 - DNA, 1881 bp, Mycobacterium avium
atggctgacgagcgggccgcagcccggctgggcagcgccgcgcgccgggcggcgaccgggctgggcgccgcggtgatcgcccggctgccggccgcgcaggcggcgatgcggccccgactgctccggttgatctgcgccgtcgtgggcggcgggttgctgtgcgccagcttcccggcggtgaactggtggtgggccgccgtccccgccgccgcggtgctggcgtgggtgctcacccatccggcgacgacgccgacgggcgggctggggtacgccttcgtcttcgggctggccttctatctaccgctgttgccgtgggtcgggctgctggtcggggccgtcccgtggctggtgctggccgcggtgtcggcgctgtttcccgccgtcttcgggctgttcgccgtgctggtgcgccggctacccggctggccggtctggttcgcgttgctgtgggcggcccaggagtggctgaagtcgatcttcccgttcggcggcttcccgtggggctcggtggcgttcggccagacgcacggaccgttcctgccgctggtccagctgggcggcgtcgcgttgctctcgttcgccatcatgctggtgggcttcagcgcgacggccctcgcgctggagatcgtcaagtggtggcgctccggttaccccgcggcccagtcatcggccgggccggccgcgccgccggcggtggtgctgcccggcgtctgcatctgcctggtgctgttcgcggcggtcatcgtctggccgcaggtgcggcactccggtaccggctcgggcggcgagccctcggtgaccgtcgcggcggtccagggcaacgtgccgcggctgggtttcgggttcaacgagcagcgccgggcggtgctggacaatcacgtccgggagacgctgcggctggccgaggacgtgcgggccggggccgccccgcaaccccagttcgtgatctggccggaagactcctcggacatcgacccgctcgtcaacggcgacgccgccctggagatctcgcaggccgcgtcggccatcggcgcaccgatcctgatcggcagcgtgctcgaagtccccggacgcccggcgcaggatccccgctacaccaacaccatgatcgtgtggaacccggcgaccggcccggccgaccgccacgacaaggagatcgtgcagccgttcggcgagtacctgccgatgccgtggctgttcaagcatctgtccggatacgccgaccgcgccggcgccatggtgccccgccccggcagcgacgtggtgcacatggccggggttccggtcggggtcgccacctgctgggaagtgatcttcgatcgcgtcccgcggcgcgccgtcacccacggcgcccagctgctggtcgtgccggccaacaacgccaccttcaaccagcggatgagcgagcagcagctggcgttcgccaaggtcagggccgtcgagcacgaccgctacgtggtggttgccggcaccaccggcatcagcgcggtgatcgcccccgacggcgccgaactggcgcgcaccgacttcttccagcccgcctacctggacatacaggtgcgcctcaaaaccaggctgacgccggccacccgctgggcgccgctgctgcaatgggtgatggtcgcggtggccggggcggtgatcctggtcgcgatacggcagaatggatggttcccgcgttcgatccggcagaggccgggacgctcgggtgcgccgaagcatcccgatgcctccccggccgaaaccgagggcgacacacacccggcgcacaatgccgcgcccgacgaggacggcgaccacgctccgccagaggacggcggcgacgacactggaccgcccgagggcggccgaccccatatcgggcgacacagaggagctaca

SEQ ID NO: 25982 - DNA, 1557 bp, Mycobacterium avium
atgaggcccttctacgtcaccaccgcgatcacgtaccccaacggcgacccgcacgtcgggcatgcctacgagtacatcgccaccgatgccatcgcccggttcaagcggctcgacggcttcgacgtgcgattcctgaccggcaccgacgagcacggcctcaagatggtcgagaccgcggcggccgagggcatcggcacggccgagctggcccggcgcaattccgatgtgttccagcggctgcaggagcggttgaacatctccttcgaccgcttcatccgcaccaccgaccccgatcatcacgaagcgtccaaggcgatctggcggcggatgcaggcggccggcgacatctacctggacagctattccggttggtattcggtgcgcgacgagcggttcttcgtcgaatcggagaccaaggtgctcgacgacgggacgcgggtggccgccgaaaccggcgccccgctgacctggaccgaggagcaaacgtatttcttccggctgtcggcctacaccgacaagctgctggcccactacgaggcgaacccggatttcatcgcccccgaggtgcggcgcaacgaggtggtcagcttcgtctccggcggcctgcgcgacctgtccatctcgcgcacctcgttcgactggggcgtcaaggtgcccgatcatcccgaccacgtcatgtacgtctgggtcgacgcgctcaccaactacctgaccggggtgggatacccggacaccgaatcggagatgttccgccgctactggccggccgacctgcacatgatcggcaaggacatcatccggttccacaccgtgtactggccggcgtttctcatgtcggccggaatcgagctgccccgaagggttttcgcgcacgggtttttgctcaaccgcggcgagaagatgagcaagtcggtgggcaacatcgtcgacccgatcacgttggtggacaccttcggcgtcgaccaactgcgctacttcctgctgcgcgaggtgccgttcggccaggacggcagctacaccaaggacgcgatcatcacccggatcaacaccgatctggccaacgagctgggcaacctggcgcagcgctcgttgtcgatgatcgccaagaacctgcactcggtggtgcccgaacccggtgacttcaccggcgacgaccgtgaactgctgcagacggccgacggtttgttgccgcgggtgcgcgccagtttcgactcgcaggcgatgcacctgggcctggaagcgatctggctgatgctcggtgaggccaacaagtacttctcggcgcaacagccgtgggtgttgcgcaagagcgagtccgaggcggatcagacccggttccgcaccgtcttgtacgtcacctgcgaggtggtccgcatcgccgcgctgctggtgcagcccgtcatgcccgattcggccggcaagctgctggatctgctggggcagggccaagatcggcgggcgttcgacgcgctgggcgcgcggctggctccgggtacggtgctgccgcctccgaccggtgtgtttccccgctaccaggcggagtcggagaaagtcgat

SEQ ID NO: 25983 - DNA, 909 bp, Mycobacterium avium
gtgacctggcagttccctgatcgcctgtccaccaattccgcacttccgggccccgcattctccggacaacccgccgtagatctgtcgtcattcgccgacttcctgcgccgccaggcgccggagttgctgccggcggccctcggcggggcgcagtccggcccggcttcgtcgagcggcggcacgggtcagctgccgcacgggaccaccatcgtcgcgctgaaataccccggcggcgtggtgctcgcgggcgaccggcgttcgacgcagggaaacatgatcgccgggcgcgacgtcaagaaggtgtacatcaccgatgactacaccgccaccggcatcgccggcaccgccgccatcgccgtggagttcgcccggctgtatgccgtggaactcgagcactacgagaagctcgaaggcgtgccgctcacgtttgccggcaaggtcaaccggctggccatcatggtgcgcggaaacctcgccgccgcgatgcagggactggtggcgttgccgctgctggccggctacgacatcgacgcgcgcgacccggaaggcgccggccgcatcgtgtcgttcgacgccgccggcggctggaacctggaagaggagggctaccagtcggtggggtcgggctcgatctttgccaagtcgtcgatgaagaagttgtactcacaggtcgtcgacgccgactccgcggtgcgcgtcgcgatcgaggcgctctacgacgccgccgacgacgactccgcgaccggcggaccggatctggtccgcggcatctatcccaccgcggtcaccatcggcgcggagggtgcgctcgaggtgccggagagccgcatcgccgagctggcccgcgaggtgatccaaagccgttcgcgcgcagacactttcggccccgacgccgcgggtggtgacaag

SEQ ID NO: 25984 - DNA, 1482 bp, Mycobacterium avium
atgtcaaaggtggcggggccgatcgctaccatgactgatgctctgcgcaccgcggtcgatcgccgcgcgtgcccgcccgaacccggaaagggagtgcaccgcctcgtggcgtccgtcatcgacaccgtagtgaacctggccaaacggcgcggcttcgtctatccctcgggggagatctacggtggcacccgctcggcctgggactacggcccgctgggcgtggagttcaaggagaacatcaagcggcaatggtggcgctcggtggtcaccgcccgcgaggacgtcgtcggcctggattcgtcgatcatcctgccccgccaggtgtgggtggcctccggccatgtcgaggtcttccacgacccgctggtcgagtcgttgatcacccacaagcgctaccgcgccgaccatctcatcgaggcctacgaggccaaacacggccacccgccgcccaacgggctggccgacatccgcgacccggacaccggcgaacccggccggtggaccgaaccgcgcgagttcaacatgatgctcaagacctacctcggacccatcgagaccgaggaaggcctgcactatctgcgcccggagaccgcgcagggtattttcgtcaacttcgccaacgtggtgacgaccgcacgcaagaagccgccgttcggtatcggccagatcggcaagagctttcgcaacgagatcaccccgggcaacttcattttccgcacccgcgagttcgagcaaatggaaatggagttcttcgtcgagccctcgaccgccaaggaatggcatcagtattggatcgacacccggctgcaatggtatgtcgaattgggtatcgatccgcagaacctgcggctgttcgagcatcccgccgacaagctgtcgcactactccgaccgcaccgtcgacatcgagtacaagttcggcttcgccggtaacccgtggggcgagctggagggggtcgccaaccgcacggacttcgacttgtccacgcactcaaagcattccggggtcgacctgtccttctacgaccaggccaccgactcccgctacatcccgtacgtgatcgagccggcggccggcctgacccggtcgttcatggcctttctgatcgacgcctacgtcgaggacgaggcgccgaatgccaagggcaagatggaaaagcgcaccgtgttgcggctggacccgcggctggctccggtcaaggcggcggtgcttccgctgtcgcggcacgccgacctgagtcccaaggcccgcgacctggcggccgagctgcgccggttctggaatatcgaattcgacgacgcgggcgccatcggccggcggtatcggcgccaggacgagatcggcacaccgttttgcgtgacggtggatttcgactcgctggaggacaacgccgtgacggtgcgccggcgcgacgacatgtcccaggagcggatcggcatggacgccgtggccgactacctgtcggcgcggctcaagggctgc

SEQ ID NO: 25985 - DNA, 2130 bp, Mycobacterium avium
ttgagtgacagcattattggctgggacaaggacgccgacgggatcgtcacgctgacgatcgacgaccttgacaacggcgccaatatgctcaccgatgcctacgtcgagcagatgggcgcgatgatcgaccggctcgaggccgaggtcgacgagaccaccggtgtggtgatcacctcgggcaagtccacgtttttcgccggcgccgatctgacccagatccgcagcgccggacccgagcacgcgcagcagctgttcgacggctccacggcgatcaaacgtgatctgcgtcggctggagacgctgggcaaaccggtcgtcgccgcgatcaacggcgccgcgttgggcggcgggctggagctggcgctggcgacccatcaccgcatcgcggccgacgtggcgggcagcgtgatcggcctgcccgaagtgatgctgggtgtgctacccggagccggcggcgtggcgcgcagcgtgcggctgctcggcatccaaaacgcactgatgcaggtgttgttgaccggcaaccggttcaagccggccaaggcccaacaggtaggactggtcgacgaactggtcgagtcggtcgaggaattggtgccagccgccaagacgtggatcctggccaacccggacaagcatgtgcagccgtgggatgtcccgggtttcgagattcccggtggcggcccggccacgtcggcgtttgcggccaacctgccggcgtttccggccaacttgcgcaagcagctcaagggctcgaggatgccggcgccgcgagcaatcatggcggccgcactcgaaggggcccaggtcgacttcgacaccgcccaggtcatcgagacccgctacttcgtgcacctggtcaccggcccgatcgccaagaacatgattcaggcgttcttcttcgatttgcaggccgtgcagggcggcacgtcgcgccccgccgacgtccccgagcgcacgatcaacaaggtcggcatcctgggtgcgggcatgatgggcgccgggatcgcgtatgtgacagcgaaagccggcatcgacgtcgtcctcaaagacatcacgctgcaggcggcccgcaagggcaaggcttactcggaaaacctcgagcagaaggcattggcgaaaggccgtaccaccgaggcgaagtcgcaggcactgctggaccgcatcaccccgaccgccgacgccgccgacttcgccggcgtggatttcgtgatcgaggcggtattcgaaaacaccgagctgaagaacaaggtgttcgccgagatcgagaacatcgtcgaacccggcgccgtgctgggctccaacacctcgtcgctgccgatcaccgacctggccgccggggtgagtcgcccggagaacttcatcggcatccacttcttctcaccggtggaaaagatggacccgatcgagatcatccgcggcgcaaagacatccgacgagaccctggcccgggtcatcgactacacgctggccatcaagaagtaccccatcgtggtcaacgacggccgcggatttttcaccacccgggtgttctccacctacctgctcgaggccttcaacatgctcgccgaaggcatcgaccctgccaccatcgaacaggcggcgcttcaggccggctacccggccgggccgctacaggtagccgacgagctcagcttcggcaccatccgcaagatcatggatgagacggtgcaggcggccgcagccgacggcctcccgctcgacgagtcggtgcgcgtggccgccgaggtggtcaccacgctgatggacactttcgaccgcaacggcaagcagggcggcgcgggtttctacgactacgccgacggcacccgcgccgggttgtgggacggtctgcgaacggcattcaacaccacacgcgcactgtcggttccgttcgacgacctgcaggaccgctacctgttcatccaggcgatcgaaacgcagaaggcctacgacgacggcgtcatcagctccgacccggacgccaacgtcggctcgatcttcggcatcggctacccgccgtggaccggcggagtgcgccagttcgccaccggctatccgggcggcgccgatgcgttccgccggcgcgccgacgaactcgcggccgcgtatggagggcggttccggtggatc

SEQ ID NO: 25986 - DNA, 891 bp, Mycobacterium avium
atgcccgccgggcgcggcattattgcgatcatgcctgacctcacacgccgggcggtgctccggatgggcgccggtgccagcctcggcgccgccggcgtgttcgcgctcagcgccctgctggatccgggcacggcgcgcgccgccaccctgccgcaggccccggcgccgttcgagccgccgacggcgggcaagacgctgccgacccggctcaccggatcgttcgtgtcggcggcgcgcggcggcatcaagaccaactacgtgatcgccatcccgcccgggcagaccgggatgctgcgtccggtgatcgcgctgcacggcgtggacggcgacgccaaccagatgctcgacatgggcgtgcccgacgggctggcccagctggtcaaggccggcaagccgccgttcgcggtggtgggtgtcgacggcggcaacacctattggcacaaaaggacttccggcgaggactcgggtgcgatggtgctcgacgagctgctgccgatgctgtccaccatgggcttcgacacctcccgggtcgggttcatggggtggtcgatgggcggctacggggcgcttcgcctgggcgccaagctgggcccgtcgcgcaccgccggcatctgcgcgatcagcccggcgctgtacacctcgtacgccaccagtgcgcccggggcgttcgacagcaacgaggacttcgtgcagaacagcgtgttgggcctgcccgcgctgaattcgattccgctgcgggtggattgcggcaacttcgaccgcttctatttcgccacaaagcaattcgtctaccagttgaagacaccaccggcaggcagcttctccctcggcggacacgatatcgccttctggcgcagtcaactccccgccgaactggcctggatggcgacc

SEQ ID NO: 25987 - DNA, 1509 bp, Mycobacterium avium
atgagtgttgccgccaacgccgagcttatggactacgacgacgtcatcgcgcgtttcgatccggtgctcgggctcgaggtgcacgtcgagctgtccacggtgaccaagatgttctgcggctgcaccaccgcgttcggcgccgaacccaacacccaggtgtgccccgtgtgcctggggctgcccggctcgctgccggtgctcaaccaggccgcggtcgagtcggccatccggatcgggctggcactcaattgcgagatcgtgccctggtgccggttcgcccggaagaactacttctacccggacatgccgaagaactaccagatttcgcagtacgacgagcccatcgccatcaacggctacctggaggcgccgctggacgacggcaccacctggcgggtggacatcgaacgcgcgcacatggaggaggacaccggcaagctcacccacatcggcagcgagacgggccgcattcacggcgcgacgacgtcgctgatcgactacaaccgtgccggtgtgccgttgatcgagatcgtcaccaaacccatcgtcggcgcgggagagcgcgcaccgcagatcgcccgggcgtatgtgacggctttacgagacctgttgcgcgccttgggtgtatccgacgtccggatggatcagggctccatgcgctgcgacgccaacgtgtcgctgaaaccgatcggcaccgccgagttcggaacccgcaccgaaaccaagaacgtcaactcgctcaagagcgtcgaagtggcggtgcgttacgaaatgcagcgccaggccgcggttctggcctcgggcggccggatcacccaggaaacccgccactttcacgaagcgggctacaccagccccgggcgcgtcaaggagaccgccgaggactaccgctacttccccgagcccgacctggagcccgttgcgcccagccgcgaactggtggagcggctgcggctgaccatccccgagctaccgtggttgagccgcaagcggattcagcaggagtggggcgtttccgacgaggtgatgcgcgatctggtcaacgccggcgcggtggacctggtcatcgagaccgtcaagcacggcgcacccagtgagcaggcccgcgcctggtggggaaacttcttggtgcaaaaggccaatgaggccaacatcgggctggacgaactgaacatcagccccgcccaggtggccgcggtgatcgccctggtcgacgagggcaaactctcgaacaagctggcccgccaggtcgtggaaggcgtgctggccggggagggcgaacccgaccaggtgatgaacgcccgaggcctcgagctggtgcgcgacgactcggtcacccaggccgcggtcgacgaggcgttggccgccaatcccgatgtggcggagaagatccgcggcggcaagatcgcggcggccggcgcgatcgtcggggcggtgatgaaggccacccgcgggcaggccgacgccgcgcgggtgcgcgaactggtgctggccgcctgcggccaaggc

SEQ ID NO: 25988 - DNA, 237 bp, Mycobacterium avium
atggcggaagaaaacaagtcgggacccgcggaagcggtgaagggcgtcgtcgaggacgtcaaaggaaaggccaaggaggccgtgggcgcggtggccggtcgtgacgacctgacccgggagggccaggcgcagcaggacaaggccgaagcgcagcgcgacgcggcgaagaaggaagccgaggccgaggccgctcgcggcggcgccgaggccgccgaggagcgccagagggccaaccag

SEQ ID NO: 25989 - DNA, 795 bp, Mycobacterium avium
atgacggagtccagggagccccacgtcgccggctcggcggctccgaggccagagccggcgaacggactggcttccggccagccgtcgagccgggcccggtattcgcgagtgctgctcaagctgggcggcgagatgttcggtggcggccaggtcggtttggatcccgacgtcgtcgcgcaggtggcccggcagatcgccgaggtggtccgcggcggcgtccaggtggcggtggtgatcggcggcggcaacttcttccgcggcgcccagcttcagcagcgcggcatggagcgcacccgttcggattacatgggcatgctgggcacggtgatgaacagcctcgcgctgcaagacttcctggagaaggaaggcatcgtcacccgggtgcagaccgcgatcaccatgggccaggtggccgagccctatctgccgttgcgcgcggtgcgccacctggagaagggacgggtggtgatcttcggggccggcatgggcctgccctacttctccaccgacaccacggccgcgcagcgggcgctggagatcggcgccgaggtggtgctgatggccaaggccgtcgacggcgtcttctccgcggatccccggcaatatcccgaggccgagctgatcaccgcgatcagccaccgtgaggtcatcgaccgcgggctgcgcgtggccgatgcgacggcgttcagcctgtgcatggacaatggcatgccgatcctggtgttcaatctgctgaccaatggcaatatcgcccgcgcggtcgccggtgagaagatcgggacgctggtcaccacc

SEQ ID NO: 25990 - DNA, 1146 bp, Mycobacterium avium
atgccgcagaccccggcgcccacgcttgcgccccggcgccgcacgcgccaactgatggtgcgcgacgtcggggtcggcagcgactatccgatctcggtgcagtcgatgtgcaccaccaagacccacgacgtgaactcgacgctgcagcagatcgccgagctgaccgcggccggctgcgacatcgtccgggtggcctgcccgcgccaggaggacgccgacgcgctggccgagatcgcccggcacagccagatcccggtgatcgccgacatccacttccagcccaagtacatcttcgcggccatcgacgccggctgcgccgcggtgcgggtgaaccccggcaacatcaaggaattcgacggccgggtgggcgaggtcgccaaagccgctgcggcagcgggcattccgatccgcatcggcgtcaacgcgggctcgctggacaagcggttcatggccaagtacggcaaggccacccccgaggcgctggtcgagtccgcgctgtgggaggcctcgctgttcgaggagcacggcttttccgacatcaagatcagcgtcaagcacaacgaccccgtggtgatggtggccgcctacgagcaactcgccgagcagtgcgactacccgctgcacctgggcgtcaccgaggccgggcccgcgtttcagggcaccatcaagtccgcggtcgcattcggtgcgctgctgtcgcgcggtatcggcgacaccatccgggtgtcgctgtcggcgccgccggtcgaggaggtcaaggtcggcatccagatcctggagtcgctgaacctgcggccgcgttcgctcgagatcgtgtcctgcccgtcgtgcgggcgcgcccaggtcgacgtctacacgctggccaacgaggtcagcgccggcctggacggcctggacgtgccgctgcgggtcgcggtgatgggctgcgtggtcaacgggccgggcgaggcccgcgaggccgacctgggcgtcgcgtcgggaaatggcaaggggcagatcttcgttcgcggcgaggtgatcaagacggtgcccgaatcccagatcgtggagacgctgatcgaagaggccatgcgcatcgccgcgcagatgaacagtgagggcgggccggaggcaacatccagcggttcaccggttgtcaccgtaagc

SEQ ID NO: 25991 - DNA, 555 bp, Mycobacterium avium
atgattgacgaggctctcttcgacgcggaagagaagatggagaaggccgtagcggttgcccgtgacgacttgtcgaccatccggaccggccgcgccaacccgggcatgttctcccggatcgtgatcgactattacggcgcggccacccccatcacccagctggccagcatcaacgtgcccgaggcgcggctggtggtgatcaagccctacgaggccagtcaggtcggggcgatcgagacggccatccgcaactccgacctgggcgtcaaccccaccaacgacggcaccctgatccgggtggcggtgccccagctcaccgaggagcgccgccgcgagctggtgaagcaggccaagagcaagggggaggatgccaaggtgtcggtgcgcaacatccgccgcaaggcgatggaggagctgcaccgcatccgcaaggacggcgaggccggcgaggacgaggtcgggcgggccgaaaaggacctggacaagaccacccatcagtacatcacccaaatcgacgagctggtcaagcacaaagaaggcgagctgctggaggtc

SEQ ID NO: 25992 - DNA, 933 bp, Mycobacterium avium
gtggctacctcagatcccggtgcaggcgacgagccggagcatgccgtcgagaacacgaccgagggtgcggccgggcagcgggccaagaagaaaacctcccgggccggacgtgacctgcgggccgccatcgcggtgggcgccggtatcggcgccgtgctcatcgtcacgctggtgttcgcgccccgcttctgggtgccgatcgtcgcgatggccatcctggtcgccagccatgaggtggtccgccggctgcgcgaggccggatacgtcatcccggtcattccgttgctggccggcggccagctcacggtgtggctgacctggccgttccacgccgccggcgcgttggccggcttcggcgtcaccgtggtggcctgcctgttctggcggttgttcatgcaggacaaccgcaagcgccccgagccgttcgccggttcgccctcggcgaactacctgcgcgacgcgtcggccaccgtcttcctggcctgctgggtgccgttgttcgcctccttcgccgccctgctggtctatcccgccgacggtgccgggcgggtgttctgcctgatgatcaccgtggtggcctccgacgtcggcggctacgccgtgggcgtgctgttcggcaagcatccgatggtcccggcgatcagccccaagaaatcctgggagggcctggccggctcgctggtgctgggtatcaccgcggccaccctggcggcgacttttctggccggcaaggcgccgtgggtgggcgcgctgctgggggtggtgctggtgttcacctgcaccctcggcgacctggtggagtcgcaggtcaagcgtgacctgggcatcaaggacatgggccggctgctgcccggccacggcggcctgatggaccggctggacggtgtgctgccgtcggcggtcgccgcctggacggtgctgacgctcgttccg

SEQ ID NO: 25993 - DNA, 828 bp, Mycobacterium avium
atggccgtagtcaccatgaagcagctgctcgacagcggcacccacttcgggcaccagacccgtcgctggaaccccaagatgaagcggttcatcttcaccgaccgcaacggcatctacatcatcgacctgcagcagacgctgacgttcatcgacaaggcgtacgagttcgtcaaggaaaccgtcgcccatggcggcaccgtgctgttcgtcggcaccaagaagcaggcgcaggaatccattgcggcagaagcgacccgggtcggcatgccgtacgtcaaccagcgctggctcggcggcatgctgaccaacttctccaccgtgcacaagcggctgcaacgcctcaaggaactcgaggccatggagcagaccggcggcttcgagggccgcaccaagaaggagatcctcgggctgacccgcgagaagaacaagctcgagcgcagcctcggcggtatccgcgacatgagcaaggtgccgtcggcgatctgggtcgtcgacaccaacaaggagcacatcgccgtcggcgaggcccgcaagctgggcatcccggtcatcgcgatcctggacaccaactgcgaccccgacgaggtcgactacccgatcccgggcaacgacgacgccatccgcagcgccgcgctgctgaccaaggtgatcgcctccgcggtcgccgagggcctgcaggcccgcgccggcgtgggccgcggtgacggcaagccggaggtcgaggccgccgagccgctcgccgagtgggagcaggagctgctcgcctcggccactgcgacagccgcccccaccgaagcgggcgcacccgaacccaccaccgacccctcc

SEQ ID NO: 25994 - DNA, 825 bp, Mycobacterium avium
ttggccaacttcaccgctgccgacgtcaagcggcttcgggaactcaccggtgccggcatgctcgactgcaagaacgccctggccgaatccgacggcgacttcgacaaggcggtcgaggcgctgcggatcaagggcgccaaggacgtcggcaagcgcgccgagcgggcgacggccgagggcctggtggccgcccagggcggcgcgctgatcgagctgaacagcgagaccgacttcgtcgccaagaacgccgaattccaggcgcttgccgaccagatcgtggcggcggccgcgtcctcgaaggccgccgacgtcgacgcgctgaaagccgcgaaaatcggtgacacgaccgtcgagcaggcgatcgccgagctgtcggccaagatcggcgagaagctggagctgcgccgcgtcgcgcacttcgacggcaccgtcgaggcctacctgcaccggcgggcggccgacctgccgcccgcggtcggcgtgctggtcgagtaccagggctcgggcaaagacagcgacaaagaggccgcccacgcggtcgcgctgcagatcgccgcactcaaggcccgctacctgtcccgcgacgacgtgcccgaggacgtggtggccagcgagcgccgcatcgccgaggaaacggccaaggcggagggcaagccggagcaggcgctgcccaagatcgtcgagggccggttgaacggcttcttcaaggacgccgtgctgctcgagcagccgtcggtgtccgatagcaagaagaccgtcaaggcgctgctcgacgaggccggcgtgaccgtcacccggttcgtgcgcttcgaggtcggccaggcc

SEQ ID NO: 25995 - DNA, 609 bp, Mycobacterium avium
atgggctttgtggcgcagcaacaaccagtcccgggcgtgcaggcgaagatggaaccaattccggactgtggtgaaaacagttaccggggttcgggaaaactgctcggcaaaaaggcgatcgtcaccggcggcgacagcggcatcggcagggcggtggcgatcgcctacgcccgcgagggcgccgacgtgctgatcgcctacctcaacgaggacgacgacgcgcgcgacgtggcccgctacgtcaccgacgccggccgcaaatgcgtgctggtgcccggcgacctgtccgatcccgcccactgccgggcggtggtggaccgcgcggtgcaggagctgggcggggtggacatcctggtcaacaacgccgcctatcaaatgatgcacaagaacctcgacgagatcagcgacgaggagtgggactacaccttccggctcaacgtcggcgcttatttctacctgaccaaggccgtgctgccgcatctgcgcgccggctcgtcgatcatcggcagctcctcggtgaactccgatacgcccaatcccaccctggcgccctacgcggccaccaaggcggccatcgccaacttctcggccagcctggcccagctgctg

SEQ ID NO: 25996 - DNA, 390 bp, Mycobacterium avium
atgggaattgtcggtgtggggatcgatctcgtctcgattcccgaattcgccgagcaggtcgaccagccgggaacggtcttctccgagacgttcacgccgggggagcgccgcgacgcctcggacaagagctcgtcggcggcgcgtcacctggcggcccgctgggccgccaaggaggccgtgatcaaggcctggtcgggttcacggttcgcgcagcggccggtgctgcgcgaggacatccaccgcgacatcgaggtggtcaccgacatgtgggggcgcccgcgggtccggttgagcggtgacatcgccaagcacctggccgacgtgacgattcacgtgtcgctgacgcacgagaaagacaccgccgccgcggtggcgatcctggagactcct

SEQ ID NO: 25997 - DNA, 1017 bp, Mycobacterium avium
atgttggcgcagttcgggatgtccatacccctggtcgccgccccgatgtcgggcggaccgaccaccccggcgatggtgtcggcggccgcccgggcgggcgcgctgggcattctcgccgccggatacaaaacggtgcagggcatcgaggcggagatcaaagccgttcgcgccgagtcgatcccattcggggtcaacctgttcgcgcccaacccggtaccggtcgacccgcaacgctaccgggattaccacggcatcatccagcgggaagccgaccagttcggcctgacgctgccgccccaacccgtcgaggatgacgacgccttcgacgagaagatcgcgctgctgctcgacgatccggtgccgttggtgtcgttcaccttcggcatcccgccgcgcgaggttattgccgcgctgcggcgcgcggaaaccgttgtggcccagaccgttaccacggccgacgaggcggcgcaggcgcacgatgccggggtggacatgctcgtggtgcaggcgacggccgccggcgggcattcggccaccctgtcgccgcagcggccggtgccgtccgtcccgatcaccgatctggtccggcaggtcaccgcccgggtgccgctgcaggtgatcgccaccggcggactggccaccccggccgcggtggccgaggtgatccgggcgggcgcgcacgccgccgcggtcggcaccgtgctgttgcgggccaccgaaagcggcgcctcggccactcatcaagcggcactggccgatccggcgtacaccgagacggtgctgacgcgggccttcaccggccgcccggcgcgcggcctgcggaacgcgttcatcgacgcgcacgaggccggggctcccctgggctaccccgccatccaccacctgaccagcccgctgcgtaaggccgccgcggcggcggcgaggccagagtacgtgcacctgtgggcgggcagcggataccgtcatgcgaccgccgagccggccgccgatattctgcgccggctgacatccgccctg

SEQ ID NO: 25998 - DNA, 897 bp, Mycobacterium avium
atgactgaattccgttccggcttcgtgtgtttggtcgggcgccccaacaccgggaagtccacgctgaccaacgcgctggtcggcaccaaggtcgcgatcacctcgatgcggccccagaccacccggcacaccatccgcggcatcgtgcaccgcgacgacttccagatcattctggtggacacgccgggtctgcaccgtccccgcaccttgctgggcaagcggctcaacgacttggtgcgcgacacctacgccgaagtcgacgtgattgggctgtgcatcccggccgacgaggcgatcggcccgggagaccgctggatcgtcgagcagatccgcgcgaccgcgccgaagacgacgctggtcgccatcgtcaccaagatcgacaaggtacccaaggaccgggtggccgcgcagttggtcgcggtcagcgaattggtcggcgactcagccgagatcgttccggtctcggcggtgaccggggcgcaggtcgacatcgtgatcgacgtgctcgccgcggcgctgccgcccgggccggcctactaccccgacggggagctcaccgacgagcccgaggaggtgctgatggccgagctcatccgggaggccgccctcgagggtgttcgcgacgagctgccgcattcgctggcggtggtcatcgacgaggtcaatccgcgggaggaccgcgacgatctgatcgacgtgcacgcgctgctctacgtcgaacgcgacagccagaagggcatcatcatcggcaaagggggtgcgcggctgcgcgaagtcggcaccgccgcgcgcgcccagatcgagaagctgctcggcaccaaggtgtatctcgacctgcgcgtcaaggtcgccaagaactggcaaagcgatcccaaacagcttggcaggctgggcttt

SEQ ID NO: 25999 - DNA, 780 bp, Mycobacterium avium
atgcccaagcgggaaccgctcgcgccgatggccacgtcacagaataacggtgcggtgcggtcgccgaagacggccgagatcgtggcggacacgttgcggcggatgatcgtcgagggacagctcaaagacggcgacttccttccctacgaagccgaactcatggatcactttcaggtcagccggccgtcactgcgagaagcggtgcgagtcttggagtccgaccgcctcgtggaggtgcggcgcggctcacgcaccggcgcccgggttcgcgtcccgggccccgagatcgtcgcgcggccggcgggcttcctgctcgagatggcgggaacgacgctcgcggacgtgatgacggcacggatgggcattgaaccgtatgcggcccggctgctcgcagaggatggcaccgctgcggcccaccgcgagttacgcgaactcatcgaggagatccccgctgcatgggagaccggcaagctgggcgcggcgtccaccgcattgcaccgccggctagtcgaactgtcgggcaacgcgacactgaccgtgatcgtcggcatgctgcacgaaatcttcgaaaggcacatgaccgcagcatttctcagcgttcagaacgtcgtgcccaaggctcagtacaacaagctgatgcggtcctacacccgactcgccgacttggtggccgcccgggacggcgccgaggccgaggcgcattggcggcgacacatggagaacgccagcgctgagctactcaagggccacgagaagacgaaggtccgagacatcatgcac

SEQ ID NO: 26000 - DNA, 738 bp, Mycobacterium avium
atggaggtcaccagtcttcgagaaccgaagatggccgatcgggtggccacggtgctgcggcggatgtttatccgcggcgagatcaccgaaggcaccatgttgccgccggaatcggagctgatggagcgtttcggcgtgtcccggccaacactgcgggaagcgttccgcgtgctcgaatcggagtcgctgattcaggttcagcgtggggtacgcggcggggcccgcgtcacccgcccccggcgcgaaacactcgcccgctacgccggcttgatcctcgaatacgaaggcgtcacggtgaaggacgtctacgacgcacgagtaacgctcgaggttccgatggtcgagcagttggccaaggaccgcaatcccaaggtgatcgccgaactcgagcagatcgtcgaacgcgaatcgcagctgaatcccggcagcgaagccgtcgatcagctcaccgacttccacgcggcaatcgcgcggttgtccggcaacagcaccctgcaaatcgtcagcgacatgctgcatcacatcatcgagaaggccaaccggtcgctgcagcccaccaagggcacgcgcgccgagcaggcggtccgccgctcggcgaaaacccaccggatggtgctggacatgatcaaggaaggcgacgccgagaaggcgggcgagctctggaagcgccatctgcagaaggcagaggagttcgtcctgaccggggccgaattgtccactgtcgtagaccttctcgaa

SEQ ID NO: 26001 - DNA, 8649 bp, Mycobacterium avium
gtgggggtggttgaggaggttttggcgggggtttttggtcaggtgttgggggtggggcgggttggggttgaggattcgttttttgatttggggggtgattcgctgtcggcgatgcggttgatcgcggcggtcaatggtgtgttgggtgctggggtttcggtgcgtacgttgtttgaggcgcctacggttgcgcagttggcgcctcgggtgcgcggtggtggccgcacgcttgctcgggtggtggcgggtgagcggccggcggtggttccgttgtcgtttgcccagtcccggttgtggttcctcgaccaactgcagggtccctcacccatgtacaacatggcggcggcgctgaagttacaggggccgcttgatgtttcggtgctgcgcgccgcgctggccgacgtgatcgcccggcacgagagcctgcgtaccgtgttcgccgtctccgacggcacaccgcaccaggtcgtgattcccgccgaacaagccgacatcggctgggacgtggttgacaccgccggctggtcgccggcacggatgaaggaggccatcgatgccgcggcaggtcatgcctttgatctctccaccgaaataccattgcgtgcaacgcttttccggaacagcctggacgagcatgtgctggtggcggtggcccatcatattgctgcggatggttcgtcgctgaatcctttgctgcgcgacctgaccgccgcctacaccgcccgctgcgccgggcgggttccggattgggtgccgttgccggtgcagtacatcgattacgcgctgtggcagcgggcgcagttcggtgatctcgaggacccggacagtccgatcgcggggcagttgcgttattggcaggaggcgttggccgggttgcccgagcggttggcgttgccgacggatcggccgtatccggcggtggctgatcatcgtggggctcgggtggacatcgactggccggcgtcgctgcagcagcaggtatcggccctggcccgggtgcataacgcgaccagtttcatggtggtgcaggccggcttggcggtgctgctggccaagctcggtgcgagttgtgatgtggcggtgggttttccgattgccgggcgtggtgacccggctcttgatgacctggtcgggttcttcgtcaacaccctggtgctgcgcgtcgatttgtccggtgatcccaccgtcggcgaaatcctggcccgggtgcgccaacgcagcctggccgcctacgaacaccaggacgtgcccttcgaaatcctggtcgagcggctcaaccccacccgatcgctggcccaccacccactgattcaggtgatgttgacctggcgcggcgacgatccgacgcggctgcgcctgggcgagctggaggtcgcggcgctgccgatcgacatcggcaccgctcgaatggatctgaccttctccctgtgcgaacgctggaccgaggagggccggcccgccggcatcgccggaacggtggaattccgcaccgacgtcttcgacgcggacaccatccgcaccctcaccgagcggctgcgccgggtgctcgacgtcctgaccgccgacccgggccggcacctctcgtcgatcgaggtgctcgaggacaccgagtttgcccggctcgacatattcggcaaccgcgcggcgctgggccggtcaacgacgggcgcctcggtgcccgcgctgttcggcgcctgggcgcagcgggtgccgggggcggtggcgatcagcagcgcggaccgctgctggacctatcgggaggtcgacgagacagcgaatcggctggcgcacttgctgattcagcacggcgtggaccgggggcagtacgtggggttgctgctggaccgttccgccgaggcggtcgtcgcgatcctgggggtactgaaggcgggcgcggcgtacgtgccgatggatccggcggtgccggcggcgcggatagccttcatcgtcgccgacgccgatctgcgggtggtggtgaccgatgcgggatcgcgctcccggctgaccgggctcggcgcggcgatcgtcgacctcgacgatccggcgttggcggactacccggccaccgaaccggccggcccgggcccggccgccggcgacatcgcccacgtgatctacacctcgggcaccaccggcgaacccaagggagtggccgtcagccaccgcaacatcacccaactgttcgcgtcgctggacaccggcatcaccctgggaccggatcaggtgtggagccagtgccattcgctggcattcgacttctcggtgtgggagatctgggccgcgctgctgcacggcgggcggctcgtggtggtgtccgacgcggtggcccgctcaccggatgacctgcggcgcttgctgattcgcgagcgcgtcacggtgttgacgcagacgccgtcggcggccggggcactgtcgccgcaggggctggactcggtcgccctggtgatcggggcggagccgtgcccgcccgagttggtggaccgctgggcgccggaccgggtgatgatcaacgtctacgggccgaccgagaccaccatgtgggtgtcgcacagtaggccgttggcggcgggctcgggcgcaccgccgatcgggtcgccggtggccggggcatcgtttttcgtgttggacccctggttatgcccggccccggtgggggtcacgggggagctgtatgtggcgggcgccggggtgggcgccggctatgtgggccgcgcggccttgacggcgtcgcggtttgtcgcctgcccgttcggtggtaccggcacccgcatgtaccgcaccggcgacctggtccgctggggtgccgacgggcagctgcactacgtgggccgggccgacgagcaggtcaagattcgcgggtatcgcatcgagctcggcgaaatccgttccgcgctcaccgatctcgacggcgtcgagcaggctgcggtgatcgcccgagaggacagccccggtcacaaacgcctggtcgcctacctcaccgggaccgccgaccccgcgcaggtccgcacccagctggccgaccggctgcccggctacatgctgccgtcggcggtgctggcgctcgacgcgctgccgctgacggtcaacggcaagctggacacccgcgccctgcccgcccccgagctccgcgccgaaaaccgttaccgcgcaccgcaaaaccccaccgaggaaagcctggccgacgtctacgcccgcctcctcggactggaacgggtaggggtcgacgattccttcttcgaactcggcggcgactcgctgtcggccatgcggctgatcaccgcggtcaacgccgagttggacgccgacctgaccgtccgcgccctgttcgaggcacccaccgtcgcccaactggcgccccgcgtcgcggccggcaccggcagggccgggcgattggtggccgcggaacgcccggcggtgctgccgctgtcgttcgcccaatcccggctgtggttcatcgaccagttgcacggcccgtcgcccgtgtacaacatggcggtcgcattgaacctgcgcgggccgctggacacggacgcgctgggcgccgccctgggcgacgtggtggcccgccacgagagcctgcgtaccctgttcccggcgcccgacggggcaccccgacaagtggtgctcgaggccgaacgcgccgaggtcgattggcaggtcgtcgacgcggcgcggtggccggcgtcctggctggcggaggccacccacgaggcagcgcgctacaccttcgacctggccaccgagatccccttgcgcgcatggcttttccggcgcaaccacgacgagcacgtgctggtggcggtggtccaccacatcgccgcggacggatggtcgctgaccccgctggtgcgcgacctgggcgccgcgtatgccagccggtgccgcgggcggcccccggactgggcgccgctgccggtgcagtacgccgactacacgctgtggcagcgagcgcaattcggtgacctcgacgaccccgacagcccgatcgccacccaactgcagtactggcagcgagccctggccgggatgccggaacgcgtcgcgctgcccaccgatcggccctacccgctggtcgccgaccatctcggcgcgagcgtgcaggtacactggccggccgaactgcagcagcacatcgcccagctggcccggacgcacaacgccaccagcttcatggtggtgcaggccgccctggcggtgctgctgtccaccctgagtgcgaatcccgatgtggccgttggtttcccgatcgccggccggcgcgaccccgcgctggacgacgtggtcgggtttttcgtcaacaccctggtgctgcgcgtcgacctggccgacgaccccagtatcgccgagctgctgggccaggtgcgccaccgcagcctgcaggcctacgaaaaccaggacgtgcccttcgagctactggtggaacggctgaaccccacccgcagcctcgcccaccatccgctggtccaggtgatgctggcctggcagaacaacgacccggtcgatgtgagcctgggcgacgtgcacgtcacgccgatgccgctggaaaaccaggtcgcccgaatggatctggtgtggtcgctggccgaacgctggacagcggacggccggcccgacggcatcgacggcacggtggagttccgcaccgacgtcttcgacgcggccagcatcgaaacactcgtgcgccgcttgcagcgggtgttgctcgccatgaccgccgatcccgcccggccggtgtcgtcgatcgacatcctcgacgaaccggagtacgcccacctcgacgcgctcggcaaccgtgccgcgctgacccgaccggcgaccgggtgggtgtcgatttcgcagctgttcgccgcccaggtggcgcgcacccccgaggcggtggcgatcagctgcggcgagcggtcctggacctaccgcgaactcgactcgtcggcaaaccggctggcgcgcgtgctggccggccggggcgcccgcccgggcgagcgggtcgccgtgctggtcccgcggtccgccggcgcggtggtgtccatcctggcggtgctcaagaccggcgccgcgtacgtcccgatcgaccccggattgccctcggcgcgaatcgatttcatgctcgccgacgccgtgcccgtcgtcacggtcaccaccgccgaactgcgcgcttcggccggcgacccagatcgggtcgtcgccatcgacgaccctgccccgcacgtcccgcgcatcggcgggcgggcggccccggcgccggatgacatcgcctacgtcatctacacctccggcaccaccggcgttcccaagggggtcgcggtcactcaccacaacgtcacccagctgcttggctcgctggacgaccgattgggcctcggccgggtatggagccagtgccattcgctggcgttcgacttctcggtgtgggagatcttcggcgcgctgctgcgcggcgggcggctggtcatcgtgcccgacgacgtcgtccggtcgccggaagacctgcacgccttgctgatcggcgagggcgtcaccgtgctgagccagaccccgtcggcggcggcggcgttgtcgccggaacggctggaatcggtggcgctggtgctcggcggtgaggcctgcccggtcgagctgatggaccgctgggcgcccggccggctgatggtcaaccagtacgggcccaccgagaccacgctgtacgcgacgatgaccacgccgctgcgtgcgggcggcgccgcggtgccgatcggctcgccggtgcccggggcggcgctgttcgtgctggacggccggctgcgccgggtgccgcccggcgtggtgggcgagctgtacgtggccggccgcggtgtggccgccggctatctcggccgcgcggccttgacggcgtcgcggtttgtcgcctgcccgttcggtggtaccggcacccgcatgtaccgcaccggcgacctggcgcgctggggtgccgacgggcagctgcactacgtgggccgggccgacgagcaggtcaagattcgcgggttccgcatcgagctcggcgaaatccgttccgtgctggccggtttggacggggtggagcaggccgcggtgatcgcccgcgacgacggcgccgggcacccgcgactggtggcctacatcaccggcaccgcggacccggccgagctgcgcgcgcagctggccgaccgactgcccggctacatggtgccctcggcggtggtggtgctggacgcgctgccgctgaccggcaacggcaagctggacacccgcgccctgcccgcacccgactacgccggcggccgttaccgggccccgggcgacgcgatcgaggagatcctggccggcatctacgcccaggtgctgggcgtggagcgggtcggggtggacgactcgttcttcgacctgggcggcgacagcatcctgtccatgcaggtggtggcacgggcccgggccgccggcgtgatgtgcacggcccgagacgttttcgtcgaacagacggtggcccggctggcccgggtcgtcaccgtggccgccgccgacggcgagttgggcgcggccgacgaggggatcgggccggtgcagcccaccccgatcatgcgctggctgcaggacatcgacggcccgatcgacgagttcaaccagaccatggtgctggccgccccggcgggggtgagccaatccgacgtggcggtggtgctgcaggcgctgctggatcggcatccgatgctgcggctgtgcctcgacgacgacggcgccggcggctgggacctgcacgtgccgccccccggttcggttgacgcccgccccatcctgcgcaccgtcgatgtgctctccgaggccgcgctggcccgggcccgggcccggctgaaccccggcgccggcctgatgctgtccgcggtatgggcaagcgagacaagccaattggcgttggttgttcatcacctggcggttgatggggtgtcgtggcggacgttgatcgaggacatcaacatcgcctgggcgcagcatcacagcggtcaggagatcgcgttgccggtgccgggcacgtcgtttgcgcggtggtcgtcgattctggccgagtacgccaagagtccggcggtggtggctgcggcggcggcgtggcagcaggtggtggccacgccggcggtgttgccggcggtggggcccgatgacacgtatgcgtcggcggggcagttgtcggcgtcgctggatgtgcagaccacccggttgttgttgggggaggtgccggcggcgtttcacgctggggtgcaagacattttgttgattgcgttcgggttggcctgcacggagttcgtgggtggtggcgcgccgatcggtatcgacgtggagggtcacgggcggcacgaggagatcgcctcgggggtggatctgtctcgtacggtgggctggttcaccacgaaatatcctgtggcactgaggatgagccggcgtctggattgggcgcgggtggtggcgggggaggccgcgctgggcgcggtgatcaaggatgccaaggagcagttgcgggcgctgcccgacggcctgagctacgggttgctgcgctacttgaaccccgagatcgaggtgcaggggccggatccggtgatcggattcaactacctgggccggctcggcggcgcggccgccgacctgtccgacgagcactggcgcctcagccccgacagtccctcggtgagcgccgcggccgcggcgatcccactgccgttgggacataccgtcgaactcaacgccggcaccatggacaccgacgccggcccgcagttgcacgccaactggacctgggcgcgctccgtgctcaccgacgagcagctaaaccggttgagccggttgtggttcgaggcgctgaccggcatctgcgcgcacgtgcaggccggcggcggcgggctgacgccgtccgacatcgcgcccacccgcctcgaccaaggccggatcgagcagctggaacggcgctacgacgtcgccgacatcctgccgctgaccccgctgcagcaggggctgctgttccacgcgaccggaagccatgccgagggcgacgtctacgcggtgcagctgagcgtcacgctgcgcggcgccctcgacccgcaccggctacaccgcgccctgcacaccgtcgtcacccgccacccgaacctggccgcccgcttctgccccgagctcggcgagccggtgcagatcattcccgccgaacccgaaatagcttggcgctacctcgaactcgacgccagcgacgtcgacgaacagctcgagcagctgtccgcggacgaacgcgccgcggtgcgagagctcggcgaccgcccgccgtttggcgccgcgctgatccgcaccgcggacacggaacaccggttcgtgctcaccgtccaccacctggtgatggacggttggtcgctgccggtgctgctgcaggaaatcttcgcctgctactacggtgcccggctgccggcgccggcgccgtaccgcggcttcgtcacctggctggcggcccgcgacgtgccggccgcccgcgccgcatggcgcgcggtgctcgacggtttcgacacccccaccctggtggccccgcggggtgccgacgcgcccgggcggcgcggggtcgcctcgttccggatggcggccgaaaccaccagcgcgggtaagcgaagtcgcacgccgccgccg

SEQ ID NO: 26002 - DNA, 591 bp, Mycobacterium avium
ttgcggttgctgccagagggcgcccggatccagtacgggcccggccagctcggcaccgcactgctgcgacgggcacaggtgccgttgcacatcgacaccggcctactcaccgacgccgtcgtcgacctcgaccggcgcggcctgttggcgggcaccccgtcggcgacgtatctgctgggcagcgacgcgctctacgactgggccgacgggcgccggatcctgcgcggactcgactacacccacgacctcacccggctgtcgcgcggtgcaccgctggtcgcggtgaacaccgccatcgagatcgaccaatacgggcaggtcaatgtcgaaggcgtgcgcgacaaggtggttggtggtatcggcggacatcccgactattgcgccgccgcccgagtgagtagcggcggactgtcgatcatcgccgttccgacgcgggtgaacgggcgctcacccctggtcgagcagctcagcaggcccacttccacccccgcccacgacgtcgacctgatcgtcaccgaggccgggtacgtcgacttgcgcgcggcagactggccgcagcgccgcacactgatagccgaattattcacggaa

SEQ ID NO: 26003 - DNA, 615 bp, Mycobacterium avium
atgcctccaacaccatgggaccccgagaccacggccgttgtctgtgtggaatgccagaacggtgtgctgggccccgagtccgtcttgcccgctttggccgccgacagctctgaactcgtctccagtgtgcgccgacttctcgattccgcccgccagttcggcgcacgggttgtgcacgcgacctacgagggcaacctcggcggccggccgaccgggacggcgcgcatctggcgggccctgggccccgcaaccgctcactgggcccccggaaccgcctccactacagtgcttcccgagctactggcacccaccgatctggtgttaccgcgccaccacggccttttcccaacgctcgattccgaactactgcccgtgctcaaaggcttcggtgtgagcaccatcgtccttgccggcgtttcgctgaacctggcgatcacccacactgccgggcatgttacgcaggccggtttcgaactcgtcgtcccgcgcgacgccgtcggcggcacccccaaggactatgcagaacaggtgctggacaacactattgccgtgctgggtcggctgaccacgatcgataagctcatcgacgaatggacatcggtcaggtctgaccgt

SEQ ID NO: 26004 - DNA, 1887 bp, Mycobacterium avium
gtgccatttcgcaacgtcgccatcgtcgcccacgtcgaccacggcaagaccaccctggtggacgcgatgctgcggcagtccggggcgctgcaccaccgcggcgacgacacccaggagcgcatcctggacagcggtgacctggagaaggaaaagggcatcaccatcctggccaagaacaccgccgtgcaccgccaccaccccgacggcagcgtcacggtcatcaacgtcatcgacacccccgggcacgccgacttcggcggcgaggtggagcgcgggctgtccatggtggacggggtgctgctgctggtcgacgcctcggaggggccgctgccgcagacccggttcgtgctgcgcaaggcgctggccgcgcacctgccggtgatcctggtggtcaacaagaccgaccggccggacgcccggatcgccgaggtggtggaggccagccacgacctgctgctcgacgtcgcctccgacctggacgacgaggccgccaaggccgccgagcacgcgctgggcctgccgacgctgtacgcctccggccgcgccggcgttgcgagcaccgagcaaccggccgacggcgaggtgcccgccggggagaacctcgacccgctgttcgacgtgctgctcgagcacatcccggcgccgtcgggcgacccggaggcgccgctgcaggcgctggtgaccaacctcgacgcgtcgaccttcctgggccggctcgccctgatccgcatctacaacggcaaactgtgcaagggccaacaggtggcctggatgcgcgaggtcgacgggctgccggtgatcaccagcgccaagatcaccgaactgctggccaccgagggcgtcgagcgcagccccaccgacgaggcgatcgccggcgacatcgtcgcggtggccgggctgcccgagatcatgatcggcgacaccctggccgaccccgaccacgcccacgcgctgccccggatcaccgtcgacgagccggcgatctcggtgaccatcggcaccaacacctcgccgctggccggcaaggtgcccggccacaaactgaccgcccggctggtccgcaaccggctggaccaggagctggtcggcaacgtgagcatccgggtcgtcgacatcggccggcccgacgcctgggaggtgcagggccgcggcgagctcgccctggccgtgctggtcgaacagatgcgccgggagggcttcgagctcaccgtcggcaagccgcaggtggtgacccgcaccatcgacggccagctgcacgagccgttcgaggcgatgacgatcgactgccccgaggagttcgtcggcgccatcacccagctgatggccgcccgcaagggccgcatggaggagatgaccaaccacgcggcgggctgggtccgcatggacttcatcgtgcccagccgcgggctgatcggcttccgcaccgacttcctcaccatcacccgcggcaccggcatcgccaacgccgtgttcgacggctaccggccgtgggcgggggagatccgggcccgccacaccgggtcgctggtctccgaccgcgccggcaccatcacgccgttcgccatgatccagctcgccgaccgcggccagttcttcgtcgaacccggccaggacacctacgagggcatggtcgtcggaatcaacccgcgcgcagaggatctcgacatcaacgtcacccgggagaagaagctgaccaacatgcggtcctcgaccgccgatgtcatcgagacgctggccaagccgctcgagctggacctggagcaggccatggaattctgcgcggccgacgaatgcgtcgaggtgactccggagatcgtgcgggtgcgcaaggtcgagctggacgccacctcgcgggcgcgcagccgggcccgcgccaaggcccggggc

SEQ ID NO: 26005 - DNA, 1488 bp, Mycobacterium avium
ttggctgacacgcgccgggtctggtcgctacggctgcggctgctggtcggacagatcgtcgtgctggcgctggtgtgtctgggcatcaccgcggtcaccgaactggcgctgaaccatcacctggtcaagcagctcgacggccaactcgccggaacctcgttccgttcggcgctgatgtaccccgagcccaaccatccgcgtcacgagcactcgccgtatccgaggccgggtcccggcccgcggttcctggacgccccggggcagccggcgggcatggtcgccgcggtggtcagccacggcaagaccgtcgacgccggctacctgaccagcagcggcacccgggacgcgctgacgtcgaccgcccagacccaactcgaacagatcgccggcagccgcgcaccggtcaccgtgaacctggacggtctgggccgctaccgcgtcgtcgccgcccccagccgcaacggcagcgacatcatcgtcaccggcctgtcgatggccaacatcgacgccaccctgatccggatgctggtcatcttcgggatcgtcaccgtgatcgcgctggcggccgccaccatcgccggggtggtgatcatcaggcgggcactggcgccgttgcgccgggtggcacaaaccgcgcgcgaggtggccgacctgccgctggcccgcggcgaggtcgaattgccggtgcgggtaagggaatcggacgccaacccgtccaccgaggtgggccagctcggcgccgcgctcaaccggatgctcgaccacatcgccgacgcgctgtcggcgcgccaggccagcgagacccgggtacgccagttcgtcgccgacgccagtcacgaactgcgcaccccgctggccgcgatccgcggctacaccgagctgacccagcgcatgggcgacgaccgcgaggcggtggcgcaggcgatgagccgggtggcctcggagaccgagcggatgacccggctggtcgaggacctgctgctgctggcgcggctggattccggccgcccgctggagcgcgaaccggtcgacctgtcccggctggcggtggacgcggtcaacgacgcccacgtcgccggccccgaccatcagtgggaactggacctgcccgaggaaccggtggtgatcaccggggacgcggcgcggctgcaccaggtgctgaccaacctgctcgccaacgcgcgggtgcacaccggcgcgggcaccgtggtgaccacccggctgagcaccgagccggcgcacaccgtgctgcaggtcatcgacaacgggccgggcattccggcggagctgcagtcggaggtgttcgaacggttcgcccgcggcgactcctcgcggtcgcgcaagggtggcagcaccgggctgggcctggccattgtgtcggcggtggtcaaggcgcacaacgggacgatctcggtgaacagctcgccgggccacaccgagttcacggtgcggttgccacccaacggatggcaaccgcacgcgtcggcg

SEQ ID NO: 26006 - DNA, 1131 bp, Mycobacterium avium
atgatccttcccgcagtcaccgccggcgccgagctgccggatctccccgtcgatgtggtggagcggatccgcatcgccacgatcgactcgcagtcggagggcactcgccgcgcatacagctcggcctggcgacggttcgagggctggtgccggcgcaacgggtacgagtcgttgcccgcgcacccgacggtgatcgccgcctacctcgtcgacgccgccgagacagtcaccgagaacggcgagcgcgcgtactccactgtgagcctcgggaagtggtgcgcggcgatcttcgaccgacaccgccgcgcgggcgtggaaccgaacccggcggcacacgagttggtgcgccagaccgcatctgggatccggaggcagtacgcggcgcgtggtgaccgcccacggcagccccggactccgctgctcaccgacgacgtgatgctgctggtctccacggcgcgggagcaggcaacgggctgggcgtcgcaggtgtgcgagcgacgagacagcgccctgctcctgatggggttcgcgggcgccttccgccgcagcgaactcagcgggctcaccggcggcgatgttgagcttcacgcggcggacggcatccacgtacacctgaggaagtcgaagaccgatcaactcggcgagggcggcacataccccctgccgcgaacgaaggacgcgctgcgctgccctgcgtgcgcgtatgtgcgctgggccgcagtggtctccgcgcacgaggacggcggcaatggcgcggtgatccgactgctcaccgactctcccgagttcggaagccggcacacgtgccggtcgcgcgcaccgaagatcgaccgccgcgcgccactgttccgatcctgccgtaacggggtgctgtcggagggtccgctgtcaggtgccggtatccacgcggtgatccgccggcgggcgctgcgggcaggcttcgatcgtgaggccgtcgagcgcctgggtggccactcgctgcgggcggggttcgtgacgcaggccgcgcgggccggcgccgatcaccacgcgatcatgcgtcagacaggtcaccgcaccccggcgatggtcacccggtacgtccgggagtcagcaccgctgatcggcaatgcggtcaccgtgctcggactc

SEQ ID NO: 26007 - DNA, 1071 bp, Mycobacterium avium
atgacgcagccggttcagaccatcgacgtgctgctggccgaacacgccgacctggaacgccggctgtccgaccccgacctgcacagcaatcccgacgaggcccgcaaggccgggcggcggttcgcccggctcgccccgatcgtcggcacctaccgcaagctgatggccgcccgagaggacctcgagaccgcgcgcgaactggccgccgacgacgattcgttcaccgccgaggtcgccgacctggaatcccgggtggcccagttggacacccagctgaccgacatgctggccccgcgcgactcgcacgacgccgacgacatcgtgctcgaggtcaaatccggtgaaggcggcgaagagtcggcgttgttcgccgccgacctggcccggatgtacatccgctacgccgagcggcacggctggacggtcacggtgctggacgagatcacctcggacctgggcggttacaaggacgcgacgctgtccatccgcagcaagggcgacagcgccgacggcgtgtggtcgcggatgaagttcgagggcggggtgcaccgggtgcagcgcgtcccggtcacggaatcccaaggccgcgtgcacacttcggcggcgggtgtgctcgtctatcccgaacccgaagaggtcgccgaggtgcagatcgacgagtccgatctgcgcatcgatgtgttccgctcgtcgggcaagggcgggcagggcgtcaacaccacggactccgcggtgcggatcacccacctgcccaccggcgtcgtggtcacctgccagaacgagcgttcgcagctgcagaacaaggcccgcgcgctgcaggtgctggcggcccggctgcaggccatggccgaggagcaggcctcggccgaggcgtcggccgatcgggccagccagattcgcaccgtggaccgcagcgaacgcattcgcacctacaactttccggagaaccggattaccgaccaccgcatcggcttcaaggcgcacaacctcgaccaggtgctcgacggcgacctggatgcgttgttcgacgcgctggccgccgccgacaagcagtcgcggttgcagcaggca

SEQ ID NO: 26008 - DNA, 936 bp, Mycobacterium avium
atgagcagcgggacgatccggctcagcctgcggcgcgcgatcgacgacgcgacggccaccctcgccgaagccggaatcgcttccgcgcgttgggatgccgagcagctggccgcgcacctggcgggcgtcgaccgaggccggctgggcttgctcgagtcgccgggtcaagagttcttccagcggtaccgtgacgcggtgttggcccgcgcccggcgggtgccgttgcagcatttgttggggacggcggccttcggtccggtcctgctgcacgtcggaccaggggtcttcgtcccgcgtcccgaaaccgaggcgctgctggaatgggccaccgcgcaacaacttccaccgcggcccgtcatcgtcgacctgtgcaccgggtcgggcgccctggcggtagcgttggctcaccatcgcgccggccggggcctgccggcgcgcatcgtcggcgtcgacaattccgatgcggccctggaatatgcgcgccgcaatgccgcgggcacgacggtcgagctggtgcgcgccgacgtcatcgagctggcccgtgtgcccggctcggcgcccgacctggacggtcgggtggatctggtcgtggccaacccgccctatgttcccgacggtgccgtgctggaacccgaagtcgcccagcacgatccgcaccacgcggtgttcggcgggcccgacggcctggcggtgatcgcccccgtcgtcgaactggccggccggtggctgcggccgggcggactgatcggcatcgagcacgacgacaccacctcgcaccagaccgtcgaattgttcgaccgcaccgggcttttcgacgacgtgcgggcgcaccgggacctgaccggccggccacggttcgtgaccgcccgcaggaggagcggcgctgatgtctcgcgtcgcgacgatgcagagcgcagcgatgaggaggagcggcgc

SEQ ID NO: 26009 - DNA, 1221 bp, Mycobacterium avium
ttgtccagtacggtctcgttggtgtccagcgacgtaaccgaccttgccggtggtttgctcgccctttccgaccgcggcgccggcgttccgctgcgcgagctggcactggtggggctgaccgcggccatcatcacctacttcgcgaccgggccggtgcgggtgctggccacccggctgggcgcggtcgcctatccgcgcgagcgcgacgtgcacgtgacgcccaccccgcggatgggcggcctggccatgtttctcggtgtcgtctgcgccgtcttcctggcctcgcagctgccggcgctcacccgcgggttcgtctactccagcggcatgcccgccgtcctggtggccggcgctgtcatcatgggcatcggcctgatcgacgatcgctggggcctggacgcgctgaccaagttcgccggtcagatcaccgcggccagcgtgctggtcaccatgggcgtggcgtggagcgtgctgtacatcccgatcggcggcgtcggcaccatcgtgctggaccaggcctcgtcgatcctgctgaccctggcgctgacggtgtcggtggtcaacgcgatgaacttcgtcgacgggctcgacggtctggccgccgggctgggtctcatcaccgccctggcgatctgcatgttctccgtcgggctgctgcgcgaccacggcggcgacgtgctgttctacccgcccgccgtgatctcggtggtgctggccggggcgtgcctgggcttcctgccgcacaacttccatcgcgccaagatcttcatgggcgactccggctccatgctgatcgggttgatgctggccgcggcgtcgacgacggcggccggcccggtctcgcagaacgcctacggcgcgcgcgacgtcttcgcactgctctcgccgttcctgctggtcgcggcggtcatcttcgtgccgatgctggatttgctgctggccatcgtgcggcgcacccgggcgggccgcagcgcgttcagccccgacaagatgcacctgcatcaccggttgctgcagatcggccattcgcaccgccgggtggtgttgctgatctacctgtgggtcggcatcgtggcgttcggcgcggcgagcaccattttcttccgcccccgcgacaccgcggcggtgatgctgggcgccatcgtggtcgccgggatcgcgacggccataccgctgttacgccgcggcgacgactacgaagacgaagagtacgacaggcag

SEQ ID NO: 26010 - DNA, 756 bp, Mycobacterium avium
atgcctgagacgacgttcctggccgaatccgccatcgaggtcggcgaacacaaccacgccacctggttgggcatgaccgtcaacaccgacacgattctgtcgaccgggatcgccgcgctgatcgtcctcgcgctggcattcttcctgcgcgcgaagatcacctccaccggcgtgcccagcggcgtccagttgttctgggaggccatcacggtccagatgcgcgatcagatcgagagcgcggtcggcatgcggatcgcgccgttcgtgttgccgctggccgtcaccatcttcgtgttcatcctgatctccaactggctgtcggtgcttccgctgcagtacacggacaagtccgggcacaccaccgagctgctgaagtcggcggccgcggacatcaattacgttctggcgctggctcttttcgtcttcgtctgctaccacgtggccggcatctggcgtcgcggcgtcgtcgggcacccgctggccgtgctcaagggtcacgtggcgttcctggcgccgatcaacgtcgtcgaggagttggccaagccaatctcgttgtcgctgcgacttttcggcaacatcttcgccggcggcatcctggtcgcgctgatcgcgctgttcccgccctacatcatgtgggcccccaacgcgatctggaaagccttcgacctgttcgtcggcgcgattcaggccttcatcttctcgatcctgaccatcctgtacttcagccaggccatggagatcgaggaacaccatgac

SEQ ID NO: 26011 - DNA, 592 bp, Mycobacterium avium
  misc_feature (567)..(567): n=g, a, t or c
gtggccgagcgattcgtggtgaccggcggcaaccggttgtccggcgaagtcgcagtggggggcgccaagaacagcgtgctcaagctgatggccgcgaccctgctggccgagggcaccagcaccatcaccaactgccccgacatcctggatgtgccgctgatggccgaggtgctgcgcggcctgggcgccaccgtcgaactcgacggcgacgtcgcccgcatcacctctcccgacgagccgaaatacgacgccgacttcgccgcggtgcgacagttccgggcctcggtgtgcgtgctggggccgctggtcggccggtgcaagcgcgcccgggtcgcgctgcccggtggcgatgccatcgggtcgcgcccgctggacatgcatcaggccggcctgcgccagctgggcgccacctgcaacatcgagcacggatgcgtggtggcgcaggcggatacgttgcgcggcgcggagattcagctggagttcccgtcggtgggggcgaccgagaacatcctgatggcggcggtggtggccgagggcgtcaccaccattcacaacgcggcccgcganaccgacgtggtggatctgtgcacga

SEQ ID NO: 26012 - DNA, 252 bp, Mycobacterium avium
atggctctggacccccaagtcgctgccgctgcgctcatcggcggtggactcatcatgggcggcggcgcgatcggtgccggtatcggtgacggtatcgccggtaacgcgctggtttccggtatcgcccggcaacccgaggcgcaaggccggttgtttacgccgttcttcatcaccgtcggtctggtcgaggcggcgtacttcatcaacctggcgttcatggcgctgttcgtcttcgccacacccgtcggcacc

SEQ ID NO: 26013 - DNA, 534 bp, Mycobacterium avium
gtgatgggtgacgcgagcctgagcgtgctggcatccagccaggtggtggccgagggaggcaacaacttcctcgtacccaacggcaccttcttcttcgtgctggccatcttcctgatcgtgctggccgtcatcggcaccttcgtggtgccgccggtgatgaaggtgttgcgcgagcgcgacgccatggtcgccaagacggccgccgacaaccggaaggcggccgagcagttcgaggccgcccaggccgattacgaagaagccatgaccgaagcccgggtgcaggcgtcgtcgttacgcgacaacgcccgcgccgagggccgtaaggtcgtggaggacgcgcgggccaaggccgagcaagaggtgctgtcgacgctgcagctggccgcccggcagctgaagcgggaaagagacgccgtggaactggatctgcgtgccaatgtggcgtccatgtcggcgaccctggccagccgaatcctcggtgtcgacgtcgcccccgccgccgcgaccacatccgcaaccaagacatccggacgg

SEQ ID NO: 26014 - DNA, 1662 bp, Mycobacterium avium
atggccgagttgacaatctccgctgatgacattcagagcgccatcgaggagtacgtaggctctttcacctccgacacctcccgcgaagaggtcggtaccgtcgtcgacgccggtgacggcatcgcccacgtcgaaggcctgccgtccgtgatgacccaggagctgctcgagttccccggcggcgtgctcggcgtggcgctcaacttggacgagcacagcgtcggcgcggtgatcctgggtgacttcgagaagatcgaggaaggccagcaggtcaagcgcaccggcgaggtgctctcggttccggtgggcgacgccttcctgggccgtgtggtcaatccgctgggccagccgatcgacggccagggcgacatcgagaccgacattcggcgggcactggagatccaggcgccctcggtggtgcagcggcagagcgtgaaagagccgctgcagaccggcatcaaggccatcgacgcgatgaccccgatcggccgtggccagcgccagctgatcatcggcgaccgcaagaccggcaagaccgccgtctgcgtggacaccatcctcaaccagcggcagaactgggagagcggcgacgagaagaagcaggtgcgctgcgtctacgtggccatcggccagaagggcaccacgatcgcgtcggtccggcgcgccctggaagagggcggggcgatggactacaccaccatcgtcgcggcgccggcctccgactccgccgggttcaaatggcttgcgccctacaccggttcggcgatcgcccagcactggatgtacgacggcaagcacgtgctgatcgtcttcgacgacctgagcaagcaagccgaggcctaccgcgcgatctcgctgctgctgcgccgcccgccgggccgcgaagcctacccgggtgacgtgttctatttgcactcacggcttttggagcgctgcgccaagctttccgacgaactcggtggcggctcgatgaccggtctgccgatcatcgagaccaaggccaacgacatctcggcctacatccccaccaacgtcatctcgatcaccgacgggcagtgcttcctggagtccgacctgttcaaccagggcgttcggccggccatcaacgtcggcgtctcggtgtcccgggtcggtggcgccgcgcagatcaaggcgatgaaggaggtggcgggcagcctgcggctggacctgtcgcaattccgtgagctggaagccttcgccgcgttcgcctccgacctggacgcgacgtcgaaggcccagctggaccgcggcgcgcggctggtggagctgctcaagcaaccgcagtaccagccgatgcccgttgaggagcaagtggtttcgatcttcctcggcaccggcggtcacctcgactcggtgccggtggaggacgtccggcggttcgaaaccgaactgctggaccacatgcgggcctccgaggacaagatcctcgccgggatccgcgacacccagaagctctccgacgaggccgccgaggagctggagaaggtgatcaacaacttcaagaagggcttcgccgccaccggcggcgcctcggtggtgcccgacgagcacgtcgaggcgctcgacgaggaggagctggaaaaggaatcggtgaaggtgaagaagccggcgccggaaaagaaggcaaagaaagagcagaag

SEQ ID NO: 26015 - DNA, 1650 bp, Mycobacterium avium
gtgacccccgctgacctcgccgagctgctcagaaacaccgccgccgcggtgctggccgagcgtgggctggacgcggccgcgttgccggcgacggtcgtcgtcgagcgcccccgcaaccccgagcacggcgactacgccagcaacctcgcgctgcagctgggcaaaaaggtcggcgccaatccccgcgagctggccggatggttggccgccgcgctggccgaaaccgacggcatcgcctcggcggaggtggccggcccgggcttcatcaacctgcgcctcgaggcgtcggcgcaggccatcgtcgtcaccaacgtgctcgacgccggcgaccgctacggccactccgacgcgcaatccacccacaacatcaacctggaattcgtctcggccaaccccaccgggccgatccacatcggcggcacccggtgggccgccgtcggcgacgcgctgggccggctgctgtccacccagggcgccggcgtggtgcgcgaatactatttcaacgaccacggcgcccagatcgaccggttcgccagctcgctgatcgccgccgccaagggcgagccgacgcccgaagacggctacgccggcagctacatcaacgacatcgccgcccaggtgctgcgccaggcgcccgacgcgctgagcctgcccgagccgcagctgcgcgagaccttccgcgccatcggcgtcgacctgatgttcacccacatcaaagagtcgctgcacgagttcggcaccgacttcgacgtgtacacccacgaagactcgatgcacaccagcggccgggtcgaccaggccatcgcccggctgcgcgaaaccggcaacatttacgagaaggacggcgcaacgtggttgcgcaccagtgcatttggtgacgacaaagaccgcgtggtgatcaagagcgacggcaagcccgcctacatcgccggcgacatcgcctactacttggacaagcggcagcgcggcttcgacctgtgcatctacatgctgggcgccgaccaccacggctacatcgcccggctcaaggcggtcgctgccgcgttcggcgacgacccggccgccgtcgaggtgctcatcgggcagatggtcaacctggttcgcaacggccaaccggtccggatgagcaagcgggcgggaaccgtgatcacgctcgacgatctggtcgaggcgatcggcgtcgacgcggcgcgctacagcctgatccgctcctcggtggacaccccgatcgacatcgacctggcgctatggtcctcggcgtcgaacgaaaacccggtctactacgtgcaatacgcgcacgctcggctgtccgcgctggcccgtaatgccgccgaactgggcctcatccccgacaccgcgcacttggaactgctcagccacgacaaggaggggacgctgctgcgcaccctcggcgaattcccgcgggtgctcaaaaccgcggcgtcgctgcgcgagccgcaccgggtgtgccggtatctggaagacctggccggtgactaccaccggttctacgactcctgccgggtgctgccgcagggcgacgagcagcccaccgatctgcacaccgcccggctggcgctgtgccaggcgacccggcaggtgatcgccaacgggctggcgatactgggcgtgaccgctccggagcgaatg

SEQ ID NO: 26016 - DNA, 933 bp, Mycobacterium avium
atgctgcccgccgggctggtggcctccgccgtcgtgtcggcgtccagtgccaatctcggtcccggcttcgacagcatcggcctggcactgagcctcatcgacgagatcaccgtcgagacaaccgattccggcctggtagtgcaggtcgagggcgagggtgccgaccaggtgccgctcggcccggaacacctggtggtgcgcgccgtggagtgcggcctgcgcgccgtcggcgtccgcgcggcgggcctggtggtgcgctgccgcaacgccatcccgcactcccgcggcctgggctcgtccgccgcggcggtagtcggcggcctcgctgcggcgaacggccttgtcgcacaagcgaattgccaaccgctgagtgatgctgcgctgatccagctgtcctcggagttcgaggggcatccggacaacgccgcggccgccgtgtttggtggcgcgatcgtttcctggatcgaccgcggcggacagcacccccggtacgcggcggcgccgctgcggctgcaccccgatatccacctgtactgcgcgattccccaggaacgctcgctgaccgcggagacccgggtgctgctgcccgcgcaggtcagccacgaggacgcacgcttcaacgtgagccgggccgcgttgctggtggtcgcgctcaccgaacgcccggatctgctgatggcggccaccgaggacgtgctgcatcagccgcagcgggcgccggccatgcccgcctcggcggaatatttgcggctgctgcggcgtcataacgtggcagcgacgctttccggggccggtccctcgttgatcgcactgaccacagcgtcggcgttgcccccggaagtgacggagtacggggcggcgaacggattcaccctcgccgaaatgaccgccggccaaggagttcgctggagcccgggagtcaccgtcgtcggt

SEQ ID NO: 26017 - DNA, 1788 bp, Mycobacterium avium
gtgaccacagacaccccagacgcgaagacgcatgcgccggtcggtgccctgaccaccatggtgctgcccgagctgcgcgcgctggctaaccaggtcggcgtcaaggggacgtcgggcatgcgtaagaacgaactgatcgccgcgatcaaggaagtccgggggcaggccaacggggccgcgcccgctgagcaggccaacggcgccgagccggccgaggacagcggcaagcccgacgccaaggacgccaaggacgacaccacgcccgacaccaaggacgccaacgaccacaccggcgctcaaagcgccgccgaggcgccggcccagaacggcgccaccgccgaggcgccgcgccgcgaacgacgcagcgcgtcccgcgacgcgggagcggccggccgcggcaacgacgacgccgaccgcgagaccgacggccgcgagcaaaacaagcaggacagccgcgagcaaagcaagcaggatggcggcgaccaggaccagcagagctccggtggccagcaggggcgcggctccaaccagcaggacgacgacggcgagggacgtcagggccggcggggacgccgcttccgtgaccgccggcgccgcggcgaacggtccggtgagggcggcgacgccgaactgcgcgaggacgacgtcgtccaaccggtagccggcattctcgacgtgctcgacaactacgccttcgtgcgcacctccggctacctggccggcccgcacgacgtctacgtgtcgatgaacatggtgcgcaagaacggccttcgccgcggtgacgcggtgaccggtgcggtccgggtgcccaaggacggcgaacaacccaaccaacggcagaagttcaacccgttggtgcgcctggacagtgtcaacggcggctccgtcgaggacgccaagaagcgtcccgaattcggcaagctgacgccgctgtacccgaaccagcggctgcgcctggagaccacgccggaccggctgaccacccgggtcatcgacctgatcatgccgatcggcaagggccagcgcgcgctgatcgtgtcgccgcccaaggcgggtaagacgaccatcctgcaggacatcgccaacgcgatcaccaagaacaaccccgaatgccacctcatggtcgtgctcgtcgacgagcggcccgaggaggtcaccgacatgcagcgctcggtcaagggcgaggtcatcgcctcgacgttcgaccggccgccgtccgaccacacctcggtcgccgagctggccatcgagcgcgccaagcgcctcgtcgagcagggcaaggacgtcgtcgtgctgctggactcgatcacccggctgggccgcgcctacaacaacgcgtcgcccgcctcgggccgcatcctgtccggtggtgtggactccaccgcgctctacccgcccaagcggttcctgggcgccgcccgcaacatcgaggaaggcggctcgctgaccatcatcgccaccgccatggtcgagaccggatccaccggtgacaccgtcatcttcgaggagttcaagggcaccggtaacgccgagctcaagctggaccgcaagatcgccgagcggcgggtcttcccggcggtcgacgtgaacccctcgggcacccgcaaggacgagctgctgctgtcgccggacgagttcggcatcgtgcacaagctgcgccgggtgctgtccggcctggattcgcaccaggccatcgacctgctgatgagccagctgcgcaagaccaagaacaactacgagttcctggtccaggtgtccaagaccacgccaggggcgatggacaacgac

SEQ ID NO: 26018 - DNA, 240 bp, Mycobacterium avium
atgaaagctgacattcaccccacctacgcggagaccacggtgctctgtgggtgcggcaacacgttccagacccgcagcaccaaggacggtggccgcatcgtcgtcgaggtgtgctcgcagtgccacccgttctacaccggcaagcagaagatcctggacagcggcggccgggtggcccgtttcgagaagcgctacggcaagcgcaaggccggcgccgagaaagccgaaagcgccgacaaa

SEQ ID NO: 26019 - DNA, 789 bp, Mycobacterium avium
gtgctgaccgaacgttcgggcagggtcgccgcggcggccaaactgcaccgccacgtcggccggcgccgggccgcccggttcctggccgagggccccaacctggtcgaggcggccgcgggccgcggcctggtccgcgacgtcttcgtcaccgaagccgcgcagcagcggtatgcgccgctgctggcggcgctggactgcccggtccatctgatcaccgagcgcgccgccaaggcgctctccgacaccgtcaccccggccgggctggtcgcggtgtgcgacctgccggccaccggcctgcgcgacgtgctggccgggtcgccgcggctcatcgcggtcgcggtccagatcagcgagccgggcaacgccggcaccctgattcggctgtccgacgccatgggcgcggccggcgtgctgctggccggccacagcgtcgacccgtacaacggcaaatgcctgcgcgcatcggccggcagcatcttctccgtcccggtggtcgccgcgccggacctgcgcgaggccgtcgccgcggtgcgcgaggccggcctgcagctgctggccaccaccgtggacggcgaggtgcgcctggatcgggcgggtgaactgctggccaagccgacggcctggctgttcggccccgaatcacacggtctgccaagcgaagtcgcggcggcggccgatcaccgggtgcgcatcccgatggccggcggcgcggagagcctgaacgtggcctcggccgcggcgatctgcctctaccagagcgcgcgggcgctggagctgttcatgcggccc

SEQ ID NO: 26020 - DNA, 1041 bp, Mycobacterium avium
gtgggtgatcaacccgtggacctgtcggaaacagcgttggccgaggcggtcggcgccgcccggcaggccttcgcccgggccggcgacctcgacgcgttggcgcgcctaaagaccgagcacctcggtgaccgggcgccgctggccctggcccgccaggcgctcggcggcgtccccaaggaccagcgcgccgacgcgggcaagcgggtcaacgccgcacgcgcgcaggcccagcaggcctacgacgaacgcctggccgagttgcgcgccgaacgcgacgccgcggtgctggtcgccgaacgcatcgacgtcaccctgccgtcgacccggcagccggtcggcgcccggcatcccatcacgatcctggccgaacacatcgccgacaccttcatcgcgatgggctgggaactggccgaggggcccgaggtggaagccgagcagttcaacttcgacgcgctcaacttccccgccgaccacccggcgcgcagcgaacaggacaccttctacatcgcgccggagggttcccggcagctgttgcgcacccacacctcgccggtgcaggtgcgcacgctgctcgcccgcgagctgccggtctacgtcatctcgatcgggcgcaccttccgcaccgacgaactcgatgccacccacaccccggtcttccaccaggtcgagggcctggccgtggaccgcggcctgtccatggcgcacctgcgcggaacgctggacgcgttcgcgcgagccgaattcggcccgcaggcgcggacccggatccggccgcacttcttcccgttcaccgaaccctccgccgaggtggacgtgtggttcgtcggcaagaagggcggcgccggctgggtggagtggggcggctgcggaatggtgcatccaaatgtgttgcgggccgccggaatcgacccggacgtctactccgggttcgcattcggaatgggcctggagcgaaccctgcagttccgcaacgggattccggacatgcgtgacatggtcgagggcgacatgcggttctcgctgccgttcggggtgggcgcc

SEQ ID NO: 26021 - DNA, 2484 bp, Mycobacterium avium
atgcgcgttccgtacagctggttgcgcgaggtcgtggccgccggggcgccggactgggacgtcgcccccgccgagctggaacagaccctgatccgcatcggccacgaggtcgaagaggtcatcgagctggggccggtggacggcccgctgaccgtcggccgggtcaccgacatcgaagagctgaccggcttcaagaagccgatccagttctgccatgtcgacgtcggcgacgacgttgaccgtgaaatcgtctgcggcgcaacaaatttcgtagcaggggacctggtggtggtggcgttgcccggcaccacgctgccgggcgggttcgccatcaccgcgcgcaaaacctacggccgcaattcggacggaatgatctgctcggcggccgaactcggcctgggcgccgaccattccgggatcctggtgctgccgccgggcaccgccgaaccgggcgccgacggcgccgcggtgctgggactcgacgacgtgatcttccacctggcgatcacccccgaccgcggctactgcatgtcgttgcgcggcctggcgcgcgagatcgcctgcgcctacgacctggaattcgtcgaccccgcggatgtcaagccgctgccggtcgacggcgaggcctggccgctgacggtgcagcccgacaccggggtgcggcggttcgcgctgcgcccggtcaccggcatcgacccggcggcggtatcgccgtggtggctgcagcgccggctgttgctgtcgggcatccgcgccacctcgccggcggtcgatgtgaccaactacgtgatgctcgagctcggccaccccatgcacgcccacgaccgcaaccggatcagcggcgggctcggcgtgcgcttcgcccggcccggcgagaccgtcgtcaccctcgacgacatcgagcgcaagctcgaacccgtcgacgtcctgatcgtcgacgacgcggcgaccgcggcgatcggcggcgtgatgggcgcggccagcaccgaggtgcgcgccgattccaccgacgtgctgctcgaggccgcggtgtgggacccggccgcggtgtcgcgcacccagcgcaggttgcacctgcccagcgaagccgcccgccgctacgagcgcggggtggatccggcgatctcggtggccgcgctggaccggtgcgccgcgctgctcgccggcatcgccggcggcacggtgtcggaggcgttgaccgattggcgcggcgagccggcgtgcgacggctggtcaccgccggccatccagatgcccgccgacctgcccgaccgcctcgccggggtcacctacccgccgggcaccgcggccaagcggctcgcccagatcggcgccgcggtcaccgccgacggcggcacgttgacggtggtcccgcccagctggcggcccgacctgctgcagccggccgacctggtcgaggaggtgctgcggctggagggcctcgaggtgatcggatcggtgctgccgtcggcgccggccggccgcggcctgtccgccgcgcagcgccgccgccgcgccatcgggcggtcgctggcccagtccggttacgtcgagatcctgcccaccccgttcctgccggcgggcgtgttcgacgtgtggggactgccggacgacgacccgcggcgcgtcaccacccaggtactcaacccgctggagtccgaccgcccgcatctggccaccacgctgctgcccgcactgctggaagccttggtgcgcaacgtgtctcgcggcctggtcgacgtctccctctacgcgctggcgcaggtggtgcagccgacagcggaaacccgtgcggtgcagttcattccggtcgaccgccggcccaccgacgccgagatcgcggtcctggacgcgtcgttgccgcggcaaccccagcacgtcgccgcggtgctgaccggcctgcgcgaacaacgcggcccgtgggggccgggccgtcgcgccgaggccgccgacgcgttcgaggcggtgcgcgtcatcgcccgggccgccggcgtggacgtgcggttgcgcgccgcgcagcagctgccgtggcatccgggccgatgcgccgaggtgctcgtcggcgacaccccggtggggtacgccggccagctgcatccggcggtggtcgaacgcgccggcctgcccaggggcacctgcgcgctggaactcgacctggacgcgatacccctcgtcgcgacgctgcccgccccccgcgtctcgccgttcccggcggtgtttcaggacgtcagcctggtggtggccgccgacgtgccggcccaggcggtggccgacgccgtccgcgagggcgccggggacctgctggaagacctgcagttgttcgatgttttcaccgggccgcagctcggcgagcaccgcaagtcgctgaccttcgcactgcggttccgtgcgccggaccggaccctgaccgaggatgacgccaccgcggcccgcgacgccgcggtgcgccgggccgccgaggcggtcggcgccgagctgcgcacc

SEQ ID NO: 26022 - DNA, 519 bp, Mycobacterium avium
gtgcgcatcgaagacgcactgcgcgtcgccgcggacgccgatctcgaccttgtcgaagtcgccccgaacgccagaccaccggtctgcaagatcatggactacggcaagttcaaatacgaagcggcgcaaaaggcgcgcgaatcccgccggaaccagcagcagaccgtcgtcaaggaacaaaagctgcgacccaagatcgacgatcacgactacgagaccaaaaagggtcacgtcatccgcttcctggaagcgggatcgaaggtgaaggtgaccatcatgttccgcggacgtgagcagtcgcggcccgagctgggctaccgattgctgcagcggctgggcgccgacgtcgccgaatacggtttcgtcgagacgtccgccaagcaggacggccgcaacatgacgatggtgctggcaccgcatcgcggcgcgaagactcgcgccagggcgcggcatcccgagggccccggcggcgcggcatcggactccgatgcggccgcggacgccgaaccctcgtcgagc

SEQ ID NO: 26023 - DNA, 192 bp, Mycobacterium avium
atgcccaaagccaagacccacagcggggcttcaaagcggttccggcgcaccggaaccggcaagatcgtccggcagaagaccaaccgccggcatctgctcgaacacaagccgaccacccgcacccggcggctggaaggccgcaccacggtgtcggccaacgacaccaagcgggtcaacagcctgctgaacggc

SEQ ID NO: 26024 - DNA, 393 bp, Mycobacterium avium
atggcacgcgtgaagcgggcggtcaacgcccacaagaagaggcgcagcatcctgaaggcctcgaagggctatcgcggccagcgatcccggctctaccgcaaagccaaagagcagcaactgcattcgctgaactacgcctaccgcgaccgtcgcgcgcgcaagggcgagttccgcaagctgtggatctcgcggatcaacgccgcggcgcgcgccaacgacatcacctacaaccggctgatccagggcctcaaggccgccggcgtggaggtggaccgcaagaacctcgccgacatcgcgatcgccgacccggccgccttcaccgcgctggtcgacgtcgcccgggcggcgctgcccgaggacgtcaacgccccgtcggactccggagaagcggcc

SEQ ID NO: 26025 - DNA, 1416 bp, Mycobacterium avium
gtgagtagacgcgggaagatcgtctgcacccttggcccggcgaccaattcggacgagttgattttggcgctggtcgaggccggaatggacgtcgcccgactgaacttcagccacggcgactacgccgaccacaaagccgcctacgaacgggtgcgggtggcctccgacgccaccggccgcgccgtcggcgtgctcgccgatctgcagggccccaagatccgcctagggcgctttgccaccgggcccacctactgggccgacggcgaaacggtccgcatcaccgtcgccgactgcgaaggcagccacgaccgggtgtcgaccacctacaaacaactcgcccaggacgccgcggtcggggaccgggtcctggtcgacgacggcaaggtcggcctggtggtcgacggcatcgagggcgacgacgtcatctgcaccgtggtcgagggcggcccggtcagcaacaacaagggcatctcgctgcccggcatgaacgtctccgcaccggccttgtccgacaaggacatcgaggacctcaccttcgcgctcgagctgggcgtcgacctggtcgcgctgtccttcgtgcgttcgccctccgacgtcgagctggtgcacgaggtgatggaccgcgtcggccggcgggtgcccgtgatcgccaaactggaaaagccggaggccgtcgacaacctggaagccatcgtgctggccttcgacgccatcatggtggcccgcggcgacctcggtgtcgaacttcccctggaagaggttccgctggtgcagaagcgggccatccagatggcccgggagaacgccaaacccgtcatcgtggcaacccagatgctcgattcgatgatcgagaactcacggccgacccgggccgaggcctccgacgtcgccaacgccgtgctggacggcgcggacgccgtgatgctgtccggggagacctcggtgggcaagtacccgctggcggccgtgcggaccatggcgcgcatcatctgcgcggtcgaggacaactccacggccgccccgccgctcacccacgtgccccgcaccaaacgcggggtgatctcgtatgcggcccgcgacatcggcgaacgcctggacgccaaggcgctggtcgcgttcacccagtccggcgacaccgtcaagcggctggcgcggttgcacaccccgctgccgctgctggccttcacggcatggccggaggtgcgcagccagctggccatgacctggggcaccgagacgttcatcgtgccgatgatgacctccaccgacggcatgatccgccaggtggacaagtcgctgctggaactcggtcggtaccggcgtggtgacctggtggtgatcgtcgccggtgcgccacctggcacagtagggtcaaccaacctgatccacgtgcaccggatcggcgaggacgacgtc

SEQ ID NO: 26026 - DNA, 441 bp, Mycobacterium avium
atgggcgcctatcggactgtcgtggtaggaaccgatggctcggactcgtcgatgcgtgcggtagagcgggcggcgcagatcgccggaccggatgccaagctgatcgtggcctcggcgtacttgccccagcatgaggacgcccgggccgccgacgccctgcgggaagaaagctacaaggtgtcgggcaccgccccgatctatgcgattctgcgcgacgccaaggagcgcgcccaccaggccggagcgaagaacgtcgacgagcgccccatcgtgggggccccggtggatgcgctcgtgcacctcgccgaggaggagcaggcggacctactggtggtcggcaacgtcggtctgagcaccatcgccggacggttgctgggctcggtgccggccaacgtgtcgcggcgggccaagaccgacgtgctcatcgtgcacaccacctca

SEQ ID NO: 26027 - DNA, 2757 bp, Mycobacterium avium
gtgcctaaagtgagagccgtgcccgccacgaaagccgcgacgaaaaccgccaccaaaaccgccgccggggccggcgaggaacaaaaccggccgacactgatgctgctggacggcaactcgctggcgttccgggcgttctatgcgctgcccgccgagaacttcaagacccgcggcgggctgaccaccaacgcggtctacggcttcaccgcgatgctgatcaacctgctgcgcgacgaggccccgacccacatcgccgcggccttcgacgtgtcccggcagaccttccgctccgatcgctacccggaatacaaggccaaccgctcggcgaccccagacgagttccacggccagatcgacatcaccaaggaagtcctggcggcgctgggcatcacggtgctcgccgagccgggattcgaggccgacgacctgatcgccaccctggccacccaggccgagaacgagggctaccgggtgctggtggtcaccggggaccgcgactcgctgcagttggtcagcgacaatgtgacggtgctctacccgcgcaagggcgtcagcgagctgacccgcttcacccccgaggcggtcgtcgaaaaatacgggctgaccccccagcagtaccccgacttcgccgccctgcgcggcgaccccagcgacaacctgcccggcattcccggtgtgggggagaagaccgcctccaagtggatcgccgaatacgggtcgctgcaggcgctggtcgacaacgtcgactcggtacgcggcaaggtcggcgacgcgctgcgcgaacacctggccagcgtgatccgcaaccgcgagctgaccgatctgatcaaggacgtgccgctggcccagacgcccgacacgctgcggctgcagccctgggaccgcgaccagatccaccggctcttcgacgacctggagttccgggtgctgcgcgaccggctgttcgaaaccctggccgccgtggagcccgaggtcgacgagggtttcgacgtgcgcggcggcgcgctggaagccggcgaactggcggtgtggttggccgagcacagctccggcaagcgcttcgggctggccgtcgccggcacccacctggcctacgacgccgactgcaccgcgctggccatcgtctccgccgacggcgagggccgctacatcgacacctcggcgctggatcccgacgacgaagccgcgctggcgtcctggctggccgaccccggtccgcccaaggcgctgcacgaggccaagctggcgatgcacgacctggccgggcggggctggacgctggccggcgtcacctccgacaccgcgctggccgcctacctggtgcggcccggtcagcgcagcttctccctcgacgatctcgcgctgcgctatctgcgccgcgagctgcgcgcggaaaaccctcagcagcaacagctttcgctgctggatgacaccgacggcaccgacgaccaggcggtgcagacgctgatcctgcgggcggtggcggtgctggatctggccgacgcgctcgacgaggaactggcccgcatcaactccacctcgctgttgagcggcatggagctgccggtgcagcgggtgctcgccggaatggaaaaggccggtatcgcagtcgatttggacttgctcagcgagttgcagagcgatttcgcccaccagatccgcgacgcggcagaggcggcgtacgcggtgatcggcaagcagatcaacctcggctcgccaaaacagttgcaggcggtgctctttgacgagcttcagatgccgaagaccaaacgcaccaagaccggctacaccaccgacgcggatgccctgcagtcgctgttcgacaagaccggccacccgttcctgcagcatctgctggcccaccgggacgccacccggctcaaggtcaccgtcgacgggctgctcaactcggtggcctccgacgggcgcatccacaccaccttcaaccaaaccatcgcggcgacgggccgattgtcgtcgaccgagccgaacctgcagaacattccgatccgcaccgaggcgggccggcggatccgcgacgcgttcgtggtcggcgacggttacgccgagctgatgaccgccgactacagccagatcgagatgcggatcatggcccacctgtcccaggacgccgggctgatcgaagccttcaacacgggggaggacctgcactcgttcgtggcctcccgcgccttcggggtgcccatcgaggaggtcaccggcgagctgcgccgccgggtcaaggccatgtcctacgggctggcctacgggctgagcgcctacgggctgtcgcaacagctcaagatctccaccgaggaggccaaggagcagatggacgcctacttcgcccggttcggcggggtgcgcgactacctgcacgccgtcgtcgaacaggcccgcaaggacggctacacctcgacggtgctgggccgccgccggtacctgcccgagctcgacagcagcaaccggcaggtgcgcgaagccgccgagcgggcggcgctgaatgcgcccatccagggcagcgccgccgacatcatcaaggtggccatgatcgaggtcgacaaggcgatcaaggaggcgggcctgcagtcgcggatcctgctgcaggtgcacgacgagctgctcttcgaggtcgcggccggcgagcgggagcagctggaagcgctggcccgcgacaagatgggcggcgcctacccgctcgacgtcccgctggaggtgtccgtgggctacggccgcagctgggacgctgcggcgcat

SEQ ID NO: 26028 - DNA, 2913 bp, Mycobacterium avium
gtggctgaccgtctgatcgtcaagggcgcccgcgagcacaacctgcgcggcgtcgacctcgacctgccccgggatgcgctgatcgtgttcaccgggctgtcgggatcgggcaaatcgtcgctggccttcgacaccatcttcgccgaggggcagcggcgctacgtggagtcgctgtcggcctacgcccgccagttcctggggcagatggacaagccggacgtggacttcatcgaggggctgtcgccggcggtgtccatcgaccagaagtccaccaaccgcaacccgcgctcgaccgtcggcaccatcaccgaggtctacgactacctgcggctgctctacgcccgcgcgggcaccccgcattgcccggtgtgcggcgagcggatcgcccggcagacgccccagcaaatcgtcgaccaggtgctggcgatgcccgagggcacccggttcttggtgctggccccggtggtgcgcacccgcaagggcgagttcgccgacctgttcgagaagctcaacgcccagggctacagccgggtccgggtggacggcgtggtgcatccgctgaccgatccgccgaagctgaagaagcaggaaaagcacgacatcgaggtggtggtggaccgcctcaccgtcaaggcgtccgccaagcagcggctcaccgattcggtggagaccgcgctgaacctggccgacggcatcgtggtgctggaattcgtcgaccacgaacacgacgcgcacaaccgcgagcagcggttctccgagaagctggcctgccccaacgggcacgcgctggcggtcgacgacctggaaccgcggtcgttctcgttcaactcgccctacggcgcctgccccgagtgcagcgggctcggcatccgcaaggaggtcgaccccgacctggtggtgcccgacccggagcgcaccctggccgagggggcggtggcgccgtggtcgacgggccacaccgcggagtacttcacccggatgatggccgggctcggcgacgagctgggcttcgacgtcgacaccccctggcgcaagctgccggccaaggcccgcaaggcgattctcgagggttccgaccaccaggtgcatgtgcgctaccgcaaccggtacggccggacccgctcgtactacgccgatttcgagggcgtgctggcgttcctgcagcgcaagatggcccagaccgagtcggagcagatgaaggagcgctacgagggcttcatgcgcgacgtgccctgcccggtctgcgagggcacccggctgaagccggagatcctggccgtcacgctggcggcggggcggcacgggaagaaatccatcgccgaggtgtgcgagctgtccatctcggattgcgcggagttcctcaacacgctcaccctggggccccgcgagcaggcgatcgccgggcaggtgctcaaggagatccagtcccggctggggttcctgctcgacgtcgggctggaatatctgtcgctgtcgcgtgcggcggccaccctgtccggcggtgaggcgcaacgcatccggctggccacccagatcgggtccgggctggtgggggtgctctacgtgctcgacgagccgtccatcggtctgcaccagcgcgacaaccgccggcttatcgaaaccctcacgcgattaagggatttgggtaacacgctgatcgtcgtggagcacgacgaggacaccatcgcccatgccgactggatcgtggacatcggcccgcgggccggtgagcacggcggccagatcgtgcacagcggaacctatgccgagctgctggccaaccaggactcgatcaccggggcctacctgtccggcaaggaaagcatcgagatgccggcgatccggcgcccggtcgaccggcgccgccagctcaccgtggtaggggcgcgcgagcacaacctgcgcggcatcgacgtgtcgttcccgctcggtgtgctgacgtcggtgacgggcgtgtcgggctcgggcaaatcgactctggtgaacgacatcctggcgacggtgctggccaaccggctcaacggcgcccggctggtgccgggccggcacacccgggtcaccgggctggaccacctggacaagctggtgcgggtggaccagtcgccgatcgggcgcacaccgcggtccaacccggccacctacaccggcgtgttcgacaagatccgcaccctgttcgccgccaccaccgaggccaaagttcgtggctatcaaccgggccggttctcgttcaacgtcaagggcggccggtgcgaggcgtgcacgggcgacggcaccatcaagatcgagatgaacttcctgcccgacgtgtacgtgccgtgcgaggtctgccacggcgcccgctacaaccgggagaccctggaggtgcattacaagggcaagaccatctccgaggtgctggacatgtccatcgaggaggcggcggagttcttcgagccgatcaccggcatccaccgctacctgcgcaccctggtcgacgtcggcctgggttatgtgcggctcggccagccggcgcccaccctgtccggtggcgaggcgcagcgcgtcaaactggccgccgaactgcagaagcgctccaccggccgcaccatctacatcctcgacgagcccaccacggggctgcatttcgacgacatccgcaagctgctgaaggtcatcaacggccttgtcgacaaaggcaacacggtgatcgtcatcgaacacaacctggacgtgatcaagacctccgactggatcgtcgacatgggcccggagggcggtgccgagggcggaaccgttgtcgcgcaaggcactccggaggacgtcgccgcggtgccggagagctacaccggcaagttcctcgccgaggtgatcggccgtggcggggcggcggccggcgccccgcgccggtcgagccggcgccgcaaagccaccgcc

SEQ ID NO: 26029 - DNA, 1440 bp, Mycobacterium avium
atgccgagtcccgccgtcacctcgccccaagtagccgtcaacgacattggctccagcgaggactttctcgccgcaatcgacaaaacgatcaagtacttcaacgatggcgacatcgtcgagggcacgatcgtcaaagtggaccgggacgaggtgctcctcgacatcggctacaagaccgaaggggtcatccccgcccgcgagctctccatcaagcacgacgtcgaccccaacgaggtcgtttccgtgggagacgaggtggaagccctggtcctcaccaaggaggacaaagagggccgcctgatcctgtccaagaagcgcgctcagtacgagcgcgcctggggcaccatcgaggcgctcaaggagaaggacgaggccgtcaagggcaccgtcatcgaggtggtcaagggtggcctgatcctcgacatcggcctgcgcggcttcctgcccgcctcgctggtcgagatgcgccgggtccgcgatctgcagccctacatcggcaaggagatcgaggccaagatcatcgagctggacaagaaccgcaacaacgtggtgctgagccgccgcgcctggctggagcagacccagtccgaggtgcgcagcgagttcctcaaccagctgcagaagggcgccatccgcaagggtgtggtctcctccatcgttaacttcggcgcgttcgtcgacctgggcggtgtggacggcctggtgcacgtctccgagctctcctggaagcacatcgaccacccgtccgaggtggtgcaggtgggcgacgaggtcaccgtcgaggtgctcgacgtcgacatggaccgcgagcgggtttcgttgtcgctcaaggcaactcaggaagacccgtggcgccacttcgcccgcacccacgccatcggccagatcgtgcccggcaaggtcaccaagctggttccgttcggcgcgttcgtgcgcgtcgaggagggcatcgagggtctggtgcacatctccgagctggccgagcgccacgtcgaggtgcccgaccaggtggtcgcggtcggcgacgacgcgatggtcaaggtcatcgacattgacctggagcggcgccggatctcgttgagcctcaagcaggccaacgaggactacaccgaggagttcgaccccgccaagtacggcatggccgactcctacgacgagcagggcaactacatcttccccgagggattcgaccccgaaaccaacgaatggctcgagggattcgagaagcagcgcgccgagtgggaggcccgctacgccgaggccgagcgccggcacaagatgcacaccgcgcagatggagaagttcgccgcggccgaggcggccgggcacgccggcggcgagcagtcgcccggcaacggcgcaccggcggagaaggcgggcggttcgctggccagcgacgcccaactggccgcgctgcgggaaaagctcgccggcaacgcc

SEQ ID NO: 26030 - DNA, 816 bp, Mycobacterium avium
atgagtccggctaccgtgcttgactccatcctcgaaggagtccgggccgacgttgccgcgcgcgaagccctgatcagcctgtcggagatcaaagccgccgcggccgccgcgccgccgccactcgacgtgatggccgcgttgcgcgagcccggaatcggcgtcatcgccgaagtcaagcgcgccagcccgtcggcgggttccctggcgaccatcgccgatccggccaaactggcccgcgcctacgaagacggcggcgcccgcatcatcagcgtgttgaccgaggagcggcgttttcacggctcgctcgacgatctggacgcggtccgggccgcggtctccatcccggtgctgcgcaaagactttgtggtgcagccgtatcagatccacgaggcgcgtgcgcacggcgccgacatgctgctgctcatcgtggccgcgctggagcagtcggcgctggtgtcgatgctggaccgcaccgaatcgctgggcatgaccgcgctcgtcgaggtgcacaccgaggaagaagccgaccgggcgctgcgggccggcgccaaggtgatcggcgtcaacgcccgcgatctggcgacgctggaggtggaccgggattgcttcgcccgcatcgctccaggcctgcccagcaacgtgatccggatcgccgagtccggcgtgcgcggcaccggtgacctgctggcgtatgccggcgcgggcgccgacgccgtcctggtgggcgagggcctggtgaaaagcggtgacccgcgcgccgcggtcgccgacctggttaccgcgggcacccatccgtcctgtccgaaaccggctcgc

SEQ ID NO: 26031 - DNA, 1269 bp, Mycobacterium avium
gtgacggtggacatctccccccggacccgtccggaccttccgcttccgagcgcagcgatcgccgaacccacccgtcatgaacccgacgccggtgggcatttcggcgtgtacggcggccgttacgtcgcggaggcgctgatggccgtcatcgaagaggtcaccaccgcctacgagaaggagcgcgtcaaccaggatttcctggacacgctggactatctgcaggcgaactacgccgggcggccgtcgccgttgtacgaggccccgcggctgtccgagcaggccggcgcgcggatcttcctcaagcgagaagacttgaaccacaccggttctcacaagatcaacaacgtgctcggtcaggcgttgctggcccagcggatgggcaagaagcgggtgatcgccgagaccggggccggccagcacggcgtggccaccgccacggcctgcgccctgctgggcctggaatgcgtgatctacatgggtgcggtggacaccgagcgccaggcgctcaacgtggcgcggatgcgcctgctgggtgcgacggtcgtctcggtgcagagcggttcgaaaacgctcaaggacgccatcaacgaagccttccgggactgggtcaccaacgccgataacaccttctactgcttcggcaccgcggccgggccgcaccccttcccggccatggtccgcgatttccagcgcatcatcgggctggaggcacgcgcccagatccaggcgcaggcgggccggctgcccgacgcggtggtggcctgcatcggcggcggctccaacgccatcgggatcttccatccgttcatcgacgaccctggcgtgcggctggtgggattcgaggcggccggtgacggcgtcgaaaccggaaggcacgccgcgactttcagcggcggctcgcccggggcgttccaggggtcgttctcctacctgctgcaggacgaagacgggcagaccatcgaatcccattccatctcagcgggtctcgactatcccggagtcggtccagaacatgcgtatctgcgcgagaccggccgtgccgaataccgtccgatcaccgacgccgaggcgatggacgcgtttcgggtgctgtgccgcaccgaggggatcatcccggccatcgagtccgcgcacgccgtggcgggtgcgctgaagttggggcccgagctgggccgcggcgcgatcatcgtggtgaacctgtccgggcgcggggacaaggacgtcgagacggcggcaaagtggttcgggctgttggggtccagcgaccga

SEQ ID NO: 26032 - DNA, 852 bp, Mycobacterium avium
gtgaggtcggggcgtgcggtcacggccgcggcgagccggctgcgcgtgttcagcctgcgcgagctcgctgtgcatcgacgccgcaccaccgcgtcgatcgccgtgatggccgtctccgcaacgtatttggtggcggtcttcggcatcttcggctcgatcaccggatcggtgagccggctggccgacgggatcgccggggtggccgcgctcgaggtctccggcatcaccgacgccggattcgccgactcggtgctggccgatgtcgccgcggtgcccggggtcgccaccgccgcgccgatgatccggacgacggcggccacgccgtccgggccggtcctgctgctgggcgtcgacgcccgcaccgccgcgctgggcggcgccctcaccgacgcggtgtcgcgaccggtgcgggagctttccgcgtcgccggacggcgtgcaggtggggccgcgggccgggtatgcgaaaggtcaagcgttccaacttggttcggccccggtcaccgtcaccgaggtgctggccggcaggcagttcgccgaactcaacggcggacactatgtgctggcgccgctggcgttggcgcagcgcgtcaccgcgcgcgccggacagctggactcgatcctgatcaccctcacgccgggcgccgacccggccgccgtccgcgccgcggtcggcgccgccgtgggcaggcgggcgatcgtggcggcgcccagctcgcgggcggcccgcgccggcgacggcgtccggctgatgaattacatggcgctgctcggcgcggcggtggcgctggtgggcggcgcgttcctgatctacaccacgatgattatggcgatcacccagcgacgccccgtc

SEQ ID NO: 26033 - DNA, 1218 bp, Mycobacterium avium
atgtcgagtccgcgccgcgaatacggcgacgcgctgcgctgtggtgaccgcagcgctgctgtgaccgagatccgggccacgctcgcctcgttggggctgctggccagcgccgatgaggatctcagcaccggccggcacgtggccctggaactcttcgacgccgagctcgaccaggccgtccgcgcctttcaacagcatcgcggcctgctggtggacggcatcgtcggggaagcgacctaccgggcgctcaaggaggcgtcctaccggctcggcgcccgcacgctgtatcaccaattcggcgcgccgctttacggcgacgacgtcgcgacgctgcaggcccggctgcaggatctcggtttctacaccggcctggtcgacggctacttcgggttgcagacccacaacgctttgatgtcgtatcagcgtgagtacgggctgtccgccgacggcatctgcggcccggaaacgttgcgctcgttgtactttctgagttcgcgggtcaccggcggatcgccgcacgcgctgcgcgaggaggagctggtccgccgatcgggccccaaactgtccggcaagcgaatcatcatcgacccgggccgcggcggcgccgaccacggcatgatcatgcagggcccgtccggcccgatcagcgaagcagatgtgttgtgggacttggcaagccggctcgagggccggatgaccgcgatcggcatggagaccttcctgtcgcggccggtcaaccgcagcccgctggatgccgaacgcgcggccaccgccaacaatgtcggcgccgacctgatgatcagcctgcgctgcgaagctcaaaaaagccccgccgccaacggggtggcatcctttcacttcggcaactcgcacggctcggtatccaccatcgggcgcaacctcgccgacttcatccaacgagaagtggtggcccgcaccggtttacgggactgccgaacgcacggccggacgtgggatctgctgcggctgacccgcatgcccacggttcaggtcgacgtcggctacgtcaccaacccgcacgaccgcgcgatgctggtgtccacccagacccgcgatgcgatcgccgagggaattctcgccgcggtcaagcggctctacctgttgggcaaaaatgaccgtcccacaggcacattcactttcgccgagttactggcccacgaattgtcggtggagcgcaccagccagatgggcggttcc

SEQ ID NO: 26034 - DNA, 1008 bp, Mycobacterium avium
ttgccgaaccgccagatcctgctgcgtcgccgcccctccggactggtccggccggacgacaccgaactggtcaccacccccgcgccggaacccgccgagggggaggcgctgctgcggaccacctacgtcggcatcgacgccgcggcgcgcacctggctcgacgaccagcccagctacctgccgccggtgcagttgggtgaggtcattcgcgctgccgggatcggcgaggtggtggcctcgcgctgtgacgcgttcgccgtcggcgacgtggtcaccacgctgaccggattccaggagtacgcgatcatccgcgacgacctgttcagcacgccgatccccggcgaggacgaccagctggcgatcatgtcggtgtacggaccgaccggcgccaccgcctatttcgggatgaccgacatcggccgcccgcagcccggcgagacggtggtggtgtcggcggccgcgggcgccaccgggtcgatcgccgggcagatcgccaagatcgccggcgcccgggtggtgggcatcgccgggggaccggagaaatgccgtgcggtggtggcggacttcgggttcgacgcgtgcatcgactacaagaacgatgacgtcgcggcggcgctcaaacagcactgcccgcgccgcgtcgacgtctacttcgacaacgtgggcgggcccatcctggacgccgtgctgggtcggctggccccccgcgcccgggtggtgctgtgcggcgtcatctccagctacctgaccggggaccatcccggcccggccaactacgtgaacctgctgtccaagaccgcgctgatgcaggggttcaacgcgctcgaccagtggggccgcttcgacgaggcgttcgccgcgctgcggaagtgggaggccgagggccgacttcaccaccggcagaccatctttgagggcatcgaatcctgcgtcgacgccctcaacgggctgttcaccggcgtcaacatcggcaagacgctggtcaagctcagcgaacccggcgccggc

SEQ ID NO: 26035 - DNA, 1014 bp, Mycobacterium avium
atgatcactcccttggtcttcgcgggtgcggtcagcgcgacgggcccatcgcttccggtgcgaacgcccccggtgcacgcggccgtcaccccggtggccgccgtctcgccgaccttccccgacctcaccgggcccgccgtcgtcgcgatcgaccgcggccccaccgcctttcacgtcgccgagccggcactgtccgccccgccgccggccgcgatcgtcaatgcgcctggggcgcttggcattccgagcatcgcgctggccgcctaccgcaatgcggagcagaagatggccgtcgccgccccgggctgcggcgtgagctggaacctgctggccgggatcgggcgcatcgaatcgggtcacgcgggcggcggcgcggtcgacgcgcgcggcaccgcgatcaccccgatctacggcccgtcgctggacggcaccctgcccggcaacgaggtcatcatccaaagcgccgccggcaaccgggtcacctacgcgcgcgccatggggccgatgcagttcctgccgggcacctgggcgcgctacgcctccgacggcaagggcgacggcgtggccgacccgcagaacctgttcgactccaccctggcggccgcccgctacctgtgcagcggcgggctcaacctgcgcgaccagtcgcaggtgctgaccgcgatcctgcgctacaacaactcgatgccctacgcgcagaacgtgctgggctgggcggcggcctatgcgaccggcgtcgtcccggtcgacctgccgccgatgaccgggccgccgccgccgctgggcgatgcgcacctcgagcaccccgaagggctcgggcccaacctgccgatgaacatcaacggcctgccgctggacgacccgctggcccgggtgccgctgatcgacctgagcagccccgcgctcggcagcccgcagccgatgttcccgtggatgacgcccaccccgcagcaggcgccgacccaggttcccggttgcacggtgatctgcatcagctcgcagggctccccgccg

SEQ ID NO: 26036 - DNA, 204 bp, Mycobacterium avium
atgatgagcgaacagcacacccacgacgcgccgcacacgcacgaacatcagcacggcggcgtgacgcacgcgcacgcgcacaccacgcacgagcacgaccacgtcgagcacgagcacagccacgcgcacaccgacggcaccgaacacacccatcggcacgtgcatcaggcgggcctcgaggacgtgcaccagcacgcccacgcc

SEQ ID NO: 26037 - DNA, 849 bp, Mycobacterium avium
atgcccgaactgcccgaagtcgaggtggtgcgccgcggcctgcactcgcacgtggtgggcaagacgatcggcgcggtgcgggtgcaccacccccgcgcggtgcgccgccacgaagccggccccgccgacctcaccgcccggctgctgggcgcgcggatcaccggcaccgaccggcgcggcaagtacctgtggctgctgctggacggccgcgataccgcgctggtggtgcacctgggcatgagcgggcagatgctgctcggcgcggtgccgcgcgccgagcacgtccgcatctcggcactgctcgacgacggcaccgtgctcagcttcgccgaccaacgcaccttcggcggctggatgctcgccgaccttctcgaggtggacggcagcgtggtgcccgaacccgtcgcgcacctggcgcgcgacccgctcgatccccgcttcgacgccgacgccgtcgtaaaagtcttgcggcgcaagcactccgaaatcaagcgccaactgctcgatcagcaggtggtgtcgggcatcggcaacatctatgccgacgaggcgctgtggcgggccaaggtgcacggggcgcggatcgccgacgcgctgacccgcaagcagttgaccgccgtgctcgacgcggccgccgacgtgatgcgtgacgcgctggccaagggcgggacctcgttcgattcgctgtacgtcaacgtcaacggcgaatccgggtacttcgaccgatcgctggacgcctacggccgggagggcgaaagctgccggcgctgcggcgcggtgatgcgccgggagaagttcatgaaccgctcgtcgttstyctgcccgaaatgccaaccgcgcccgcggctt

SEQ ID NO: 26038 - DNA, 759 bp, Mycobacterium avium
atgaccctcgtgaatttcacttcaaaagtcgctgtcgtcactggcgcggcatcgggtatcggcgaagcgactgccaaacgactcgctgaagatggcgccaaggtggtcgtcgcggacatcaatgaggatggcggcgagcgcgttgtcgccgagatcgccgaacgcggtggcgaagccgcgttcctgcgtactgacatctccattgaagaggacgtgaactccctgatcgacttcgctgtctccacctacggcgggttgcatctggcgcacaacaacgcggccgtcgcccacaccccgactcccctccatgagttgagcaccgacgtgtttgacacagtcaccggaattgggctgcgcggaacgtttttctgcatgcgagctgagatcgcacacatgatcggccacggcggtggggcgatcgtcaacaccgcctcgggggccgcactcaaggcggctgccggcatgcacgcctatgtcgcgaccaaacacgggatcgtcggcctgacgcgcaatgccggcctcgactacgcccgcaacggcatccgcgtcaatgcggtagcgcccggttcgatcaagacgccccagatggccagttttccgcaagagatgcaggacgaatgggagcggatcattccgatgggccgaatgggtcgtcctgaggaggtcgccgatgttgtggcattcctgctctcggacgcggccagcttcattaccgcgaccaccgtcgaaatcgacggcgcctacctgcaatccagcaaa

SEQ ID NO: 26039 - DNA, 2751 bp, Mycobacterium avium
gtgcgcggatcaccagtgcacgccggggaccaggcgcaccagccgcctgaccgggcgcggtgtgcgcaagccgcgcgtgacggcgcggacgggccggcgcggcttgcggggtgcagtgcgttcgatgcgttccgccggccggggttcggtggccaccccgcgcgccgcggccgagtccgggtagccgaggtagagctggtgcaggacccgccgagaagtcctgggcgcgaagtaatttccggcctcggccagggtgcccagcggggtgtcgatgcgggccggcttttccaccagcccgcgcaccaccatcgccgctgcgcgctccgggctgatcgcccgcaccgggttgagccggtgcgacggcacgatcatcggggtgcgcaccagcggcatgtggatgttggtgaaggtgatgtggtcggacagcacctccgagccgaccacgtcggcgaacgcgtccagggccgccttggtcggcagataggagctgtacttggggttgcgtgcctgcacaccggcgctggacacgttgacgacgtgaccgaatcgccgctcccgccaatgcggcagcagcgccagcaccatccgcaccgcgccgaagtagttgacggccatcacccgttcgtagtcgtgcagccgatcggtcgagttgaccaccgagcggcggatcgaccggccggcgttgttcaccaggtaatcgacgtggtcgaaccggcccaggatgtccttgacggtgtgttccaccgacgcggaatcggtgacgtcacaggtaaaggcatgggccgcaccgccattggcgcggatctcgtcgaccagcgcgtccagtgcggcgccgttgcgggcgagcgcgaacacggtggcgccccgctgcgcgatcgcgatggccgacgcccggccgatgccgctggaggcgccggtgacgatgacgtgccggccgtacagcggtccccgcggatcgtcgcggcgcgcccggtcggggtcgaggtgctcggcccagtaccgccacagcctgggcgcgtagccggcgaactcgggaacttcgattccggtgcccgccaacgcatttcgcgtcttctcgctgacgaaggtgggggccaggtcgaccaggtcgaacacctgcgcggggatgccgagctgggtggccgccatgtcgcgcaccacccgggcgcggccgcgcaccttgagcaccggggcggccaccgcgccgggcagcgacccgcgcagcggcggcagcccggccgccttggccacgccccggtagatgccgcgcaggccgatggtcttctcggcggtgaggtggaaggtctgcccgtccaggccgtcggcgtgcatcagcgcgaccagcgcgtcggcgacgtagtcgaccggcacgatgttggtgcgcccggtgtcggggagcagcatcggggtgaacctgggcagcaccgccagcttggccagtacgccgaagaagtagtacggcccgtccaccttgtccatctcgccggtgcgcgagtcgcccaccaccaccgccgggcggtagatgcgatgacgcaggccgggcgccgagcgcaccagcagctcggcctcgaacttggtctggtgatacggcgtgggcagttgctggcccacgtcgaagtcgtcctcggtgtactcgccggggaagtcaccggccaccgcgatggacgacacgtggtgcagggtggcgccgagccgttgcgccagctcgatcacggcgcgggtgccgtccacgttggcggcccgctgctcggcctccccggcggtgatgtcgtagatcgccgcgcagtgcaccaggtggtcgacgtgtcccagctcggccagggtctcgtcgctcagctccagcgccggcagctctccgaccagcggtttcacccggtcgccccagggggtgtcgccctgcgccgagagccgttcgaagcggcccagcgactgccggcggaccagcacccacacctgcgcgtcgggccgggtttgcagaagacgagtgacgacgcggcgaccaataaacccggtaccgccggtaacgacataccgcatgaagacatcgtggcggtgccggccgcgcacgtcaaccgccgagtttggggagcgagcttgggcggcgagcttcggggcggccgggggctagctgcggaagtcgcggatcccgtcccaatccaccagcgtccagccggtgatcgggttgccgttgatcaccacccggccggtgttgggcagcggatgggtgttcatcaggctgtccttggcgttgcgggtgttcatcagcgtccacaccatgatcgagttcgcatgcgagaacaccaccgggttgcggtgtccgctgttgtagatcttgttgacggccgcggtgaactggtcgttgaactccttgccgctgatcgagccggggatgctgtcggagacgtcgcccttgagccagttcgccggcgccaccaggtaggtcgacttcgccatcgactcgggtttgccgttgtaccagccggcgttgatctcctggatgccgggcagcacctcgacctgcttgccgagctcggcggccagcggggccgcggtttgctgggcccgggtcatggtggaggcgtagacgctgtcgtagtccttgcggccgagttggtgggcgacctgttcggcctgccccttgccctccggggacagacccggcccgggcacctcggtgtcgatggtgccgctggcgttggcctcggactgggcgtgccggacgaaggtcaccgtgatggaccgggcctgcgg

SEQ ID NO: 26040 - DNA, 1080 bp, Mycobacterium avium
atgactttacgggtcggcatcatcggcgtcgggtggggcgcacgtgtgcaggtgcccggtttccgggcggcgaagggcttcgagcccgtcgcgctctgtgcgcgtacacccgatcggctggagcgtgcggcggccaaactgggcatcgaacagacctccaccgattggcagtctttcgttacccgcgacgacctagacgtcatctcggtcgcgactcccaccgtgctgcaccacgaaatgacgatcgccgcactggcggcggggaagccggtgttgtgcgagaagccgctggcgggcgacctcgaagcggcccgccacatggtgcgtgctgcgaccgattccaagctgcccaccgcctgctgtttcgaaaaccggtggaacccggactggttggcagtcgccgacaaggtgcgctcgggctttctcggttcgcagtacctcgcccgggtcagtcgcagcgcgtcgtattggcatccgagtcatccgctgcaggcacattggatgtacgaccgcgagcagggcggcggctatctggccggcatgctggtgcacgatctggacttcctgaccagcctgctcggccgcccggtgtcggtgtgcgcggaggtgcgcaccagcgatcctgtccgcgaactgcccgacggggggaccctaccggtcaccgccgatgacaccgcggcactgctgatgcgtatggagtcgggggtgaccgtcattttgagcctctccgttatgggcgcccacgccgatcactaccgcctcgaattgttcggctccgatggcaccatcatcggcgacggcgacttgcgttccgcggcatacagcctcggcgccgccaccgatgcgggattgagtcccctgacggtggatgaacgcgaacccgcgcaccccgagcggttgcccgggggcctggcgggtcacgccagcagggctatggcgctgatgctgcaggactggctgcccgcgttcgacggtggtcccagcggcgcggctaccttcgaggacgggctgttgtcgctcgcggtgatcgacgccgcgcaccgctccgccgaaggtggagggtgggagcaggtgcaggtt

SEQ ID NO: 26041 - DNA, 954 bp, Mycobacterium avium
ttggcgaatgtgatccggataggaacccggggcagcctgctggccaccacccaggccgggggcgtcagggacgccctgatcgcccgcgggcacccggcggaactggtcaccatcaccaccgcgggggaccggtcgtcggggcccatcgagtcgctcggggtgggagtgttcaccaccgccctgcgcgaggccatcgaggagggccgggtggacgccgccgtgcactcccacaaggacctgccgaccgccgacgatccacggtttgctgtggccgccatccccgcccgcaacgacccacgggacgcggtggtggcccgcgacggcctggtgctcggggagttgccacccggttcgctggtgggcacctcgtcgccgcggcgggccgcgcagcttagagcattgggtctcggtttggaaatccgccccctacgaggcaacctagataccaggttgaacagggttagcagtggtgatctggacgcgatcgtggtagcccgggcgggtctggcccggctgggtcgcctcggggatgtcaccgagacgctcgagccggtgcagatgttgccggcaccggcacagggcgcgctcgccgtcgaatgccgcgccggggacagccggttggccgcggtgctggcggagctggacgatgccgacacgcgcgcgtcggtcaccgcggagcgagccctgctggccgaactggaggccggttgctccgcaccggtgggcgcgatcgccgaagtggtcgagtccatcgatgaggacggccggatcttcgaagagctgtcgctgcgcggttgcgtggcggcgctggacgggtccgacgtgatccgcgcgtccggcatcggcactcccggtcgggcccgagagctggggctttcggtcgccgccgagctgttcgagctgggcgcgcgcgagttgatgagcggagcgcggcacgacccggcgcgaggaaat

SEQ ID NO: 26042 - DNA, 612 bp, Mycobacterium avium
gtgccccagcgcgggggatacgcgccgataatcggcggcatcggttacctgctggccgcaggaccggccgcgtacacgttgaaaagcgttgcggccaaggatgtctgggtgcgtccgaccgagcgggcccgggccgaggcggtcggcgtgcccgccgtggagccgccggcgaagacggccgcgggcacctgggccgtcagctttccgcgggtgctgtccgagctgttctggatcgggcggtacggcgagcgcgcggagagcatggcccggctgctcatcgtcacccgcgaccgcttccacgtctaccgccatcaccagcacagcgaggaaagcgagtgcgtgccggtgctgatggccgcgctgggccgcatcacgggcaccgacaccggcaccggcgccgcggccggtggcgatgcggccgagacgatcgccgtcgcgccctccacgctgtggtcgctgaccgtcgacccgcagcggcccggctcgctggtgcagtcggtggaggggctggcgctggccgcgcgggcggtgcgcgaccagatgtccaacgacacctggatggtgctggcgggggtggagcgggcgctggcgttggacagcgagccgccggac

SEQ ID NO: 26043 - DNA, 1164 bp, Mycobacterium avium
gtgacgccggcaagcgggtggcgtgcggtgtcatcggtgccggctagacggggcgacgcgcacatcgatttcgcccgctcgccgcggccgaccatcggggtggagtgggagttcgcgctcgtcgacgcgcagacccgcgacctgagcaacgaggccaccgcggtgatcgccgagatcggcgaaaacccgcgcgtgcacaaggaattgctgcgcaacaccgtcgaggtggtcagcggcatctgccggaccgtgcccgaggcgatggaggatctgcggcagaccctggggcccgcgcgccggatcgtgcgggaccgcggcatggaactgttctgcgccggcgcacatccgttcgcgcagtggacgacccagaagctcaccgacgccccgcgctacgccgagctgatcaagcgcacccagtggtggggacggcagatgctgatctggggggtgcacgtgcacgtcgggatctcctcgccgaacaaggtgatgccgatcatgacgtcgctgctgaactactacccgcacctgctggcgctgtcggcgtcctcgccgtggtggaccggggtggacacgggctacgccagcaaccgggcgatgatgttccagcagctgcccaccgccgggctgccgttccagttccagacctgggcggagttcgagggcttcgtctacgaccagaagaagaccggcatcatcgaccacgtcgacgaagtccgttgggacatcaggccttccccgcacctgggcacgctggagatgcggatctgcgacggcgtgtccaacctgcacgagctggccgcgctggtggcgctgacgcactgcctggtggtcgacctggatcgcaggctggaggccgacgagtcgttgccgaccatgccgccctggcatcaccaggagaacaagtggcgcgccgcccgctacggcctggacgcggtgatcatcctggacgccgacagcaacgaacgcctggtcaccgaggacctcgacgacgtgctcaaccggctggagccggtcgcccgcaagctgcagtgcgccgacgagctggccgcggtggccgacatcccccgccacggcgcgtcataccagcgtcagcgccgggtggccgaggaacacgacggcgacctgcgcgcggtcgtcgacgcgctggtggccgagctggagatc

SEQ ID NO: 26044 - DNA, 1251 bp, Mycobacterium avium
gtggggcggctggcgatctgggaccgaccggaacggcgcagcggaatcccggcgctggacgggctgcgcgccatcgcggtggcactggtgctcatcggccacggcggcatccccggtgtcagcggcggattcatcggcgtcgacgtctttttcgtgctcagcgggttcctgatcacctcgctgctgctcgacgagctgggccgcaccgggcgcatcgagctgaccggattctggatccggcgcgcccgacggctgcttccggcgctggtgctgatggtgctcaccgtggccgccgcccgccagctgctgcccgaacgctcgctcaccgggctgcgcgacgacgcgatcgcggcgttcctgtggatggcgaactggcggttcgtcgcccagaaaaccgactacttcacccagggcgcgccgccgtcgccgctgcagcacacctggtcgctcggcgtggaggaacagtactacttcgtctggccgctgctgctcatcgcggtcgcgctggcgctggccgcgcgcgcccggcgccgctgcacccgggccaccgtcggcggggtgcggttcagcgcgttcgtcatcgccaccgtgggcgcgctggcgtccgcggcggtggccatcgtgatggccgccgacggcacccgcgaccgcatctacttcggcaccgacacccgggcgcaggcattgctggtcggcgcggccgcggcggcgctgctggtgtccgactggccatcgatgaaccgcggctggtgcatgctgcgcacccggtgggcgcgccgcgtcgcccggatcctgccggtgctgggattggccgggctggcggcggcgacccactgcgccagcggcgccagcggcgaattccggcacggcctgctgatcggcgtcgcgatcgcggccgtggcggtgatcgcccccgtcgcggtggagcagcgcggcgtggtggcgcgggtgctcgcgctgccgccgctggtctggttgggcaccatctcctacggcgtctacctgtggcactggccaatcttcttggcgctcaacggggaacgcaccgggtgggccggtatgccgctgttcgccgcgcggtgcgcggcgacggtggcggtggccgccgcgtcgtggtggctgctcgagcagcccatccggcgctggcgcccggcgcgggtgccgctgttgccgctggccgcggcgacggtggccagcgccgccgcggtcacgctgctggtggtagccggtgggcgccgggccgggcctgcg

SEQ ID NO: 26045 - DNA, 954 bp, Mycobacterium avium
atgcagggcgtattcggcgtattcatcggcacgtttctcatcggtctgcgtgaaggcctcgaggcgtcactgatcgtgagcatcgtcgccgccttcctcaagcgaaacggccagaccctgcgcccgatgttcgccggcgtcgcggtggctgtgctgctcagcgtcgcggtgggcgtcggcctggacctgctggcgaccagcctgccgcaggcccagcaagagatgatggaaaccgtcatcaacgccgtcgccgtggtgttcgtgacctcgatgatcatctggatgaaccgcaacgccgcgcagctcaagggtgaactcgagcgcgaagcccgccaggcggtccaccgcggcggggccctggccctgggcgccatggccttcctcgccgtcctcaaggagggcttcgagacgtcggtgttcctgctggcggcggccgagacctcgcacggcagtcggtggttcgccgtgctgggcggggtgctgggcatcgcgacgtcgatcgggctcggcgtgggcctgtacttcggcggcctgcggctgaacctgggccggttcttccgggtgaccggggtgttcctggtgctgatcgccgccggcctggtgctgggtgcgctgcgcaccgcgcacgaggccggctggctgaacatcggccagcggcagcttttcgacctgtccggctggatcccgagcgattccgtgctgggcgcggtcaccaccggcgtgctcggcatccccgccgacccccgtctggtcgaggtgctgggctggctgctgtacgccgtgccggtgctcgtcgtgttcctgcggccggcccggctggcggccaccccgcgcgcccgaggccggctgctggcgaccgccgccacgctgctgctggccatcgccgccgtgctcgcggtcgcggcgcccgcccgggacacggtcgacgccgcgcgcacccgcaccgtcaccgac

SEQ ID NO: 26046 - DNA, 1305 bp, Mycobacterium avium
atgggatcggtcaacagggtgtacatcgcgcggctggcgcggatgctggtgctgggcccgctcggcgaatccgtcggccgggtccgcgacgtggtgatcagcatcagcatcgtccgccagcaaccgcgggtgctggggctggtcgtcgacctggcgacgcggcgcagcatcttcatcccgatcctgcgggtggccgccatcgaccccaacgccgtgacgctgagcaccggcagcgtgtcgctgcgtcatttcgagcagcggcccggggaggtgctggcgataggtcaggtgctcgacaccgtggtcaaggtcaacgaccccgaactgccggagctggccggcgtcgacgtggtggtgaccgacctgggcatcgagcagacccggacgcgggactggatggtcacccgggtcgcggtgcgcccgcagcgacggctgcgccggcgcggcccggtgcacgtggtggactggcgcaacgtgcagggcctgaccccgtccgcgctggcgctgcccggccaggccgtcgcgcagctgctcgaacagttcgagggccgcaagcccgtcgacgtcgccgacgccatccgcggactcccgcccaagcgccgctacgaggtgctcaaggcgctcaacgacgaccggctggccgacatcctgcaggagctgcccgaactcgaccaggccgaggtgctctcgcagctggggaccgaacggtcggccgacgtgctcgaggagatggatcccgacgacgccgccgacctgctcggggtgctcaatccgaccgacgccgagatgctgctgaaacggatggaccccggcgattcggcctcggtgcgccgcctactcacccactcccccgacaccgcgggcggcctgatgacgtccaacccggtggtgctcaccccggacaccgcggtcgccgaggcgctggcccgggcccgcgatcccgatctgaccgccgcgctgtcgtccatggtgttcgtggtgcgcccgcccacggccacccccaccggccgctacctgggctgtgtgccgttgcagcggctgctgcgcgaggcgccggccgagctggtcggcgggatcgtcgacagcgacctgctgacgctgcggccggagacgccgctggtcgcggtgacccgctacctggccgcatacaacctggtgtgcggccccgtggtcgacgacgagaaccacctgctgggcgcggtgaccgtggacgacctgctcgatcacctgctgccgccggactggcgggtggacatgcaggaactcgacaccgccggccggctcgagggactgggaggatccggg

SEQ ID NO: 26047 - DNA, 2547 bp, Mycobacterium avium
gtggcccggtaccggctagccgtccgaccccgcggcaccgtcgctctcctcgacggtctcgtccgcggcttcctcggcgttgcgggcgatggccagcatcgtgtcgccctcacccagattcatcagccggacgcccttggtctgccgtgccgccttacggacctggcccgccgcggtgcggatgacaccgccgccggaggtgatcgcgtacagctcgctgtcctcgtccacaatcagcgcacccaccagcctgccacggcggcggtcatacatcacggtcagcacgcccttgccgccgcggccctgcaccggatactcctcgatcgcggtgcgcttggcgtacccgccggacgtcgccaccagcaggtaggtgccctcgcggaccacgttgagcgacagcaggtagtcgtcggcgttgaagcgcatgccctgcacaccggaggtggcgcggcccatcgggcgcagcgcctcgtcggtcgccgagaaccggatggactggccgttggccgacaccagcagcagatcgtcctcggccgagcacaacaccgcgcccacgagttcgtcgttgtcgcgcaggttgatcgccacgatgccgcccgaacggttcgagtcgaagtcggtcagcttggtcttcttcaccaggccgttgcgggtggccagcaccaggtagggggcgtcctcatagctgcggatctggatcacctgggcgatccgctcctcgggctggaacgccagcaggttggccacgtgctgaccgcgggcggtgcgagacgcctcgggcagttcgtaggccttggcgcggtagacccggccctgggtggtgaagaacaggatccagtcgtgcgtcgagcacacgaagaagtgccgcacgatgtcgtcctgtttgaggccggcgccctgcacgcccttgccgccccgcttctggctgcggtacaggtcggtcttggtgcgcttggcgtagccggtctcggtgatggtgacgacgacgtcctcgcgggcgatcagatcctcgtcgctgacgtcgccgtcggcggccacgatccgggtgcgccgcgcgtcgccgtgcttttcgacgatctcggcgagctcgtcgcgcacaatgccgcgttgccgttccggcttggccaggatgtcctccaggtcggcgatctcggcctcgatcttggccaggtcgtcgatgatgcgctgccgctccagggcggccagccggcgcagctgcatgtccaggatcgcctgggcctggatctcgtcgatgtcgagcagctcgatcaagccctgccgcgcgatgtcgacggtttccgacgcccggatcagggcgatgacctcgtcgagcgcatcgagcgccttgaccagaccgcgcaggatgtgggcccgctcgttggccttgcgcaaccggtaggtggtgcgccggacgatgacgtcgagttggtggtcgacgtagtggcggatcagctggtcgagccgcagggtgcgcggcaccccatcgacgatggccagcatgttggcgccgaagctggtctgcagctgggtgtgcttgtagaggttgttcagcaccaccttggcgacggcgtcgcgcttgagctcgatgacgatgcgcagcccgacccggtcgctggactggtcctcgatgttggagatgccggccagcttgccgtcgcgcacctgctcggcgatcgaggtgatgaagttgtcgtggttgacctgatacggcaactcggtgatgaccagcgaggtgcgaccgcgcgaatcctcttccacctcaacgactccgcgcatccggatggagccgcggccggtcttgtaggcgtcggcgatgccctgcgtgccgacgatcaggcccgaagtcgggaagtcgggtcctttcacccgttccatcacggcggccagggtggcctcttcgtcggcctcgtaattgtccagcgcccagaacaccgcctcggcgagctcgccgaggttgtgcggcgggatgttggtggccatgccgaccgcgatgccccccgacccgttggccagcaggttggggaaccggctgggcagcaccgtcggctcttgcacccggccgtcgtagttgggaatgaaatcgactgtctcctcgtcgatttcgcgcagcatctccatggccagcggggtcagccgcgcctcggtgtaccgcatcgcggccggcgggtcgttgcccggcgaaccaaaattgccctgcccgtcgaccaacggatagcgcagcgaccacggctgggccatccgcaccagggtgtcgtagatcgaggcgtcgccgtgcgggtggtagttgcccatcgtttcggcgaccgaccgcgccgatttggcgtggctgcggtccgggcggaaacccgagtcgtacatggcgtagagcacccggcggtgcaccggcttgaggccgtcgcgcacctcgggcagcgcgcggccgacgatcacgctcatcgcgtaatcgatgtagctgcgctgcatctcctgctggatgtcgaccggttcgacgcggtcggcggcgtcaccgccgggtggcagcgtggtgtcagtcatctattcctcgtt

SEQ ID NO: 26048 - DNA, 900 bp, Mycobacterium avium
atggatgtcgtcgcgctgcgtgatcccgtgtcgtcggtcgtcgcccgcttcatcccgcgggcgggcatgatcggcacgtcgctgcgcgacggcgaggtggagctgctgggccagcgccgtggcctggacgcctacgtcgccgacggcaagacgatgggcatcccgattctgtatccgtgggcgaaccggttgggcggcaacacttatgccgccgagggcgcgacggtgaccctgacgcccggacgcaacggcgtgcgcgccgaccccaacgggttgccgctgcacggcgtactggccggctatcccggctggcgggtgacggcgcagacggcgaacgagctgaccgcccagctcgatttcggcgccgatccggagttgttggccggcttcccgtttccgcatctgctgcaggtggcggtgcgcctggccgggcgcacgctgacgctgaccaccacggtcaccgcgaccggtgacaccgcggtgccggtgtgcttcggctttcacccctacctgcagctgcccggcgtgccgcgcgccgagtgggtcatcgagaccccgccgctgcggcatctggggttggacgaccacggactgcccaccggggagtccgaactacagccggaacggcgagaaccgctgcgggacaagacgttcgacgacgcctacgaccgggtcgacgagggcgcggtgttcgcggtgtccggcggcgggcgccggctcgaggtatgtttcgagcacggatatcccgccgcgcagatcttcgcgccgccggccaaacccggcgaggaggccgtcatctgcttcgagccgatgaccgcgccgaccgacgccctgcgccgcggcggctaccgccgcgcacaccccggccggccggcggctacccggttctcgatccgggtg

SEQ ID NO: 26049 - DNA, 969 bp, Mycobacterium avium
gtgggcacatcggaggacaaggcccccgggcagccggtcatccatctctcgcaactgctgcgggcgccggtgctggcgcgctcgggcgaaacggtgggccgggtcgaggacgtgatcgtgcggctgcgcggagccgacgagtacccgctggtgaccgggatcgtggccggcgtcggcgggcggcgggtgttcgtcggcgacaaatcgattcacgaatactccgcggatcgagtcctgttgaccaagaacaagattgaccttcgcggcttcgaacgccgggaaggcgaggtgttgttgcgcaccgacgtgttgggccaccggctgatcgacgtggccaccgtcgagctggtgcgcgcctacgacatcgaactcgagcagaccgccgccggctggatggtcgcccggctggacacccgccgtccgccccggttgttcgggctgatcaagcactccgggggccacgcgtcgcgcgactggaaggcgttcgagccgctgatcggccacgcccgctccgatgcggtgcgccggctttcggaccggttcggcgagctcaaggccgccgagatcgcggacctgctggaagaagccgacaaggccgagggcggcgagatcctggaccgggtgcacagcgaccccgaactggaagccgacgtcttcgaagagctggacccggagaaggccagccggctgctcgacgagatgcccgatgacgaggtcgccgcgttgctggggcggatgcgcgccgacgacgccgccgacgcgatcgtcgatctgcgccagtcgcggcgccgccgcgtgctcgacctgatgcccgccccgcaacgcaccaaggtcatcacgttgatgggtttcaaccccgaaagcgccggcgggctgatgaacgtcgactcggtctcctgcgcggccagcgccacggcggccgaggcgctggcgttgatcgcctcctcgcacagcttcagcccgaggcgc

SEQ ID NO: 26050 - DNA, 234 bp, Mycobacterium avium
atgggggaccagcagagcgggccgcaggaagcggtcaagggcgccgtcgagggcgtgaagggcaaggccaaggaggtcggcgggaccatcctcggccgcgacgacctgaccgaagaaggtcaggcccagcaggacaaggccgacgcccagcgcgacgcgggcaagaaggaagccgaggccgagtcggcgcgggccggcgcggatgccgccgaggagcgccagaagaagaaccaa

SEQ ID NO: 26051 - DNA, 1095 bp, Mycobacterium avium
gtggccactccaagccacagcgacacaacggattacgacgaggccgttgccgcttctacctcgtccaccagcccccaggacaacgcggtcgcggcgccgaccgtgcggcccgacagcacgagatacgccgtgcgccaacgcccgatccgccgggtgatgctgacggtaccgccggcgccggggatcaaccccagcgccaactcgggcagcccgaacaccgcgtcgtcgcgggcgctgacccacccgcagaacgccgccatctccagtccgctgcccagcacccggccgtgcacctcggcgcggcacgcccggccgaaccgggcggtcagcgcgtcgagcaccagcgccgggctgtgccgggtgcgcgccaggtgcgcgctggccggatcggcgaaggtgccgaattcggcgagatccccaccgctgcaaaaggaggggccgttgccgctcaacacgattccggtcaccgacgggtcgagctgggcgaccgccagcgcctccagcagcgcggcgcgcgcatcggtggagaacgcgttgtgccgttgcggccggttgaacgcgatccgcagcacgtcgccgtcgcgccgggctagcaccgggtcggcgatctcgggcatgcgggccgggccgcgctcgtcgagccagcgcgcgaactccgggccggcctgcagcgtcgaatacgccagcgactcggtcagcagcccccgcgccgctggccccgcaggatccaccgcgcgcaacacgtcgtcgcagatcgcgctggcgtgcggccaccgcccgcagcgtgccgtcagctcgtccagcgacgtggacaccgaatcgacggtgacggcgcgacggtccgtgcaggcgtcttcggtgagggtgaaagtcgctgcgtcgagccagaattcggacctggcgatctggtcagccgagccgacggcgacgatcacgcccggtggtgaggcggggccgtcctgcggcgcgctggagaggtcgaccacccgcagcatcggtcacaccgaatacttctcgatcagcccgttcttgaagagcttgccggtgtcggtgcgtggcagctgctcctcgaatgcgatcgctcgcggacacttg

SEQ ID NO: 26052 - DNA, 1164 bp, Mycobacterium avium
gtggccaccggcgcacctacgggggcgctgccgggccgaatcgtgcgtgcgatcggcgaggcgggatcgatgaatcccgttgtgctgctggacgaaatcgacaaggtcggctccgactaccggggcgacccgagcgcggcgctgctcgaggtgctcgacccggcgcagaaccacacgttccgcgaccactacctggatctggacctcgacctgtccgacgtggtgttcctggccaccgccaacgtcgtcgagaacatcccgtcggccctgctggaccggatggagctggtgaccatcgacggctacaccgaggacgacaaggtcgccatcgcccgggactacctgctaccccggcagcgggagcgggcggcgctgaccgaggacgaggtgacggtgaccgatgcggcgctgcgcaagatcgccgccgactacacccgcgagccgggcgtgcgacagttcgaacggctgctggccagggcgctgcgcaaggtgacgaccaagctggcagagcagcctgggccggtcaccatcgacgagcccgatctcgtcgactacctgggccggccccggttcacgcccgagtcggccgaacgcaccgcggtgcccggggtggcgaccggcctggccgtcaccggcctgggcggcgatgtgctctacatcgaggccggggcgaccgacggggagccggggttgcagctgaccggtcagctgggtgacgtgatgaaggagtcggcgcagatcgcgctgtcctacgtgcgctcccacgccgccgcgctcggggtcgacccgaaggcgctggaccggcgcatccacgtgcacgtgcccgccggggcggtgcccaaggacggcccgtcggccggtgtcacgatggtgaccgctctggtgtcgatggccaccggacgccaggtgcgctccgacgtcggcatgaccggcgaggtcacgctgaacggtcgggtgttaccgatcggcggcgtgaagcaaaagctgctggcggcccaacgtgccgggctgtcaacggttttcatcccggcgcgcaacgagccggatctcgatgacgtgcctgccgaggtgctcgaggcgctgacggtcacgcccacgaccgacgtggccgacatcgtcgcgcaggcgctggaacccgtcaccgcgccggccgccgccgcggcc

SEQ ID NO: 26053 - DNA, 3807 bp, Mycobacterium avium
gtgtgcagcgaaaccgcttggaaatcagcccatttcatgcgcccggagcgccgagtgttatttcttgtcggcccgctgcgagtcgccggattcctcggagtccccggactcctcggcttcgcgggccggatcctcgatcacctcatatgccggatcaaccatcgacaattcccgctgaccggcctggcgggccttgccgctgatccgcaacagctgaccgggctggatgtcggcgccgccgtggccgtgatggaagatgaccgtgatctccccgctgctgtcgccgaccacgatccgccggcgggtgccgccgcgctcggcgacgtcctcgacctcgctgacccgcccctcgatggtggcccgctgcccggagatcaggccggccaccatgatgaccgccgacgaccgcgccggatgctcgtaggccgcgaccttctggtcctcgtcctgcgacacccacgcctggatcttgtcgagctccttggcgatgcgctgctcgaacgtgtccgggtaggcctcccggatccgcgattccacgtcgtagggcacgatcgtcgccgcggcgtcggggatctggctgacggcccgggcgaccttgtccgcggtccggtcgtgcagcaggcggcccagcagccgcgcgaaggtccgtcgcggcagcagcaccgtcacgttggtattgggatgctcgtcgcgcaccttggcgaccatcagctgcgcggaccggctgatccgccggtccgggcagtccacgatccgcagcggtgtgtcaagcgagaagtggtcccagcggttccgcagctgcgcggcgtgcgccgggtcgaccatgaagtgcaccgccaccagctcgtcggcccgcaggccccggccgtatcgcagcgcctcgatcaccgccaggtcgaccgagtcgacgaacaccagcaccttgtgccgcgcgtacttcaccagctccgggcggtcggtgcggaacatctcgagaatggctgcctcggcccggtattcgcggttgagccgggtcagcacgaacaccagcagcgggaacaccacgaccaccagccaggcgccctcggtgaacttcgccaccgcgaagatgcccaccacgatcgtcgacaggaccgccgcggacaggttgatcgtcagccggtgccgccagcccgcttcccgatgggtcaagtggtgcctggtcatcccgtaaccggccatcgcgaacccggtgaacacgccgatcgcgtagaagggcaccagcgcgttgaccgagccaccggtcgcgaccagcaacgccaccgacagcgcggtcagggtgatgatgccgttcgaaaacaccaggcggtgaccgcgtttcgtcaactgcctgggcaggaagcggtcctcggcgacgaagctggccaacgccgggaacccgttgaagctggtgttggcgccggtgaacaggatggccgccgtcgacgcctggaccatgacgaagaagatgtcgcccaccacgccgccgccgtagacggcgtggccgatctgggacagcaccgaggggtattcggtcaggtacggggtggcgtgggtgacgtgggccagataggcgaccccggccagcaggaagcccaggatgctggccatcgcggtgagcacccgacgggcgttgcggccctgcggctttcggaagtagtccaccgtgttggagatcgcctcgaccccggtcagcgacgaaccgccgttggcgaaggcccgcagcaacaccaggatcgtcgcgcccagcaccagcccgttgccctgatggaccggcacggtcccggccaggtgcgcgggatcgtagatcggcaggttgccgatgaccgcgcgcacgacgccgatcacgatggtcaggcccaccatgacgatgaaggaataggtcgccaccgcgaacggcattcccgcttcccgcaatccgcgcaggttcgcgtagcagatgacgagcaccacgccgaccgtgatcgccaggctgtaggggcccagcacggggatcgccgacaccaccgcgaccgtcccggcggccgactgcacggccacggtcaccacgtagtcgatcagcagcgcggcggcggcgatctgcgccacccgggggccgaaattgtcccgggcgacgatgtaggagccgcccgcgcgggtgtaggccatgacgacctgccggtaggaggcggccaccagcaccaggatgagcaggatgacgccggtgatgggcagcagcaacaggaacgcggccagccccgcgtgcggcaacagctcgatcaggatctgctcgggaccgtaggcgacggacgacaccgcgtccggcgaaagtgcgcccagcgcaacaccattggacaacttctcggacgcgatgtcctcggtgatcagcggcttgcccagaaacacgcgcttggccacatccccgaacgagagcgggatgcgcaggttgccggtcgaactggtcacgagcaccgtccttatgtgagacgcctccgagcattgtgcacgcccgcacggccgccggtgcgatcaggcgagccggtgcgatcaggcgagccggcgcaccgcggcggcgatacgctcgtcgtcggccgtcagcgcgacccgcacgtgctgcgcgccgcgcgggccgtagaactcgccgggcgccgccagaatgccgcgccgcgccagccaggtgatcgtgtcccggcacggctcgccgcgggtgacccacagatacaggccggcttcggaatggtcgacggcgaagccggccgaccgcagcgcgggcaacagggcggcccggcgccgttcatagcgctgccgctgcgcccgctcgtgcgcgtcgtcgtcgagggcggccaccatggccgcctgcaccggcgtcggcaccatcatcccggcgtgcttgcgcaccgccagcagctcggcgatcagctcggcgtccccggcgacgaaaccggcccggtagccggccagcgacgagctcttggacagcgagtggatcgcgagcagcccggtggggtcgccgtcgcagacctgcggatgcaggatcgacagcggctgcgcgtcccagcccaatcccagatagcactcgtcggaggccaccaggcagccccggtcgcgggcccatgccgccaccttgcgcagatgatcgacgcccagcacccgcccggtcgggttgctcggggagttcaggtagtacagcgccggggattgcgggcccacctgggtcagcgagtccgcgcgcagcacccgcgccccggccagccgggcgccgacgtcataggtcggatacgccagctcgggcaccacgatcaggtccgccggccccaggcccagcaaggtgggcagccacgcgatgagctccttgctgccgatcaccggcagcacgctggcctcggtcagcccgaccaccccgaaccggcgggccagggcggccaccgccgagtcccgcagccgggcggtgcccgcggtggcggggtatccggacgccgagccggcggcggccagcgcctgctggatcacgggcgccaccgggtcgacgggggtgccgacggacaggtcgacgatgccgtcgggatgcgaaccggccagcgccttggcctcggccagcgtgtcccagggaaactccggcagggccgccgagacggccgggcgacgcttcctgagctggtgtggcaccgggccgctcagtcgccttcgccttgcggtggcaggtccttgaccacctgcgggtcgttctcggtcagcccgaccttggccgccccgccgggcgaacccagctcggcgaagaagtcggcgttgatctgcgtgtactggctccactggtccggcacatcgtcttcg

SEQ ID NO: 26054 - DNA, 411 bp, Mycobacterium avium
ttgagcgtcggattcgtcgcggccgtgccagtgcgctggtcggatatcgacatgtaccagcacgtcaaccacgccaccatggtcaccatcctggaggaggcgcgggttcagttcctgcgggaggcgttcgaggtcgacatcctgaccatcgggctgctcatcgccgaggtcaaggtgacctacaaaggccaactgcggcttgtggattcgccgctgcaggtgaccatgtggaccaagcggctgcgggcggtcgatttcacgctgggctacgaggtgcgctcggtcaacgccgaccccgagtcccggccggccgtcatcgccgaatcgcaactggccgccgtgcacatcgaagaggagcggctggtgcggctctcaccgcaacatcgagagtatctgcagcggtggattcgg

SEQ ID NO: 26055 - DNA, 393 bp, Mycobacterium avium
ttgggggaatcctcggtcggctccggggtgcgccgggtggaggcctacgtcgggctggactcgttccggcacctggccaaggaacgcgcgctgatggcggggctggcgtcgtcgctgaaggtgccgtcggaggaggtgccggcccgggtggccaacctggtggagccggtttcggggccccggagaaagaaactcgagcggatgcgggtggcctccgcgacgggccgcggccgggaacccccccccggggcgcggagcgaatccgtaaacgtccgcttggtggcgcagcggatgtccggcgggatgacgggcggccgacctgcgctcgctggtcggcgacatccgcggcaagctgggcagcgatcccgcggtggtcgcgctgatcgccgaggg

SEQ ID NO: 26056 - DNA, 2322 bp, Mycobacterium avium
atgagtgtgcacgtaacagatgccaagccggtctccgaagccgagcaattgctcgaggggctcaatccgcaacagcgccaggccgtggtgcacgagggttcgccgctgctgatcgtcgccggggcgggttcggggaagacggcggtgctgacccgccgcgtcgcctacctgatcgcggcccggggggtcggggtgggccaggtgctggccatcaccttcaccaacaaggccgccgcggagatgcgggaacgggtggtgcggctggtgggcaaccgggcccgcgccatgtgggtgtccacctttcattcgacctgcgtgcgcatcctgcgcaaccaggcgtcgctgatcgagggcctcaattccaacttctcgatctacgacgccgacgactcgcggcggctgctgcagatgatcggccgcgacatgggcctggacatcaagcgctactcgccgcggctgttggccaacgcgatctccaacctgaagaacgagctgatcgaccccgccgcggcggtcgccaacctcaccgacgactccgacgagttgtcccgcaccgtggcaagcgtctacggcgaataccagcgccggctgcgggcggccaacgcgctggacttcgacgacctgatcggcgagacggtggcggtgctgcgcgccttcccgcagatcgcccagcactaccggcggcggttccggcacgtgctcgtcgacgagtaccaggacaccaaccacgcgcagtacgtgctggtgcgcgaattggtgggcaccgacaccgaggacggcgttccccccggcgagctgtgcgtggtcggcgacgccgaccagtcgatttatgccttccgcggcgccaccatccgcaacatcgaggacttcgaacgcgactacccggacgcgacaaccattctgctggaacagaattaccgctcgacacagaacatcctgtcggcggccaactcggtgatcgcgcgtaactccggtcgccgcgacaagcggctgtggaccgacgccggcgccggcgagctgatcgtcggctacgtcgccgacaacgagcacgacgaggcccgcttcgtcgccgaggagatcgacgcgctcgcgcagaagggcgagatcacctacaacgacgtcgccgtcttctaccgcaccaacaactcgtcgcggtccttcgaggaggtgttcatccgcgccgggatcccctacaaagtcgttgggggggtgcgcttttacgagcgcaaggagatccgcgacatcattgcctacctgcgggtgctggacaaccccggcgacgcggtgagcatgcggcgcatcctcaacaccccgcgccgggggatcggtgatcgggccgaggcctgcgtggcggtgtacgccgagaacaccggtgccagtttcgccgacgcgctggtggccgcggccgaaggcaaagtgccgatgctgaattcgcgcgcggagaaggcgatcgcgggtttcgtcgagttgctggacgacctgcgcggccggctggacgacgatctcggcgacctggtcgagtcggtgctcgaacgcaccggctaccgccgggagctggaatcgtccaccgatccccaagagctggcgcgtctggacaacctcaacgaactcgtcagcgtcgcacacgaattcagcaccgaccgggcgaacgccgccgcgctggacgagtcgctggacgccgcggacgacgaagacgtgcccgacaccggtgtgctggccgagttcttggaacgggtctcgctggtctccgacagcgacgagatccccgaggacggcgccgggatggtcacgctgatgaccctgcacaccgcgaagggcctggagttcccggtggtgttcgtcaccggttgggaggacgggatgttcccgcacatgcggtcgctggacgatccggtcgaactctccgaggagcggcggctggcctacgtgggcatcacccgggcccggcagcggctctacctgagccgggccatcgtccgctcgtcgtggggccagcccatgctcaacccggaatctcgcttcctgcgggagattccgcaggaactgatcgagtggcggcgcaccgcgccggcgccgtcgttcagcgcaccggtcagcggcgccggccggttcggcaccccgcgggcggccccgacccgcgccgcaatgagcaaacggccgctgctggtgctggcgccgggcgaccgggtgacgcacgacaagtacgggctgggccgagtcgaggaggtgtccggcgccggcgagtcggcgatgtcactgatcgacttcggcagctccgggcgggtgaagctgatgcacaaccacgccccgatcagcaagctc

SEQ ID NO: 26057 - DNA, 267 bp, Mycobacterium avium
atggccgcaacggccctcgcgatcggtgggctgggcctggccggcttgggcatcgcaacgcaagcccaggcccatcccgggcccttcccgcaatggtgccccggcgaattctgggatccgggctggggaaacaactgggactggaacaactgccatgactggcgtggcggcccgcccccgccgcctccgggtccgccgggcccgccacccccggggtggggccaccctggtccgggcggaccgccgccgccgcacggctggcacccc

SEQ ID NO: 26058 - DNA, 2796 bp, Mycobacterium avium
ttggctgacccgaaactgaaggaaaacaccagcggcgggaacggcagccgccggcgactcgtgatcgtcgagtcgcccaccaaggcgcgcaaactggccagctacctgggctcgcggtacatcgtcgagtcgtcgcgcgggcacatccgcgacctgccccgggccgcggccgacgtgccggcgaaatacaagtcggagccgtgggcgcggctcggcgtgaacgtcgacgccgacttcgagccgctgtacatcatcagcccggagaagaagcacaccgtcagcgagctcaagggcctgctcaaggacgtcgacgagctctacctggccacggacggcgaccgcgagggcgaggccatcgcctggcacctgctggaaaccctcaaacccaacattccggtcaagcggatggtgttccacgagatcaccgagccggccatcctggaggccgccgagaacccgcgcgacctggacatcgacctggtcgacgcgcaggagacccggcgcatcctggaccggctgtacggctacgaggtcagcccggtgctgtggaagaaggtcgcgcccaagctgtcggcgggccgggtccagtcggtggccacccggatcatcgtgcagcgcgagcgcgaccggatggcgttccgcagcgcgtcctactgggacatcgtggcccagctggacgccagcgtgtccgacccccaggcctccccgcccaccttcgcggcccggctgaccagcgtggacggcctgcgggtggcgaccgggcgggacttcgactcacagggccagctgcgcaaggccgacgaggtgatcgtgctcgacgagccccaggcgaccgagctggccgccgggctgcagggcgcccagctgtcggtggcctcggtggaggaaaagccctacacccgccggccgtacgcgccgttcatgacgtcgacgctgcagcaggaggccggccgcaagctgcggttctccgccgagcgcaccatgagcatcgcccagcggctctacgagaacggctacatcacctatatgcgtaccgactcgaccacgctgtcgggctcggccatcaacgccgcgcgcacccaggcgcgtcagctctacggcgaggagtacgtctcgccatcgccgcgccagtacacccgcaaggtgaagaacgcgcaggaggcgcacgaggcgatccgtccggccggcgagacgttcgccaccccggacgcggtgcgccgcgagctcgacggcgacgagttccggctctacgagctgatctggcagcgcacggtggcctcccagatggccgacgcgcgcggcaccacgctgagcctgcggatcggcggtcaggccggggaccggcaggtggtgttctccgcgagcgggcgcaccatcaccttcccgggctttttgaaggcctacgtggagaccgtcgacgagctggccggcggcgaggccgacgacgccgagagccggctgccgcagctgacccagggccagcggctggacgccatcgagctcacccccgacggccacgccaccaacccgccgccgcgctacaccgaggcgtcgttggtcaaggcgctcgaggagctgggcatcggccgcccgtcgacctactcgtcgatcatcaagaccatccaggaccgcggctacgtgcacaagaagggcagcgccctggtgccgtcctgggtcgcgttcgccgtcaccggtttgctggagcaacatttcggccggctggtggactacgacttcaccgccgcgatggaagacgagctggacgcgatcgcctcgggccaggagcggcgcaccgactggctgaacaacttctacttcggcggcgagcacggcgtggccgactcgatcgcccgctccggcggcctgaagaaactcgtcggcgtcaacctggagggcatcgacgcccgagaagtcaactccatcaagctctttgacgacgagcagggccgccccgtctacgtccgggtgggcaagaacgggccctacctggagcgcatggtgaccggcgacgacggcgagcccaccccgcagcgggccaacctcaacgactcgctgacccccgacgagctcaccctcgaggtggccgagcagctgttcgccacgccgcaggagggccgggtgctgggggtggatccggcgaccggccacgagatcgtcgccaaggacggccgttacgggccgtatgtggccgaggtgctgcccgagccgccgcccgacgatgacgacggcagcggcgcgcccgccaagaagggcaagaagcccaccgggcccaagccgcgcaccgcgtcgctgctgcgcaccatggacctgcagacggtcaccctcgaggacgcgctgcgcctactctcgctgccccgggtggtgggggtcgaccccgagaccggtgaggagatcaccgcgcagaacggccgctacggtccatacctgaagcgcggcaacgactctcgctcgctggccaccgaggagcagctgttcgacatcaccctcgaggaagcgctgaagatctacgccgagcccaaacgccgcggccggcagggcgccgccgcgccgccgctgcgggagctgggcgccgatccggcgaccggcaagccgatggtgatcaaggacggccggttcgggccgtacgtcaccgacggcgagacgaacgcgagcctgcgcaagggcgacgacgtcatgtcgctcaccgaccagcgcgccgccgagctgttggccgaccgcagggcgcgcggcccggcgaagcggaccgccaagaaaaccagccgcaaggccccggccaagaaggcggccaagcgcggt

SEQ ID NO: 26059 - DNA, 978 bp, Mycobacterium avium
atggcttacccgcggcagcgtccgcgccggcttcgctcgaccccggcgctgcgccgcctggtggcccaaacctccttggagccaaggcatttggtgctgccgatgttcgtcgcagacggtatcgacgaaccgcgtccgatcgcctcgatgccgaaggtggtgcagcacacccgcgactcgctgcgcgccgccgccgccagcgccgtcgccgccggggtgggcggtctgatgctgttcggtgtgccgcgcgacgaggagaaggacccgatcggttcggccggcaccgaccccgacggcatcctcaacgtcgcgctgcgcgatctggccaaggacctcggcgatgccaccgtgctgatggccgacacctgcctggacgagttcaccgaccacgggcactgcggtgtgctggatgaccggggccgggtggacaacgacgccaccgtggcgcgctacgtgaatctcgctgtggcgcaagcggagtcgggcgcccacgtggtggggccgagcgggatgatggacggtcaggtgggcgcgattcgcgacggactggacgccgccggcttcaccgacgtggtgatcctggcctacgccgccaagttcgcctcggcgttctacggcccgttccgggaggcggtcagctccagcctgtccggggatcggcgcacctatcagcaggagaccggcaactcccgcgaggcgctgcgcgagatccggctggacctggacgagggcgccgacatcgtgatggtcaagccggcgatgagctatctggacgtggtggccgccgcggcggaggtctcgccggtcccggtggccgcctaccaggtgtcgggggagtacgcgatgatttgtgctgcggccgcgaacaattggatcgacgagcgcgccgcggcgctggagtcgctgaccagcatccgacgcgccggagccgatatcgttctgagctattgggccgcggatgcggcagggtggctgtcg

SEQ ID NO: 26060 - DNA, 738 bp, Mycobacterium avium
ttggcagtgatcaccgaacccgtcaagacgttttcgcgcaagttcatgggctacgacaccaccgcggtcgacgcgcacatcgagatgctgaccgccaagcagcagctgctgatcgacgacgtggagagcctgcgggcaaggctgcaggagtccaacgagcaaacggccgcgctgcgcaaggaggtcgccgcgctcaccgacacctcgccggcgccgcacgcggtgcagcagcggatggccaagatgctggcccgcgcggtcgacgaggtggccgagatgcaggccgaggcgcgggccgaggccgacgcgctgatcgccgcggcggaagccgaggcgcaggccgccgagcgcaagcgcgacgaggtgctcgccgacatggccgcgcagcaggaggcgctggaggccgaataccgggagaccaaggagaagctggacgccgagctggccgacatgcgcgccgaggcgcaggcggccatcgacgaggcgcgccgcgccgccgaacgggagtgcgagcagctgctcggcgacgccaagcagggcgccgaccactaccgcgacacggcccggcgtgcggtggaggaggccagcgcgcagcggatcaagatcctcgagcagctgatgagcgtgtaccgcgagctcgaggacgtcccggccgcgctgcaggccgcctacgacgagcagcagggctcggccgacgacggcgtgctggcggcggtggacggcaaggtacgcgcgggc

SEQ ID NO: 26061 - DNA, 3348 bp, Mycobacterium avium
atgacgatcgatgaccgggcactgcacgttgggcgagaacaactgacggaactcgatggtgggccattcccgctgacacgcggacagctcgacatctggctcgcacaggaaacggatcagcagggtgcgaggtggcagctgggctacctgctgcgaatcgaaggcaccgtcgacccgtggttgctggagcacacgatccggcaagtggtgcgcgaggccgaaccactccgagccgcctttttccaggtggatggccaggttttccagaaggccgtcgattacccggacgtcgagctcgcgtgctatcagcggatgggctcgcaagatcccgtccaggaagcctaccggctggcggcctcgattcagcgcaccgtgatgccgctcgatggcccgctgttcaaatttgcgttgttgcagacccgcgtggacgaattctatctattcgtgtgctgccaccacatcgtggcggacggaatcggtcttgctctcatttgccaccgcatcggggatgtctacaacgcgttggcctcgggtgcgccgattccccccgcctatttcgggtcgctgagtgatttgattgcctgcgaggccgaatacgaagcgtccaccgattatctcgatgatcgggcctattgggccgagaacctaccgtcggaaagcgaaccgggttatcggttcgcgcccgcctcggagcgggaaccgtacgaatcttccgcgccgattgagttggacccggtcgccgtcgccgggatacagaagttgtcacaggagctgggggtgcgtcgctcgtcggtgctggccgcggcgtgcgcgctgctggtgggcgggtgcgacctggaaaattcggagatcgtgttcgagtttccggtgagtaggcgggtgcgtccggaagcgcagacggtgcccggaatgattaccggattcgtccccctggtcctgaaagcttcgccgggctcgtcggtcgcgagtttttgtgagcatgtcgacacacggctgggagaagcgctccaacatcagcggttcccggtgcacaccatcgagaacaagcgtcgcgggtccacgcagacgtcaaatcgggtaattctcaatttcattccgacgacaaacctggccaacatcgccggtgccagggtttcgggaaccctgacccacaccaacctcgtcgaccagcttggactggacttcttcagcgaccacgatcggctattcctcggcatgcagcccggcgcgacaacgggtggattcggtggcgccgggcaatggctttctgattgtgacgtccacgatgtggtcgggcggttggagcgggtgttggtggcgatgacggctgatccggggcggcggttgtcgtcggtggatgtgctgggtgtgggtgagcgggtgcggttggatgagcttggtaacaaggcggttttggctggcccgcggggtgtttcggtgtcgattccggatttgtttgccgcgcatgtggccgggacgccggatgcggtggcggtgagttttggcggccgttcggtgagctatcggcagctggatgaggcgtcgaatcggttggcgcatctgctggtggctcgcggggtgggcccgggtgagcgtgtggcgctgctgttttcgcggtcggtcgatgcggtcgtggcgatgttggcggtgctcaagacgggggcggcgtatctgccgatcgacccgggcgtgccggacgagcgggtcgggtttgtgttggccgatgccgcgccgatcgccgcgatcaccggcaccgggctggcggagcggttgggcggacaggacgtggcggtcatcggtgtggacgatcccgacgtcgttccggctgtcgacgcccagccgagcacggcaccaccggggccggcccctgacgatgtcgcctacctgatttacacgtcgggcaccacgggtgtgcccaaaggcgttgcggtcactcaccgcaacgtgacccagctgttgggggcgttggatgcggggttgccggccccgggcgtgtgggcgttgtgtcattcgttggcgttcgacgtgtcggtgtgggagattttcggcgcgctggtgcgcggtgggcggttggtggtggtgccggagtcggtgaccgtttctccgcagcagctgcacggcatgttggtggccgaacaggtcagcgtgttgacccagaccccctcggcggtggcggcattgccggctgacgggttggagtcggtggccgtggtggtggtcggtgaggcgtgtccggtggaggtggtggatcggtgggcgccgggtcgggtgatggtcaacgcctacgggccgacagagaccaccatgtgcgtggccatcagcgcaccactagagcccggatcgggcgtgccacccatcggtgcgccggtatcgaccgccgcactgttcgtcctcgaccggtggttacgccctgctccccccggggtggtcggggagttgtacgtcgccggcgccggcgtggcgatcgggtatacgggccgggccgggttgaccgcctcacggttcgtggcgtgcccgttcgccagtatgtcggggcagcggatgtatcggaccggggatttggtgcgttggcgtgccgacgggcagctggattatctggggcgggccgatgagcaggtcaagatccgcggctatcgcatcgagctgggtgaaatccgttcggcgctagtggatttggacggtgtggagcaggcggcggtgatcgcccgcgaggaccgccccggcgacaaacgactggtcgcctacgtcaccgaatcagccaccgggacagccgatccgggcgagatccgcgcccggctggcgaagcggttgcccgagtacatggtgccggccgcggtggtggtgctggacgcgctgccactgacggtcaacggcaaactcgacacccgcgccctgcccgcacccgaattccagaacgccgactaccgtgcacccgccagtccggtcgaggaaatcctggccggcgtattcgccgacgtgctggggctggaccgggtcggcgtggacgactcgttcttcgacctgggcggcgactcgttgttggcgatgcgggtgatcgccgcgatcgaaaccacgctgaatgccgacctttcggtgcgcaccgtgttcgaggcgcccaccgttacccagttggcgcagcgcgtcagcggcgaccggggccggcggcaaccgttggtggccgtggagcggccggcggtggtgccgttgtcgttcgcccagcagcggttgtggttcatcgaccaactgctcgggccctcgccgatctacaacatggctgccgcgttgcggctgaccggacggctagacgccgacgcgttggggacggccctggccgatgtggtggcccgc

SEQ ID NO: 26062 - DNA, 699 bp, Mycobacterium avium
ttgttgaccagtgccttctttgccatctgctcagttctccttgaagggaaagccgagggcccgcaacagcgctcgtccttcgtcgtcagtcgtcgccgaggtgacgacgttgatgtccatgccgcggacccggtcgatcttgtccacatcgatctcgtggaacaccgactgctcggccagcccgaaggtgtagttgccgacaccgtcgaactgcttgggcgagagcccgcggaagtcgcgaatacggggcagcgcgatcgaggtgagccggtcgaggaactcccacatccggtccccgcgcagggtgacccgggcgccgatcggcatgccctcgcgcagcttgaactgcgcgatggacttgcgcgcccggcggatctcgggccgttgcccggtgatcagcgccaggtcgttgacggcaccgttgatcagcttcgcgtcgcgcgccgcctcaccgatgcccatgttgaccacgaccttggtcaccgtcgggatctgcatgacgttggcgtatccgaactgctgctgcagcgaatcgcgaatctcgttgcggtagcgctctttcaggcgcggctgaactttctctgtcgtggtcatctcagatgtccttgccgttgcgcttggagatacggacgcgcttgccggtctcctcgtcgaggcggtagccgacccgggcgggcttgccgtcggagtcgaccacca

SEQ ID NO: 26063 - DNA, 1428 bp, Mycobacterium avium
atgggaatcgacgcggggacgacggccacgccgcgcacgctggccgaaaaagtctgggacgaccacgttgtggtgtccggcggggccaacgagccggacctgatctacatcgatctgcacctggtgcacgaggtcaccagcccgcaggcgttcgacggcctgcggctggccggccggccggtgcggcggcccgatctgacgctggccaccgaggaccacaacgtgcccaccatcgacatcgacaagccgatcgccgacccggtgtcgcgcacccaggtcgagacattgcgccgaaattgtgccgaattcggcgtccggctgtacccgatgggcgacgcggagcagggcatcgtgcatgtcgtcgggccgcagctgggcctgacccaaccgggaatgacggtggtgtgtggggatagtcacacctcgacgcacggcgcattcggcgcactggccatgggaattggcacctcggaggtcgagcacgtgctggccacccagacgttgccgctgcggccgttcaagacgatggcggtcaacgtcgacggcgagttgccggccggcgtgacggccaaggacatcattctggcgctgatcgccaagatcggcaccggcggcgggcaggggcacgtcatcgaataccgcggcagcgccatcgaatcgctgtcgatggaaggccggatgaccgtgtgcaacatgagcatcgaggccggtgcccgggcggggatgatcgctcccgacgacaccacctacgagttcctgcgggaccgcccgcacgcccccaagggcgcgcaatgggatgcggccatgcgctattggcagcagctgcgcaccgatcccggcgcggtgttcgacaccgaggtctatctggatgccgcgtcgctgagcccgttcgtgacgtggggcacgaacccgggtcagggcgtgccgttggccgccgcggtaccggatcccgaactgatgaccgatgatgccgagcgtcaggccgccgagaaagcgttggcatacatggaccttcgaccgggcacgccgatgcgcgacatcgcggtcgacgcggtgttcgtcggctcttgtaccaacggtcgtatcgaggatctgcgggtcgtcgccgacgtgctgcgcggccgcaaggtcgcgccgggggtgcggatgctcgtggtgcccggctcgatgcgggtgcgcgcgcaggccgaagccgaagggctgggcgaggttttcaccgccgcgggcgccgaatggcggcaggcgggctgctcgatgtgtttgggaatgaatcccgatcagctggcgccgggggagcggtgcgcggcgacctcgaaccgcaacttcgaagggcgccagggcaaaggcggccgcacgcatttggtgtctccggccgtcgccgcggccacggcggtgcgcggcacattgtccgctccggccgatttggac

SEQ ID NO: 26064 - DNA, 1554 bp, Mycobacterium avium
atgtggccgaacggcaccatcaccccctacggtgccgaccagctcgccgcaggtgatctcccgaacctgtgggtgaccagcgccgaccgccagcacatcttctacttgatgggcggcttggcgccgttccccggcgtgaccgacggcatcctgtgcgtcgagaacccggtcgggatggccgcgaagttcaagaaccttgacctgcaggccgcccgccaagacggggtcacctaccagggcaaggtgtacgacccggccatcatcaagctgaagctgcaagtccatgcccgcacaccccaagtgctgcaacagatcatggacgaatggatgggagcctggtccaccccacgcgacaccaccctgacgatggaatacatcacccccgacggcggctactggaccgcccaggtccggctgatgcccgactcctggggcgacgcaatgaaactcaccccccgcgagatcggggtgtgggacatgacccacatctgccgcatcgacgacagcttctggacaaccatccccgtcgtcgactcctggcggcccacctacgccgacttctccgacaacttcgccactccaaccgaatccgggctcgggccgggctggtcgaccatctacaacccgaagggctccggctacgagtacgtcggcgccgaccgccaagtccactgggccgactccggtaactccacccagggcgtgctcaacatctacaccgcccagcccaccgacaccgacaaccaagtcgtgactgtcaccctcggcgccggctgggacggtgtggtgctgttcggcgaagccaccaccgtcatcggcgcccgaatggacgccaacggcaacggcgtgttctgcgacttcggttggggcggaatcgaagtctactgcgtcgtcgacggtgtcgtgacgatgctctaccgggtggtcgacctgttctccgcgccgctgcccggggagacctggcagttcatcgcaggcgcggtcccgggcgtgccgcgcagcttcgcggtgacccgcttcgacggcaccgaagtcgtctcgttcaccgaggccggcgaaaccagccccctcgggccggacaaccgctacaccgggttcggaatgaccactgggcaaggcattttcaacgaagcccagcccgccccgatcgcctatttcgccggcgccgacaacaaccaggccgccgaaaccgggtatgtcggcctgtcgaaccagggcacccaggagggctggcccgacatcctgttttacgggcccggaacgtggggattcggcaatggccccaacagcacgaacatgatcaccgtcgggccgctgaaggccggggacgtcgcgttcctgtccacgctgccgcgccagcagcgagtggtgaacatgaacaacctcaccgacacctcgttccagaaactgctgtccggggtctatgacaccccgataccgggtgtggccacaccggatcaggtcacgctgtcacagatcccggtgtcgatcaccggcggcaccgcgtcctcccagatcgttatgtcgttgaccccgcgtaggattcacccggcg

SEQ ID NO: 26065 - DNA, 1359 bp, Mycobacterium avium
atgacaacgacttcggagacttcggaggcctccggggccccgcaggcgacgccgctgacgccggtgatcagccgcttctgggacgatcccgagtcgtggacgctgcagacgtaccaccggcacggcgggtacgcggcgatgaagaaggcgctggcgatggagcccgacgcggtcatcgggatggtcaaggactccgggctgcgcgggcgcggcggcgcgggcttctcgaccggcaccaagtggtcgttcatcccgcagggcgacaccggcgcggccgccaagccgcactacctggtggtcaacgccgacgagtcggaacccggtacgtgcaaagacattccgttgatgctggccaccccgcacgtcctgatcgagggggtgatcatcgcggcgtatgcgatccgggccaaccacgcgttcatctatgtgcgcggcgaggtgctgccggtgctgcgccggctgcagaacgccgtcgccgaggcctacgccgccggctatctgggccgcgacatcgacggctcgggcttcgatctggagctggtggtgcacgccggcgccggcgcctacatctgcggcgaggagaccgcgctgctggactcgctggagggccgccgcggccagccccggctacggccgccgttcccggcggtggccgggctgtacggctgccccacggtgatcaacaacgtcgagaccatcgccagcgtgccgtccatcatcggcaacggcgtggactggttccgctcgatgggcagcgagaaatcgccgggtttcacgctgtattcgctgtccggccacgtcacccggcccggccagtacgaggcgccgctgggaatcacgttgcgcgagttgctcgattacgccggcggggtgcgggccgggcaccggctcaagttctggacccccggcggctcgtcgaccccgctgctgaccgacgaacacctcgacgtgccactggattacgagggcgtgggcggggtcggctcgatgctgggcaccaaggcgctggagatcttcgacgagaccacctgcgtggtgcgtgcggtgcgccgctggacctacttctacaagcacgagtcgtgcggcaagtgcacgccgtgccgcgagggcacgttctggctcgaccagatctacgaacggctggagaccggtaagggcacggccgaggacatcgacaagctgctggacatctccgacaccatcctgggaaagtcgttctgcgcgttgggcgatggcgccgccagcccggtgatgtcgtcgatcaagtacttccgcgacgagtacgtcgcccacgtcgagaacggcagatgcccgttcgacccgcgagactccatgctgacaccgaacgggagcgactcg

SEQ ID NO: 26066 - DNA, 951 bp, Mycobacterium avium
gtggcctcggccctgctggtggtgctgctgctggccggcgtcggcctgggcgccggggtggcctggttcgacaccaagctgcaccgcgagccggtgctcgccgactacccgggccggcccgagccgggccgcggcagcaactggctgatcgtcggctcggacagccgccagggtctgagcgccgagcagcaacagcagctggccaccggcggtgacatcggcgacggccgcaccgacaccatcctgctggtccaccttcccggggtggggtccggcgtggcgccgacgatggtgtcgataccgcgcgactcctacgtgccgatccccgagcacggcaaggacaagatcaacgccgcgttcgccatgggcggggcgacgctgctggtccgcacggtggagcaggccaccgggctgcgcatcgcgcactacgccgagatcgggttcggcgggttcgccgccctggtggatgcgctgggcggggtgagggtgtgcccgcaggcgccgatgcacgacccgctggccggcctcgacctgccggccggctgccagacgctggacggccgcaacgcgctggcctacgtgcgcagccgcgacaccccgcgcgccgatctggaccggatggtcaatcaacggcagttcgtcgcggcgctgctgcaccgtgcggccagccccgcggtctggctcaacccgtggcgctggtacgcggcgccgcgcgcggtcgccgactcgctgaccgtggaccgcgccgaccacgcctgggacctggcccggctcggctgggcgctgcacggctcccccgccacggtgacggtcccgatcggcgagttcaccagcggcgacgccggctcggtggtggtgtgggaccacgcgcgggcggcccggctgttcgacgcgttgtcctccgacgggcagctgccggcgggcagcacggacgaacagcagccgtcgagc

SEQ ID NO: 26067 - DNA, 627 bp, Mycobacterium avium
atgacggacctggcagagctggtggcgccggcgcacaccgccgtcatcacgcaagaagtccagggcgcggtcgtcggtcccgacgccggcctgggcgcgctggccgcggaagcccgccgggtcgcgctgccgaacatcgtgcggctgttgccgccggcccgcgccgccggtgtgcgaatcgtgcactgcctggtgcagcggcgcccggacggactgggctccaatcacaacgccaagatcttcgcgctgggtcgccgctccgggcaaggccgggtggacatctcccccggcaccccgggggccacgctgttgcccgaattaggccccgcgccaagcgatttggtgctgagccggtggcatggcgtgggcccgatgggcggtaccgacctcgacgcggtgttgcgcaacctgggcgtgtccaccctggtggtggtcggcgtctcgttgaacatcgcgattcccaacgtcgtcatggatgcggtcaacgccgcctaccgcgtcgtcgtcccgcgcgacgccgtcgccggcgtccccgccgagtacggcgaggcggtcatcgcgaacacgttgtcgctgctggccaccatcaccaccaccgacgagctgctgcgcgcctggagccggcca

SEQ ID NO: 26068 - DNA, 1401 bp, Mycobacterium avium
gtgaagctgaacgcacataacctgaccggtctcaaaatccccgtcccgacctatgaccgtagccaaatcggcatcggcatagcgcatttcggcgtcgggggttttcatcgtgcccaccaggccatgtacctggaccgcttgctgaacgacggcctcgcccgggactggggcatctgcggtatcggcgtgctgcccgacgaccggcgcatgcgcgacgcgctgcgcagccaggactacctctacacgctgatcctggaacatcccgacggcacccaggagccgcgcgtcatcggatccatcgtcgacttccgttacgcgcctgaggatcccggttccgtcgtcgatctgctggccgatcccgccacccggatcatctcgctcaccatcaccgagggcggctaccagccgccgctcagcgcggcgttcgagttggtggccgaggcgctgaatcggcgacgggagcgtggcctgccctctccgacgatcgtctcctgcgacaacatcatcaaaaacggagacgtggcccggcgcgccttcaccgcccacgccgagcaggtcaatcccgaactcgcgcaatggatgcgggagaacaccaccttccccaactcgatggtcgaccggatcaccccgacgcccacaccggacctcgtcgaccggttggccgccgagttcggcgtgcaggacgccgagccggtggtggccgagccgttcgccatgtgggtgctcgaggacgacttcgccgacgggcggcccccgctggacaaggccggcgtgcggctggtcgacgacgtggcgccctacgaggcgatcaagctgcggctgctcaacgccggccatcagggcctgtgctatttcgcctacctggccggataccgcgaggtgcacgaggccgcccaggatccggtgatcgcggaattccttgcccgctacatggattcggaggcgatgccgacgctgccgcggatgcccggcctggaagacttccgcgacggcctcatcccccgcttcgccaacgcctatgtgggcgaccaggtggcccggctgtgcgcggactcctccgaccacatcccgaagtggctcttgccggtggtgcacgacaacctgcgctccggcggcccggtgcagctgtccgcggcgatcgtcgcgagctgggctcgctacgccgagggcgtcgacgaacagggccgcccgatcgaggtggtggaccggctcgccgacaccctggtgccgctcgcccgctcgcagcgcgagaatccggacgcgtttctggccaaccgtgcggtgttcggcgacctgatcgacgcaccgcgcttccgcgaggcctaccggtgggccctggactcgctgcaccggcgcggcgcgcgcgcgacgttgcgggcgctgatcggggccgacgggtcg

SEQ ID NO: 26069 - DNA, 1815 bp, Mycobacterium avium
gtgacgaacaccgttgattccgcgggcaccggcggagggcgggcggcaccgggcggctccgcatcggcactggcagtgggcacgccgctgacctccattccggactaccgcaacgaaatacacaccgccgaagacgtcatcgacgtggaggcatacggcggcggcttcgatctcacccggcgggcgaccgcccccaagctgcgggtcggccgcgaccggtggttcaacctgttgtggttgatccccatcggctttgccctgctgatcgcgggggtggcggtgggcaaaggcctgcacaacatgccggcggtgcagtcgttcatccagcgctacccgggcaccgacagcgccggtgtcccgcccggcctgccggcgtggatcggctggacgcatttcttcaacctgttcatgatgatgttcatcatcaggaccggcatccagatcctgtgcgaccatccccggctctacttcagccgcaacgccacccccggtaaggacgagtggctgcgggtcgggccgccggttcccgacgacgagctgtggaccgccaacgccgacaccgtcgccctgccaccgcaattcgggcttcccgggttccgccactcgatcgggttggcccgctggtggcacctcggcgtcgacgtgttgtggttgctcaacggggccgtcttctacgtgctgttgttcgccaccgggcagtggcgccacatcgtgccgaccagctgggacgtcttccccaacgccgcgtcggtggccgtgcagtacctgtcgctggactggcccaccgacaacggctgggtggcctacaacggcttgcagctgctgtcgtatttcacgacggtgttcatcgccgccccggccgcgttgatcaccgggctgggcatgtcaccggcgctgtcgcagcgggtgcactggctgagcaagcggctgagcatccagcacgcgcggtcgctgcatttcctggtgctggtctacttcctgttcttcatcctggtgcacgtcaccatggtgctgaccaccagtgcgctgcgaaacctcaaccacatgttcgccgcccgcgacgacaacagctggataggtttcggcatcttctccgcggccatggtgctgaccgcgatcgcgtgggtttgggccactcccttcaccattcgccatccgcgggtggtgcagcgggtcggctacgcgctggtcggcccgttccagcggatgctcgagcagctggatcccaagccgggcgccttcaccgaaaaggacatctcgccgcaccactggcgcaacggccggctgcccgagacggtcgagtacaaggagctggaggccaacgacttcaaggactggcggctcaaggtctacgggctggtcgagcacccgatggagttctcgctcgaggacctgatggcgctgccctaccacgagcagatcagccagcacttctgcattcaggcctggtcgggtgtcgccaaatggggtggcgtgcagatgaaaacgatcatggacatcgtcaagccgctgcccgaggccaaatgggcggtgttctactcgatgggtctcggcgccacgggcggcatctactacaacgcccaccacatcggccagatggaccatcacatgacgatgctggcctacaagatgaacgaccagcaactgccctacatgcacggccggccgctgcggctgcgcaatgagctgcagcacggcttcaaattggtgaagtggatcaagggcatcgagttcgtcgccgactaccgcgacatcggaagcggttacggcggctacagcgaagaccacaagtatttcgggcgccaccaaacgctc

SEQ ID NO: 26070 - DNA, 888 bp, Mycobacterium avium
gtggttagagccgagcgcgccccgaagtcgaccggcttcccgcagctgcccccggcgcccgacgactacccggtgttcccggacaagtcgacgtggccggtggtcttccccgagttgccgccgtcgcccggcggcgggccgagccggccgccgcagcacatctccaaggcggcagcgccgcgcatccccgcggaccgactgcccaaccacgtggccatcgtgatggacggcaacggccgctgggccaccgaacggggcatgtcacgcaccgacggccacaaggccggcgaggcggtggtcatcgacatcgtctgcggcgcaatcgaaatcggcatcaagtggctcagcctgtacgccttttccaccgagaactggaagcggtcccccgaagaggtccggtttttgatgggcttcaaccgcgacgtggtgcggatgcgacgggtgaacctgaacacgataggggtcaagatccgctgggtgggttcgcggccccggctgtggcgcagcgtgatcaacgaattggcgatcgccgaggagatgaccaagcgcaacgacgtcatcaccgtcaactactgcgtcaactacgggggccgggccgaaattgccgaggccacaaaggaaatcgcccggctggccgccgccggccggttgaaccccgagcgcatcaccgagtccaccgtggcgcatcacctgcaacggcccgacatccccgatgtggacctgttcttgcggacctcgggggagcagcggtccagcaacttcatgttgtggcaggccgcctacgccgaatacatcttccaggacaagttgtggcccgactacgaccgccgcgatctgtgggccgcctgccaggaatacgcttcccgcaaccgcagattcgggagcgca

SEQ ID NO: 26071 - DNA, 1038 bp, Mycobacterium avium
atgggactgcaagaggtgtggttcggcatcatcgggatgctgttcctgggtttcttcatcctggagggcttcgacttcggcgtgggcatgttgatggaaccgttcgcccgggtcggaatcggtgagccagaaccgttgcgccgcaccgcactcaacaccatcggcccggtgtgggacggcaacgaggtgtggttgatcgtcggcggcgcggccatgttcgcggcctttcccggctggtacgccaccgtattctccacgctgtacctgccactgttggcgatcctgttcgggatgatcctgcgcgccgtggcgatcgagtggcgcggcaagatcgacgacaccaagtggcgcggctgggccgatttcggcatcgccgccgggtcgtggctgccggcggtgctgtggggggtggcgttcgccgtcctggtccgcgggctgccggtggacgccgacggccacatccacctctccgtcaccgacgtgctcaacccctacacgctgttgggtggcctggccaccgccgggctgttcctgttgtacggggcggtgttcgtggcgttgaagacgtccggtgcgatccgcgacgacgcctaccgcttcgccgtctggctttcgcttccggtgacgggactggttgcgggctttgggctttggacccagctcggctacggcaaggactggacctggctggtgctcgcggtggcggtggtggcgcaagtggcggcggtgctgttggtgtggcggcgcgcgtccgacggctgggcgttcacctgcctcgcgctggtggtcgccgccgtggtgatcctgctcttcggcgcgctgtatccgaacctggtgccgtccacactggacagccggtggagcctgaccatctacaacgcgtcctcgacgcattacaccctcaaggtcatgacgtgggtgacggcgatcatggccccggtgacggtggtgtaccaggcgtggacgtattgggtgttccggcaacggctttcggccgaccggatcccggcgcccgtcgggctgacaaggcgcccgtcc

SEQ ID NO: 26072 - DNA, 600 bp, Mycobacterium avium
gtgctgggcgtggagcgggtgggtgtggacgactcgttcttctacctgggcggcgacagcatcctgtccatgcaggtggtggcccgcgcccgcgcggcgggggtgatctgtcggccgcgcgacgtgttcgtcgagcagacggtggcccggctggcgcgggtgtcccaagtggctgtcgacggcgagttgggcgcggccgacgaggggatcgggccggtgcggcccaccccgatcatgcgctggctgcaggacatcgacggcccgatcgacgagttcaaccagaccatggtgctggccgcgcccgccggggtcggtgtcgacgacgtcgcggtggtgctgcaggcactgctggaccgccacccgatgctgcggctgcgggtgcaggacgacggcgccggtggctggtcgctggaggcgcccgaggtcggctcggtgcgcgcggccgactgcctgcgcggcggtcgacagttttgtccgaacccggcgctgtggaggcggcggtcccggcctcaacgtgtccgacggcgtcctgctgtccgcggtatgggcaagcgagacaagcccaattggccgttggttgttcatccacctggcggttta

SEQ ID NO: 26073 - DNA, 1233 bp, Mycobacterium avium
gtgggccagaccgcggccatggccgaggccgaccgcacgtggatggtggacacgctgctggcgctgctgcagaccccgagcccgtcggggcgcacggacgcggtgatgcaggtgatcggcgacatcctcgacgacttcggcgtgccgttcacgctgacccggcgcggggcgctgaccgccgagctgccgggggagtcggcgaccaccgaccgcgcgctggtggtgcactccgacaccatcggctgcatggtccgcgggctcaaggacaacggccggctggaactcgttccggtcggcaccttctcggcccgattcgccgcgggtgcacgggtgcgcatcttcatcgacgatcccgaggagttcatcaccggcacgatcctgccgctcaagtccagcggccacgcgttcggcgacgagatcgacacccaacccacgggctgggagcacgtcgaggttcgcatcgaccgcaaggtgtcgtgccgggacgacctggtccgcctcggtctgcagatcggtgatttcgtcgccctgatcaccagcccggagctgaccgccgacggcttcgtggtctcccggcatctggacggcaaggcgggcgtggcgatcgcgctcgccctggccaagaacttcgccgagaacaaggtggtgttgccgcatcgcaccacgatcatggtcaccatcaccgaggaggtcggtcacggcgccagtcatggtctgccgccggacgtcgccgaactcatctccgtggacaacgcggtgtgcgcgcccggccagcactcgctggaggacggggtgacgatcccgatggccgatatgcacggcccgttcgactaccacctgacccgcaagttgtgccggctggcccaggaccgcggaatcccgttcgcgcgcgacatctttcgctattaccggtccgacgccgccgcggcgatcgaggcgggcgcgaacacccgcgccgcgctggtcggcttcgggctcgacggcagccacggctgggagcgcacccacatcgattcgctggaggccgcctacaacttgctgcacgcgtggctgcagacgccgttgacgttcgccaagtgggacgccaagccgaccgggagcctgcgcgacttcccgtcctcgaagcagcccgcacccagcgagcggtgggtgccgttgtcgcgcggcgactacgaaagcccgggcgacgcgtcgccggggacgcactggccgccctcggaggggccgcagtcc

SEQ ID NO: 26074 - DNA, 1167 bp, Mycobacterium avium
gtgcccatcgtcaccgccacgtccgcgctgtcccgcgtgttcgggtcgtgcggtgcgctcgccgccgcgaccatccggcgcgcaccgcggcgggtgtgggccaccgtgatgacggtgttgatcggggtgctcaccacggtggtgatcaccggcaccaacgcggacatgatcgggtcggcgcgcgccatcttcgcgccggtcgccgaggctgacgtgtgggtgagcgcggatccgcccgacagtttccccacggatgttctgccgcaagggctttcggaaagactcgccgcgctgcccggtgcggcgcgggtgaccgagggggcgtgcgggttcgccgtcgtcgcgggcacccgggtgctgctggacgggttcgccgcgggcagcagggacgcgttgttccgcgcgctcgacgaccgggtgcgcgccgaggtgctggccgggcggggtgtggtgctcacccagaatctgggcaaggcgctcaacgtgcgggccggcgaccggctgcggttgcagaccccgcacggcccgcgggaggcggcggtgctggcggtggtgccgttcttctcgacggtcatcggcaccgtcgggatggatctggcccagctgcgggcatggttcgatcgcccggcggcgacgacgctgcaaatcacggcggccccgggggtggatccgcggcggctgctggctgacgtccgcgcgacggtgccggcgcccaaccacgtctacgacggccgcgccgcgctggccgggctgcaggccccgctgcaccagagcatgttcatcgccaacgcggtgtggatcatcgtggtggcggtggccgcggtcgccctgctcaacacgttgacgctgtcggtgaccgagcggcgccgcgagatcggtgtgctgcgggcgatgggcgccggccgccggttcattctgcgcatggtgctggccgaggcggccggaatcggttgtgtcggcggtggtttggggtttctgctcgggctggcggaccagtggttgttcagccgcatcagcggggacatgatgaacttcccggtggccttccggctcagcccgctggcgcttgcctgcaccgccggggcgctggggatcaccctgctcggttcggtgccgcccgcgcggcgggcggcgcggctgaacatcatcgaggcggtcagcgtgaac

SEQ ID NO: 26075 - DNA, 690 bp, Mycobacterium avium
atgagcgttccggatttcgcggcccgaccgcaactttccgacgacgtcgcgcatctgatccgcggccggatctttgacggcagttacgccgccggctcctatgtgcggctggatcagctggccgccgaactcgggatcagcgtcacaccggtgcgtgaagcgctgttcgcgctgcgcgccgagggcctgatcagccagcagccccggcgcggcttcgttgtgctgccggtcacccggcgcgacgtcaccgacgtggcgaacgtgcaggcgcacgtcggcggtgagctggccgcgcgtgcggcggtcaacatcaccgacgaccagctgcgcgagctcaaacagatccaggcgcagctggaggacgcctacgccggcgacgagcacgagcgcactgtccggctgaaccacgaattccaccgggccatcaacatcgccgccgactcacccaaactggcgcagctgatgtcccaaatcacccgctacgcaccggaatcggtgttccctgcgatccagggctggcccgagcagtcgatgaaggaccaccggcgcatcttgtccgcgctgaaaaagcgggacgacaagctggcccgtgcggcgatgtcggagcacctggccgccggtgcggttccgctgatcgatcacctggtcgcccgcggtgtggtggtcgacggcggcgggccggaccccggt

SEQ ID NO: 26076 - DNA, 1269 bp, Mycobacterium avium
gtgaccaggaatcagcacgacccctacgacgacttcgaccgtcagcgacgggtggccgaagcgcccaagactgcgggtctgccgggcaccgaaggtcagcaccgcaccgacttcgcccgcgaccgcgcccgcgtgctgcacagcgccgcgctgcgccgcttggccgacaagacccaggtcgtcgggccgcgagagggagacacgccgcgtacccggctgacgcactcgctcgaggtcgcccagatcggtcgggggatggcggtggggctgggttgcgatctcgacctcgtcgagctcgcggggctggcccacgacatcggccacccgccctacggccacaacggcgaacgcgcgctcgacgaggtcgccgcggcatacggcgggtttgagggcaacgcccagaacttccggatcctgaccagcctcgagcccaaagttcttgacgcccaaggaaatagcgccgggttgaacctgacgcgcgcgtcactggatgcggtgatcaaatatccgtggcggcgcggcgaaggccccgggacaagcaagttcggcttctacgacgacgaccgggaagcggcggcctgggtgcgcgccggcgccccggccggccggatgtgcctggaagcgcaggtgatggactgggccgacgatgtcgcctattcggtgcacgacgtcgaggacggcgtcgtctcgcaacgcatcgacctgcgggtgctcgccgacgacgacgaggccgcggccctggccaaactgggcgagagcgaattctcccgggtgggcgccgacgacttcatggccgccgcgcgccggctgtcggccctgccggtggtcgccgccgtcggcaagtacgacgccacgctggcctcctcggtggcgctcaaacggttgaccagtgagctggtcggcaggtttgcctcggccgccatcgccaccacccgcgcggccgccggacccgggccgctggtgcgctaccgcgccgagctcgcggtccccgatctggtccgcgccgaggtggccttgctgaaaatcctggcgctgcagttcatcatgtccgatccccgccatcaacagacccaggccgggcagcgggaacggatccaccgggtggcgcactggctgtatgcgggggcgccgcgaacgctggatccggtctttgccgccgcgttcaacaccgcggccgatgacggcgcccggtggcgggtgatcgtggatcagatcgcctcctacaccgagggccggctggaacgcatcgacgcccgccaggccggtccg

SEQ ID NO: 26077 - DNA, 759 bp, Mycobacterium avium
atggtcgcgacgctgttctacaccgacgagctgcccgacgccggctcgctggccgtgctgggcggcgacgaggggtttcacgccgccaccgtccggcggatccgccccggggaacgcctggtgctcggcgacggcgccggcgggctggcccgctgcgaggtggagcacgccgggcgcgacgggctgcgggcgcgggtgctcgaacgctggaccgtggcgccgccgaacccgccggtgaccgtggtacaggccctgccgaagtccgagcgctcggagctggctgtcgaactggccaccgaggccggcgcggatgggttcctggcctggcaggccgcccggtgtgtggccaattggcacggcccgcgggtggacaagggtttgcgccgctggcgggcggtcgccaaggcggcggcccgccagtcccgccggccgcacattcccaccgtcgacggggtgctgtccaccgcgtcgctgacgtcgcggatccgcgacgaggtggccgccggcgcggtggtgctggccctgcacgagtcggccaccgaccggcttacggatgtgcctgtggcacaggcgaagtcgctgttcctggtgatcggccccgaaggcggtatcgccgacgacgagctcgccgccctgcggcaggcgggcgcgctgagcgtccggctgggcccccaggtgctgcgcacgtcgacggccgccgcggtggcgctgggcgcgctcggggtgctgaccccgcgctgggacgacgccgcgagcccg

SEQ ID NO: 26078 - DNA, 852 bp, Mycobacterium avium
atgacgccgaaccttgcgaagcgtgtgctccacggaacgaccatggcaaccgtggtctcccccgacggcaccgtcatcggctatgaatccgtcggtgccggaccgcctttgctgctggtgcacggcagcacgggcacgcgggctcgctggcgcccggtgacgccggagctggcgcggcgctacacggtgcacgcgatggaccgccgcggccggggactcagcacggccgaggccgaaccctacagcttgggccgggaggccgaggacgtcgcggccgttgccgaggccgtcggcggcgacgtctacgtcgtcgggcattcctacggggcgttggcggtcctggacgccgccccgatcacacgcgccttccggcggatcgtgctttacgagccgcccataccctcgctcggcctcgacgtcggctcgcctgggggctgggcacggatcacggcgctgtccgacccacgcgacatcctcgaagcgttctaccgcgaaaccctgcagctatccgagtcggccatcaaagaccttgccaaccgcgagtttccgtacctcgcggggtcgatccgccataccgccggccgggaactcgcgcagacccgcgcctaccgcttaacggagcggcatgcgaacatcaccacaccggtccgcatgttgctcggcaccgagagccccgcgtatttgcgggcggccaccgcggtcctcgccgcgaagatcccgggcgccacgatcgtggccctgcacggacaggggcaccaggcgatcgactacgacccggatcagttcgcccgggcggtgctggaattcgactccgaggaggtcgactccggcggtgtcggggcggtcaccgcc

SEQ ID NO: 26079 - DNA, 975 bp, Mycobacterium avium
atgaataccgtgcacgtcaacatcgagctggcgcgctactccgactgggcgttcacgtcggcggtggtggcgctggtgatcgcgctgctgctgctggccttcgagctcgcctacgccggcggacgccgcgccgatgcgcgggcccgggtgctggccggggcggtcagcgccgactcggcgacacccggggtggtggacgaggtgccccgccggcccgtcgacgagcgcgccggccgcgccggcctggccgtggtgtacctgggcaccggcctgctgctggcctgcctggtgctgcgcggcctggccaccctgcgggtgccgtggggcaacatgtacgagttcatcaacctgacctgcctgtgcgggttggtcgccggggcgatcgtgctgcgccgcccgcagtaccgcccgctgtgggtgttcctgctgctgcccgtgctgatcctgctcacggtgtccgggcgctggctctacaccaacgccgcgccggtgatgcccgcgctgcagtcctactggctgcccatccacgtgtcggtggtcagcctgggctccggggtgttcctggtcgccggcatcgccagcatcctgttcctgctgcgcacctcgccgctgggcgaccccggcaacgacagcgcgccggcccggctggtgcggcggttcccggacgcgcagaccctggatcgcatcgcctaccggaccaccatcttcgcgttccctgtgttcggcttcggcgtcatcttcggcgccatctgggccgaagaagcctggggccggtactggggctgggaccccaaggagacggtgtccttcgtcgcctgggtgatctacgccgcctacctgcatgccaggtcgacggccggatggcgggaccgcaaggccgcctggatcaacgtcgcggggttcgtggccatggtcttcaatttgttcttcgttaacctggtcaccgtgggtctgcattcctatgcgggcgtgggt

SEQ ID NO: 26080 - DNA, 1086 bp, Mycobacterium avium
gtggtcggagcggccggatcgcgctcccgggccgccctgatgtcacgacgaatggctgccagcatgctaatcggccaggtcggcgaacagcggcgtgctcaggtaccgctcaccgaagtcggggagcacgacgaccaccagcttgccggcgttctcgggccggcgggccacctgcagggcggccaccagcgccgcccccgaggagatgccgaccagcagcccctcctcggcggccagccggcgggccagcgcgatcgactcctcgttgccgacggcgatgacctcgtcgaccagatccatggcaagcaccggcggcacgaacccagcgccgagaccctggatcggatgcggccccttctggccgccggacaacaccggcgacgcggccggctccacggcgatgaactgcgccgacggcttgcgttccttgatgacttgggcgacaccggtgatggtgccgccggtgccgacgccggcgacgaagatgtcgaccttgccgtcggtgtcgcgccacacttcctccgcggtggtgctgcggtgaatcgccgggttggccgggttctcgaactgctgcggcacgaaataccggtcgtcgctcttggccaattcctcggccttggcgatcgcgcccggcatgccgtcggcgcccggcgtcagcacgatctcggcgcccaaggcgcgcaacaacattcgccgctccacgctcatcgtctccggcatggtgagcacgcagcggtagccgcgcgccgcggccaccagcgccagcgcgataccggtgttgccgctcgtcggctcgagaatgatggtgtccggtttgatcaggcccgcctgctcggccgcatcgatcatggccaccccgatacggtccttcacgctgttgcccgggttgaagaattccaacttggcgacgacgtcggcgaccgcaccttcggtgacccggttcaaccggaccagcggggtgtttccgatcagctgcgtgacgttctcggcgatgctcatctaccttttgtctcccacgatgtaggaccaggcctcgtcggcctgccagctaatatcgaactctatggccatttcggtggggatggc

SEQ ID NO: 26081 - DNA, 1656 bp, Mycobacterium avium
atgacgacgcgagggcgtaagccgacacccggccgcatcacgtacgtgggctccggcccgggtgacccgggactgttgacggcccgggccgcggcggtgctggcgaacgccgcgctggtgttcaccgaccccgacgtgcctgagccggtgctggcgctgatcggcaaggacctgccgccggtgtccggtccggcgccggccgagccggcgcccaacggcgagggcgctggctccgagcaggggcaggcgcagccggcggtgatctccggtggtcccgacatccgcccggcgctgggtgatccggccgaggtggccaagacgctgaccgccgaggcgcgcaccggtgtcgacgtggtgcggctggtggccggtgacccgctgaccgtcgacgccgtcatcaccgaggtcaacgccatcgcccgcagccacctgcacatcgagatcgtgcccgggctggcgcccaccaacgccgtcccgacctacgcgggcctgccgctgggctcctcgcacaccatggccgacgtgcgcggtgacgtggactgggaggcgctggccgccgcgcccggcccgctgatcctgcaggccaccgcgtcgcacctggccgacgcggcgcgtaccctgatcgaacacgaactggccgagaacaccccgtgcgtggtcaccgcgcacggcaccacctgccagcagcgctccatcgagaccacgctgcaggggctgaccgactcggcggtgctgggcggcaccgaccccgccggcccgctgaccggtccgctggtggtgaccatcggcaagacggtgagcgcccgggccaagctgaactggtgggagagccgcgccctgtacggctggaccgtgctggtgccccgcaccaaggaccaggccggcgagatgagcgagcggctgacgtcgtacggcgcgctgccgatcgaggtgccgaccatcgccgtcgagccgccgcgcagccccgcgcagatggagcgtgccgtcaagggattggtcgacggccgcttccagtgggtggtgttcacctccaccaacgcggtgcgcgcggtgtgggagaagttcggcgagttcggtctggacgcgcgcgcgttctccggggtgaagatcgcctgtgtgggcgagtcgaccgccgaccgggtgcgggcgttcgggatcagccccgagctggtgccggccggcgagcagtcctcgctgggtctgctcgacgacttcccgctctacgacagcgttttcgacccggtgaaccgagtgctgttgccgcgggccgacatcgccaccgagacgctggccgaggggctgcgcgaacggggttgggagatcgaggatgtcaccgcctaccggacggtgcgggccgcgccgccgccggcggagacccgggagatgatcaagaccggcggcttcgacgcggtgtgcttcacgtccagctccacggtgcgcaacctagtcggcatcgccggcaagccgcacgcccggacgatcatcgcctgcatcggtcccaagaccgccgagaccgccgccgagttcggcctgcgggtggatgtccagcccgagaccgcggcggtgggcccgctggtcgacgctctggccgaacacgccgcgcggttgcgcgccgagggggcgctgccaccgccgcgcaagaagagccgcaggcgc

SEQ ID NO: 26082 - DNA, 603 bp, Mycobacterium avium
atggacggcgtgaccgagctggagaagggcccgcgcgggcggcgacggggccggggtgctcgcgagcgcatcctcggcgcggcgcagcagctgttccgcgagcggggcatcaacaacaccgggatggacctgctctgcgcggcggcgcaggtgtccaagcgcaccgcctaccagcacttcggtagcaaggacgagctgatcgctgagtacctgcggcgtcttgacgtcgacaccacgtccgaggtcttcgagcgcgacgatctcacgccccgcgaacgactgctcgcggtattcgcgacgccgcctgcgttcaccgacgagccgatgcccctctgcccgttcatcgccgccgccgtggagatctccgatccgcagcatcccgcgcgcgtgcgggcccgcgagtacaagacctccgtcgccgcccgcctgagcgagactgcccgggaggccggcgccgccgatccggaactgctcggtgagcagctggcgctgttactcgatggcgcctcggttcggaccagggccttgggcagcgacgccttcccgacggctgccgggatcgcggccgccctggtcgagcgcgccatacccccgacggcacgg

SEQ ID NO: 26083 - DNA, 231 bp, Mycobacterium avium
atggcagtgggaatttcgcctggcgaactgcgtgagctcaccgacgacgagctgaccgagcggttgcgcgaatccaaggaagagctgttcaatctgcgtttccagatggcgaccggccagctgaccaacaaccgccggctgcgcacggtgcgtcaggagatcgcgcgcgtctacaccgtgctgcgggaacgtgaactgggcctggcaagcgggccggacggtaaggaatcg

SEQ ID NO: 26084 - DNA, 366 bp, Mycobacterium avium
atggtgtcaaccacccacaaccagcaaacatatgtccgcgacacgttggacggcttcctcgcccagcgggtagactttccgatggaggtaatagtcgccgacgatgcctcgaccgatgccacaccccgaatcatccaggaatacgccgaccgccatccgaacctcttccggcccatcctgcggtcgagaaacgtcggcctcaacgccaacctcaccggtgccctgtccgccgcgcgtggcgagtacatcgcgctgtgcgagggcgacgactactgggtcgacccgttgaaattgaccaaacaagtggcggggctcgacgaggatccccgaccaccacggtgtgtttccaccccggtgcaggtggtc

SEQ ID NO: 26085 - DNA, 1488 bp, Mycobacterium avium
atgacggtattggactatccggtatggctgcgcgtcgatcattggctcaacgtgctgtttgtgacgctgataattcgcagcggcatcgagatactttccacccacccgaagttgtactggcacgacgacagcaagccgggcaccgagtgggcgcgctttacccgaaaggtgatgccccgcgaccggatctacgacaccctcgatgaggaggaggattatcatccgttgatttccctgcccggccacgcgcagctgggcatgggccggcactggcatttcttcgcggtgatcggctgggtgctggtggggctttcctattacgtcctgctgttcgccaccggccaatggcaccgctactggccctattcctggtcgatcttccccgaggcgttcaacgacatcgtcacctatctgacgttcaatctgccgccggtgctgcccggtgagcccctggacgccatgcagaagctgacgtacgcgggggtggtgttcgtgctggcgccgttccagatcctcaccggcgccgcgcagtccccggcgatcgaggcgcgcttcccgtggtacgtgcggatgtggggcggtcggcaatgggcccgcagcctgcatttcctggggctggtcgcctttgtggtgttcatcgtgatccacctgtcgatgatcttcttctggggctggggaaggctcaccgccgcaatgattttcggctcggtgcgcaacacctactgggcgacggcgatctcgctgctgatcatcgccgcgatcgtcgggatccatgtggcggccacgctgtggagtctgcggcatccacgctccgtgcagcgggtgctgggtcgggtggtcaccgcggcccggctgatgctgctgcgcccgcttaattcgcggcagaactacccggcgagcaagatcaccccgcggcatcgcatcaacggaaagccgcccaccagcacggaatacaaggtgatggcggtgcacaacttcgtcgactggcggctgcgggtgggcggactggtggaaaacccggtagtcctcgaccttgccgcgctgcgttcgctggccgagccggaaacccaacgggtgatgcacaattgcgtgcagggctggaccagcatcggggagtggaccggagttcatctgcgccggctggtcgatctggtgcggccgctgccgcaggcgcgttacatctgctttctgaccatgcaggacaacagcaccgacgagccggcctcgcacggcggcggccagttctacgaagtgctcgacctggaattcgccgacaagccgcagaccctgctggcctatgaaatgaacggcgccccactgccgatccagcacggcgcaccgttgcggctgcgggtggaaacgcaggtgggtttcaagatggccaagtggatcaaccagatcgagttcgtcgacgacttcgccgggatcggcatgggcaccggcggttggcgtgaggaccgcgtgtactacgacaaggacgtggagatc

SEQ ID NO: 26086 - DNA, 231 bp, Mycobacterium avium
atgtcggacaagagcggtcccgaggaggccatcgagggcgtcgtcgagggcgtcaagggcaaggtcaaggaagtggccggcgcggtcgccggacgcgacgacctgatgcgtgagggtcaggcccagcaggacaaggccgaggcgcagcgcgaggccgcccagaaggaggccgaggccgaaagcgcccgaaaggccgccgagatcaacgaggctcgccagaaggccgaacag

SEQ ID NO: 26087 - DNA, 493 bp, Mycobacterium bovis
ggaacagctggcgcggtaaacatcgaatgatcaggcacgtcagtaggttctgtatatgatccggttgtcggtattaacgtgtatgggtggggttgacggtgccggtggggccgccggcgccgtcaccaccatcacccacgccagcttcaacgatccgcacggggtggcggtcaacccgggcggcaacgtctacgtcaccaatttcggcagcggcacggtgtcggtgatcaaccccgccaccaacaccgtcaccggctcccccatcaccatcggcaacggtccaagcggggtggcggtcagccccgtcaccggcctggtcttcgtgaccaacttcgacagcaacacggtgtcggtgatcgacccgaccaccaacaccgtcaccggctcccccatcaccgtcggcaccgctccgaccggggtggcggtcaaccccgtcaccggcgaggtctatgtcaccaacttcgccggcgacacggtgtcggtaatcagctga

SEQ ID NO: 26088 - DNA, 1569 bp, Mycobacterium bovis
ctcctggtcaacggccgggtgtacagccccacccaccccgaagccaccgcgatggcggtgcgcggcgatgtcgtcgcctggttgggcagcgacgacgtcggccgcgaccagttcccagacgctgacgtgcaggatctcgacggccgattcgtggcgccggggttcgtggacagccacatccacctgaccgcgaccggtctgatgctcagcgggctggacttgcggcccgcgacctcacgcgcgcagtgcctacggatggtcgccgactatgcggccgaccatccgggtcagccgctgtggggtcacggttgggatgagtcggcctggccggagaatgctgcgcccagcaccgccgacctagacgcggttctcggtgactgtcccgcctacctggccaggatcgactcgcactccgcgttggtctcctccggactgcggcggctggtccccgagctggcggcggcaaccggttacacggcccagcggccgctgaccggtgatgcccaccacctagcccgggccgccgcacgctacctcttgaccgacgtccagcttgccgacgcccgggccgtggcgctgcaggccatagccgcggccggcgtcgtcgccgtgcacgaatgcgccggtccggaaatcggcgggctcgacgactggttgcggctgcgtgcactcgagcacggagtcgaggtgatcgggtactggggtgaggccgtggccacgccggcccaggcccgtgacctggtgaccgagaccggggctcgagggctggccggtgatttgttcgtcgacggggcgctcgggtcgcgcaccgcctggctgcacgagccctacgcggacgcccccgactgcatcggcacctgccaccttgacgtagacggcatcgaagcgcacgtacgagcatgcaccaaggccgaagtgaccgccggcttccacgtcatcggcgacgctgcggtgtcggccgcagtcgccgccttcgaacgggtggtggcagatctcggcgtggttgccgtcgcccgctgcggccaccgcctcgagcatgtggagatggtcaccgcggaccaggccgcgaagctgggcgcttggggggtcatcgccagtgtgcagcccaacttcgatgagctgtggggcggtggcgacggcatgtacgctcgccgcctgggcgcccagcgaggcagcgaactcaacccgctggcgctgttagcatcccaaggcgtgcccctcgcgcttggctccgacgcgcccgtcacgggctttgatccctgggccagcgtgcgcgcggcggtcaatcaccgcacgccgggcagcggggtatcggcgcgggcggcgtttgctgccgcgacccgcggcggctggcgggccggtggtgttcgagacggccggatcggcaccctggtgcccggcgcgcccgcgtcctacgcgatatgggacgccggggactttgacgtctgcgcaccgctgcgacgcagtacagcgctggtctaccgacccagcgctcccggggtacccgcattgccgctgctgggcccgaccgacgccttgccgcgttgccgccacaccgtgcatcgatgt

SEQ ID NO: 26089 - DNA, 1038 bp, Mycobacterium bovis
gtggccagcagcgtgatcaggccggtcacgatccagccgcgtaaccggtccaggggcccgaaatccgcgaccggcaccagcgggccggggctgacgacgggtaccacaggctcctcggggcggtccttggccaggacacaggattctgggggccgggcggtcatcggtgtcgatcgtaggctgtccgtcatgtcctctggtcgcctgttgctcggcgccaccccgctgggccagccgtcggatgcgtcaccacgcctggcggccgcgttggccaccgccgatgtggtggcggccgaggacacccggcgggtgcggaaattggccaaggctcttgacatccggattggtggacgggtggtcagcctgttcgaccgggtggaggcgttgcgcgtgacggcccttctcgacgcgatcaataacggtgcgacggtgctggtggtcagtgacgccgggaccccggtgatcagcgatcccggctatcggctggtcgcggcgtgcatcgacgcgggggtttcggtgacgtgtttacccgggccgtccgcggtgaccaccgcgctggtgatgtccggtctgccggcggagaagttctgcttcgagggtttcgccccgcgcaagggtgcggcgcgccgggcctggctggccgaactggccgaggagcggcgcacctgtgttttcttcgaatccccgcgccggttggctgcgtgccttaacgatgccgtcgagcagctcggtggtgcccgtccggcggcgatctgccgggagctgaccaaggtgcatgaggaagtggtgcgcggatcgcttgacgagttggcgatctgggcggccggtggtgtgctcggcgagatcaccgtggtggtggcgggcgccgccccccacgccgaactgtcgtcgctgatagcccaagtggaggagttcgtcgcggcgggtattcgtgtcaaggacgcctgcagcgaggtagcggcggcacatccgggggtgcgcacccgccagctttacgacgcggtgctgcaatcacggcgggaaaccggcgggccagcg

SEQ ID NO: 26090 - DNA, 951 bp, Mycobacterium bovis
atggtagacgtgcacgcagtcggcgcggtcacagtcgggctggccggagccgagctgaccgagatgagcatgatgaacgccggcgccgcacaggtgcggatgttctccgacgacgggttctgcgtgcatgacccgctgatcatgcgccgcgccctggaatatgccaccggtttgggggtgctgatcgcccagcacgcggaggagccccggctgacggtcggcgccttcgcgcacgagggacccatggcggcgcggctgggcctggcgggatggccgcgggccgccgaggaatcgatcgtcgcccgcgacgccttgctggcccgtgacgccggcgcccgggtgcacatctgtcacgcgtcggccgcgggcaccgtcgaaatcctgaaatgggctaaggaccagggtatttcgatcaccgccgaggtcaccccccaccacttgttgctcgacgatgccagattggccagctatgacggcgtgaaccgggtcaacccgccgctgcgcgaagcttccgacgcggtcgccctgcgacaggcgctggccgacgggatcatcgactgtgtggccacagatcacgccccgcatgccgagcacgagaaatgcgtcgaattcgccgcggcccggcccggcatgctcgggttgcagacggcattgtcggtggtggtgcagacaatggtggcgcccggcttgttgagttggcgcgatatcgcgcgggtgatgagtgagaacccggcgtgcatcgcacgcttgcccgatcagggccggccactggaggtgggggagccggccaacctgacggtggtggaccccgacgccacctggacggtcaccggcgccgacctggccagccggtcggccaacacgccgtttgagtcgatgagcctgcccgccaccgtgaccgcgaccctgctgcgcgggaaggtgaccgcgcgcgacgggaagatccgggca

SEQ ID NO: 26091 - DNA, 462 bp, Mycobacterium bovis
atgttccggctgctgttcgtatctccgcgtatcgcccccaacaccggcaacgccatccggacgtgcgccgcaaccggctgtgaactgcatctggtcgagccgctcggcttcgacctgtccgaacccaagctgcgacgggccgggctggactaccacgacctggcctcggtcaccgttcatgcctcgctcgcgcacgcctgggaggcgctgtcgccagcgcgggtgttcgccttcacggcgcaggcgacgacgttgttcaccaacgtcggctaccgggccggtgacgtgttgatgttcgggcccgaacccaccggcctggacgaggccaccctggctgatacgcacatcaccgggcaggtgcgcattccgatgctggcgggccggcgctcgttgaacctgtccaacgccgcagccgtcgcggtctacgaggcctggcgtcagcacggctttgccggggcggtc

SEQ ID NO: 26092 - DNA, 1032 bp, Mycobacterium bovis
ttgtggatcgccacggcggtcatcgccgccctggtcgtcatcgctgcgctgaccctggggctggtgctctaccgtcggcggcgcatcagtctgtcgcctcggcccgagcgcggcgttgtcgaccgctcaggcggttacaccgcatcgtctggcatcacgtttagtcagacgccgacgacccagccggccgagcggatcgatacgagcggactgcccgccgtgggcgacgatgcgaccgtccctcgcgacgcgcccaagcgcacgatcgccgacgtacaccttcccgagtttgagccagaaccccaggctccagaggtccccgaggctgacgccatcgcgccgcccgaaggtcgattggaacgactgcgcggacggctcgccagatcgcagaatgccctcgggcgcggcctgttgggactgatcggcggcggcgacctggacgaggactcctggcaagacgtcgaggacaccctgctggtcgccgacctgggaccggcggccaccgcgtcggtggtgtcgcagctgcgcagccgcctggccagcggcaacgtgcgtaccgaggccgacgcccgggcggtattgcgtgacgtcctgatcaacgaactgcaacctggcatggaccgctcgatccgcgcgctaccgcacgccggccatccttcggtgttgctggtcgtcggcgtcaacggcaccggaaaaaccaccacggtcggcaagttggcgcgggtactagtggccgacggccgacgggtcgtactcggtgcggctgacaccttccgtgcggccgccgccgatcagctacagacctgggcggcgcgggttggcgcagcggtggttcgcgggcccgaaggcgccgacccggcatcggtggcgttcgacgccgtcgacaagggcatcgccgccggcgcagacgtcgtgctcatcgatacagccgggcggctgcacaccaaggttggcctgatggacgagctggacaaggtcaagcgcgtggtgactgggcgagcgtccgttgacgaggtgttgctggtgctcgat

SEQ ID NO: 26093 - DNA, 1317 bp, Mycobacterium bovis
  misc_feature (680)..(680): n=g, a, t or c
cccactggcttgcgccccaacgccgtcgtgggcgttcggttggccgcactggccgatcaggtcggcgcggccctggccgagggtccagctcagcgtgccgtcaccgaggaccggacggtcaccggggtcacgctgcgcgcccaggacgtgtcacccggtgacctgttcgccgccctgaccggctcgaccacccacggggcccgccacgtcggcgacgcgatcgcacgcggcgccgtcgcggtgctcaccgaccccgccggggtcgccgagatcgccggacgagcggccgtgcccgtgttggtgcaccccgcaccccgcggcgtgctcggcggcttggccgccaccgtgtacgggcatccgtccgagcggttgacggttatcgggatcaccggaacgtccggcaagaccaccaccacctatctggtcgaggccgggttacgggctgccggacgcgtcgccgggctgatcggcaccatcggcatccgcgtcggcggcgccgaccttcccagcgcgctgaccaccccggaggcccccacgctgcaggcgatgctggcggcgatgtcgaacgcggggtggaacaccgtggtcatggaggtgtcccagccacgcgctggcgctgggccgggtggacggcacccggttcgccgtcggcgccttcaccaatctctcccgtgaccacntggatttccaccccagcatggccgactacttcgaggccaaggcgtcattgttcgatccggactcggcactgcgcgcccgcaccgccgtggtgtgcatcgacgacgacgccgggcgcgcgatggcggcgcgggccgccgacgcgatcaccgtcagcgccgccgaccggcccgcacactggcgcgccacggatgtggcgcccacggacgcgggcgggcaacaattcaccgccatcgaccccgccggcgtagggcatcacatcggaatccggctaccgggccgctacaacgtcgccaattgcctggtcgccctggcgattctggacaccgtcggggtctccccggaacaggcggtgccgggcctgcgtgagatccgggtcccggggcggctcgagcagatcgaccgcggccagggctttctcgcgctggtcgactacgcgcacaaaccggaagcgctgcggtcggtgctgaccaccttggcgcacccggaccgccggctggcggtggtgttcggcgccggcggcgatcgtgacccgggcaagcgggccccgatgggccggatagccgcgcagctggccgacttggtggtcgtcaccgacgacaacccgcgtgacgaagatcccactgcgatccgccgcga

SEQ ID NO: 26094 - DNA, 1032 bp, Mycobacterium bovis
atgaaatttgtcaaccatattgagcccgtcgcgccccgccgagccggcggcgcggtcgccgaggtctatgccgaggcccgccgcgagttcggccggctgcccgagccgctcgccatgctgtccccggacgagggactgctcaccgccggctgggcgacgttgcgcgagacactgctggtgggccaggtgccgcgtggccgcaaggaagccgtcgccgccgccgtcgcggccagcctgcgctgcccctggtgcgtcgacgcacacaccaccatgctgtacgcggcaggccaaaccgacaccgccgcggcgatcttggccggcacagcacctgccgccggtgacccgaacgcgccgtatgtggcgtgggcggcaggaaccgggacaccggcgggaccgccggcaccgttcggcccggatgtcgccgccgaatacctgggcaccgcggtgcaattccacttcatcgcacgcctggtcctggtgctgctggacgaaaccttcctgccggggggcccgcgcgcccaacagctcatgcgccgcgccggtggactggtgttcgcccgcaaggtgcgcgcggagcatcggccgggccgctccacccgccggctcgagccgcgaacgctgcccgacgatctggcatgggcaacaccgtccgagcccatagcaaccgcgttcgccgcgctcagccaccacctggacaccgcgccgcacctgccgccaccgactcgtcaggtggtcaggcgggtcgtggggtcgtggcacggcgagccaatgccgatgagcagtcgctggacgaacgagcacaccgccgagctgcccgccgacctgcacgcgcccacccgtcttgccctgctgaccggcctggccccgcatcaggtgaccgacgacgacgtcgccgcggcccgatccctgctcgacaccgatgcggcgctggttggcgccctggcctgggccgccttcaccgccgcgcggcgcatcggcacctggatcggcgccgccgccgagggccaggtgtcgcggcaaaacccgactggg

SEQ ID NO: 26095 - DNA, 834 bp, Mycobacterium bovis
atgaccatcgatgtgtggatgcagcatccgacgcaacggttcctacacggcgatatgttcgcctcgctgcgccggtggaccggtgggtctatcccggagaccgacatcccgatcgaagcgaccgtctcctcgatggacgccggcggcgtcaccctgggtttgctcagcgcctggcgtggccccaacggccaggacctcatctctaatgacgctgttgcggaatgggtccggttgtaccccaaccgttttgccggtctggcggcggtcgacctggatcgcccgatggcggccgtccgggagttgaggcgccgagtcggtgaggggttcgtcggcctgcgggtggtgccttggctatggggcgccccgccgaccgaccgccgctactatccgttgttcgccgaatgcgtgcagtccgcggtgccgttctgcacccaggttggtcacaccggcccgctgcggccgtcggagaccggacgccccattccctacatcgaccaggtggcgttggactttccggaactggtgatcgtgtgcggacatgtcggctatccgtggaccgaggagatggtcgcggtcgcccgcaaacacgagaatgtctacatcgacacctcggcctacaccatcaagcggctgcccgggaagctggtgcggttcatgaaaaccgacacgggacagcgcaaggtgctgtttggtaccaattacccgatgatcgcccacacgcacgccctgaccggtcttgacgaactggggctaagcgacgaagctcgtcgcgactttctgcacggcaacgctgtgcgggtattcaagctggacccacgaggaaaggtgcagacg

SEQ ID NO: 26096 - DNA, 522 bp, Mycobacterium bovis
atgaagacgctgacactgcaattgcagcgctacctccaccatctgacgatcgaacgatgtgtcgcggcaaacacattgagctcctaccgacgtgatctgcgccgatactccaagcacctgtaagaacgagggattaccgatctgtccaaggtcagcgagcacgacgtcagctagttccttgtggcattgcggtgcagcgattctgattctcggacggcggctttgtatcccgtgtcggcgtcaccgacgctgatcgagctgcggggctgcttcgcttccgtgccggaaaagaccgtccgaactggacgtggtgcgcgccgtgcggtcaccgacaccgagcatgccatagtcctagagcatgacaatcgactacgtgctatcgctgctcgcatgtgctgtcggcgaataaccgaacgacagcctgtctgagctgctacaccggccgtgctggaactgctgacttcgactgtgactcggatcttcgaaggcgcacgccttgaccttcactcactacaactcaca

SEQ ID NO: 26097 - DNA, 303 bp, Mycobacterium bovis
gtggccaagaagtccaagatcgtcaagaatcagcggcgggcggccaccgtcgcccgttacgcatcgcgtcgcaccgcgctcaaagacatcatccgatccccatcgagcgcccccgaacagcgcagtaccgcccagcgagcccttgcccgccagccccgcgacgccagtcccgtgcggttacgcaaccgcgacgccatcgacggccggccgcgcggacatctccgcaaattcgggctctcccgtgtgcgggtccgccaactggcccacgacggacacctgcccggtgtccggaaggccagctgg

SEQ ID NO: 26098 - DNA, 162 bp, Mycobacterium bovis
atggcgcgcaccgacatccggccgattgtgaagctgcgttccacggcgggcaccggctacacctacaccacccgcaagaaccgccgtaatgaccccgaccgtctcatcttgcgcaaatacgacccgatcctgcggcgtcacgtggactttcgcgaggaacgc

SEQ ID NO: 26099 - DNA, 234 bp, Mycobacterium bovis
ttgtccgcccactgccaagtcaccggccgcaagccgggatttggaaacaccgtctcgcactcccatcgccgaagccgtcggcgatggtcgcccaacattcagcaacgaacgtattacctgccctccgagggccgtcgcattcggctgcgggtgtccacgaagggtataaaggtcatcgaccgcgacggtatcgaagcggtcgtggcccgcctgcgtcgccaggggcagcggatc

SEQ ID NO: 26100 - DNA, 315 bp, Mycobacterium bovis
atgccagtggtgaagatcaacgcaatcgaggtgcccgccggcgctggccccgagctggagaagcggttcgctcaccgcgcgcacgcggtcgagaactccccgggtttcctcggctttcagctgttacgtccggtcaagggtgaagaacgctacttcgtggtgacacactgggagtccgatgaagcattccaggcgtgggcaaacgggcccgccatcgcagcccatgccggacaccgggccaaccccgtggcgaccggtgcttcgctgctggaattcgaggtcgtgcttgacgtcggtgggaccggcaagactgca

SEQ ID NO: 26101 - DNA, 933 bp, Mycobacterium bovis
atgtcggctgacaaccaccaggtgcccatcgagattcgcggactgaccaagcacttcgggtcggtgcgggcgctcgacgggctcgacctcacggtgcgcgagggcgaagtgcacggcttcctcggccccaacggcgcgggcaagtccacgaccctgcgcatcctgctaggcctggtgaaggccgacggcggaagcgtgcggttgctgggcggtgacccctggaccgacgccgtcgacctgcaccgccacatcgcctatgttccaggcgatgtcacattgtggccgtcgctgaccggtggtgagaccatcgacctgctggcccgcatgcgaggcggcatcgacaacgctcgtcgcgcggaactgatcgagcgcttcggcctggacccaaccaagaaggcgcgcacctactccaagggcaaccgccaaaaggtctccctgatctcggcattgtcgtcgcacgccactctgctgctcttggatgagccgagcagcggcctggacccgttgatggaaaacgtgtttcagcagtgcatcggcgaagcacgccaacgcggtgtgacggtgctgttgtccagccatattctggccgagaccgaagcgctgtgcgaaaaggtgaccatcatccgagccggcaagaccgtcgaaagcggttcactagacgccttgcggcacctcagccgcacctcgatcaaggccgaaatgatcggtgatccaggagacctcagccgaatcaagggagtcgaggacatcagcatcgagggcaccacagtgcgcgcccaggtcgacagcgaaagcctgagagaactcatccaagtgctcggccacgccggtgtgcgcagcctggtcagtcagccgcccaccctggaggagctgttcctgcgccactacagcctgggccccgaggtcgcagccgagcaacaggtggcaacgccg

SEQ ID NO: 26102 - DNA, 2427 bp, Mycobacterium bovis
gtggactcgtttaacccgacgaccaagacgcaggcggcgctaaccgcggcgttacaggcggcttcgaccgccggcaatcccgagatccggcccgctcacctgctgatggcgctgctgacccaaaacgacggtatcgccgcaccgctactggaggctgtcggtgtcgagcccgccaccgtccgcgccgaaacccagcgcctgctcgaccgtttgccgcaggcgactggagccagcacgcagccgcagctgtcccgcgagtcgttagcggcgatcaccaccgcgcagcagctggccaccgagctggacgacgagtacgtctccaccgagcacgtgatggtcgggctggccaccggtgactccgacgtcgccaagctgttgaccggccacggcgcctcgccgcaggcgctgcgggaggcgttcgtcaaggtgcgcggcagcgcccgggtcaccagccccgaaccggaggcgacctatcaggcgctgcagaagtactccaccgacctgaccgcccgcgcccgcgaaggcaaactcgacccggtcatcggccgcgacaacgagatccgccgcgtggtgcaggtgctgtcccgtcgcaccaagaacaacccggtgctgatcggtgagcccggcgtcggcaagaccgcgatcgtggagggcctggcgcagcgcatcgtggccggcgacgtgccggagagcttgcgcgacaagaccatcgtcgcgctcgatctcggctcgatggtcgccggctccaaataccgcggcgaattcgaggaacggctcaaggccgtcctcgacgacatcaagaactcggccggccaaatcatcacgttcatcgacgagctgcacaccatcgtcggcgccggcgccaccggcgagggggcgatggacgccggcaacatgatcaagccgatgctggcccgcggcgagttacggctggtcggggcgaccacgctggacgaataccgcaagcacatcgagaaggacgccgcgctcgagcgccgtttccaacaggtgtacgtcggcgagccgtcggtggaggacaccatcggcatcctgcgcgggctcaaagaccgctacgaggtgcaccacggggtgcgcatcaccgactcggcgctggtggcagctgccactttgagcgaccggtatatcaccgcccgcttcctgcccgacaaggccatcgacctggtcgacgaggcggccagccggctgcggatggagatcgactcgcggcccgtcgagatcgacgaggtcgagcggctggtgcgccggctggagatcgaagagatggcgctgtccaaagaagaagacgaggcgtcggcggagcggttggccaagctgcgctccgagctggccgaccagaaagagaagttggccgagctcaccacccgctggcagaacgagaagaacgcgatcgaaatcgtccgcgacctcaaggagcagctggaagccctgcgcggggaatccgagcgggccgaacgcgacggcgacctggccaaggccgccgagctgcgctacggacgcatccccgaggtggagaagaagctcgacgcggcgttgccgcaggcgcaggcccgggagcaggtgatgctcaaggaggaggtcggtcccgacgacatcgccgacgtggtgtcggcgtggaccggcatcccggccggtcggctgctggaaggcgagaccgccaagctgctgcgcatggaagacgagctgggcaagcgggtcatcgggcagaaggccgcggttaccgcagtctctgatgcggtgcggcgcagccgggccggggtgtccgaccccaaccggcccaccggggcgttcatgttcctcggcccgaccggtgtcggcaagaccgagctggccaaggcgctggccgacttcctgttcgacgacgagcgggcgatggtccgcatcgacatgagcgagtacggcgagaagcacaccgtggctcggttgatcggcgccccgcccggctatgtgggatacgaggcgggcggtcagctgaccgaggcggtgcgccggcgtccctacacggtggtgctgttcgacgagatcgagaaggcgcacccggacgtgttcgacgtgctgctgcaggtcctcgacgagggccggctcaccgacgggcacggccgcacggtcgacttccgcaacaccatcttgatcctgacgtccaacctggggtcgggtggcagcgccgagcaggtgctggccgcggtgcgcgctacgttcaagccggagttcatcaaccggctcgacgacgtgctcatctttgagggtctcaaccccgaagagctggtgcgcatcgtcgacatccagctggcgcagctgggcaagcggctggcgcagcggcggctgcagctgcaggtctcgctgccggccaagcgctggttggcgcagcgcggattcgacccggtgtacggggcgcgcccgttgcgccgg

SEQ ID NO: 26103 - DNA, 1020 bp, Mycobacterium bovis
cctccggccgaggtgaggcatccggtgtatgcgacccgggtgctgtgtgaggtggccaacgagcgcggggtgccgaccgctgatgtgctggcgggcacggcgatcgagccggccgacctcgacgatccggacgcggtggtcggtgcgcttgacgagatcaccgcggtgcgccggttgctggcccgattgcccgacgacgccggtatcgggatcgacgtaggcagccggttcgcgctcacccacttcgggttgttcgggtttgccgtgatgtcatgtggcacccttcgcgaactgcttaccatcgcgatgcgctatttcgcgttgaccaccatgcacgtcgacatcacgttgtttgaaaccgccgacgattgcctggtcgaactggatgccagccacttgccggccgatgtccgtggattcttcatcgagcgcgatattgccggaatcatcgcgacgacaacgagtttcgcgcttccgttagccgcgaagtatgcggatcaagtatcggccgaactggcggttgacgcggaattgttgcgcccgttgctcgagcttgtgccggtgcacgacgtcgcattcgggcgcgcgcacaaccgggtgcacttcccgcgtgccatgttcgacgagccgttgccgcaggccgaccgccatacgttggaaatgtgtattgcacaatgcgacgtgctgatgcaacgcaacgagcgacgccgtggcatcacggccttggtgcgcagcaagctgtttcgcgattccgggcttttcccaacgtttaccgacgttgctggcgaacttgacatgcatccgcggacgctgcggcgtcgacttgccgaggaaggcacttcgtttcgggccttgctgggcgaggcgcgctccaccgtggccgtcgacctgctacgcaacgtcgggctgacggtgcagcaggtgtccacccggctgggctacaccgaagtctcgacgttctcgcatgcgttcaaacgctggtatggcgttgcgcccagcgaatattcgcgccgcgggtag

SEQ ID NO: 26104 - DNA, 1335 bp, Mycobacterium bovis
ttgattccgctagcgggtgatccggtgtcctcgcaccgcacgccggtgtggttggcgtcgccgccggaggtgcattcggcgctgctaagtgctggtccggggccgggttcgttgcaggcggccgcggcggggtggagcgcgttaagcgccgagtacgccgctgtggcgcaagagttgagcgcggtggtggccgcggtgggggccggggtgtggcagggtcccagtgctgagttgtttgtggccgcctatgtgccgtatgtggcgtggttggtgcaggccagtgcggatagcgcggcggcggccggtgagcatgaggccgcggcggctggctatgtttgtgcgttggcggagatgccgacgttgccggagttggcggccaaccacctcacgcatgcggtgttggtggcgacgaatttctttgggatcaacacgatcccgatcgcgctcaacgaggccgactatgtgcggatgtgggtccaggcggccaccgtgatgagcgcctatgaggcggtggtgggtgccgcgctggtggccacaccacacaccggcccggcaccggtcatcgtcaaacccggcgccaatgaagccagcaacgccgtggccgccgcaaccataaccccattcccatggcacgaaattgtacagtttttagaagaaacgttcgcagcatatgaccagtatctgtccgctttgctttccgaactccctgcggtggcttgggtttggttccagctctttgtggatatcctgggtttcaacattattgggttcattattacgttggcatccaatgctcaactattgacagagttcgctatcaatgcttcttatgttgcggtcggattattgtatgccattgcgggcgttatagacatagttgtcgagtgggttattgggaatctgtttggtgttgttccccttttgggggggccgttgttgggggcgttggccgctgctgtggttccgggtgtagctgggttggccggggtggcgggattggccgctgtgccggcggtgggtgcggctgctggcgcgccggcggcgttggtgggcagtgtggcgccggtgtcgggtggtgtggtgtcgccgcaggcgcggttggtgtcggcggtggagccggctcccgcgagcacgtcggtgtcggtgctggcttctgatcggggtgctggggcgttggggtttgttgggacggctggcaaggagtcggttgggcagccggcggggttgacggtgttggccgatgagtttggtgatggtgcgccggtgccgatgctgccgggcagctgggggccggatttggtcggtgtggccggtgatggggggttggtgtcagtt

SEQ ID NO: 26105 - DNA, 1198 bp, Mycobacterium bovis
gcgaagatcacatcggtggtgtcgcacgcaaagccgtgaatcaccgcgatggcagacaacgcaggcaacatatgggatcggttcttgcacagcaacccggtgagtgtggtcatcgatggcaccgggcagcagctcaaaggcttcggcgaggaggccttcgggatggccaaggactcctggaacctagggccactgcgcgcctcgatagacccgttcgggtggtatcgctcctggcaggagatgctgactgggatggcgccgctgccgggcctggacggcgagaacgctcccggcgttgtggagtcgtggaagcagttcggcaaaagcctcatccattgggatgagtgaacgaccaaccctaatgaggcgctaggcaagaccgtattcgacgccgcgacgctagctttgccgggcgggccgctgtcgaaacttggcagcaagggccgcgacattctcgcgggcgtgcgaggcctcaagccaccgactcaggaacgaccccaccctaatcgttccgcagtctgacgaatcgcctaccggcctttccagcaccccgatctggcgtagtgctcgccggcaccgacggtaggcccgcgcgagagcctccatggcctgattccactgggcctgccagtcctgatgactcatcccgagatcaccttggcaagcacgcgacggcgcggtgcgctcactggcgatatcggcccccaagctctgcgtcgtgcccgtataaccggccatgtctccgacattggccgtcatcgccgggtagctgtacatactctgcgacaccacgaatccctttcaaatattccgggcaatgatttttagacactctttcgatcgaaaatttggtcgagttcacggccgtcagatcgtcaaactgacaccaaccccccatcaccggccacaccgaccaaatccggcccccagctgcccggcagcatcggcaccggcgcaccatcaccaaactcatcggccaacaccgtcaaccccgccggctgcccaaccgactccttgccagccgtcccaacaaaccccaacgccccagcaccccgatcagaagccagcaccgacaccgacgtgctcgcgggagccggctccaccgccgacaccaaccgcgcctgcggcgacaccacaccacccgacaccggcgccacactgcccaccaacgccgccggcgcgccagcagccgcaccca

SEQ ID NO: 26106 - DNA, 366 bp, Mycobacterium bovis
atgctttcagcggttatcctgactgaacgtggctatccagcagtgcccctggcaggacacttggtgcaccagagattagtccgtccctgtcgtctcgtactagtgacaggtttcctcaagtatctgacgcgcgcggcggatagagaccgaactgtctcacgacgttctaaacccagctcgcgtgccgctttaatgggcgaacagcccaacccttgggacctgctccagccacaggatgcgacgagccgacatcgaggtgccaaaccatcccgtcgatatggactcttggggaagatcagcctgttatccccggggtaccttttatccgttgagcgacaccccttccactcgggggtgccggatcac

SEQ ID NO: 26107 - DNA, 411 bp, Mycobacterium bovis
ggtacgggaatatcaacccgttgtccatcgactacgcctgtcggcctcgccttaggtcccgactcaccctgggcggactggcctggcccaggaacccttggtctttcggcgggcaaggttctcacttgccttgtcgctactcatgcctgcattctcactcccccaccctccaccaccggtcacccggtggcttcgctgaatgagggacgctcccctacccacacccaccacaaggtggatgtgccgcggcttcggcggtgtgcttgagccccgctacattatcggcgcacaatcacttgaccagtgagctattacgcactctttcaagggtggctgcttctaagccaacctcctggttgtctttgcgactgcacatcctttcccacttagcacacgcttgggggccttagc

SEQ ID NO: 26108 - DNA, 171 bp, Mycobacterium bovis
atgacgtcaagtcatcatgccccttatgtccagggcttcacacatgctacaatggccggtacaaagggctgcgatgccgcgaggttaagcgaatccttaaaagccggtctcagttcggatcggggtctgcaactcgaccccgtgaagtcggagtcgctagtaatcgcagat

SEQ ID NO: 26109 - DNA, 1254 bp, Mycobacterium bovis
gtggccgagcgtttcgtcgtgactgggggcaaccggttatcaggcgaagtggccgtcggcggcgccaagaacagcgtgctcaagctcatggctgcgacgttgttggccgagggcaccagcacgatcaccaactgtcccgacatcctcgatgtgccgctgatggcggaggtactgcgtggtctgggcgccaccgtcgaactcgacggtgacgtggcccggatcaccgcacctgacgagccgaagtacgatgccgacttcgctgcggtgcggcaattccgcgcctcggtctgtgtgctgggaccgctggtcgggcggtgcaaacgggccagggtcgcgctgccgggcggtgacgcgatcgggtcgcgtccgttggatatgcaccaggcgggcctacggcaattgggtgcccactgcaacatcgagcacggctgcgtggtagcccgagcggaaacgttgcgcggtgcggagattcagttggagttcccctcggtgggagccaccgagaacatcttgatggccgccgtggtggccgagggagtcaccactattcacaatgcggctcgagaacccgacgtcgtcgacttgtgcacgatgttgaaccagatgggcgcacaggtcgaaggtgcgggttcgccgacaatgaccatcaccggtgtcccgcggctgcatccaaccgagcaccgggtgatcggagaccgtatcgttgccgccacatggggcatcgctgccgcaatgacccgtggtgatatatcagtggcgggcgtagacccggcgcatctgcagctggtgctgcacaaattgcacgacgcgggcgcaaccgtcacccagactgacgccagcttccgggtgacccagtacgagcgtccgaaggctgtcaacgttgcgaccttgccgtttcccgggtttcccacggatctgcagccgatggctatcgctttggcgtcgatcgccgacggcacatcgatgatcacggagaacgtgttcgaggcgcggttccgcttcgttgaagagatgatccggctcggtgcagacgctcggaccgacgggcaccacgccgtggtgcggggcctcccgcagctgtcgagcgctccggtgtggtgttcggacatccgtgccggggccggcttggtgctggcggggctcgttgccgacggcgacaccgaggtccacgatgtattccacatcgatcgcggatatccgttgttcgtggagaacctggtgagtctcggtgccgagatcgaacgggtatgctgt

SEQ ID NO: 26110 - DNA, 1410 bp, Mycobacterium bovis
gtgagcaccaacgaggggtcgctgtggggcgggcggttcgccggcggcccgtcagacgcgctggccgcgctgagcaagtccacccacttcgactgggtgctggccccctacgacctcaccgcgtcgcgggcgcacaccatggtgctgtttcgggccgggctgctcaccgaggagcaacgcgacgggctgctcgccggcctggacagcctcgcccaagacgtcgccgacggcagcttcggcccgctggtcaccgacgaggacgtgcatgccgcgctggagcggggcctgatcgaccgggtcggaccggacctgggcggccggctgcgggccgggcgctcgcgcaacgaccaggtggccgcgctgtttcggatgtggctgcgcgacgcggtgcgccgggtcgccaccggtgtgctcgacgtggtcggtgcgctggcagagcaggccgccgcacacccgagcgccatcatgcccggcaaaacccacctgcagtccgcccagccgatcctgctggcacaccatctgctcgcgcacgcccaccccctgctgcgcgacctggaccgcatcgtcgacttcgacaaacgcgcggcggtgtccccgtacggctcgggcgccttggccggctcgtcgctgggcctggatcccgacgcgatcgccgcggacctcggtttctcggctgccgcggacaactccgtcgacgcgaccgccgcccgcgacttcgccgccgaggcggcgttcgtgttcgccatgatcgccgtcgacctgtcccggctggctgaggacatcatcgtctggagctcgacggaattcggctacgtcacgttgcatgactcgtggtccaccggtagctcgatcatgccgcagaagaagaatccggacatcgccgagctggcccgcggcaagtccgggcggctgatcggaaacctggccgggctgctggccaccctgaaagcccagcccctggcctacaaccgcgacctgcaggaagacaaggagccggtgttcgattcggtggcccagctggagctgctgctgccggcgatggccgggctggtggccagcctgaccttcaatgtccagcggatggcggagctggccccggccggctatacgttggccaccgatctcgccgaatggcttgtgcggcaaggtgttccgtttaggtccgcgcatgaggccgcgggtgcggcggtgcgtgcggccgaacagcgcggcgtggggctgcaggaactcaccgacgacgagctggccgccatcagccccgagctgaccccgcaagtccgcgaggtgctgaccatcgaaggctcggtgtcggcccgcgattgccggggtggcaccgcgccgggccgggttgccgagcaactgaacgccattggtgaagccgccgagcggctgcgccgccagctggtgcgc

SEQ ID NO: 26111 - DNA, 457 bp, Mycobacterium bovis
atgtcggcgaaaatcgacattaccggtgattggactgtggccgtgtattgcgcggcctcgccaacgcacgcggagttgctagagctggccgccgaagtcggcgcggcaatcgccggacgtggctggacgctggtgtggggaggtggccatgtttcggcgatgggggctgtcgcctcggcggcgcgagcctgcggcggctggaccgtcggcgtgattcccaagatgctggtgtaccgcgaactggctgatcacgacgccgacgagctaatcgtcaccgacaccatgtgggagcgcaagcagattatggaagatcgctcagatgcgttcatcgtgttgccgggcggtgtcggcacctagacgagctgtttgacgcatggaccgacgggtatctcggtacccatgaacgaaccattgtgatggtagatccctgcgggcatttcgatggactgcgggcatg

SEQ ID NO: 26112 - DNA, 1162 bp, Mycobacterium bovis
atgcggcagcggtggcaagccgtgatgatgaacaactacggcacccccccgatagcgctggccagcggtgacggcgccgtggtcaccgacgtggacggcagaacctatatcgacctgctcggcggcatcgcggtcaacgtgctgggccatcgccaccccgcggtcatcgaggccgtcacccggcagatgtcgacgctggggcacacctccaacctgtatgccaccgaaccgggcatcgcgctggccgaggagctggtcgcgctgctgggggccgaccagcggacgcgagtgttcttctgcaactccggcgccgaggccaacgaggcggcgttcaagctgtctcggctcaccggacgcacgaaactggtcgccgcccacgacgccttccacggccgcaccatgggctcgctggcgctcaccggacaaccggccaagcaaacgccgttcgcgccgctgcccggcgacgtcacgcacgtcggctacggcgacgtcgacgcgttggccgccgccgtcgatgaccacaccgccgcggtgttcctggaaccgatcatgggggagagcggggtcgtcgtcccgcccgcgggctaccttgccgccgcccgcgacatcacggcgcggcgcggcgcgctgctggtgctcgacgaggtgcaaaccgggatgggccgcaccggagcgttctttgcccaccagcacgacggcatcaccccggacgtggtgaccctggccaagggtctgggcggcgggctgccgatcggtgcctgcctggccgtcgggccggccgccgaactactgaccccaggcctgcacggcagcaccttcggcggcaacccggtttgcgccgcggcggcgctggcggtgctacgggtgctggcgagcgacggcctggtccgccgcgccgaagtcttgggcaaatcgttgcggcacggcatcgaagcgctcggccacccgctcatcgaccacgtgcgcggacgcggactgctgttgggcatcgcgctgaccgccccgcacgccaaggacgccgaggccaccgcccgcgacgccggttacctggtcaacgcggccgcacccgacgttcatccggttggcgccgccgctgatcatcgccgaagcacagctcgacggctttgtcgccgccttgccggcaatcctggaccgcgccgtg

SEQ ID NO: 26113 - DNA, 921 bp, Mycobacterium bovis
gtgatcaggcatttcctgcgcgacgacgatctgtccccggccgaacaggccgaggtgctcgagctcgcggccgagctgaagaaagacccggttagccgtcgtcccctgcaagggccgcgcggggtggcggtcatcttcgacaagaactccacccgcacccggttctccttcgagctgggcatcgcgcagctgggcgggcatgccgtcgtcgtcgacagcggcagcacccagctgggccgcgacgaaaccctgcaggacaccgcaaaggtgttgtcccgctacgtcgatgccatcgtctggcgaaccttcggccaagagcggctggacgccatggcgtcggtcgcgacggtgcccgtgatcaacgcgctctccgatgagttccatccgtgtcaggtgttggccgacctgcagaccatcgccgaacgcaagggggcgctgcgcggcctgaggttgtcctacttcggcgacggcgccaacaacatggcccactcgctgctgctcggcggggtcaccgcgggtatccacgtcaccgtcgcggctcccgagggcttcctgcccgacccgtcggtgcgggccgcggccgagcgccgcgcccaggataccggcgcctcggtgactgtgaccgccgacgcccacgcggccgccgccggcgccgacgttctggtcaccgacacctggacgtcgatgggccaggaaaacgacgggttggaccgagtgaagccgtttcggccgtttcagctcaactcgcgacttctggcgctggccgactcggatgccatcgtgttgcattgcctgccggcccatcgcggcgacgagatcaccgacgcggtgatggacgggccggccagcgcggtgtgggacgaggccgaaaaccggctgcacgcgcagaaggcgctgctggtgtggctgctggagcgctca

SEQ ID NO: 26114 - DNA, 924 bp, Mycobacterium bovis
gtgagcgtcgtattcgccgacgtcgacaccggcatcgacgacgcgctggccgtgatctatctgctggccagtcccgacgccgatctggtcggcatcgcctcgaccggcggaaacatcgcggtaggtcaagtgtgcgcgaacaacctgagcttgctcgaattgtgcggtgccgcagacatccccgtgtccaaaggcgccgatgagccgctcggcggccggtggcccgatcacccaaagtttcacggccccaaggggataggctatgccgagctgccggccagcaatcgccggctcaccgattatgacgccacgacggcctggatcgcggcggcgcactcccacgccggcgacctgatcggtctggtcaccggcccgctgaccaacctggcgctggcgctgcgcgccgaacccgcgctgccgaggctgctgcgccggctggtgatcatgggcggcatgttcgacggccagccgatcaccgaatggaacatccgggtggatcccgaggcggccagcgaggtgttcaccgcgtgggccggacaacgacaactgccgatcgtgtgcggtttggatctcacccggcgggtcgcgatgacaccggacattctcgcccggctggcgtccgtctgcggctcgtctccggtgatgcgggtgatcgaggacgcgctgcggttctacttcgagtctcatgaggcgcgcggacatgggtacctggcatatatgcacgacccgctggccgccgcggtcgcaatggacccggaactcctgacgacccggaccgcgacggtggatgtcgacccgacgggggcgacggtcaccgactggtccgggaagcgaaatcccaacgcgcggatcggcatgagcgtcgatccggcggtgttcttcgaccggttcgtcgaacggatcggacgattcgcgcgccgaacg

SEQ ID NO: 26115 - DNA, 2100 bp, Mycobacterium bovis
gtgaccacactcgaagagatctccgcgcttacccgaccgcgccatcccgacgactggaccgagatcgattcggctgccgtcgacaccatccgggtattggccgccgatgccgtccaaaaggtcggcaacggtcatcctggaacggcgatgagcctggctccgttggcctacacgctgtttcagcggacaatgcgtcacgatcccagcgacacacactggctgggccgcgatcggttcgttttgtcggccgggcacagcagcctgaccctctacatccagctctacctcggcggcttcggcctggaactgtccgacattgagtcgttgcgcacctggggatccaagacccccggacacccggagttccgccacacccccggcgttgagatcaccaccggcccgctggggcagggactggcgtcggcggtcgggatggcgatggcctcgcgctacgagcgcggcctgttcgacccggacgccgaaccgggcgccagccccttcgaccactacatctatgtcatcgcctccgacggtgacatcgaagaaggggtgacctcggaggcgtcgtcgctggccgcggtccagcaactgggcaacctcatcgtgttctacgaccgcaaccagatctcgatcgaggacgacaccaacatcgcgctgtgtgaggacaccgcggcccgctaccgcgcgtacggctggcacgtgcaagaggttgagggcggtgagaacgtcgtcggcatcgaggaggccatcgccaatgcgcaggcggtcaccgaccggccctcgttcatcgcgctgcgcaccgtcatcggctatccggcgccgaacctgatggacaccggcaaggcgcacggcgcggcgctgggcgacgacgaggtggccgcagtcaagaagatcgtcggcttcgatccggacaagacgttccaggtccgcgaggacgtcctcacccacacccgagggctggtggcccgcggcaaacaggcccacgaacgctggcagctcgaattcgatgcctgggcgcggcgtgaacccgagcgcaaggcgctgctggaccggctgctcgcgcagaagttgcccgacggctgggacgccgacttgccccactgggaaccggggtccaaggcgctggccacccgtgcggcctcgggtgcggtgctgtccgcgctcgggccgaaactgcccgagttgtggggcggttcggccgacctggcgggcagcaacaacacaacgataaagggcgccgactcctttggcccgccctcgatttccaccaaggagtacaccgcgcactggtatggtcgcaccttgcacttcggtgttcgcgagcacgcgatgggtgccatcctgtccggcatcgtgctgcacggacccacccgggcttacggcggcaccttcctgcagttctccgactacatgcgcccggcggtgcggctggcggcgttgatggacatcgacaccatctacgtctggacgcacgactcgatcggcctcggcgaagacgggcccacccatcaaccgatcgagcacctctcggcgctgcgcgcgatcccccggctgtcggtggtgcgcccggcagatgccaacgagacagcctacgcctggcgcacgatcctggcccgccgcaacggcagcgggccggtcgggttgatcctgacccgccagggtgtgccggtgctggacggcaccgacgccgagggggttgcccgcggcggttacgtgctgagtgacgccggtggtctgcaaccgggcgaggaacccgacgtcattctcatcgccaccggctcggaggtgcagctggcggtcgcggcgcagacgttgctggcggacaacgacatcctcgctcgggtggtgtcgatgccgtgcctggagtggttcgaggcccaaccctacgagtaccgcgacgcggtgctgcccccgacggtgtcggcgcgggtggccgtcgaagccggcgtcgcgcaatgctggcaccagctggttggcgacacgggcgagatcgtctcgatcgagcactacggcgaatccgcggaccacaagaccttgttccgcgagtacggcttcactgccgaggccgtggccgccgccgccgaacgagcgctggataac

SEQ ID NO: 26116 - DNA, 1119 bp, Mycobacterium bovis
atgaccgctcagaaccccaacctggccgcattgagcgccgcgggggtatcggtgtggctggatgacctgtcgcgggaccggctgcgctcgggcaatctgcaggagctgatcgacaccaagagcgtcgtcggggtgaccaccaacccgtcgatctttcagaaggcgctgtcggagggccacacctacgacgcccagatcgccgagctggccgcgcgcggcgccgacgtggatgccaccatccgcaccgtcaccactgacgacgtgcgcagcgcgtgcgacgtgctggtcccccagtgggaggactccgacggggtcgacggccgggtgtcgatcgaggtcgacccgcggctggcacacgaaaccgaaaaaacgatccaacaggcaatcgagctgtggaagatcgtcgaccggccgaaccttttcatcaagatcccggccactaaggccggtctgcccgccatcagtgccgttctggcggaagggatttcggtcaacgttacgctgatcttctccgtgcagcggtaccgcgaggtgatggacgcctacctgaccgggatggaaaaggcccggcaagccggacacagcctgtccaagatccattcggtggcatcgtttttcgtctcccgggtggacaccgaaatcgacaagcggctggacagaatcggctcgcggcaagcgctcgaactgcgcggccaggccggtgtcgccaatgcccgcctggcctatgccgcctaccgggaggtcttcgaagacagcgatcgttatcggtccctcaaggtcgacggcgcccgggtccagcgcccgttgtgggcttccaccggcgtgaagaaccccgattactcggacaccctctacgtcaccgagttggtcgccccacacaccgtgaacactatgccggaaaagacaattgacgccgtcgctgatcatggcgtgatccaaggcgacacggtcaccggaactgcatccgatgcccaggcggtgttcgaccagctgggggcgatcggcatcgacctcaccgacgtgtttgccgtcctcgaggaggaaggcgtgcggaagttcgaggcctcctggaacgagctactccaggaaacccgggcgcatctcgacaccgctgcccaa

SEQ ID NO: 26117 - DNA, 1542 bp, Mycobacterium bovis
atgaaaccggcccacgccgcggcgtcgtggcgcaacccgctacgagacaagcgggacaagcgattacccagaatcgccggcccgtgcggcatggtgattttcggcgtcaccggcgacctggcccgcaagaaggtgatgccggccgtctacgatttggccaaccgcggcctgctgccgcccacattctcgctggtggggtttgcccgccgagactggagcacccaggatttcggtcaagtggtgtacaacgccgtccaagagcactgccgaacaccgtttcggcaacagaactgggaccggctggccgagggattccgttttgtgccaggcactttcgacgacgacgacgcgttcgcccaactcgccgagacgctggagaagctcgacgccgagcgcggcaccggcggcaaccacgccttctacctggcgatcccgcccaaatccttcccggtggtgtgtgagcagctgcacaagtccggcctggcccgcccgcaaggcgaccggtggagccgagtcgtgatagagaagccgttcggccacgacctggccagcgcacgcgagctgaacaaggcggtcaacgcggtcttcccggaggaagcggtcttccgcatcgaccactacctgggcaaagagacggtgcagaacatcctggcgctgcggttcgccaaccagctgttcgacccgatctggaatgcgcactacgtcgaccacgtacagatcaccatggccgaagacatcggcctgggcgggcgcgcgggctattacgacggcatcggcgcggcccgcgatgtcatccagaaccatctcatgcagctgctggcgctgaccgcgatggaggagccggtcagcttccacccggcagcgttgcaggccgagaagatcaaggtgctctcggccacccgccttgccgagccactcgaccagaccaccagccgcggccagtacgccgccggctggcaaggcggggagaaggtggttgggctgctcgacgaggaggggttcgccgaggactccaccaccgaaaccttcgccgctatcaccctggaagtcgatacgcgccggtgggccggcgtgccgttctatctgcgaacgggaaaacgattgggccgccgggtgaccgagatcgctctggtcttcaggcgggcgccgcatctgccgttcgacgccaccatgaccgacgagctgggcaccaacgcgatggtcatccgcgtgcagcccgacgaaggtgtcacattgcggttcggctccaaggtgccgggcaccgccatggaagtccgcgacgtcaacatggacttctcctacggctcggcattcgccgaagattcaccggaggcctacgagcggctcatcctcgacgtcctgctcggcgagccctcgctgtttccggtcaacgcggaggtcgaactggcgtgggagatcctcgatccagcgttggaacattgggcggcacacgggacgcccgacgcctacgaggcaggtacctggggtccggaatcatccttggagatgctgcgccgcaccggccgggaatggcggcggcca

SEQ ID NO: 26118 - DNA, 798 bp, Mycobacterium bovis
ttggcgcccacagctgccggtcacccagtggtcggtgaccaagcgatgacggtctatttcatcggagcgggccccggcgccgccgacctaatcaccgtccgcggccaacggctcctgcaacgatgcccggtgtgcctgtatgcgggttcgatcatgcccgacgacctgttggcgcagtgtccgcccggcgcgacgattgtcgacaccggtccgctgaccctcgaacaaatcgtgcgcaaacttgccgacgccgacgccgacggccgcgacgttgcccggctgcattccggcgacccgtcgctgtacagcgcgctggccgaacagtgccgcgaactcgacgcgctgggcatcggctacgaaatcgtgccgggcgtaccggcttttgccgcagccgcagcggcgctaaagcgcgaactcaccgtgccgggtgtggcgcagacggtgacgctcacccgggtggcgacgctgtccacacccatgccgcccggtgaggacctggccgcgctcgcccgatcccgcgccactctggtcttgcacctggccgcagcccagatcgacgccatcgttccgcgactgctagacggtggttaccgacccgaaacgccggttgcggtggtggctttcgcgagttggccgcaacagcggacgctacgcggcacgttggccgatatcgccgcgcggatgcacgatgccaagatcaccaggaccgccgtgatcgttgttggcgacgtgctgaccgctgagggctttaccgacagctacctatattcggtggcacggcacggtcggtatgcacag

SEQ ID NO: 26119 - DNA, 1725 bp, Mycobacterium bovis
gtgaagctcaccgacgtcgattttgccgtcgaggcctccgggatggtgcgggccttcaaccaggccggtgtgctggacgtgtcggatgtgcatgtggcgcaacgtctctgtgcactggccggggagagcgacgagcgggtggcgttggcggtagcggtggcggtccgcgcgctacgggccggttcggtgtgtgtggatctgttgtcgatcgcgcgggttgctggacacgacgacctgccgtggccggatccggcggactggttggcggcggtgcgggccagtccgttgctcgccgatccacccgtgctgcacctgtatgacgatcggctgctctatctggaccgctactggcgcgaagaagagcaggtgtgcgcggacctgctcgcgttgctgacatccaggcgaccggccggggtacccgacttgcggcgactgttcccgaccggctttgacgagcagcggcgcgcggcggaaatcgcgctctcgcaaggtgttacggtgttgactggcgggcctggcaccggaaagacgacgacggtcgcgcggctgctggcgttggttgccgagcaggcggagctggccggtgagccgcggccgcggatcgcgctggccgcacccaccggcaaggcggcggcccggctggccgaggcggtacggcgcgagatggccaagctcgacgccaccgaccgggcacggctcggcgacctgcacgcggtcacgctgcatcgtctgctgggtgccaaaccgggagcgcggtttcgccaggatcgccagaaccggttgcctcacaacgtgatcgtggtcgacgagacctcgatggtgtcgctgacgctgatggcccggctggccgaggcggtgcgcccgggcgcccggttgatcctcgtcggcgatgccgaccagttggcgtcggtggaagccggagcggtgctggcggatttggtcgatggcttctcggtacgcgacgacgcgctggtggcgcagctgcgaacgtcgcatcggttcggcaaggtgatcggtaccttggccgaagcgatccgggccggcgatggcgatgccgtactgggcctgctgcgctcgggtgaggagcggatcgagttcgtcgacgacgaggatccggcgccgcggttgcgcgcggtgctggtgccacacgcgttgcggctgcgcgaggcggcgctgttgggtgcctccgacgtcgcgttggccaccctggacgagcaccggctgctgtgtgcgcatcgggacgggcccaccggcgtgctgcactggaaccgccgggttcaagcctggctcgccgaggagaccggccagccgccctggacgccgtggtacgccgggcgtccgctgctggtgacggccaacgactacggccttcgcgtctacaacggcgacaccggtgtcgtgctggccggccccaccggtctgcgggccgtcatttctggtgcatccgggccacttgacgttgccaccggccgcctcggcgacgtcgagaccatgcacgcgatgaccatccacaagagtcagggcagccaggtcgacgaggtgacggtgctgatgccgcaagaggattcgcggttgctgacccgggagttgctgtacaccgcggtggcccgggccaaacgcaaggtccgggtggtcgggtccgaagcttcggtgcgggccgcgatcgcacgccgggcggtgcgggccagcgggttgcggatgcggttacagtcgacggggtgtggc

SEQ ID NO: 26120 - DNA, 1482 bp, Mycobacterium bovis
gtgacggacatcatccgatccgacgccgcgacgttggccgccaagatcgccatcaaggaggtgtcgtcgaccgagatcacccgggcctgcctggatcagatcgaggcgaccgacgagacgtaccacgccttcctgcatgtggcggccgatgaggcgctggcggcggcggccgccgtcgacaagcaggtggccgctggagaacccttgccgtcggcgctggccggggtgccgctggcgctcaaggacgtcttcaccaccagcgacatgcccaccacctgcgggtcaaaaatcctggagggatggcgatctccctacgacgccacgctgaccgcgcggttgcgcgccgcggggatcccgatcctgggcaagaccaacatggacgagttcgcgatgggctcgtcgacggagaactccgcttacggtcccacccgcaacccgtggaatctcgaccgggtacccggcggttccggtggcggcagcgcggcggcgctggccgcgttccaggcgccgctggccatcggatccgacaccggggggtcgatccgccagccggccgcgctgaccgcgaccgtcggcgtcaaacccacctacggcacggtgtcgcgctatgggctggtggcctgcgcgtcctcgctggatcagggcggcccgtgtgcgcgcaccgtcttggacaccgcgctgttgcatcaggtgatcgccggccacgacccgcgcgactccacgtcggtcgacgccgaggtgcccgacgtggtgggcgccgctagggccggcgcggtcggggatctgcgtggcgtgcgggtcggcgtggttcgacagctgcacggcggcgagggctaccagccgggcgtgctggcctccttcgaggctgccgtggagcagctaaccgcgctgggcgctgaggtcagcgaggtcgactgcccgcacttcgaccatgccctggccgcctattacctgattctgccctcggaggtgtcgagcaatctggcgcgcttcgacgcgatgcgctacgggctgcgggtcggcgacgacggcacccgcagcgccgaggaggtgatggcgatgacccgggccgccggtttcgggcccgaggtcaagcggcgcatcatgatcggcacctacgcgttgtcggccggctactacgacgcctattacaaccaggcgcagaaggtgcgcacgctgatcgcccgcgacctcgacgcggcgtatcggtccgtcgacgtgctggtgtcgcccacgaccccgaccaccgcgttccggctgggtgagaaggtggacgatccgctggcgatgtacttgttcgacctgtgcacgctgccgctgaacttggccggccactgcggcatgtctgtgccgtcggggctctccccggacgacgggttgccggttggcctacagatcatggcgccggcattggccgacgaccggctctaccgggtgggggcggcttatgaggccgcccgcggcccgctactgagcgccatt

SEQ ID NO: 26121 - DNA, 480 bp, Mycobacterium bovis
atgagcacccggtccgctcgaattgtcgttgtgtcgagccgcgcggcggccggtgtgtataccgatgattgcgggccgattatcgctggatggcttgaacagcatgggttttcgtccgtccagccgcaggtggttgccgacgggaacccagtcggcgaggcgctacacgacgcggtcaacgccggagtcgacgtgatcatcacttccggcggcaccggtatctcgcccaccgataccacgcccgaacacacggtcgccgtgctggactacgtcattcccgggctggccgacgcgatccgccgctccggcctgcccaaggtgccgacatcggtgctgtcgcgcggggtgtgcggcgtggctgggcggaccctgatcatcaatctgccgggatcgcctggaggtgtacgtgacggcctcggggtgctcgccgatgtgctggaccatgctctcgagcagatcgccggtggagatcacccgcga

SEQ ID NO: 26122 - DNA, 1389 bp, Mycobacterium bovis
atggcgatccgccaacacgtcggcgcgctgttcaccgacctgtacgaggtgacgatggcccaggcctactgggccgaaagaatgtcgggcacagcggttttcgagatattcttccgcaagcttccgcctggcaggtcctacatcatggccgccgggctggccgatgtggtcgagttcctcgaagcgtttcgattcgacgagcaggatctgcgttacctgcgtggcctgggccagttttccgacgagttcctgaggtggctggccggagtgcgtttcaccggagatgtctgggccgcgccggaaggaaccgtgatttttccgaacgaacccgcggtccagctgatcgcgccaatcatcgaggcccagcttgtcgagacgttcgtgctgaaccagattcatctgcaaagcgtgctcgcgagcaaggccgcgcgggtggtcgccgccgcgcgcggacgaccggtggtggatttcggcgcgcggcgcgctcacggcaccgacgcggcctgcaaggtcgcgcgcaccagttatctcgcgggcgctgcgggcacgtcgaatctgctcgcggcccgccaatatgggatcccgacgttcggcaccatggcgcacagctttgttcaagccttcgacagtgaggtggccgcgttcgaggcgttcgcccggctctacccagccaccatgctgctcgtggacacctacgacacgctacgcggcgtcgatcacgtcatcgagttggccaagcggctgggcaatcgcttcgatgtgcgcgcggtccggctggattccggcgacctcgatgagctgtccaaggcgacccgtgcacggctcgacaccgccggtctcgagcaggtcgagatcttcgcgtcgtcgggcctcgacgaaaaccgcatcgccgcgcttttggctgcccgctgtccgatcgacggcttcggcgtgggcacccagctcgtcgtggctcaagacgcgcccgcgctggacatggcctacaagctggtggcatacgacggcagcgggcgcaccaagttctccagcggcaaggtgatctacccgggacgcaagcaggtgttccgtaagctcgagcacggagtcttttgcggcgacacgctcggcgagcacggtgaaaaccttcccggggacccgttgctggtgcccatcatgaccaacggccgacgcatccggcagcatgcacccacattggacggcgcgcgggactgggcccgccagcagatcgacgcgctcccgccggagctgcgctcgctcgaggacaccggctactcgtatccggtggcggtcagcgacaggatcgtgggcgaactcgcccggctgcggcacgccgacacggccgaagcccaccccgggtccaacgtcgtcggggcgaaggccaaacgaccc

SEQ ID NO: 26123 - DNA, 603 bp, Mycobacterium bovis
atggctcgttacaccggacccgtcacccgcaaatcacggcggttgcgcaccgacctcgtcggtggcgaccaggccttcgagaagcgtccctacccgcccggccaacacggtcgcgcgcggatcaaggaaagcgaatatctgcttcagctgcaggagaagcagaaggcccgtttcacatacggcgtaatggaaaagcagttccgccgctactacgaagaggccgtgcggcagcccggcaagacgggtgaagaactgctgaagatcctcgaaagccggctggacaacgtcatctaccgtgccgggctggcgcgcacccggcggatggctcgccagctggtcagccacgggcatttcaacgtcaacggcgtgcacgtcaacgtccccagttaccgggtgtcgcagtacgacatcgtcgacgtgcgggacaagtccctgaacacggtgccgttccagattgcccgggagacggcgggcgagcgtccgatcccgagctggctgcaagtggtgggggagcggcaacgcgtcctgatccaccagctacccgagcgcgcgcagatcgacgtcccactcaccgagcagctgatcgtcgagtactactcaaag

SEQ ID NO: 26124 - DNA, 417 bp, Mycobacterium bovis
atgccaccagcaaaaaaagggccggcaacgtcggctaggaagggccagaagacccgccggcgggagaagaagaacgtcccgcacggcgccgcccacatcaagagcacgttcaacaacacgatcgtgaccatcaccgacccgcaaggcaacgtcattgcctgggcatcgtcggggcacgtcggcttcaagggttcccggaaatcgaccccgtttgcggcccagctggccgcggagaacgccgctcgcaaggcccaagaccacggggtgcgcaaggtcgacgtgttcgtcaagggcccgggctcgggccgcgagaccgcgatccggtcgctgcaggccgccggcctggaggtgggcgcgatctcggatgtcaccccccagccgcataacggtgtccggccccccaatcgccggcgcgtc

SEQ ID NO: 26125 - DNA, 372 bp, Mycobacterium bovis
atggctcgactcgtcggcgtcgacctgccgcgcgataagcggatggaggtcgccctgacctacatctttggcatcggccgtacccgctcgaacgaaatcctggcggccaccggcattgaccgggatctgcgcaccagagatctcaccgaagaacagctgatccacctgcgcgactacatcgaagcgaacctgaaggtggagggtgacctgcgccgcgaggtacaggccgacatccgtcgcaagatcgagattggctgctatcaggggttgcggcaccgccgcggtatgccggtacgcggccagcggacaaaaaccaacgcgcggacccgcaaaggccccaagcgcaccatcgcaggcaagaagaaggctagg

SEQ ID NO: 26126 - DNA, 219 bp, Mycobacterium bovis
atggccaagaaggacggtgccatagaggtcgagggtcgcgtggtcgagcccctgcccaatgccatgttccgcattgagctggagaacggccacaaggtgctcgcccacatcagcggcaagatgcgtcagcactacattcgcatcctgcccgaggaccgggtggtggtggaattgtcgccctacgacctgtcccggggccgcatcgtgtaccggtacaag

SEQ ID NO: 26127 - DNA, 1308 bp, Mycobacterium bovis
atggacccgctgaaccgccgacaattcctcgcgctggccgctgccgccgccggcgtgaccgccggctgcgccgggatgggcggcggcggttcggtgaagtccggttccggcccaatcgacttctggtccagtcatcccggccaatccagcgcggcggaacgggagctgatcggtcgtttccaggaccgattccccactctgtcggtcaagctgatcgacgccggcaaggactacgacgaggtggcacagaaattcaatgcggcgctcatcggaaccgacgtgcccgacgtcgttttgctcgacgaccgatggtggttccatttcgccctcatcggtgttctcactgcccttgacgacctgttcggccaagttggggtggacacaacggattacgtcgattcgctgctggccgactatgagttcaacggccgccattacgctgtgccgtatgctcgctcgacgccgctgttctactacaacaaggcggcgtggcaacaggccggcctacccgaccgcggactgcaatcctggtcagagttcgacgagtggggtccggagttacagcgcgtggtcggcgccggtcgatcggcgcacggctgggctaacgccgacctcatctcgtggacgtttcagggaccgaactgggcattcggcggtgcctactccgacaagtggacattgacattgaccgagcccgccacgatcgcggccggcaacttctatcggaactccatccatggcaagggttatgcggcggtcgccaacgatattgccaacgagttcgccaccggaatcctggcctcggccgtggcatccaccggctcgctgcccggcatcaccgcatctgcccgattcgacttcggcgccgcaccgctgcccacgggcccggacgcagcgcccgcctgtccgacgggcggtgcggggctggcgataccggccaagctctccgaggagcgaaaagtcaacgcgctcaagttcatcgcattcgtcaccaacccgacgaacaccgcctacttcagccagcaaaccggctatctgccggtgcgcaagtccgccgtcgacgatgccagcgaacggcactatctggcggacaatccccgtgcgcgggtggcgctcgaccagctgccacacacccggacacaagactacgcacgggttttcctgcccggtggtgaccggatcatctccgccggcctggaatccatcgggctgcgcggagccgacgtgaccaagaccttcacgaacatccaaaaacggttgcaggtcatcctggatcggcagatcatgcggaagctggcggggcatggc

SEQ ID NO: 26128 - DNA, 1380 bp, Mycobacterium bovis
gtgggacgctgcctggagtgcggccgctggggcaccgtagacgaggtggcggtgctcagtgccgtcggtggcaccaggcgccgttcggtggcgccggcgtcgggcgccgttccgatcagtgccgtcgacgcgcatcggacccgaccctgcccaaccggcatcgacgaactggaccgggtgctaggtggcggtatcgttcccggttcggtgacactgctggccggcgatcccggagtgggtaagtcgacgctgttgctcgaggtcgcgcaccgctgggcccagtccggacggcgcgcgctctatgtctctggtgaggaatccgccggtcagatccggctgcgtgccgaccggatcggctgcggcacggaggtcgaggagatctacctcgccgcacaatccgacgtgcacaccgtgctcgaccagatcgagacggtgcagccggcactggtcatcgtcgactcggtgcagaccatgtccaccagcgaggccgacggcgtcaccggcggggtcacgcaggtccgtgcggttacggctgccctgaccgctgccgccaaggccaacgaggtcgcattgattctcgtcggccacgtcacgaaggacggggccatagccggaccgcgttcgctagagcacctcgtcgacgttgtgctgcattttgaaggggaccgcaacggtgcgctgcggatggtccgcggggtcaagaaccgattcggcgccgccgatgaagtcggatgtttcctcctgcacgacaacggaattgacggtatcgtcgacccgtcgaacctgttcctggaccagcggccgacacccgtcgccggtaccgcgatcaccgtgacgctggacggaaaacggccgctcgtcggggaagtccaggcattgctggccacaccgtgcggcggctcgccgaggcgggccgtcagcgggatccaccaggcccgcgctgcgatgatcgctgctgtgctggaaaagcacgcacggctggcgatcgccgttaacgacatctacctgtccaccgtgggcggcatgcggttgaccgagccgtcggcggatctggcggtcgccatcgcgctcgcctcggcctatgcaaatctgccgctgcccaccactgccgtcatgatcggcgaggtaggtctggccggcgacatccggcgggtcaacgggatggcgcggcgccttagcgaagccgcccgccaagggttcaccatcgccttggtcccgcccagtgacgatccggtgccgcccggtatgcacgcgctgcgcgcatccaccatcgtcgcggcgctgcagtacatggtcgacattgccgaccaccgcggcaccaccctcgcaaccccgccctcacattccgggactggacacgtcccactagggcgcggtaca

SEQ ID NO: 26129 - DNA, 693 bp, Mycobacterium bovis
gtggtcagggaagcgggcgaagtagttgcgatcgtcccggctgcggggtcgggggagcggttggccgtcggtgtgcccaaggcgttttaccagctcgacgggcagactctcattgagcgggccgtcgatggcctgctggattcgggggtagttgacaccgttgttgtggccgtgcccgccgaccgtacggacgaggcgaggcagatcctcggccacagggcgatgattgtggcgggtgggtcgaatcgcactgacaccgtgaacctggcgctggcagtgctgtccgggaccgcggagccggagtttgtgcttgtgcatgatgccgcgcgggcactgacaccaccggccctggtcgcccgggtggtcgaggcgttgcgggacggttatgccgccgtcgttcccgtactgccgctttctgacaccatcaaggccgtggatgccaacggggtggtcctgggcacgccggaacgagccgggctgcgggccgtgcagaccccacaagggttcactaccgacctgctgctgcggtcatatcagcgcggctccctagaccttccagccgccgagtacaccgatgacgcgtcgctggtcgagcatatcggcggccaggtgcaggtggtcgacggcgatccgctggcgttcaagatcaccaccaaactggatctgttgctggcccaagctatagtgcgcggg

SEQ ID NO: 26130 - DNA, 228 bp, Mycobacterium bovis
aatcagctgccccgcgttggtttggggaccgatgtgcatccgatcgaacccggacgtccgtgctggctggtggggttgttgttcccgagcgccgacggttgcgcgggccactccgacggtgacgtggccgttcatgcgctgtgcgacgcggtgctgtcggccgcggggctaggcgacattggcgaggtgttcggcgtcgacgatccccgttggcagggtgtcagtggt

SEQ ID NO: 26131 - DNA, 1710 bp, Mycobacterium bovis
cgacatgttgcgccatgtcgtcgtcctgatcacccagcatggctatcgggtcggcaacgctgtggtgcaggtgatcggcaaccgaccgaagatcggttggcgccggctcgaggcgcaggcggtgctgtcacgtctgctcaacgcgccggtgtcggtgtcggctaccaccaccgacgggctgggcctcactggccgcggcgagggcttggccgcaatcgctacggcattggtggtttcgttgcggtagcgcactcctggtccggacgcgcgcgccgcaggttgcagcaattgggcaggtaagctggcacgtcgtgaccgatcgggctcgcttgcggctacacgacactgccgccggtgtcgtgcgggatttcgtcccgttgcgacctggacacgtctcgatctacctgtgcggtgccacggtgcagggcctaccgcatatcgggcatgtccgcagcggggtcgccttcgacatcctgcgccgatggttgctcgcgcgtggctacgacgtcgcgtttatccgcaacgtgaccgacatcgaagacaagatcctggccaaggccgccgcggcgggccggccgtggtgggagtgggcggctacccacgagcgtgccttcaccgcggcctacgacgctctggacgtcttgccgccgtccgcggagccgcgcgccaccgggcatatcacccagatgatcgagatgatcgagcgcctgatccaggccggcccacgcgtataccggtggcggtgacgtttacttcgacgttctgagctacccggagtacggccagttatccggtcacaagatcgatgacgtccatcagggcgaaggtgtggctgccggcaagcgggaccagcgcgacttcactttgtggaagggcgaaaagccgggtgaaccgtcgtggccgacgccgtggggccgcgggcgtccgggctggcatctggaatgctcggcaatggctcgcagctatctcgggccggaattcgatatccattgcggtggaatggatttagtcttcccgcatcatgagaacgaaatcgcccagagccgcgccgccggtgatgggttcgcccgctactggctgcacaatggctgggtgacgatgggcggggagaagatgagcaagtcgctgggcaacgtgttgtccatgccggcgatgttgcagcgggtgcggccggctgagctgcgttattacctgggcagcgcgcactaccggtcgatgctcgagttctccgagaccgctatgcaggatgcggtgaaagcctatgtcgggctagaggacttcctgcaccgcgttcgcacccgggtgggcgccgtctgccccggcgatccgaccccacggttcgccgaagcgctcgacgacgacctgtccgttccgatcgcgctcgccgagattcaccacgtgcgggcggaaggcaaccgggcactcgatgccggcgaccacgacggggccttgcgaagcgctagcgcgattcgggcgatgatgggcatcctgggctgtgacccgctcgaccagcgctgggaatcccgagacgaaacctcggcagcgctggccgccgtcgatgtgctggtccaggctgaactacagaatcgggaaaaggcccgcgagcagcgcaactgggcgctcgccgacgagatccggggtcggctgaagagagccggcatcgaggtcaccgacaccgccgacgggccacagtggtcgctgctgggtggt

SEQ ID NO: 26132 - DNA, 495 bp, Mycobacterium bovis
atgattcactaccgcaccatcgatagccccatcgggccattaaccctggccgggcatggctcggtgttgacgaacctgcggatgctcgagcagacgtatgagccaagccgcacacactggacacccgaccccggcgcattttctggcgctgtcgaccaactcaacgcttatttcgccggcgagctcaccgaattcgatgtggaacttgacctccggggaaccgactttcagcaacgagtatggaaagcattgctgacaatcccgtacggggaaacccggtcctacggggaaatcgccgaccagatcggcgcccccggcgccgcacgcgccgtgggattggccaacggccacaatcccatcgccatcatcgtcccgtgccaccgcgtgatcggcgccagcggaaagctcaccgggtacggcggtggaatcaaccggaaacgagctctgctcgagttggagaaaagccgggcgcccgcagacttgacgctcttcgac

SEQ ID NO: 26133 - DNA, 1128 bp, Mycobacterium bovis
atgggctccctgaaggatttcagcgccagcgagctgggtgccatcgccattaagggcgccctggagaaggccaacgtgccggcgtccttggtcgagtacgtgatcatgggccaggtgttgaccgcgggtgccgggcaaatgcccgcacggcaggcggcagtggcggccggcatcggttgggatgtccctgcgctgacgatcaacaagatgtgcctgtccggcatcgacgcaatcgcgctggctgatcaactcattcgggccagagagttcgacgtggtggtggccggcggtcaggagtcgatgacgaaggcgccccacctgttgatgaatagccggtcgggttacaagtacggcgacgttacggttttggaccacatggcctacgacggtctgcacgacgtgttcaccgatcagccgatgggcgcgctcaccgagcaacgcaacgacgtcgacatgttcacccgctccgaacaggacgagtacgcggctgcgtcccaccaaaaggcggccgcggcatggaaggacggcgtattcgccgacgaggtgatcccggtgaacatcccgcagcgcacgggcgatccactgcagttcaccgaggacgaggggatccgcgccaacaccaccgccgccgcgctggccggtctgaagccggcgttccgtggcgacggcaccatcaccgccgggtcggcgtcacagatctccgacggtgcggccgcggtggtggtcatgaaccaggaaaaggcccaggaactggggctgacctggctagccgagatcggcgcccacggtgtggtggccgggccggattccacactgcaatcgcagccggccaacgcgatcaacaaggcgctggatcgcgagggcatctcggtggaccagctcgacgtggtggagatcaacgaggcgttcgctgcggtggcattggcctcgatacgcgaactcgggctgaacccccagatcgtcaacgtcaacggtggtgcgattgccgtcgggcatcccctcggcatgtcagggacgcgaatcacgctacatgcggcgctgcagttggcacgccggggatcgggcgtcggggttgccgcattgtgcggggctggcgggcagggcgacgcactgatattgcgggccgga

SEQ ID NO: 26134 - DNA, 2397 bp, Mycobacterium bovis
atgacaacgatcgagtcacgccctccgtcgccggaagacctagccgacaacgctcagcagccgtgcgggcacggccggatgatgcgcaaagaggacccgcgattcatccgcgggcgcggaacctacgtcgacgacgtcgcgctgccgggcatgttgcatctggccatcctgcgttcgccgtatgcgcatgcccgcatcgtgcgcatcgatgtgactgccgcgcaggcacatccgaaagtcaaggccgtggtgaccggcgccgatctggccgccaagggcctggcttggatgccgacactagccaacgacgtacaagccgtgctggccaccgacaagacgcgcttccagggccaagaggtggcgtccgtggttgccgaggaccggtattcggcccgcgatgcatgcgagttggtcgacgtcgactacgaaccgcgggatcccgtcgtggatgcccgcacggcgctggacccgtcggcgccggtcatccgcaccgatctggagggaaagagcgacaatcacatcttcgactgggagaccggcgacgcggcggcgaccgaggcggtgttcgccaaggccgacgtcgttgtccagcaggagatcgtctacccgcgggtgcacccggcgccgatggaaacctgtggcgcggtggccgatctagatccggtcaccggaaagctgacgctgtggaccaccagccaggcgccgcacgcgcatcgcacgctatacgcgctggtggccgggttgcccgaacacaagattcgggtgatctcgcccgacatcggcggcggcttcggcaacaaggtgccgatctatcccggttatgtctgtgccattgtcgcgtcgctgctgctggacaagccggtcaaatggatggaggaccgcagcgagaacctgacgtccaccggattcgcccgcgactacatcatggtcggcgagattgccgccaaccgtgacggcaagatcctggcgatccggtccaatgtgctggccgaccatggtgcgtttaacgcccaggccgcgccggcgaagtacccagccgggttcttcggggtgttcaccggcagctacgacatcgaggccgcctactgtcacatgaccgcggtgtataccaacaaggcgcccggcggggtcgcctacgcgtgttcgttccgcatcaccgaagcggtctacttcgtcgagcggctggtggactgcctggccttcgagctgaagatggatccagccgagctgcgcttgcggaatctattgcggcccaaccagtttccgtatcagagcaagactggttgggtgtacgactcgggcgactacgagaccacaatgcgtaaggcgatgaacatgatcggctacgaggcgttacgcgccgaacaaaagcagcggcgagcgcgcggcgagctgatgggcatcgggatgtcatttttcaccgaggccgtgggcgccgggccgcgcaaggacatggacatcctcggcctgggcatggccgacggctgcgagctgcgcgtgcacccgacgggcaaagccgtgctgcggctttcggttcagacccagggccagggccacgagacgacgttcgcgcagatcgtcgccgaggagctggggattgcgcccgacgacatcgaggtggtgcacggcgacaccgaccagacaccgttcgggttgggcacctacggcagccggtccacacccgtctcaggtggtgccgcggcgctggtcgcccgcaaggtgcgcgacaaggccaagatcatcgcctcgggcatgctcgaggtttcggtcgccgacttacagtgggagaaagggaagttccacgtcaagggtgacccgtcggccgcggtgaccatcgccgacatcgcgatgcgcgcgcacggcgccggcgatctgcccgagggcatcgagggcgggctggatgccgaggtctgctacaacccgtcgaatctgacctacccgtacggcgcctacttctgtgtggtcgacatcgacccgggcaccgcggtggtgaaggtgcggcgctttttggccgtcgatgattgcggaacccggatcaacccgatgatcatcgagggtcaggtacacggcggcatcgtcgacggcatcggcatggcgctgatggagatgattgccttcgacgaggacggcaactgtctgggcggatcgttgatggactacctgatcccgaccgcgctcgaggtgccacacctagagaccgggcacaccgtgaccccgtcgccgcatcacccgatcggcgccaagggcatcggtgagtcggccacggtgggttccccgccggcggtggtgaacgcggtggtggatgcgttggcgccgttcggggttcggcacgccgacatgccgttgacgccgtcgcgggtctgggaggccatgcagggccgggccacaccaccgatc

SEQ ID NO: 26135 - DNA, 537 bp, Mycobacterium bovis
gtggccggacctgaccgcgcagagttggctgagttggtgcgccggctgtcggtggtgcacggccgcgtcacgctgtcgtctggccgggaggccgactactacgtcgacctgcgtcgcgccaccttgcaccatcgggcgtccgcgctgatcggccggctaatgcgcgaactcactgccgactgggactattcggttgtcggcggcctgacactcggggccgatcccgtggcgaccgccatcatgcatgccccgggccgtccgatcgacgcgttcgtggtccgcaagtcggcgaaagcccatggcatgcagcgacttatcgaagggtcggaggttaccgggcagcgggtgctggtggtagaggacaccagtaccaccggtaactccgcgctgacggcggtgcacgccgtccaagacgtgggtggtgaggttgtcggcgtggctaccgtggtggatcgcgccaccggggccgcagaggctatcgaagccgagggactgcgctaccgcagcgtgctgggcctggccgatctggggctggat

SEQ ID NO: 26136 - DNA, 447 bp, Mycobacterium bovis
atggccgagctgaccgaaacatcgccggaaacccccgaaaccaccgaggccattcgtgccgtcgaggcgttcctcaacgccctgcagaacgaagacttcgacaccgtcgacgccgcactgggcgacgacctggtctatgagaacgtcgggttttccaggatccgcggtggccgccgcacggcaacgctgcttcgccgcatgcagggccgcgtcggcttcgaggtgaagatccaccgcatcggcgccgacggcgccgcggtgctcaccgaacgcaccgacgcgctaatcatcggaccgctgcgggtgcagttctgggtctgcggcgtattcgaggtggacgatgggcggatcaccctgtggcgggactacttcgatgtctacgacatgttcaagggcctcttgcgaggcctggtggcgctggtggtgccatcgctgaaggcaacgctg

SEQ ID NO: 26137 - DNA, 465 bp, Mycobacterium bovis
gtggcatcagcccttctccttcttagcgccgtaacggctgcgtgcctgtttgcggttcttgacaccctgcgtatccagcgaaccgcggatgatcttgtagcgcacaccaggcaggtccttcacccggccgccgcgcaccagcaccatcgagtgctcctgcaggttgtggccctcgccgggaatgtacgccgtgacctcgacctgactcgtcaacttcacgcgggcaaccttccgaagcgccgagttcggcttcttcggagtggtggtgtacacgcgggtgcatacaccacgacgctgcgggctgcccttcagagccgcggtcttgaccttactgatcttgtcccgacgacccttgcggaccagctgctggatggttggcatctaccggctttctatcttgggcgctttcacgttctgtttgtcggccatgccccgccacggttacccgcggccgggtgtgtcgca

SEQ ID NO: 26138 - DNA, 663 bp, Mycobacterium bovis
ctgggcgcggatctggccggcgaggtcagcaccgcggagccgtatgtcgtcgaacccgacgggccaccgggtgtttcgaggttcaccgtggccgccctagatcttggtatcaagaccaacactccgcgtaacttcgcccggcgcgggattcgctgccatgtgctgccggcatcgaccaccttcgagcagatcgccgaactcaacccgcatggcgtgttcttgtccaacggccccggcgacccggccaccgccgatcacgtcgtcgcgcttacccgcgaggtgctgggcgccggaatcccgttgttcggcatctgtttcggcaaccagatcctgggccgcgcgctgggcctgtcgacctacaagatggtgtttgggcaccgcggcatcaacatcccggtcgtcgaccacgccaccggtcgggtggcggtgaccgcgcaaaaccatggcttcgcccttcagggggaggcgggccaatccttcgccaccccgttcggtcccgcggtggtcagccacacctgcgccaacgacggtgtggtcgaaggcgtcaagctcgttgacgggcgggcgttttcggtgcaataccacccggaagccgccgccggcccgcacgatgccgagtacctgttcgaccagttcgtggagctgatggcaggggagggccgc

SEQ ID NO: 26139 - DNA, 3345 bp, Mycobacterium bovis
gtgccccgtcgcaccgatctgcaccacgtgctggtcatcggctccgggccgatcgtcatcggccaggcgtgcgagttcgactactccgggactcaggcgtgccgggtgctgcgcgccgagggcttgcaggtcagcctggtgaactctaatccggccaccatcatgaccgacccggagttcgccgaccacacctacgtagagcccatcaccccggcgttcgtggagcgggttatcgcccaacaggccgagcggggcaacaagatcgacgccctgctggcgaccctgggtgggcagaccgcgctgaacaccgcggtcgcgctgtacgagagcggggtgctggaaaagtacggcgtggaactcatcggcgccgatttcgacgccatccagcgcggcgaggaccggcagcggttcaaggacatcgtcgccaaggccggtggcgaatccgcccggagccgagtgtgtttcaccatggccgaagtgcgtgagacggtcgccgagctcggcctgccggtggtggtgcggccgagcttcaccatgggcgggctgggttcggggatagcgtactccaccgacgaggtcgaccggatggccggcgccgggctggcggcctcgcccagcgccaacgtgctcatcgaggaatcgatttacggctggaaggaattcgaactcgagctgatgcgcgacggccacgacaacgtggtggtggtgtgctcgatcgaaaacgtcgacccgatgggtgtgcacaccggcgactcggtcaccgtcgcgccggcgatgacgttgaccgaccgggaataccagcggatgcgcgacctgggcatcgcgatcctgcgcgaggtgggtgtggacaccggcggctgcaacatccagttcgcggtcaacccgcgcgacggtcggctgatcgtcatcgagatgaacccgcgggtgtcgcgttccagtgcgttggcgtccaaggcgaccggctttccgatcgccaagatcgccgccaaactggccatcggttacaccctcgacgagatcgtcaacgacatcacaggggaaacgccggcctgtttcgaacccaccctggactacgtggtggtcaaggcgccgcggttcgcgttcgagaagttccccggtgccgatcccaccctgaccaccaccatgaaatctgtcggtgaggcaatgtcgttgggccgcaacttcgtcgaggcgctcggcaaggtgatgcgctcgctggagacgacccgcgccgggttctggacggcaccggatcccgacggcggcatcgaggaagccctgacccggctgcggaccccggccgaaggccggctctacgacatcgagctggcgttgcggctgggtgcgacggtggaacgggtggccgaggccagcggtgtcgacccgtggttcatcgcgcagatcaacgagctggtcaatctgcgcaacgaactcgtcgcggcacccgtgctgaacgccgagctgctgcggcgcgccaagcacagcggactatcggatcaccagatcgcgtcgctgagaccggaattggccggcgaggccggcgtgcggtcactgcgcgtgcgcctgggcatccacccggtatacaagacggtggacacctgcgcggcggagttcgaagcccaaaccccctaccactacagcagctacgagctcgaccccgccgccgaaacagaggtggccccgcagaccgaaaggcccaaggtgctgatcctcggttcggggcccaatcggatcggccagggtatcgagttcgactacagctgcgtacacgcggcaaccacgttgagccaggctggctttgagaccgtgatggtcaactgcaacccggagacggtgtccaccgactacgacaccgcggacaggttgtacttcgagccgttgacgttcgaggacgtcttggaggtctaccacgccgaaatggaatccggtagcggtggcccgggagtggccggcgtcatcgtgcagctcggcggccagaccccgctcgggctggcgcaccggctcgccgacgccggggtcccgatcgtgggcaccccaccggaggccatcgacctggccgaggatcgcggcgcgttcggcgacctgctgagcgccgccggactgccggcgccaaagtacggcaccgcaaccactttcgcccaggcccgccggatcgccgaggagatcggctatccggtgctggtgcggccgtcgtatgtgctcggtggtcgcggcatggagatcgtgtatgacgaagaaacgttgcagggctacatcacccgcgccactcagctatcccccgaacacccggtgctcgtcgaccgcttcctcgaggacgcggtcgagatcgacgtcgacgcgctgtgtgatggcgccgaggtctatatcggcgggatcatggagcacatcgaggaggccggcatccactccggtgactcggcctgtgcgctgccaccggtcacgttgggccgcagcgacatcgagaaggtgcgtaaggccactgaagccattgcgcatggcatcggcgtggtggggctgctcaacgtgcagtacgcgctcaaggatgacgtgctctacgtcctggaagccaacccgagagcgagccgtaccgttccgtttgtatccaaggccacagcggtgccactcgccaaggcatgcgcccggatcatgttgggcgccaccattgcccagctgcgcgccgaaggcttgctggcggtcaccggggatggcgcccacgcggcgcgaaacgcccccatcgcggtcaaggaggccgtgttgccgtttcaccggttccggcgcgccgacggggccgccatcgactcgctactcggcccggagatgaaatcgaccggcgaggtgatgggcatcgaccgcgacttcggcagcgcgttcgccaagagccagaccgccgcctacgggtcgctgccggcccagggcacagtgttcgtgtcggtggccaaccgggacaagcggtcgctggtgtttccggtcaaacgattggccgacctgggttttcgcgtccttgccaccgaaggcaccgcagagatgttgcgccgcaacggtattccctgcgacgacgtccgcaaacatttcgagccggcgcagcccggccgccccacaatgtcggcggtggacgcgatccgagccggcgaggtcaacatggtgatcaacactccctatggcaactccggtccgcgcatcgacggctatgagatccgttcggcggcggtggccggcaacatcccgtgcatcaccacggtgcagggcgcatccgccgccgtgcaggggatagaggccgggatccgcggcgacatcggggtgcgctccctgcaggagctgcaccgggtgatcgggggcgtcgagcgg

SEQ ID NO: 26140 - DNA, 540 bp, Mycobacterium bovis
atgcccaagcccaccaagggccctcgcctcggcgggtcgtcttcacatcagaaggcgatcttggccaacctcgccacgtccctgttcgagcatgggcggatcacgacgaccgagccgaaggcccgggcgctgcgtccgtacgcggagaagctgatcacgcatgccaaaaaaggcgcattgcacaaccggcgcgaggtgctcaagaagctccgtgacaaggatgtggtgcataccttgttcgccgagatcggaccgttcttcgccgaccgcgatggtggctacacccgtatcatcaaaatcgaggcacgtaagggcgacaacgctccgatggccgtgatcgaactggtccgggagaagacggtgacctcggaggccaatcgagcacgccgggtagctgccgcgcaggcgaaggccaagaaggcggcggccatgccgaccgaggagtccgaggccaagcctgctgaggagggtgacgtggtcggcgccagtgagcctgacgcgaaggcccccgaagagccccccgcagaggcccccgagaat

SEQ ID NO: 26141 - DNA, 1041 bp, Mycobacterium bovis
atgctgatctcacagcgccccaccctgtccgaggacgtcctcaccgacaaccgatcccagttcgtgatcgaaccgctggagccgggattcggctacaccctgggcaattcgctgcgtcgcaccctgctgtcgtcgattcccggagcggccgtcaccagcattcgcatcgatggtgtactgcacgaattcaccacggtgcccggggtcaaagaagatgtcaccgagatcatcctgaatctcaagagcctggtggtgtcctcggaggaggacgagccggtcaccatgtacctacgcaagcagggtccgggtgaggttaccgccggcgacatcgtgccgccggccggcgtcaccgtgcacaaccccggcatgcacatcgccacgctgaacgataagggcaagctggaagtcgagctcgtcgtcgagcgtggccgcggctatgtcccggcggtgcaaaaccgggcttcgggtgccgaaattgggcgcattccagtcgattccatctactcaccggtgctcaaagtgacctacaaggtggacgccacccgggtcgagcagcgcaccgacttcgacaagctgatcctggacgtggagaccaagaattcaatcagcccgcgcgacgcgctggcgtcggctggcaagacgctggtcgagttgttcggcctggcacgggaactcaacgtcgaggccgaaggcatcgagatcgggccgtcgccggccgaggccgatcacattgcgtcattcgccctgccgatcgacgacctggatctgacggtgcggtcctacaactgcctcaagcgcgagggggtgcacaccgtgggcgaactggtggcgcgcaccgaatccgacctgcttgacatccgcaacttcggtcagaagtccatcgacgaggtgaagatcaagctgcaccagctgggcctgtcactcaaggacagcccgccgagcttcgacccctcggaggtcgcgggctacgacgtcgccaccggcacctggtcgaccgagggcgcgtacgacgagcaggactacgccgaaaccgaacagctt

SEQ ID NO: 26142 - DNA, 1620 bp, Mycobacterium bovis
atggccaagacaattgcgtacgacgaagaggcccgtcgcggcctcgagcggggcttgaacgccctcgccgatgcggtaaaggtgacattgggccccaagggccgcaacgtcgtcctggaaaagaagtggggtgcccccacgatcaccaacgatggtgtgtccatcgccaaggagatcgagctggaggatccgtacgagaagatcggcgccgagctggtcaaagaggtagccaagaagaccgatgacgtcgccggtgacggcaccacgacggccaccgtgctggcccaggcgttggttcgcgagggcctgcgcaacgtcgcggccggcgccaacccgctcggtctcaaacgcggcatcgaaaaggccgtggagaaggtcaccgagaccctgctcaagggcgccaaggaggtcgagaccaaggagcagattgcggccaccgcagcgatttcggcgggtgaccagtccatcggtgacctgatcgccgaggcgatggacaaggtgggcaacgagggcgtcatcaccgtcgaggagtccaacacctttgggctgcagctcgagctcaccgagggtatgcggttcgacaagggctacatctcggggtacttcgtgaccgacccggagcgtcaggaggcggtcctggaggacccctacatcctgctggtcagctccaaggtgtccactgtcaaggatctgctgccgctgctcgagaaggtcatcggagccggtaagccgctgctgatcatcgccgaggacgtcgagggcgaggcgctgtccaccctggtcgtcaacaagatccgcggcaccttcaagtcggtggcggtcaaggctcccggcttcggcgaccgccgcaaggcgatgctgcaggatatggccattctcaccggtggtcaggtgatcagcgaagaggtcggcctgacgctggagaacgccgacctgtcgctgctaggcaaggcccgcaaggtcgtggtcaccaaggacgagaccaccatcgtcgagggcgccggtgacaccgacgccatcgccggacgagtggcccagatccgccaggagatcgagaacagcgactccgactacgaccgtgagaagctgcaggagcggctggccaagctggccggtggtgtcgcggtgatcaaggccggtgccgccaccgaggtcgaactcaaggagcgcaagcaccgcatcgaggatgcggttcgcaatgccaaggccgccgtcgaggagggcatcgtcgccggtgggggtgtgacgctgttgcaagcggccccgaccctggacgagctgaagctcgaaggcgacgaggcgaccggcgccaacatcgtgaaggtggcgctggaggccccgctgaagcagatcgccttcaactccgggctggagccgggcgtggtggccgagaaggtgcgcaacctgccggctggccacggactgaacgctcagaccggtgtctacgaggatctgctcgctgccggcgttgctgacccggtcaaggtgacccgttcggcgctgcagaatgcggcgtccatcgcggggctgttcctgaccaccgaggccgtcgttgccgacaagccggaaaaggagaaggcttccgttcccggtggcggcgacatgggtggcatggatttc

SEQ ID NO: 26143 - DNA, 378 bp, Mycobacterium bovis
atgtcgaatctgcatccgttaccagaggtggcgagctgcgtagtcgcgccgctggtgcgcgaaccgctgaatcctccggccgcggccgaaatggcggcccggttcaaagccctggccgatccggtgcgattgcagctgctgagctcggttgccagtcgcgccggcggcgaggcctgcgtctgcgacatttccgcgggagtcgaggtgagccagcccacgatttcgcatcatctcaaggtgctgcgcgacgcgggtttgctgacctcgcggcgtcgggcctcgtgggtgtactacgccgtggtccccgaggcgctgaccgtgttgtcgaacctgctcagcgtgcatgccgatgccgcacccgccctgggggcaccggca

SEQ ID NO: 26144 - DNA, 1479 bp, Mycobacterium bovis
ttgccgcggtcggtgcctgacgtgcttgaccctctggggccgggtgcgcccgtgtgggtagccggtggccgggtgaccggtcaggcggtggccgcggtgctgactcggtttggtgcgacgccgacggtgtgcgacgacgatccggtcatgctgcgaccgcacgccgaacgtgggctgccgaccgttagttcctcggacgcggtgcagcagataaccgggtatgcgctggtggtcgccagtcccggcttctcgcccgcaaccccgctactggccgcggccgcggcggcgggggtgccgatctggggtgacgtggagttagcctggcggctagacgcagcgggctgctacggaccgccgcgcagctggctggtggtgaccggcaccaacggcaagaccaccacgacgtcgatgctgcacgccatgctgatcgccggtggccgccgcgccgtgctgtgcggcaatatcggcagtgcggtgctggatgtgctggacgagccggccgagctgctggccgtggagttgtccagtttccagctgcactgggcgccgtcgctgcggcccgaggccggcgcggtgctcaacattgccgaagaccacctggactggcatgccacgatggccgaatacaccgcggccaaggcccgggtgctgaccggcggggtagcggtggccgggctggatgacagccgagcggccgcactgctggacggctcaccggcgcaggtgcgggtcggcttccggctcggcgagccggccgcgggggaactgggcgtgcgcgacgcccacctggtcgatcgcgccttctccgacgacttgacgctgctgccggtcgcgtcgataccggtgccaggtccggtcggcgtgcttgacgccctggccgcggcggcgctggcccgctcggtcggggtgcccgccggtgcgatcgccgacgcggtcacgtcgtttcgagtgggccgacaccgcgccgaggtggtggccgttgccgacggcatcacctacgtggacgactccaaggccaccaacccgcacgccgcgcgggcttcggtgcttgcatacccgagggttgtatggatcgccggtggcctgctcaagggcgcgtcgcttcacgccgaggttgcggcgatggcgtcgcggctggtcggtgcggtgctgatcggccgggatcgcgcagcggttgccgaggcgttatcacgacacgcgcccgatgtcccagtcgttcaggttgtggcaggcgaggatactggtatgcctgcgactgttgaggttcctgttgcttgtgttctagatgtggcaaaagatgacaaagccggtgagaccgttggcgctgccgtgatgaccgctgcggtggccgcggcccggcggatggcccaacccggtgacaccgtgctgctggcaccggccggcgcctcattcgaccagttcaccggttatgccgaccggggcgaggcattcgcgaccgcggtccgcgcggtgatccgg

SEQ ID NO: 26145 - DNA, 780 bp, Mycobacterium bovis
atgccgcttacacctgccgacgtccacaatgtggcgttcagtaagccgcctatcggcaaacgtgggtacaacgaagatgaggtcgacgccttcctcgacctggtggaaaacgagctgacccgcctgatcgaagagaactccgatctgcgtcagaggatcaacgagctggatcaagagctcgccgcgggcggcggtgccggcgttacgccgcaggccacccaggcaatcccggcgtatgagcccgaaccgggcaagccggcgccggcggcggtctcggcggggatgaacgaggaacaggccctgaaggcggcgcgagtgctgagtctggcccaagacaccgccgaccggcttacaaacaccgccaaagccgagtcggacaagatgctggccgatgcccgtgccaatgcggagcagatcctcggtgaggcccgacacaccgccgacgccacggtcgccgaggcccgccagcgtgccgatgccatgctggccgatgcccaatcccgatccgaggcccagttgcgccaggcgcaggagaaggccgatgccttacaggccgatgcggaacgcaagcactccgagatcatgggaaccatcaaccagcagcgcgcggtgcttgaaggccgcctcgagcagctgcgtaccttcgaacgtgagtaccgcaccaggctcaagacctacctggaatcgcagctggaggaactcggccagcgtggatcggcggcgccggtcgattccaatgcggatgccggtggcttcgatcaattcaaccggggcaaaaac

SEQ ID NO: 26146 - DNA, 1469 bp, Mycobacterium bovis
accgacggctcccagactcgaggggccgagccggtcgaggggcagcggacgggcccggaagaagcctctaacccgggttcggcgaggccccgcacccgtttcggtgcctggctgggccgtccgatgacctcgtttcacctcatcatcgccgttgccgcattgctgaccacccttggactgatcatggtgctgtcggcatcggcggtgcggtcctacgacgacgacggatcggcttgggtgatcttcggcaagcaggtcttgtggacgcttgtgggtcttatcggcggctatgtctgtctgcggatgtcggtgcggttcatgcggcgcatcgccttctccggtttcgcgatcaccatcgtgatgctggtgctggtgctggtgccggggatcggcaaggaggccaacggctcgcgcggctggttcgtggtcgcgggcttctcgatgcagccctctgagctggctaagatggcgttcgccatctggggagcgcatctgctggccgcccggcgcatggaacgggcttcactgcgcgagatgctgattccactggtgccggccgccgtcgttgcgctggcgctgatcgtggcccagcccgacctcggacagaccgtgtcgatgggcatcatcttgttgggcctgctgtggtatgcggggctgccgctgcgcgtcttcctcagctcactggcggcggtcgtcgtctcggccgccatcctggcggtgtccgcgggctaccgatccgaccgggtgcggtcgtggctcaaccccgaaaacgatccgcaagactccggctaccaggcccgacaggcaaagttcgcgctggctcaaggtggcattttcggcgacggtctgggccaaggcgtggccaagtggaactacttgcccaacgcccacaacgacttcattttcgccatcatcggcgaagagctgggtctcgtcggcgcgctcggactgctggggctattcggattgttcgcctacaccggcatgcgcatcgctagccggtccgccgacccgttcctgcggctgctgaccgccaccacgacactgtgggtgctgggacaggcgttcatcaacatcggctatgtgatcgggctgctgcccgtcaccggcctgcagctgccgctcatctccgccggtggaacctccacggccgcaacactttcgctgataggcatcatcgccaacgcggctcgccacgaaccggaggcggtggccgcgctgcgggctgggcgcgacgacaaggtgaaccggttgctgcggctgccgctgcccgagccgtatctgccccctcgtctcgaggcgtttcgtgaccgcaagcgcgccaacccgcaaccggcccaaacgcagcccgcgcggaagaccccccgcacggcgcccggacagcctgcccggcagatgggcctgccccctcgacccggctcgccccgcacggccgatccgccggttcgtcgatcagtgcatcatggagc

SEQ ID NO: 26147 - DNA, 1230 bp, Mycobacterium bovis
gtgaaggacacggtcagccagccggccggcgggcgcggggcaacggcgccccggcccgccgatgccgcctcgccgtcttgtggttcctcgccgtctgctgattccttgtcggtcgttctcgccggcggcgggaccgccgggcacgtcgagcccgccatggccgtcgccgacgccttggtcgcgttggatccgcgcgtccggattaccgcgttgggcaccccccgtggactagagaccaggctggtgccccagcgcggctaccacctggagctgatcacggcggtgccgatgccgcgcaagcccggcggcgacctggcccggctgccgtcgcgggtgtggcgcgccgtccgggaggcccgggacgtgctcgacgatgtcgacgccgacgtcgtcgtcggtttcggtgggtacgtcgcgctaccggcttacctagccgctcgcggcctgcctttgccgccccggcgccggcgccggatcccggtggtgatccacgaagccaacgccagggcgggactggccaaccgggtcggcgcccataccgcggaccgggtgctctccgcggtgccggattccgggctgcggcgcgccgaggtggttggggtcccggtccgtgcgtcgatcgccgcgctggaccgcgcggtgctgcgagccgaggcgcgggcacacttcggcttccccgacgacgcgcgggtgctgctggtgttcgggggttcgcagggcgcggtctcgctcaaccgggcggtgtccggcgccgccgccgacctggccgccgccggtgtttgcgtgctgcatgcccatggaccccagaacgtgctggagttgcgccgtcgggctcaaggtgacccaccgtacgtggcggtgccctatttggaccggatggagctggcctacgccgccgccgatctggtgatctgccgggccggggcgatgacggtcgccgaagtatccgccgtcggtctgccggccatctacgtgccgctgccgatcggcaacggtgaacagcggctgaatgcgttgccggtagtcaatgccggcggcggcatggtggtcgccgacgccgccctgacccccgagttggtggcccgccaggttgccgggctgctcaccgaccccgcgcggctggccgcgatgaccgcggccgcagccagggtgggacatcgcgatgccgcgggccaggtggcccgggccgcgctggccgtcgccaccggggccggtgccaggacaacgacg

SEQ ID NO: 26148 - DNA, 1482 bp, Mycobacterium bovis
gtgagcaccgagcagttgccgcccgatctgcggcgggtgcacatggtcggcatcggcggagctggcatgtcgggcatcgcccgaatcctgctggaccgcggcgggctggtctccgggtcagacgccaaggagtcgcgcggtgtgcatgcgctgcgggcgcggggcgcgttgatccggatcggacacgacgcgtcgtcgctggacctgttgcccggtggcgccacggcggtcgtcactacccatgccgccatccccaaaaccaaccccgagctcgtcgaagcgaggcgccgcggcattcccgtggtgctgcggccggccgtgctggccaagttgatggccgggcgcaccacattgatggtcaccggcacgcacggcaagacaacgacgacgtccatgctgatcgtcgccctgcagcactgcgggcttgacccgtcctttgcggtcggcggtgagatgggggaggccggtaccaacgcccatcacggcagtggcgactgtttagtcgccgaagccgacgaaagcgatggctcgctgttgcagtacacaccccacgtcgcggtgatcaccaacatcgagtccgatcacctggacttctacggcagcgtcgaggcgtatgttgcggtgttcgactccttcgtggagcgcattgtccccgggggtgcgctggtggtgtgcactgacgaccccggaggggccgcgctggctcagcgcgcgactgagctgggaattcgagtgctgcgatacgggtcggtgccgggtgagaccatggcagccacgttggtctcgtggcagcaacagggggtcggcgcggtcgcacatatccggttggcctcagaactagccacagcacagggtccccgcgtgatgcggctgtcggtgcccgggcgacacatggcgctcaacgcgctgggagcgctgctggccgcggtgcagatcggcgccccggccgacgaggtgctcgacgggctggccggcttcgaaggagtgcggcgacgattcgaactggttgggacctgcggcgtcggaaaggcgtcggtgcgcgtgttcgatgactacgcccaccacccgacggagatcagcgcgacactggcggcggcgcgcatggtgctcgaacagggcgacggtggccgctgcatggttgtgtttcaaccccatttgtattcgcggacaaaggcattcgctgctgagtttgggcgtgcgctgaatgccgctgacgaggtgttcgtactcgacgtctacggagctcgtgaacaaccgctggccggtgtcagcggagccagcgtcgctgagcacgtcactgtgccgatgcgctacgtcccggatttttcggcggtcgcacagcaagtggccgccgccgctagtccgggcgacgtcatcgtcacgatgggtgccggagacgtgaccttgctgggcccggaaatcctgaccgcccttcgggtccgggccaaccgaagcgcccccggccgtccgggggtgctggga

SEQ ID NO: 26149 - DNA, 942 bp, Mycobacterium bovis
atgacggaacacaacgaggacccacagatcgagcgcgtggccgacgacgccgccgacgaggaggcggttacggagccgttggccaccgaatcgaaggacgaaccggccgagcacccagaattcgaagggccgcgtcggcgcgcccgccgcgaacgtgccgaacgtcgcgccgcgcaggctcgagctaccgcgatcgagcaggctcgccgcgcggccaaacggcgagcccgcgggcagatcgtcagtgagcagaaccccgccaaaccggccgcccgaggtgttgttcgagggctgaaggcgctgctcgcgacggtcgtgctggccgtcgtcgggatcgggcttgggctcgcgctgtacttcacgccggcgatgtcggcccgcgagatcgtgatcatcgggatcggggcggtgagccgcgaggaggttctcgacgccgccagagtgcggccggcaacgccgttgctgcagatcgacacccaacaggttgctgaccgagtggccacgatccggcgggtggccagtgcgcgggtgcagcggcagtacccgtcggccttgcggatcaccatcgtcgagcgggtcccggtggtggtcaaggatttttcggacggcccgcacctttttgaccgcgacggcgtcgacttcgcgaccgatccgccaccgccggcgttgccttatttcgatgtggacaatcccggtcctagcgatccgacgaccaaggcggcgctgcaggtgttgaccgcgctgcatcctgaagttgcaagccaggtggggcggatcgcggccccgtcggtggcctcgatcaccctgacgttggccgatggccgcgtggtgatctggggaaccaccgaccgctgcgaagagaaggccgaaaagctggcggcgctgttgacccagccaggcagaacgtacgacgtgtccagccccgacctgccgaccgtgaaa

SEQ ID NO: 26150 - DNA, 1137 bp, Mycobacterium bovis
atgacccccccgcacaactacctggccgtcatcaaggtcgtgggtatcggtggtggcggtgtcaacgccgtcaaccgaatgatcgagcagggcctcaaaggcgtggaattcatcgcgatcaacaccgacgcccaggcgttgttgatgagcgatgccgacgtcaaactcgacgtcggccgcgactccacccgcgggctgggcgccggcgccgatccggaggtcggccgtaaggccgccgaggacgccaaggacgagatcgaagagctgctgcgcggtgccgacatggtgtttgtcaccgccggcgaggggggcggaaccggcaccgggggggcacccgtcgtcgccagcatcgcccgcaagctgggcgcgttgaccgtcggtgtggtcacccggccgttctcgttcgagggcaagcgacgcagcaatcaggccgaaaatggcatcgcggcgctgcgggagagttgcgacaccctcatcgtgattcccaacgaccggttgctgcagatgggagatgccgcggtatcgctgatggatgctttccgtagcgccgacgaggtgctgctcaacggcgtgcagggcatcaccgacctgattaccaccccgggtctaatcaacgtcgacttcgccgacgtcaagggcatcatgtccggtgccggcaccgcactgatgggcatcggctcggcccggggcgaaggccggtcgctcaaagcggccgagatcgccatcaactcgccgttgctggaagcctcgatggagggcgcgcaaggcgtgctgatgtcgatcgccggcggcagcgacttgggcttgttcgagatcaacgaggcggcctcgttggtacaagacgccgctcaccccgatgccaacatcatcttcggcaccgtcatcgacgattcgctcggtgacgaggtgcgggtgaccgtgatcgcggccggcttcgacgtcagcggtcccggccgcaagccggtgatgggcgagaccggcggcgcccaccggatcgagtcagccaaggcaggcaagctcacctcgaccttgttcgagccggtcgacgccgtcagcgtgccgttgcacaccaacggcgcaaccctgagcatcggcggtgatgacgacgatgtcgacgtgccgcccttcatgcgccgc

SEQ ID NO: 26151 - DNA, 792 bp, Mycobacterium bovis
gtggatggaatgaccgcgatggcggcggatctttcggcgtatccagaccgcgaatcggaattgacgcatgcgttggcggcaatgcgatcgcgacttgcggcggccgcggaggcggcgggtcgcaatgtcggcgaaattgaacttctaccgattaccaaattctttccagcaaccgatgttgcgattttgtttcgattgggttgtcggtccgttggcgaatcgcgcgaacaggaagcttcagccaagatggccgaacttaatcggttgttggcggctgccgagttgggtcactcggggggtgtgcactggcacatggtgggccggattcaacgcaacaaagccgggtcgctggctcgctgggcgcacaccgctcactcggtggacagctcgcggttggtgaccgcgctggatcgggcggttgttgcggcgctggccgaacaccgtcgtggcgagcggctgcgggtttacgtccaggtcagcctcgacggtgacggatcccggggcggcgtcgacagcacgacgcccggcgccgtagaccggatttgcgcgcaggtgcaggagtcagagggcctcgaactggtcgggttgatgggcattccgccgctggattgggacccggacgaggcctttgaccggctgcaatcggagcacaaccgggtgcgtgcgatgttcccgcacgcgatcggtctgtcggcgggcatgtccaacgaccttgaagtcgccgtcaaacatggttcgacctgtgtgcgtgtcggtaccgcgctattgggtccgcggcggttacggtcaccg

SEQ ID NO: 26152 - DNA, 723 bp, Mycobacterium bovis
gtgaatagtcactgtagtcacaccttcatcacagacaacagatctcccagggctagaaggggtcacgcaatgagcacactgcacaaggtcaaggcctacttcggtatggctcccatggaggattacgacgacgagtactacgacgaccgcgctccctcgcgcgggtatgcgcggccccgattcgacgacgactacggccgctacgatgggcgcgactacgacgacgcgcgcagcgattcacgcggtgacctgcgcggtgagccggccgactatccaccaccgggatatcgcggcgggtacgcggacgaaccacgtttccggccccgggagttcgaccgcgcggagatgacacggccgcgcttcggatcgtggctgcgcaactccacccgcggcgcgctagcgatggacccccgccggatggcgatgatgttcgaggatggccatccgctctcgaagatcaccacgctgcggcccaaggactacagcgaggctcgcaccatcggtgagcggttccgcgacggcagcccggtcatcatggatctggtgtcgatggacaacgccgatgccaagcggctggtcgatttcgcggccggcctggccttcgcgctgcgcggctcgttcgacaaggtcgcgaccaaggtgttcctgctctcgcctgcagacgtcgatgtgtcccccgaggagcgccgcaggatcgccgaaaccgggttctacgcctaccaa

SEQ ID NO: 26153 - DNA, 1377 bp, Mycobacterium bovis
atggaaacgtacgacatcgcgatcatcggaaccggttcgggcaacagcattctcgacgaacgctatgccagcaagcgggcggcgatctgcgagcagggcaccttcggcggcacctgcctcaatgtcgggtgcatccccacaaaaatgttcgtctacgccgccgaggtggccaagaccatccgaggcgcgtcgcgttacggtatcgacgcgcacatcgaccgggtgcgatgggacgacgtcgtctcgcgcgtcttcgggcgcatcgatccgatcgcgctgagcggcgaggactatcgaaggtgtgcgcccaacatcgacgtgtaccgcacacacacccgtttcgggccggttcaggccgatggccgctacctgttgcgcactgacgcgggtgaagagttcaccgccgagcaggtggtgatagccgccggatcgcggccggtgattccgccggccatcctcgcgtccggcgtcgactatcacaccagcgataccgtcatgcggatcgccgagttgccggagcacatcgtgatcgtcggaagcggcttcattgcagcggaattcgcacatgtgttttccgctctgggcgtacgggtcaccctggtgatccggggcagctgcttactacggcattgtgacgacaccatctgcgaacggttcacccgcatcgcatcgaccaaatgggagctgcgcacccatcgcaacgttgtggacggccagcagcgcggctcgggcgtcgcgctgcggctagacgatggttgcaccatcaacgccgacctactgttggtagcgacaggccgggtgtccaacgccgacctgctggatgccgagcaggccggtgtcgatgtcgaggacggccgggtgatagtcgacgagtaccaacggacttcggcgcgtggggtttttgcgctgggcgatgtctcgtcgccgtacttgctcaagcatgtcgccaaccacgaggcccgcgtcgtgcagcacaatctgctctgcgactgggaggacacccagtcgatgatcgtcaccgaccaccgatacgtaccggctgcggtattcaccgatcctcagatcgctgccgtcggactcactgaaaaccaagctgtggcaaagggactcgatatttcggtcaagatacaggactatggtgacgtcgcgtacggctgggcgatggaggacaccagtggaatcgtcaagctcatcaccgagcgcggctctgggcgcttactgggcgcacacatcatgggttaccaggcatcctcgctcatccaaccgttgatccaggcgatgagctttgggctgaccgccgccgaaatggcccgcggccagtactggattcatccggcgctgccggaggtggtggaaaacgcgctgcttggcctgcgt

SEQ ID NO: 26154 - DNA, 1557 bp, Mycobacterium bovis
atgaagccctattacgtcaccaccgcgatcgcatatcccaacgctgcaccccacgtaggtcacgcctacgaatacatcgccaccgacgcgatcgcccggttcaaacggctggatggctatgacgtgcgcttcctgaccgggaccgacgagcatggcctgaaggtcgcacaagccgccgcggcagcgggcgtgcccaccgcggcgcttgcccggcgcaattccgacgtgtttcagcgcatgcaggaggcgctgaacatctccttcgaccgattcatccgcactaccgatgccgaccaccacgaggcgtccaaggaactctggcgacggatgtcggcggccggcgacatctatctggacaactattccgggtggtactcggtgcgcgacgagcggttcttcgtcgaatcggagacccaacttgtcgacggcacgcgcctgacggtagagaccggcacgccggtgacctggaccgaggagcagacctacttcttccggctgtcggcctataccgacaagctgctggcccactatcacgccaaccccgacttcatcgcgccggagacgcggcgcaacgaagtgatcagcttcgtctccggcggcctggacgacctgtcgatctcgcgcacctcgtttgactggggtgtgcaggtgcccgagcaccccgaccacgtcatgtacgtctgggtcgacgcgctgaccaattacctgaccggggcgggcttcccggataccgactcggagttgttccgccgctactggcccgccgatttgcacatgatcggcaaggacatcatcaggtttcatgccgtctattggccggcgtttttgatgtcagccggaatcgagttgccgcgaaggatcttcgcgcacgggttcttgcacaaccgcggcgagaagatgagtaaatcggtgggcaacatcgtcgacccggttgccctggcggaagcgctcggggtggaccaggtccgctacttcctgttgcgggaggtcccgttcggccaggacggcagttacagcgacgaggccatcgtcactcggatcaacaccgatctggccaacgagctcggcaacttggcccaacgctcgttgtcgatggtggccaaaaaccttgacggcagggtgcccaacccgggtgagttcgccgacgccgacgccgcgctgcttgcgaccgccgatggcttgttggagcgagtgcgcggtcacttcgacgcacaggcgatgcacctggcgctggaggcgatctggctgatgctcggcgacgcgaacaagtacttttcggtgcagcagccgtgggtactgcgcaagagcgagtccgaagccgatcaggcccggttccgcaccacgctctacgtcacctgcgaggtagtccgcatcgcggcactgctgatccagccggtgatgccggagtcggccggcaaaattttggacctgctcggccaggccccaaaccagcggtcgttcgccgccgtaggtgttcggctgacccccggcacagcgctgccgccgcccaccggggtatttccccgctaccagccgccgcaaccacccgaaggcaag

SEQ ID NO: 26155 - DNA, 792 bp, Mycobacterium bovis
ttggtcgacgcccacacccatctcgacgcgtgcggtgcacgagacgccgatacggtgcggtcgctcgtcgagcgagccgccgcggccggcgtgaccgcggtggtcaccgtcgccgacgacctggagtccgcgcgctgggtcacccgcgcggccgaatgggatcggcgagtctatgccgcggtggcgttgcacccgacccgcgccgatgcgctcaccgacgctgcccgtgccgagctcgagcgattggttgcccaccccagggtggtggccgtcggtgagaccggaatcgacatgtactggccgggtcgcctggacgggtgtgcggagccgcacgtccagcgggaggcctttgcctggcatatcgatctggccaagcggaccggtaaaccgctgatgatccacaatcgtcaggccgaccgcgacgtgctggacgtgctgcgggccgagggcgcgccggacaccgtgatcttgcactgcttctcgtcggacgcggcgatggcccgcacgtgtgtggacgccgggtggctgctcagcctgtccgggacggtgagcttccgtaacgcccgtgaactacgggaagccgtcccgctgatgccggtggagcagcttttggtggaaaccgatgcaccgtatttgaccccgcatccccaccggggcttggcgaacgaaccgtactgcctgccctataccgtgcgggcgctggctgaactggtcaatcggcgccccgaagaggtggcgctcatcaccacaagcaacgctcgccgagcttatgggctagggtggatgcgccaa

SEQ ID NO: 26156 - DNA, 951 bp, Mycobacterium bovis
atgtgctgtacgagcgggtgcgcgctgaccatccggctgctcgggcgcactgagatcaggcggctggccaaagagctcgactttcggccgcgcaaatctctcggacagaacttcgtgcacgacgccaacacggtgcgacgggtggttgccgcctccggggtcagccgttccgacctggttttggaggtcgggccgggcctgggatcgctgaccctggcactgctcgaccgcggcgcgaccgtcaccgcggtcgagatcgatccactactggcttctcggctgcaacagaccgtggcggagcactcgcacagcgaggttcaccgactaacggtggtcaatcgcgacgtcctggccctgcgccgggaggatctagccgcggcgccgaccgcggtggttgccaatctgccgtacaacgtagcggtaccggcgttgttgcatctgcttgtcgagttcccgtcgatccgtgtcgtgacggtgatggtgcaggccgaggtcgccgaacggctcgccgccgagccgggcagcaaagagtacggcgtgcccagcgttaagctgcgcttcttcgggcgggttcgccgctgcggcatggtgtcgccgaccgttttctggcccattccgcgtgtctattccgggctggtacgcatcgatcgatatgagacctcgccctggcccaccgacgacgcttttcgacggcgggtattcgaactcgtggacatcgcattcgcgcagcggcgcaagacttctcgcaacgcgtttgtgcagtgggcgggctcgggaagcgagtcggcgaatcgattgttggcggccagcatcgaccccgcccgtcgcggtgagacgctgtccatcgacgacttcgtgcggctgctgcgacggtccggcggctccgacgaggccaccagcaccggccgggacgccagggcgccggacatttcggggcacgcgtcggcgagc

SEQ ID NO: 26157 - DNA, 1515 bp, Mycobacterium bovis
atgaccgcggcggctaccaatctggcggagattggttcggcgatcagcacggcaaatggtgcggcggcactcccgactgttgaggtggtggccgcggccgccgacgaggtgtccacgcagatcgcggctctattcggagcgcatgccaggagctaccaaaccctcagcacccaggcagcggcgtttcatagtcggtttgtgcaggcgttgaccacggccgcggcttcctacgccagcgtagaggccgccaacgcgtcgccacttcaggttgcgctagacgtgattaatgcgcccgcccagacactgctcggacgtccgctaattggtaacggcgccgacggatcgacaccggggcaggccggcgggcccggcgggttgctgtacggcaacggcggtaatggcgccgccggtgggcccaaccaggccggcggcgccggcggcaacgccggcttgatcggcaacggcggggcgggcggcgccgggggtgttggcgcggtcggcggtaacggcggcacgggcggcctgctattcggcaacggcggggccggcgggcaaggcgggctcggcctcgcaggtatcaacggcggcagcggcgggcagggaggccacggtggcaacgccatcctgttcggccagggcggtgccggcgggccaggtggcaccggcgccatgggcgtcgccggcaccaatcccacccccatcggcaccgcagcgcctggcagcgacggcgtaaatcagattgggaacggtggtaacacggacctcaccggcggcgccggtggcgacggcaatgccggcagcaccaccgtgaacggcggcaacggcggtaccggcggcgcagctaggaactcatctggtggtaccggtaactcctttggtggtgccggcggcgccggaggcgacggcgccaacggcggcgacggtggcgctggcggggaagccctcaccgaaggcggtgccaccgccgttagtggtgctggtggtaagggaggtaacgccgaggcttccggcggcgccggcggcaacggcggcaaaggtggctttgctcaggccaccaccagcgtgaccgggggtaacggcggtaacggtggcaatggccacgacagtaacgcgccgggcggcgctggcggcagcggtggcgtcggcggtgacggcggccgtggcggcctgctggccggcaacggcggcaccggcggtgccggtggcaacggcggtaccggtggcgccggtgcccccggcggtgccggcggcgccggcggcaaagccgacatcgccaacagcctcggcgacaatgccaccgtaaccgggggcaatggcgggacaggcggagacggcggcagcgcgctgggcaccgggggggctgggggtgccggaggtctaggtggtcacgggggtgcaggcgggctgctgattggcaacggcggcgccggtggcgctggcggcctcggcggtgcgggcggcgccggcggtgcgggcggtgagggcggtgccggcggcgccggaggcgaagctata

SEQ ID NO: 26158 - DNA, 1452 bp, Mycobacterium bovis
gtgctgatcggtgcgggcatcatgagcgccacgctgggggtgctgctgcgtcggctcgaaccgaactggtcaatcaccctgatcgaacggctggacgcggtagccgccgaaagcagcggtccctggaacaacgccggcaccgggcactccgcgctgtgcgagatgaactacaccccagaaatgccggacggctcgatcgacatcaccaaagcggtgcgtgtcaacgagcaattccaggtcacccgccagttctgggcatacgcggccgaaaacggcatcctcaccgacgtgcgcagcttcctcaaccctgtgccgcacgtgagtttcgtccatggatcgcggggcgtcgagtatctacggcgccgccaaaaggcgttggccggcaacccgctgttcgccggcaccgagttcatcgagagtcccgacgaattcgcccgccggctgccgttcatggccgctaaacgggccttctccgagccggtggcgctcaactgggccgccgacggcaccgacgtcgacttcggtgccctcgccaaacaactcatcggctattgcgtgcaaaatggcactaccgcgttgttcgggcacgaggttcgcaacctctcgcggcaatccgacggcagctggacggtcaccatgtgcaaccgccggaccggcgaaaagcgcaagttgaacaccaagttcgtctttgtcggggccgggggtgacaccttgccggtgctgcagaaatccgggatcaaagaggtcaaaggcttcgccggcttcccgattggcggtcggttcctgcgcgccgggaacccggcgctcaccgcctcgcatcgggcaaaggtatatggcttcccggcgccgggcgccccgccgttgggcgccttgcatctggatctgcggtttgtcaacggcaagtcgtggctggtgttcgggccatacgccggctggtcgccgaagttcttgaaacacgggcagatcagcgacctgccccggtcgatcaggccggacaatctgttgtccgtgctcggcgtgggcctcaccgagcggagactgctgaactacttgatcagccagctgcgtctctctgaacccgagcgggtcagtgcgctgcgcgaattcgcccctagcgcaatcgattcggactgggagttgacgatagccggtcagcgggtacaggtgatccggcgagatgaacgcaacggcggggtgctcgagttcggcacgacggtcatcggcgatgctgacggtagtattgccggactactgggcggctccccaggggcttcgaccgcggtggcgatcatgctggacgtgctgcagaaatgctttgccaaccgctatcaatcctggctgcccacgctcaaagaaatggtgccgtcgctgggggtgcagctgtcgaatgaacccgcgctgttcgacgaggtgtggtcatggagcaccaaggcgctgaagttaggtgccgca

SEQ ID NO: 26159 - DNA, 522 bp, Mycobacterium bovis
gccgccggtgccgccgttgccgccgttgccgccgttgccttggctggcaccgctcccgccgccgttaccgccgtcaccgccggcgccgccagcaaagccagtgctacccatcgcgccggagcctgcgggggcgtcggcgccggcactgccggccccgccgttgccgccggtgccgccggcaccacctttgccgctagcaccggccacgccgctatggctcaacaactggccggcacccccggcgccaccgttgccgggggcgccgccgtcaccgccggtgccgccgctgccaccggtaccacccaggccggccatcgtgccgtcgaagccgtcaccgccgccaccgccatcgccgccgtagccgccggctccgccggtgccgccgcgcccgaacagcagggcggcttgacccccggcgccgccgttgccgccggccccgccggccccgccggcgccgccaccgtcgacaccggcaccgcccgcgccgccagtgccaccgtgcccgccggcgccggcgcccat

SEQ ID NO: 26160 - DNA, 1011 bp, Mycobacterium bovis
ttgaccgacaaccgcgatctggcgcggggccaggctgcctgggccatggaccagatcatgaccggcaatgcgcggccggcgcagatcgccgccttcgcggtggcgatgacgatgaaggctccgaccgccgacgaagtcggtgagctcgctggcgtcatgctcagccacgcgcatccgttgcccgccgatacggtccccgacgacgccgtcgacgtcgtcggcaccggtggcgacggagtcaacacggtgaacctatccaccatggcggcgattgtggtggcggctgcgggtgtgccggtggtcaagcacggcaaccgagcggcgtcctcgttgtccggtggcgccgacacgctggaggcgctgggggtgcgcatcgacctgggacccgacctggtcgcgcgcagcctcgcggaggttgggatcgggttctgcttcgcgccgcggttccatccctcctaccggcacgcggccgcggtacgccgcgagatcggtgtgcccaccgtgttcaatcttctcgggccgctgaccaatccggcccggccccgggctggactgatcggatgcgcgttcgccgacctcgccgaagtgatggccggggtgtttgctgcgcgccggtccagtgtgctggtggtacacggcgacgatgggctggacgagttgaccaccaccaccacgagcacgatctggcgcgttgcggcgggcagcgtggataagttgacgtttgatcccgccggattcgggtttgcgcgcgcccagcttgaccagctggctggaggcgatgcgcaagccaacgcggccgcggtgcgcgcggtgttgggcggtgccaggggcccggtccgggacgctgtggtgctcaacgccgccggtgcgatcgtcgcccacgccggattatccagccgtgctgaatggctgccggcctgggaggaggggttgcggcgggccagtgcggcaatcgacaccggtgcggccgaacagttgctcgcgcgatgggtgcggttcggtcggcagatc

SEQ ID NO: 26161 - DNA, 1956 bp, Mycobacterium bovis
gtgtgtggactgctggccttcgtcgcggccccggccggtgctgcggggcccgaaggtgccgacgctgccagcgccatcgcccgcgcatcgcatttgatgcgccaccgcgggcccgatgaatcgggcacctggcacgccgtcgatggcgcctccggaggcgtcgtgttcgggttcaaccgactgtccatcatcgacatcgcgcactcgcatcagccgctgcggtgggggccgccggaggctccggaccgctacgtgctggtgttcaacggcgagatctacaactacttggagctgcgtgacgagctgcgcacccagcacggcgctgtgttcgccaccgacggcgacggtgaggcgatcctcgccggctatcaccactggggcaccgaggtgctgcagcggttgcgcggcatgttcgcattcgcgctgtgggacaccgtcacccgcgaattgttctgcgcgcgagatccgttcggcatcaagccgttgtttatcgccaccggagccggcggcacggcggtggccagtgagaagaaatgcctgctggacctcgtcgagttggtggggttcgacaccgagatcgaccatcgggcgttgcagcactacaccgtcctgcagtacgtgccggaacccgagacactgcaccgtggggtacgtcggctggaatcaggctgcttcgcccggatccgtgccgaccagctcgcgccggtgatcacccgttatttcgtgccgcgatttgcggccagtccgatcaccaacgacaacgaccaggcccgctatgacgagatcacggcagtgcttgaggactcggtggccaagcatatgcgcgccgatgtcaccgtcggcgcgtttctgtccgggggtatcgactccacggccatcgcggcgctggccatccggcacaatccgcggctgatcaccttcaccaccggtttcgagcgcgagggcttctccgagatcgacgtcgcggtggcttcggcagaggccatcggtgcccgtcacatcgccaaggtggtcagcgccgacgagttcgtcgccgccctgcccgagatcgtctggtacctcgacgagccggtcgctgacccagcgctggtaccgttgttcttcgtcgcccgcgaggcccgaaagcacgtcaaagtggtgttgtcgggcgaaggcgccgacgaactgttcggcggctacacaatctatcgagaaccgctgtcgttgaggccgtttgactacctgcccaagccactgcgccggtcgatgggaaaagtttccaagccactgccggagggcatgcgcggcaagagtctgctgcaccgcggatcgctgacactcgaagagcgctactacggcaatgcccgcagtttctccggcgcgcagctgcgcgaagtactgcccgggttccggccggactggacccacacagatgtcacggcgccggtctactccgaatcggccggctgggatccggtggcgcgaatgcagcacatggacctgttcacctggctgcgcggcgacattctggtcaaggccgacaagataacgatggccaactccctggagctgcgggtgccgttcctggacccggaggttttcgcggtggcctcccggttgccggcgggcgccaagatcacccgtaccaccaccaagtacgcgctgcggcgcgcgctggagcctattgtgcccgcacacgtgctgcaccggcccaagctcgggttcccggtcccgatccggcattggctgcgtgccggcgagctgctggagtgggcgtatgcgacggtgggctcgtcgcaggccggtcacttggttgacatcgccgccgtgtatcgcatgctcgacgagcaccggtgcggcagcagcgaccacagccgccggctgtggaccatgctgatctttatgctgtggcacgcgatcttcgaagagcacagcgtggtgccccagatcagcgagccgcagtaccccgtccagttg

SEQ ID NO: 26162 - DNA, 984 bp, Mycobacterium bovis
atgctgggggcattggccgtcaccgtcagtggatgcagctggtcggaagccctgggcatcggttggccggagggcattaccccggaggcacacctcaatcgagaactgtggatcggggcggtgatcgcctccctgtcggttggggtaatcgtgtggggtctcatcttctggtccgcggtatttcaccggaagaagaacaccgacactgagttgccccgccagttcggctacaacatgccgctagagctggttctcaccgtcataccgttcctcatcatctcggtgctgttttatttcaccgtcgtggtgcaggagaagatgctgcagatagccaaggatcccgaggtcgtgattgatatcacgtctttccagtggaattggaagtttggctatcaaagggtgaacttcaaagacggcacactgacctatgatggtgccgatccggagcgcaagcgcgccatggtttccaagccagagggcaaggacaagtacggcgaagagctggtcgggccggtgcgcgggctcaacaccgaggaccggacctacctgaatttcgacaaggtcgagacgttgggcaccagcaccgaaattccggtgctggtgctgccgtccggcaagcgtatcgaattccaaatggcctcagccgatgtgatacacgcattctgggtgccggagttcttgttcaagcgtgacgtgatgcctaacccggtggcaaacaactcggtcaacgtcttccagatcgaagaaatcaccaagaccggagcattcgtgggccactgcgccgagatgtgtggcacgtatcactcgatgatgaacttcgaggtccgcgtcgtgacccccaacgatttcaaggcctacctgcagcaacgcatcgacgggaagacaaacgccgaggccctgcgggcgatcaaccagccgccccttgcggtgaccacccacccgtttgatactcgccgcggtgaattggccccgcagcccgtaggt

SEQ ID NO: 26163 - DNA, 897 bp, Mycobacterium bovis
atgagcgggccgaatcccccgggacgggaacctgacgaacccgaatcggaacccgtcagcgacacgggcgacgaacgggcttccggcaaccacttgccgcccgtcgccgggggcggcgacaaactgcccagtgaccagacgggcgagaccgacgcatattctcgggcatactctgctccggaatccgagcacgtcaccggcggcccgtatgtgccagccgatctcaggctctatgactacgacgactatgaggagtcgtccgacctggacgacgaactggccgctccgcgctggccgtgggtggtcggtgtcgccgccataattgccgccgttgcgctcgtggtttcggtgtcgttgctcgtcacgcgaccacataccagcaaactcgccaccggcgacactacgtcctctgcaccgcccgtgcaggacgaaatcacgaccaccaagccggcgccgccaccgccgccaccagccccaccgcccaccaccgagatcccgacagcgacggagacacagacggtcactgtgacgccgccaccaccgcccccaccggcgacaaccacggcgccgccgccggcgaccaccacaacggcggcggcaccgccgcccacgaccaccacgccgaccggtccgcggcaagtcacctattcggtgaccggtaccaaggcgccgggtgacattatctcggtgacttacgtcgatgccgccgggcgccgacggacacagcacaatgtgtacatcccgtggtccatgacggtcaccccgatctcgcaatccgacgttggctcggtggaggcctccagccttttccgggtcagcaaactcaactgctcgatcaccacgagcgacggaacggtgctctcatcgaactccaacgatggaccgcaaacgagctgc

SEQ ID NO: 26164 - DNA, 1287 bp, Mycobacterium bovis
atgagccgcgccgacgacgatgcagtgggggtaccacccacttgcgggggacgaagcgatgaggaggagcggcgcatagtgcccggacctaacccgcaagacggggccaaagacggggctaaggcaaccgccgtcccccgtgaaccggacgaagccgcgctggccgcgatgtccaaccaggagctgctcgcattgggcggcaagctggatggtgtccggatcgcctacaaagagccccgctggccggtcgagggcaccaaagccgagaagcgcgccgagcgttcagtggcggtgtggcttttgctaggtggcgtgttcggactggcgctgttgctgatcttcctgttctggccgtgggagttcaaggcggcggatggcgaaagcgacttcatctactcgctgactaccccgctctacggcctgactttcggattgtccatcctgtcgatcgccatcggcgccgtgttgtatcagaaaaggtttattcccgaagagatttcaatccaggaacgtcacgatggcgcttcgcgggagatcgaccgcaagacggtggtggcgaacctgaccgacgcgttcgagggctcgacgatccgacggcgcaagctgatcgggctgtccttcggcgtgggcatgggtgcgttcgggctaggcaccttggtcgcgtttgctggtggcctcatcaagaacccctggaagccggttgtccccaccgccgagggcaaaaaggcggtgctctggacgtcgggttggaccccccgctaccagggcgagacgatctatctggcgcgcgccaccggcacggaggacggaccaccgttcatcaaaatgcgcccggaggatatcgacgccggtggaatggagaccgtttttccctggcgggagtccgacggcgacggcaccaccgtcgaatcacaccataagctgcaggaaatcgcgatgggtatccgtaacccggtgatgctcatccggatcaaacccagtgacctgggccgcgtggtcaagcgcaagggccaggagagtttcaacttcggcgaattcttcgcgttcaccaaggtctgctctcatttgggttgcccgtcatcgctgtacgagcagcagagctaccgaatcctgtgcccttgtcaccagtcgcagttcgacgcattgcatttcgctaagccgatcttcggtccagcggcccgcgccttggcgcaactgccgatcacgatcgacacggacgggtatctggtcgccaacggtgactttgtcgagcccgtcggaccagcattctgggagcgaacaacaaca

SEQ ID NO: 26165 - DNA, 951 bp, Mycobacterium bovis
gtgcttgccacggccaagcgactgggctatgccggaccggatccggtggcgcgatcgttgcggacccgcaaagccggtgcggtcggtttggtgatggccgaaccgctgacctatttcttcagcgacccggccgcgcgggattttgttgcgggagtggcgcagtcgtgcgaagagctggggcagggcctgcagctggtttccgtcggctccagtcggagccttgcggacggcacagctgccgtgctcggcgctggggtggacggcttcgtggtgtattcggtaggcgacgacgatccctacctgcaggtcgtgctgcagcggcggctgccggtggtggtggtcgaccagcccaaagacctctccggagtgtcccgggtcggcatcgacgaccgggcggcgatgcgtgagcttgccggctacgtactcgggttggggcatcgcgagctcggcctgctgaccatgcggctgggacgggatcggcggcaagacttggtggacgccgagcggctgcggtcgccgaccttcgacgtacagcgcgaacgcatcgtcggcgtatgggaggcgatgacggccgccggcgtcgacccggactcgctgaccgtggtggaaagctacgagcatttgccgacgtccggcggcactgccgccaaggtggctctgcaggccaatccgcggctgaccgcgctgatgtgcacagcggacatcttggcgctctcagctatggattaccttcgggcgcacgggatttacgtgcccgggcagatgaccgtcacagggtttgacggagtgccagaggcgctgagccgggggctgaccacggtcgcgcagccgagtctgcacaaggggcaccgggcgggcgagctattgctgaagccgccgcggtccggactgcccgtcatcgaggtgctcgataccgagctggtccggggccgcaccgcgggtccgccggcg

SEQ ID NO: 26166 - DNA, 543 bp, Mycobacterium bovis
atgaaggtcgccgcgcagtgttcaaagctcggatatacggtggcacccatggaacagcgtgcggagttggtggttggccgggcacttgtcgtcgtcgttgacgatcgcacggcgcacggcgatgaagaccacagcgggccgcttgtcaccgagctgctcaccgaggccgggtttgttgtcgacggcgtggtggcggtgtcggccgacgaggtcgagatccgaaatgcgctgaacacagcggtgatcggcggggtggacctggtggtgtcggtcggcgggaccggggtgacgcctcgcgatgtcaccccggaagccacccgcgacattctggaccgcgagatcctcggtatcgccgaggccatccgcgcgtccgggctgtccgcgggaatcgtcgacgccgggttgtcgcgcggcctggcgggtgtctccggcagcacgctggtggtcaacctcgcgggttcgcgttatgcggtgcgcgatggaatggcgacgctgaatccgctagcggcacagatcatcgggcagttgtcgagcttggagatc

SEQ ID NO: 26167 - DNA, 922 bp, Mycobacterium bovis
atgtcacgcccagaagtactaacgccgttcacggcaatcgtcccggcagccggcctgggtaccgcgctttctgccggccaccaagacggtgcccaaggagctgctgcccgtcgtcgacactcccggtatcgagctggtggccgccgaggcggccgcggccggtgccgaacggctggtgatcgtcacctccgagggtaaggacggggtggtcgcgcatttcgtggaagacctggtgctggagggcacgctcgaggcccgaggcaagatcgccatgctggccaaggtgcgtcgcgccccggcactgatcaaggtcgaatccgtggtgcaggccgagccgctgggactgggacacgccatcggctgtgtggagccgacgctgtcgcccgacgaagacgctgtcgcggtgctgctgcctgacgacctggtgctgccgaccggcgtcctggagacgatgtcgaaggtgcgagccagcaggggcggcaccgtgctgtgtgctatcgaggtggcgcgcgaggagatcagtgcctacggggttttcgatgtcgagccggtccccgatggtgactacaccgacgatcccaacgtgctgaaggtcaggggcatggtcgaaaagcccaaggccgaaacggcgccgtcgaggtatgcggcggccggccgctacgttctagaccgtgccatcttcgatgcgttacgccgcatcgaccggggtgcaggcggtgaagtgcagctcaccgatgcgatcgcgctgctgattgccgagggccatcccgtccatgtcgtcgtccaccaagggtcccgacacgacctgggaaatccgggcgggtacctcaaggctgcggttgactttgcattggatcgtgacgactacggcccggacttgcggcgatggttggtggcgcgactgggtctgacagagcagtag

SEQ ID NO: 26168 - DNA, 1092 bp, Mycobacterium bovis
atgttggccatcggcgcggtgacgatagcggtggtgtccgccggcatcggcggcgcggccgcatccctggtcgggttcaaccgggcacccgccggccccagcggcggcccagtggctgccagcgcggcgccaagcatccccgcagcaaacatgccgccggggtcggtcgaacaggtggcggccaaggtggtgcccagtgtcgtcatgttggaaaccgatctgggccgccagtcggaggagggctccggcatcattctgtctgccgaggggctgatcttgaccaacaaccacgtgatcgcggcggccgccaagcctcccctgggcagtccgccgccgaaaacgacggtaaccttctctgacgggcggaccgcacccttcacggtggtgggggctgaccccaccagtgatatcgccgtcgtccgtgttcagggcgtctccgggctcaccccgatctccctgggttcctcctcggacctgagggtcggtcagccggtgctggcgatcgggtcgccgctcggtttggagggcaccgtgaccacggggatcgtcagcgctctcaaccgtccagtgtcgacgaccggcgaggccggcaaccagaacaccgtgctggacgccattcagaccgacgccgcgatcaaccccggtaactccgggggcgcgctggtgaacatgaacgctcaactcgtcggagtcaactcggccattgccacgctgggcgcggactcagccgatgcgcagagcggctcgatcggtctcggttttgcgattccagtcgaccaggccaagcgcatcgccgacgagttgatcagcaccggcaaggcgtcacatgcctccctgggtgtgcaggtgaccaatgacaaagacaccccgggcgccaagatcgtcgaagtagtggccggtggtgctgccgcgaacgctggagtgccgaagggcgtcgttgtcaccaaggtcgacgaccgcccgatcaacagcgcggacgcgttggttgccgccgtgcggtccaaagcgccgggcgccacggtggcgctaacctttcaggatccctcgggcggtagccgcacagtgcaagtcaccctcggcaaggcggagcag

SEQ ID NO: 26169 - DNA, 669 bp, Mycobacterium bovis
gtgctgattgcccgcctcttcgttggcgctgtcccggcgctcgcgcgggacggccggggctgtgtcatcgttgaggacatggcgatcgcgagcaagtcggcgttgcgcgaccagctcctggcggcccgacgccgcgttgccgacgacgtgcgcgccgccgaggcccggatgttgcgtggacacctggagcgcatggtcaccagcgacagcaccgtctgcgcgtatgtgccggtaggcggcgagccggggtcaatcgagatgttggatgtgttgctgcgccgcgcggggcgagtgctgttgccggtggcgcgcaccgccggcggtgacctcccgttgccgttgcggtggggcgagtaccgtgccggcggactcgcgcgcgcacgctggggactgctcgaaccacccgaaccttggctgccggaagccgcgctggcgcaggccagcttggtgctggtgccggcgctggctgtcgaccgccagggcgtgcgactgggccgaggtcgcggcttctacgatcgctcgctgcggtgccgcgacccgcacgctcgtctagtcgcggtggtgcgcactgtcgaactggtcgacgtgttgccgtcggagccgcacgacgtacccatgactcatgcgctcacaccggagcgcgggctgatcgcgctgccgtgcggggaa

SEQ ID NO: 26170 - DNA, 744 bp, Mycobacterium bovis
atgaaccggcaacctatcgttcagctgagtaacttgagctggacattccgagaaggcgaaacccgacgacaagtcctagaccacatcaccttcgatttcgagcccggtgagtttgtcgcgctgctggggcaaagtggaagtggtaaaagcactttgctgaacctcatcagtggcatagaaaagcccaccacaggtgacgtcacaattaatgggttcgctatcactcagaaaaccgagcgagaccggacgttgttccggcgcgatcagattggcatcgtctttcaatttttcaacctgattcccactcttaccgtgttggaaaatattacgctgcctcaggaactggccggagtttctcagaggaaagcggccgtggtcgctcgtgaccttctcgaaaaagtgggcatggccgaccgtgaacgcacctttcccgataaactctccggcggagaacaacaacgggtcgctatttccagagcgttggcgcataatcccatgctggtgttagccgatgagccgaccggcaacctggactccgataccggggataaagtcttggatgttctgcttgatctcacccgccaagcaggtaaaaccttaatcatggctacgcatagcccgtcgatgacgcagcatgccgaccgggtagtcaacttacagggcggcaggttgatacctgccttgaaccgagaaaatcaaaccgaccagccggccagcacgatcctattgcccacgtcatatgaa

SEQ ID NO: 26171 - DNA, 345 bp, Mycobacterium bovis
gtgcctgtcactcaggaagaaatcattgccggtatcgccgagatcatcgaagaggtaaccggtatcgagccgtccgagatcaccccggagaagtcgttcgtcgacgacctggacatcgactcgctgtcgatggtcgagatcgccgtgcagaccgaggacaagtacggcgtcaagatccccgacgaggacctcgccggtctgcgtaccgtcggtgacgttgtcgcctacatccagaagctcgaggaagaaaacccggaggcggctcaggcgttgcgcgcgaagattgagtcggagaaccccgatgccgttgccaacgttcaggcgaggcttgaggccgagtccaag

SEQ ID NO: 26172 - DNA, 1248 bp, Mycobacterium bovis
gtgagtcagccttccactgctaatggcggtttccccagcgttgtggtgaccgccgtcacagcgacgacgtcgatctcgccggacatcgagagcacgtggaagggtctgttggccggcgagagcggcatccacgcactcgaagacgagttcgtcaccaagtgggatctagcggtcaagatcggcggtcacctcaaggatccggtcgacagccacatgggccgactcgacatgcgacgcatgtcgtacgtccagcggatgggcaagttgctgggcggacagctatgggagtccgccggcagcccggaggtcgatccagaccggttcgccgttgttgtcggcaccggtctaggtggagccgagaggattgtcgagagctacgacctgatgaatgcgggcggcccccggaaggtgtccccgctggccgttcagatgatcatgcccaacggtgccgcggcggtgatcggtctgcagcttggggcccgcgccggggtgatgaccccggtgtcggcctgttcgtcgggctcggaagcgatcgcccacgcgtggcgtcagatcgtgatgggcgacgccgacgtcgccgtctgcggcggtgtcgaaggacccatcgaggcgctgcccatcgcggcgttctccatgatgcgggccatgtcgacccgcaacgacgagcctgagcgggcctcccggccgttcgacaaggaccgcgacggctttgtgttcggcgaggccggtgcgctgatgctcatcgagacggaggagcacgccaaagcccgtggcgccaagccgttggcccgattgctgggtgccggtatcacctcggacgcctttcatatggtggcgcccgcggccgatggtgttcgtgccggtagggcgatgactcgctcgctggagctggccgggttgtcgccggcggacatcgaccacgtcaacgcgcacggcacggcgacgcctatcggcgacgccgcggaggccaacgccatccgcgtcgccggttgtgatcaggccgcggtgtacgcgccgaagtctgcgctgggccactcgatcggcgcggtcggtgcgctcgagtcggtgctcacggtgctgacgctgcgcgacggcgtcatcccgccgaccctgaactacgagacacccgatcccgagatcgaccttgacgtcgtcgccggcgaaccgcgctatggcgattaccgctacgcagtcaacaactcgttcgggttcggcggccacaatgtggcgcttgccttcgggcgttac

SEQ ID NO: 26173 - DNA, 741 bp, Mycobacterium bovis
gtgactgccacagccactgaaggggccaaacccccattcgtatcccgttcagtcctggttaccggaggaaaccgggggatcgggctggcgatcgcacagcggctggctgccgacggccacaaggtggccgtcacccaccgtggatccggagcgccaaaggggctgtttggcgtcgaatgtgacgtcaccgacagcgacgccgtcgatcgcgccttcacggcggtagaagagcaccagggtccggtcgaggtgctggtgtccaacgccggcctatccgcggacgcattcctcatgcggatgaccgaggaaaagttcgagaaggtcatcaacgccaacctcaccggggcgttccgggtggctcaacgggcatcgcgcagcatgcagcgcaacaaattcggtcgaatgatattcataggttcggtctccggcagctggggcatcggcaaccaggccaactacgcagcctccaaggccggagtgattggcatggcccgctcgatcgcccgcgagctgtcgaaggcaaacgtgaccgcgaatgtggtggccccgggctacatcgacaccgatatgacccgcgcgctggatgagcggattcagcagggggcgctgcaatttatcccagcgaagcgggtcggcacccccgccgaggtcgccggggtggtcagcttcctggcttccgaggatgcgagctatatctccggtgcggtcatcccggtcgacggcggcatgggtatgggccac

SEQ ID NO: 26174 - DNA, 189 bp, Mycobacterium bovis
gtgcgggtgatcgtggaccgagaccgatgtgaaggcaacgcggtgtgcttgggaatcgcaccggatatcttcgacctggacgacgaggactatgccgtggtcaagaccgatccgatcccggttgatcaggaggatctggccgagcaggccatcgcggaatgcccgcgtgcggcgttgtcgcgtggtgag

SEQ ID NO: 26175 - DNA, 1200 bp, Mycobacterium bovis
atgtccggcggcggatctcgacgcaccagtgtcagggtggcagcggcgctgctggccgggctgatggtgggatccgcagtgctgacttatctttcgtatacggcggctttcacgtctacggacaccgtcacggtatcgtcgccgagggccggcctggttatggagaagggcgccaaggtcaaataccgtggcatccaggtaggcaaggtcacggatatcagctacagcggcaaccaagcacggctcaagctggccatcgacagcggcgagatgggttttatcccctccaacgcgacggtgcgcatcgccggaaacaccatcttcggcgccaaatcggtggaattcattccgccaaagacgccgtcgcccaagccgctaagtccgaatgcgcacgtggcggcgtctcaggtacagcttgaggtcaacacgttgttccaatcgctcatcgacctgctacacaagatcgatccgcttgaaacgaacgcgacgctgagcgcgctgtccgaaggcctgcgcggccacggcgatgacctgggtgcgctgttgtcgggactgaacacgctgacccgccaagcgaacccaaagttacccgcccttcaggaggatttccgcaaggcggcggtggtggccaacgtctatgctgacgccgccggggacctgaacaccgtgttcgataacctgccgacgatcaacaagacgatcgtcgaccagaaggacaacctcaacgacacgctgctagccaccatcggtctgtctaataacgcctatgagacgttggcgcccgccgaacagaatttcatcgacgccatcaaccggctccgagccccgctcaaagtgacctccgactactccccggtattcggctgccttttcaagggcatcgcgcgcggtgtcaaggagtttgccccgctaatcggtgtccgtaaggctgggctgttcacctcgtcgagcttcgtgttgggtgcgccgtcgtacacctatccggagagcctgccgatcgtcaacgcctccggcggtccgaactgccgagggttgcccgatatcccgaccaagcagacgggcgggtcgttctaccgcgcgccgttcctggtcaccgacaacgctttgatcccataccagccgttcaccgagttacaggttgacgcgccgtcgacgctgcagttcctgttcaacggtgcgttcgcggaacgggacgacttc

SEQ ID NO: 26176 - DNA, 927 bp, Mycobacterium bovis
atgggcggcgacctgtccgagggcaccgtcaaaggcgacgaggtcgcttgcccgttccacgactggcgctggggtggcgacggccgctgcaaattggtgccgtatgccaggcgcacacccagaatggcgcgcactcggtcgtggacgaccgatgtgcgcagcgggctgctgtttgtctggcacgaccatgagggcaatccacccgaccccgcggtccggatccccgagattcccgaggcggccagcgacgagtggaccgactggcggtggaaccgcatcctcatcgaagggtccaactgccgcgacatcatcgacaacgtcaccgatatggcgcacttcttctacatccacttcggtttgccgacgtacttcaagaacgtcttcgagggccacatcgcctcgcagtatctgcacaacgtgggccggcccgatgtcgacgatctggggacgtcttacggtgaggcgcatctggattcggaggcgtcttacttcgggccgtcgttcatgatcaactggctgcacaaccgctacggcaactacaagtccgagtcgatcctgatcaactgccactacccggtgacccagaactcgttcgtcctgcaatggggcgtcatcgtcgaaaagcccaagggtatgagcgaagagatgaccgacaagttgtcgcgggtgttcaccgagggcgtcagcaagggcttcttgcaggatgtcgagatctggaagcacaagacccgcatcgacaacccgctgctggttgaagaggacggcgccgtgtatcagctgcgccgctggtatgaacagttttatgtcgacgtagccgacataaaaccagagatggtggagcgcttcgagatcgaggtcgacaccaagcgcgccaacgagttctggaatgccgaggtagagaagaacttgaaatcgagagaagtttcc

SEQ ID NO: 26177 - DNA, 363 bp, Mycobacterium bovis
gtggagctgcgggattggttacgggtcgacgtgaaggcgggaaagccgttgttcgaccagctcagaacccaggtgatcgacggagtccgcgccggcgcattgccgcccggcacccggctcccgacggtgcgtgacttggccgggcagctgggcgtggcggccaataccgtggcccgcgcctaccgcgagttggaatcggcggcgatcgtcgaaacgcggggacgcttcggcactttcatttcccgcttcgatccgaccgacgccgcgatggctgccgcggccaaggaatatgtcggcgtggcgcgagcgctggggctgacgaagtccgatgcgatgcgctatctcacccacgtgccggacgac

SEQ ID NO: 26178 - DNA, 594 bp, Mycobacterium bovis
gtgagcgttccacgggtcggggtgctggcgctgcagggcgacacccgggagcacctggctgcgctgcgcgaatgcggggccgagccgatgacggtgcggcgccgcgacgaacttgacgcggtggacgcgctggtcatcccgggcggggaatccaccacgatgagccacctgctgctcgacctcgacctgctgggaccgctgcgggcccggctcgccgatgggcttccggcctatggttcgtgcgcgggcatgattctgttggccagcgagatcctggacgccggtgcggcaggccgccaggcgctgcccctgcgtgcgatgaatatgacggtgcggcgcaatgcttttggaagtcaggttgactcgtttgaaggcgatatcgagttcgctggtctagacgatccggtgcgcgcggtgttcatccgggcgccatgggttgagcgagtcggtgacggtgtgcaggtgctggcccgcgcggcggggcacatcgtcgcggtgcgccagggtgcggtgcttgccaccgcgtttcatccggagatgaccggcgatcgccgcattcatcagttgttcgtcgacatcgtcacctccgcggcg

SEQ ID NO: 26179 - DNA, 2091 bp, Mycobacterium bovis
ttggagaccgacccgatgagcgcccccgcacaacccgccccgggagtcgatggcggcgacccgtcgcaagcccgaattcgggttcctgccgggaccaccgcggccaccgccgtcggcgaagcgggtttaccgcggcgcggtacgcccgatgcgatcgtcgtcgtgcgcgacgccgacggcaacctgcgcgacctgagctgggtgcccgacgtcgacaccgatatcacgccggtggccgccaacaccgacgacggtcgcagcgtgatccgccattcgaccgcgcacgtgttggcccaagccgtccaagagctgtttccgcaggccaagctcggcatcggaccacccatcaccgacggcttctactacgacttcgacgtgcccgagccgttcacgcccgaggacttggcggcgctggaaaagcggatgcgccagatcgtcaaggaaggccagctgttcgaccggcgggtctacgaatccaccgaacaggcccgcgccgagctggccaacgagccctacaagctggaactcgtcgacgacaaatcgggtgacgccgagatcatggaggtcggcggtgacgagctcaccgcctacgacaacctcaacccccgcacccgcgagcgcgtctggggcgacctgtgccgcggaccgcacatcccgaccaccaaacacatcccggcgttcaagctcacccgcagctcggccgcctactggcggggcgatcagaaaaacgccagcctgcaacggatctacggcaccgcgtgggaatcccaggaggcgctcgacaggcacctggagttcatcgaagaggcgcagcgccgcgaccaccgcaagctgggtgtcgagctggacctgttcagcttccccgacgaaatcggttccggcctagcggttttccaccccaagggcggcatcgtgcgtcgcgaactggaggactactcgcggcgcaagcacaccgaggcgggctaccagttcgtcaacagcccgcacatcaccaaggcccagttgttccacacctcgggacatctggactggtacgccgacggcatgttccccccgatgcacatcgacgcggagtacaacgccgacggctcgctgcgcaaacccggccaggactactacctcaagccgatgaactgcccgatgcactgcctgatcttccgcgcgcgcgggcgatcctatcgggaactgccgttgcggctcttcgagttcggcacggtgtatcgctacgagaagtccggtgtggtgcacgggttgacccgggtgcgtgggctgaccatggacgacgcgcacatcttctgcacccgcgaccagatgcgcgacgagctgcggtcgctgctgcggtttgtgctcgacctgctcgccgactacggcctcaccgacttctacctcgaactgtccaccaaggacccggagaagttcgtcggcgccgaggaggtctgggaggaagccaccaccgtgctggccgaggtgggcgccgaatccgggctggagctggtgcccgatccaggcggcgcggcgttctacgggcccaagatttcagtgcaggtcaaagacgcgctgggccgcacctggcagatgtcgaccatccagctggacttcaactttccggaacgtttcggcctggagtacaccgccgccgacggaacccgccaccgcccggtgatgatccaccgcgcgctatttgggtcgatcgagcggttcttcggcattctcaccgagcactacgcgggggcgttcccggcctggttggcgcccgtgcaggtggtcggcatcccggtcgccgatgagcacgtcgcctatctggaagaggttgccacgcaactgaagtcgcacggggtgcgggccgaggtggacgccagcgacgatcggatggccaagaagatcgtgcaccacaccaaccacaaggtgccgttcatggtgttggcgggtgatcgtgacgtcgccgccggcgcggtgagtttccggttcggtgaccgcacccaaatcaacggtgtggcccgtgacgatgcggtggcggccattgtcgcctggatcgctgaccgcgaaaatgcggttcctacagcggaactggtgaaagtggccggtcgtgag

SEQ ID NO: 26180 - DNA, 918 bp, Mycobacterium bovis
gtggggacaagaggaggcaccatggatcctgcaggtaacccagcgaccggtacggcgcgggtcaagcgcggcatggccgagatgctcaagggcggcgtcatcatggacgttgtcaccccggagcaggcccgcatcgccgagggcgccggtgcggttgcggtaatggcgttggaaagggtgcccgccgatatccgcgcccagggcggggtgtcgcggatgagtgaccccgacatgatcgagggcatcatcgccgcggtcaccatcccggtgatggctaaagtgcgcatcggccactttgtcgaggcgcagatcctgcagacgttgggcgtcgactacatcgacgagtccgaggtgctgacgcccgctgactacgcccaccatatcgacaagtggaacttcacggtgcctttcgtgtgtggggcgaccaatctcggtgaggcgttgaggcgcatcagcgagggagcggccatgatccggtccaagggcgaggccgggaccggagacgtctccaacgcgaccacacacatgcgggccatcggtggtgagatccgccggttgacgtcgatgtcggaggacgaattgtttgtcgcggcaaaagaattgcaagcgccctatgaactcgttgccgaggtagctcgggcgggcaagttgccggtcacactgttcaccgccgggggtatcgccacgcccgccgacgcggcgatgatgatgcagcttggcgccgagggcgtcttcgtgggttccggtattttcaagtccggcgcccctgagcaccgcgccgccgcgatcgtcaaggccaccacgttcttcgacgatcccgatgtgctggccaaggtgtcgcgcgggctgggcgaggcgatggtgggcatcaacgtggacgagatcgctgtcggtcatcggctcgcccagcgcggctgg

SEQ ID NO: 26181 - DNA, 756 bp, Mycobacterium bovis
gtgctcattggttcgcatgtcagcccaaccgatccgctggccgcagcggaggccgaaggcgctgacgtagtgcagattttccttggcaatccgcagagctggaaggctcccaagccgcgggacgacgccgccgcgctgaaagccgcgaccctgcccatctacgtgcatgcgccctacctgatcaaccttgcgtcggcgaacaatcgcgtgcggatcccgtcgcgcaagatcctgcaagagacctgtgctgcggcggccgacattggcgcagcggcggtgatcgtgcacggtgggcacgtcgccgacgacaacgacatcgacaagggcttccagcgctggcgcaaggcgctggaccggctggaaaccgaggttcccgtctacctggaaaacaccgccggcggcgatcacgcgatggcgcgccgcttcgacaccatcgcccggctctgggacgtcatcggcgacaccggaatcgggttttgcctggacacctgccacacctgggcggccggcgaggcgctgaccgatgccgtcgatcggatcaaagcaattaccggccgcatcgatctggtgcactgcaacgactccagggacgaagcaggatcgggccgtgaccgccacgccaacctcggcagcggccagattgatcctgacctgctggtggctgccgtcaaggcggccggcgcgccggtgatctgcgaaaccgccgaccaaggtcgcaaggacgacatcgcgtttctgcgggaaagaaccggcagc

SEQ ID NO: 26182 - DNA, 720 bp, Mycobacterium bovis
atgccggccatgaccgcccgttcggtggtactcagcgtgctgctcggtgctcatcccgcgtgggccaccgcaagcgaattgatccagctgacagcggatttcggtatcaaggagacgacgttgcgggtcgcgctgacccgcatggtcggtgccggggatctggtccggtccgcggacggctaccggctctcggatcggttgctggcccgccagcgccgacaagatgaggccatgcgcccacggacccgcgcttggcacggaaactggcacatgctgattgtcaccagcatcggcaccgatgctcgtacccgggccgcactgcgaacctgcatgcaccacaagcgtttcggtgaattgcgggaaggggtgtggatgcggccggacaatctcgacctcgacttggagtccgacgttgcggcccgggttaggatgctgacggcccgcgacgaggcccccgccgacttggccgggcagctgtgggatctgtcggggtggaccgaggccggccaccggttgctcggcgacatggcagcggccaccgacatgcccgggcgatttgtggtggctgcggcgatggtgcgccacctgctcaccgatccgatgttgcccgctgaactgttgcccgccgactggccgggcgccgggttacgggcggcgtaccacgacttcgccactgcaatggcgaaacgacgcgatgcaactcaactcctggaggtgaca

SEQ ID NO: 26183 - DNA, 1336 bp, Mycobacterium bovis
gtgggtgcagggagtcggtttccgctggtggacccgctgccgagcgttggagctcggcctgaccggttacgcggccaaccacgccgacggacgcgtgctggtggtcgcccagggtccgcgcgctgcgtgccagaagctgctgcagctgctgcagggcgacacgacaccgggccgcgtcgccaaagtcgtcgccgactggtcgcagtcgacggagcagatcaccgggttcagcgagcggtaatctggcccctcgtgtacctcaagagtctgacgttgaagggcttcaagtccttcgccgcgccgacgactttacgcttcgagccgggcattacggccgtcgttgggcccaacggctccggcaaatccaatgtggtcgatgccctggcgtgggtgatgggggagcagggggcaaagacgctgcgcggcggcaagatggaagacgtcatcttcgccggcacctcgtcgcgtgcgccgctgggccgcgccgaagtcaccgttagcatcgacaactccgacaacgcactgcctatcgaatacaccgaggtgtcgatcacccgaagaatgtttcgcgacggtgccagcgaatacgaaatcaacggcagcagttgccgtttgatggatgtgcaggagttgctgagcgactccggcatcggccgtgagatgcatgtgattgttgggcaagggaagctcgaggagatcttgcagtcgcggcctgaggatcggcgggcgttcatcgaggaagccgccggtgtgctcaagcatcgcaagcgcaaggaaaaagctctgcgcaaactcgacacgatggcggcgaacctggcccggctcaccgatctgaccaccgagctccggcgtcaactcaaaccgctgggccggcaggccgaggcggcccagcgtgccgcggccatccaagccgatctgcgcgacgcccggctgcgcctggcggccgacgacttggtaagccgcagagccgaacgggaagcggtctttcaggccgaggctgcgatgcgccgcgagcatgacgaggccgccgcccggctggcggtggcatccgaggagctggccgcgcatgagtccgcggtcgccgaactctcgacgcgggccgagtcgatccagcacacttggttcgggctgtctgcgctggccgaacgggtggacgctacggtgcgcatcgccagcgaacgcgcccatcatctcgatatcgagccggtagcggtcagcgacaccgaccccagaagccccgagagctagaagcccgaggccccagcaggtggccgtcgccgagcaacaactgttagcggagcctggacgcggcgcgtgcccgactcgatgctgcccg

SEQ ID NO: 26184 - DNA, 867 bp, Mycobacterium bovis
atgcccgagctgcccgaagtcgaggtggtgcggcgcggcttgcaggctcacgtgaccggccggaccatcaccgaggttcgggtgcaccacccccgcgctgtgcgccgccacgatgccgggcccgcggatctgacggcgcggctgcggggagcgcggatcaacggaaccgatcggcgcggcaagtacctgtggttgacactcaatacggctggggtccataggccgacggacaccgcactcgtggtgcacctgggcatgagtgggcagatgctgctcggggcggtgccgtgtgccgctcacgtccggatttccgcgctgctcgacgacgggaccgtgctgagcttcgctgaccaacggaccttcggagggtggctgcttgccgacctggtgacggtggacggcagcgtggtaccggtgccggtcgcccacctggcgcgcgacccgcttgacccgcggttcgattgtgacgctgtagttaaagtgttgcggcgcaagcattccgaactcaagcgccagctgctggatcagcgggtggtgtcgggaatcggcaacatctatgccgatgaggcgctgtggcgggccaaggtgaacggcgcccacgtcgccgccacactaaggtgccggcgtctgggagcggtcctgcatgccgccgccgacgtgatgcgcgaagcgctggcgaaaggtggcacctcgttcgactctttgtatgtcaacgtcaacggcgagtcgggctacttcgagcggtcgctggacgcttatggccgcgaaggcgaaaactgtcggcgctgcggcgcggtgatacgccgggagaggtttatgaaccgctcgtcgttctactgcccgcgatgccagccgcggccccgaaag

SEQ ID NO: 26185 - DNA, 1182 bp, Mycobacterium bovis
atgccagcagccagcgcatccgaccgcgtcgaggaattggtgcggcgccgtggtggcgagctggtcgagctgtcccatgccatccacgccgagcccgagctggcgttcgccgagcatcgcagctgcgccaaggctcaggcgctggtcgccgaacgcggtttcgagatcaccacggccgccggtgggttggacacggcgtttcgcgccgactacggcagcggaccgttggttgtcggagtgtgcgccgagtacgacgcgcttcccgggatcggacacgcctgcgggcacaacattattgcggcctccgcggtgggcaccgcgctggcactggctgaggtggcggacgacctgggcttgaccgtggctctgctggggacccctgccgaggagtccggcggcggtaaggcgctgatgctgcaggccgggacgttcgatgacgttgcggtggccgtgatggtccatcccgggccgaccgatatcgccggcgcacgatcactggccctgtccgaggtcaccgtgcgctatcggggtaaggaatcgcacgcggccgtcgcgccgcacctaggggttaacgccgccgacgccgtgaccgtggcgcaggtcgctattggggtacttcgacagcaattggcgcccgggcaaatggtgcacggcattgtgaccgacggcgggcaggcggtcaatgtcatccccgggcaggcgaggctgcagtatgcgatgcgtgcggtcgaatcggattcgctgcgcgagctgcagaccagaatgttcgcctgctttgcggccggcgcgctggccgccgggtgcgaatacgaaatcgacgaggctgcaccggcatacgcggagctcaaacccgacccgtggctggctgacgtgtgccgggaggagatgcagcggctggggcgcgagccgttgctgccagccttggaggcagagctgccgctgggtagcaccgacatgggcaacgtgacgcaggtgctgcccgggatccatccggtgatcggcctggacgccggcgcggcgacggtgcaccaacgggccttcaccgtcgcttccgctggtgccagcgccgaccgcgcggtggttgacggcgcgatcatgttggcacgcacggttgtccgtctcgcgcagactcctgatgagcgtgaccgggtgctggccgcgcagcagcgcagggcggcgcga

SEQ ID NO: 26186 - DNA, 1602 bp, Mycobacterium bovis
gtgacgccagagaattggatcgcccacgacccggacccgcagacggccgccgagctcgccgcctgcggccccgacgagctgaaagcgcggttcagccgcccactggcgttcggcaccgcggggttgcgcgggcacctgcggggcgggccggacgcgatgaacctggcggtggtgttgcgcgccacctgggcggtggcacgggtgctcacggatcgaggtctggctggttcgccggtgatcgtggggcgcgacgctcggcacggctcaccggcgtttgccgctgcggccgccgaagtgcttgccgccgcaggtttttccgtgctgcttctgcccgatcccgcacccaccccggtggtggcgttcgcggtgcggcacaccggcgccgccgctgggatacagatcacggcgtcacacaacccggcgaccgacaacggctacaaggtctatgtcgacggcggccttcagctcctcgcccctaccgaccggcagatcgaagccgcgatggccaccgcgcccccggccgatcagatcgccaggaagaccgtcaaccccagtgaaaaccgcgcctccgatctgatcgaccgttatatccagcgtgcggccggggtccgaaggtgcgccggttcggtccgggtggccctgacgccgctgcacggggttggcggggcgatggccgtcgagacccttcggcgagccggtttcaccgaggtgcataccgtggcgacgcaattcgcgccgaatcccgacttccccaccgtgacattgccgaaccccgaggagcccggagccaccgacgcactgctcaccctggctaccgacgtggacgccgacgtcgcgatcgcgctggatcccgatgcggatcgctgcgcggtcgggatacccacggtgtcgggatggcggatgctgtccggtgacgaaaccggttggctactaggtgattacatcttgtcgcaaaccgacgaccgggcgtcgccgccggaaaccagggtggtggccagcaccgtggtgtcgtcgcggatgctggcggcgatcgccgcgcatcacgctgccgtgcacgtggagaccctcaccggctttaagtggctggcgcgcgccgatgcgaacctgcccggcaccctggtgtacgcctacgaggaagcgatcgggcactgcgtcgaccccaccgcggtgcgtgacaaagacggcatcagcgccgcggtgttggtgtgcgatctggtggccgcgctcaaaggccagggtcgttcggtgaccgacgcgctcgacgagctcgcccgatgctacggcgtgcatgaggttgccgccctgtcacgccccgtgggcggcgccgtcgagaccaccgacctgatgcgacggctccgcgaggacccgccgcgtcggctggccggtttccccgccacggtcaccgatatcggcgacacgctgatcctcaccggcggcgacgacaacatgttggtcagggtggcggtgcggccttctggaacagaaccgaagctgaagtgctacttggagattcgctgcgcggtgaccggtgacctaccagctgcccgacagctggtgcgggcgaggatcgatgagctgtcggctagcgtgcggcggtggtgg

SEQ ID NO: 26187 - DNA, 621 bp, Mycobacterium bovis
gtgcaggtccatgtcgttgaccacccactggccgcggcccgactgaccacgctgcgtgacgaacgcaccgacaacgccggcttccgggcagcgctgcgcgagctcacgctgctgttgatctatgaggccacccgcgatgcgccctgcgagccagtcccgatccgtacgccgctggccgagacggtcgggtcgcggctaaccaagccacccctgctggttcctgtgttgcgggcggggttggggatggtcgacgaggcgcatgccgccttgccggaggcgcacgttggctttgtcggtgtcgcccgcgacgagcaaacccaccagccggtgccgtatctggactcgctgcccgacgacctgacggatgtaccggtcatggtgcttgacccgatggtggccaccggcgggtcgatgacgcacaccctcggtctgctgatctcgcgcggtgcagcggatatcacggtgctgtgtgtggttgcggcgccagaaggaatcgcggcgctgcagaaggctgcgccaaacgtgcggttgttcactgcggccatcgacgaagggcttaacgaggtcgcctacattgtgcccggtctcggcgatgccggcgatcgccagttcggcccgcgc

SEQ ID NO: 26188 - DNA, 1527 bp, Mycobacterium bovis
gtgttggtggtcgacttcggtgcccaatatgcccagttgattgcccgtcgggttcgagaagcacgggttttctccgaggtgattccgcacaccgcctcgatcgaggagatcagggcccgtcagccggtggcgctcgtgctttccggtggaccggccagtgtctacgccgacggcgctccgaaactcgatccggcgctactggacctcggtgtaccggttcttggcatctgctacgggtttcaggccatggcgcaggcgctcggggggatcgtcgcccacaccggcactcgcgaatacggtcggactgaactgaaagtccttggtggcaaactgcattcggatcttcccgaggttcagccggtatggatgagtcacggtgacgcggtcacggccgcgccggacggattcgacgtggtggctagcagcgccggtgccccggtggccgccttcgaggccttcgaccggcgcctggccggggtgcagtatcacccggaggtgatgcacaccccacacgggcaacaggtgctcagccggtttttgcacgacttcgccgggctcggcgcccagtggacgcccgccaacatcgccaacgcgctgatcgagcaggtgcgcacccagatcggcgacggccacgccatctgcgggctatccggcggcgtggattccgcggtggccgcggccctggtgcagcgggccatcggcgaccggttgacctgtgtcttcgtcgaccacgggctgttgcgcgccggtgagcgggcgcaggtgcaacgcgatttcgtggccgccaccggcgccaacctggtcaccgtcgacgcggccgagaccttcctcgaggcgctgtcgggcgtgagcgcccccgagggcaaacgcaagatcatcggccgtcagttcatccgcgcgttcgagggcgcggtgcgggatgtgctggacggtaagactgctgagttcctggtgcagggcacgctgtatccggatgtggtggagtccggcgggggcagcggcaccgcgaacatcaagagccaccacaatgtcggcggcctgcccgacgacctgaagttcaccctcgttgagccgctgcggctgctgttcaaagacgaggtgcgcgcggtcgggcgggagttgggtctgccggaggagatcgtggcgcgccagccgtttccgggaccggggttgggtattcggatcgtcggggaggtcaccgccaagcggttggatacgctgcggcacgccgattcgatcgtgcgtgaggagctgaccgcggcgggcctggacaaccagatctggcagtgtccggtggtgctgttggccgatgtccgctcggtgggtgtgcagggtgacggtcgcacctatggccacccgattgtgctgcgtccggtgtcgagtgaagacgcgatgaccgccgactggacccgggtgccctacgaggtgctcgagcgcatctcgacccggatcaccaacgaggtcgccgaggtcaaccgcgtggtgctggacatcaccagcaagccgcccgccaccatcgagtgggag

SEQ ID NO: 26189 - DNA, 1572 bp, Mycobacterium bovis
gtggacacggacaacgcgatgcctgcacgttttagcgcccagattcagaatgaggatgaggtgacctccgaccaaggcaacaacggcggcccgaacggcggaggccgcctggcgccgcgcccggtttttcggccaccggtcgacccggcgtcgcgtcaagcgttcgggcgtccgtccggggtccaagggtcctttgtggccgagcgtgtgcgcccgcagaagtaccaggaccagtctgacttcacaccgaacgatcagcttgctgacccggtgcttcaggaggcgttcggtcgtccgttcgcgggcgccgaatcgctgcagcgccatcccatcgatgccggagcgctggcagctgagaaagacggtgccggccccgacgagcccgacgatccgtggcgcgaccccgcggccgcggccgcgctggggacgccagcgctagccgcgccggcaccgcacggtgcgctggccggcagcggcaagctgggtgtgcgcgacgtgctgtttggcggcaaggtgtcctacttggcgctgggcatcttggtcgctatcgcactggtgatcggcggcatcggcggtgtcatcggccgcaagaccgcggaagtagtcgatgcgttcaccacgtcgaaggtgaccctgtcgaccactggcaatgcccaggaaccggccggccggttcaccaaggtggcggccgccgtggccgattcggtggtgaccattgagtcggtcagcgaccaggagggcatgcaaggttccggcgtcatcgtcgatggccgcggctacatcgtcaccaacaatcacgtgatctctgaggcggccaacaatcccagccagttcaagacgaccgtggtgctcaacgacggcaaggaggtgcccgccaatctggtgggtcgtgaccccaagaccgacttggccgtcctcaaggtcgacaacgtcgacaatctgaccgtggcccggctcggtgattccagcaaggtacgggtcggtgacgaagtcctcgcggtcggcgcgcccctggggctgcgcagtacggtgacccagggcattgtcagcgcgctacaccgccccgttccgttgtcgggcgagggctctgacaccgacaccgtcattgacgcaattcagaccgacgcctcgatcaaccacggtaactccggcggtccgctaatcgacatggatgcccaggtgattggcatcaacaccgccggtaagtcactgtcggatagcgccagcgggctgggctttgcgatcccggtcaacgagatgaaattggtggcaaattctctgatcaaagacggaaagatcgtgcatccgacgttgggcatcaacacccggtcagtaagcaacgcgatcgcgtcgggcgcgcaggtggccaatgtaaaggcgggaagtcccgcgcagaagggcgggatcttggagaacgatgtgatcgtcaaggtcggtaaccgcgcggtcgccgactccgacgagttcgtcgtcgccgtgcgccagttggctatcggccaggacgctccgatagaggtggtccgcgagggtcggcatgtgacgctgacggtgaaaccggaccccgatagcacc

SEQ ID NO: 26190 - DNA, 1143 bp, Mycobacterium bovis
gtggcagcgattgccccgttggtattcgccagtgcggtcggcggcgcggctccggtattccccgggagaaccgcgccggtgcacgccgttatcaccccggtggccgcggtcgccgcgtccggcatagacctgtccggtccggtcgtcatcgccatgaagcgcccgccgaccagcttccgcgtggcggtagctaccataccggctccaccaccaccgatgatcgtgaattcgcctggtgcgcttggcattccggccatggcactgtccgcctaccgcaacgccgagctgaagatggccgctgccgcccctggctgtggcgtcagttggaacttgctggccgggattgggcgcatcgagtcgatgcacgcaaacggcggcgccaccgacgcgcgcggcaccgcgatccagccgatctacggcccaacgctggacggcaccctgccaggcaacgagatcatcatccaaagcagcgtcggcaatcgcgtcacgtacgcccgcgcgatggggccaatgcagttcttgcccggcacttgggctcggtacgccaccgacggcgatgacgacggtgtggctgacccgcagaacctgttcgactccacgttggccgcagcccgctacctgtgtagcggtgggctcaacctgcgcgacccggcgcaggtcatggccgcgctcctgcgctacaacaactcgatgccttacgcccagaacgtactgggctgggccgccggctacgccaccggtgtgttcccggttgacttgcccccgatcaccggtccgccaccaccactcggcgacgcgcacctcgagaatccggagggtctcgggcccggcttgccgatcaatgtcaacggcctgaccgccgatggccccatggcgcacctgccgctgatcgacttgaccccgcgccaggcggcgctcaatccaccgccgatgttcccgtggatggcacctgacccatcggcgccgatgcccggctgcacgctgatctgcattggctcacatggcccgccagtgggcgcgccgccgttcccgcctaccgctcccccacctccattcctacctgccgctcccccacctccggatccattggccggcccgcctggcgacgcgggcctggcgccgccggcgccggctcctgccggc

SEQ ID NO: 26191 - DNA, 1017 bp, Mycobacterium bovis
atgcgtgcggtagtcatcgacggggccggcagcgtcagagtcaacacccagcccgacccggcactgcccgggcctgacggagtggttgtcgccgtgaccgccgccggcatctgcggatccgatctgcatttctacgaaggcgaatatccgttcaccgagccggtggccctcggtcacgaggcggtaggcaccatcgtcgaggccgggccacaggtgcgcaccgtcggagttggcgacctggtcatggtgtcttcagtggccggctgcggcgtctgcccgggatgcgaacccatgatccagtcatgtgcttctccggcccgatgatcttcggcgccggcgtgcttggcggcgcacaggccgatctgctggcggtgccggccgccgatttccaggtgctcaagatccccgaaggtatcaccaccgagcaggcactgctgctcacggacaacctcgccaccggttgggcggcagcccaacgagccgatatttcattcggctccgccgtggcggtcatcggcctgggagccgtcggcctctgcgcgctgcgcagcgccttcatacacggtgccgcaacggttttcgctgtcgaccgagtaaagggacgcttgcaacgcgcggccacctggggtgctacgccgataccgtcaccggcggccgagacgattctggccgcgacgcggggtcgcggcgcagactcggtgattgacgccgtcggcaccgacgcctcgatgagcgacgcgctcaatgcggtgcgccctggcggcaccgtctcggttgtcggcgtgcacgatcttcagccgtttcccctgcccgcactgacgtgcctgttgcgaagcatcacgctgcgaatgaccatggcaccggtacaacgaacctggccggaactgatcccgttgctgcagtcgggccgactcgatgtcgatggcatcttcactaccaccctgccgttggacgaagcggccaagggctatgcaaccgcgagggcgcgctcgggtgaggagcttaaggttctgctta

SEQ ID NO: 26192 - DNA, 3948 bp, Mycobacterium bovis
gtgctcgacgtcaacttcttcgatgaactccgcatcggtcttgctaccgcggaggacatcaggcaatggtcctatggcgaggtcaaaaagccggagacgatcaactaccgcacgcttaagccggagaaggacggcctgttctgcgagaagatcttcgggccgactcgcgactgggaatgctactgcggcaagtacaagcgggtgcgcttcaagggcatcatctgcgagcgctgcggcgtcgaggtgacccgcgccaaggtgcgtcgtgagcggatgggccacatcgagcttgccgcgcccgtcacccacatctggtacttcaagggtgtgccctcgcggctggggtatctgctggacctggccccgaaggacctggagaagatcatctacttcgctgcctacgtgatcacctcggtcgacgaggagatgcgccacaatgagctctccacgctcgaggccgaaatggcggtggagcgcaaggccgtcgaagaccagcgcgacggcgaactagaggcccgggcgcaaaagctggaggccgacctggccgagctggaggccgagggcgccaaggccgatgcgcggcgcaaggttcgcgacggcggcgagcgcgagatgcgccagatccgtgaccgcgcgcagcgtgagctggaccggttggaggacatctggagcactttcaccaagctggcgcccaagcagctgatcgtcgacgaaaacctctaccgcgaactcgtcgaccgctacggcgagtacttcaccggtgccatgggcgcggagtcgatccagaagctgatcgagaacttcgacatcgacgccgaagccgagtcgctgcgggatgtcatccgaaacggcaaggggcagaagaagcttcgcgccctcaagcggctgaaggtggttgcggcgttccaacagtcgggcaactcgccgatgggcatggtgctcgacgccgtcccggtgatcccgccggagctgcgcccgatggtgcagctcgacggcggccggttcgccacgtccgacttgaacgacctgtaccgcagggtgatcaaccgcaacaaccggctgaaaaggctgatcgatctgggtgcgccggaaatcatcgtcaacaacgagaagcggatgctgcaggaatccgtggacgcgctgttcgacaatggccgccgcggccggcccgtcaccgggccgggcaaccgtccgctcaagtcgctttccgatctgctcaagggcaagcagggccggttccggcagaacctgctcggcaagcgtgtcgactactcgggccggtcggtcatcgtggtcggcccgcagctcaagctgcaccagtgcggtctgcccaagctgatggcgctggagctgttcaagccgttcgtgatgaagcggctggtggacctcaaccatgcgcagaacatcaagagcgccaagcgcatggtggagcgccagcgcccccaagtgtgggatgtgctcgaagaggtcatcgccgagcacccggtgttgctgaaccgcgcacccaccctgcaccggttgggtatccaggccttcgagccaatgctggtggaaggcaaggccattcagctgcacccgttggtgtgtgaggcgttcaatgccgacttcgacggtgaccagatggccgtgcacctgcctttgagcgccgaagcgcaggccgaggctcgcattttgatgttgtcctccaacaacatcctgtcgccggcatctgggcgtccgttggccatgccgcggctggacatggtgaccgggctgtactacctgaccaccgaggtccccggggacaccggcgaataccagccggccagcggggatcacccggagactggtgtctactcttcgccggccgaagcgatcatggcggccgaccgcggtgtcttgagcgtgcgggccaagatcaaggtgcggctgacccagctgcggccgccggtcgagatcgaggccgagctattcggccacagcggctggcagccgggcgatgcgtggatggccgagaccacgctgggccgggtgatgttcaacgagctgctgccgctgggttatccgttcgtcaacaagcagatgcacaagaaggtgcaggccgccatcatcaacgacctggccgagcgttacccgatgatcgtggtcgcccagaccgtcgacaagctcaaggacgccggcttctactgggccacccgcagcggcgtgacggtgtcgatggccgacgtgctggtgccgccgcgcaagaaggagatcctcgaccactacgaggagcgcgcggacaaggtcgaaaagcagttccagcgtggcgctttgaaccacgacgagcgcaacgaggcgctggtggagatttggaaggaagccaccgacgaggtcggtcaggcgttgcgggagcactaccccgacgacaacccgatcatcaccatcgtcgactccggcgccaccggcaacttcacccagactcgaacgctggccggtatgaagggcctggtgaccaacccgaagggtgagttcatcccgcgtccggtcaagtcctccttccgtgagggcctgaccgtgctggagtacttcatcaacacccacggcgctcgaaagggcttggcggacaccgcgttgcgcaccgccgactccggctacctgacccgacgtctggtggacgtgtcccaggacgtgatcgtgcgcgagcacgactgccagaccgagcgcggcatcgtcgtcgagctggccgagcgtgcacccgacggcacgctgatccgcgacccgtacatcgaaacctcggcctacgcgcggaccctgggcaccgacgcggtcgacgaggccggcaacgtcatcgtcgagcgtggtcaagacctgggcgatccggagattgacgctctgttggctgctggtattacccaggtcaaggtgcgttcggtgctgacgtgtgccaccagcaccggcgtgtgcgcgacctgctacgggcgttccatggccaccggcaagctggtcgacatcggtgaagccgtcggcatcgtggccgcccagtccatcggcgaacccggcacccagctgaccatgcgcaccttccaccagggtggcgtcggtgaggacatcaccggtggtctgccccgggtgcaggagctgttcgaggcccgggtaccgcgtggcaaggcgccgatcgccgacgtcaccggccgggttcggctcgaggacggcgagcggttctacaagatcaccatcgttcctgacgacggcggtgaggaagtggtctacgacaagatctccaagcggcagcggctgcgggtgttcaagcacgaagacggttccgaacgggtgctctccgatggcgaccacgtcgaggtgggccagcagctgatggaaggctcggccgacccgcatgaggtgctgcgggtgcagggcccccgcgaggtgcagatacacctggttcgcgaggtccaggaggtctaccgcgcccaaggtgtgtcgatccacgacaagcacatcgaggtgatcgttcgccagatgctgcgccgggtgaccatcatcgactcgggctcgacggagtttttgcctggctcgctgatcgaccgcgcggagttcgaggcagagaaccgccgagtggtggccgagggcggtgagcccgcggccggccgtccggtgctgatgggcatcacgaaggcgtcgctggccaccgactcgtggctgtcggcggcgtcgttccaggagaccactcgcgtgctgaccgatgcggcgatcaactgccgcagcgataagctcaacggtctgaaggaaaacgtgatcatcggcaagctgatcccggccggtaccggtatcaaccgctaccgcaacatcgcggtgcagcccaccgaggaggcccgcgctgcggcgtacaccatcccgtcgtatgaggatcagtactacagcccggacttcggtgcggccaccggtgctgccgtcccgctggacgactacggctacagcgactaccgc

SEQ ID NO: 26193 - DNA, 3288 bp, Mycobacterium bovis
gtgggtggcctggaagaggtgctctacgagctgtctccgatcgaggacttctccgggtcgatgtcgttgtcgttctctgaccctcgtttcgacgatgtcaaggcacccgtcgacgagtgcaaagacaaggacatgacgtacgcggctccactgttcgtcaccgccgagttcatcaacaacaacaccggtgagatcaagagtcagacggtgttcatgggtgacttcccgatgatgaccgagaagggcacgttcatcatcaacgggaccgagcgtgtggtggtcagccagctggtgcggtcgcccggggtgtacttcgacgagaccattgacaagtccaccgacaagacgctgcacagcgtcaaggtgatcccgagccgcggcgcgtggctcgagtttgacgtcgacaagcgcgacaccgtcggcgtgcgcatcgaccgcaaacgccggcaaccggtcaccgtgctgctcaaggcgctgggctggaccagcgagcagattgtcgagcggttcgggttctccgagatcatgcgatcgacgctggagaaggacaacaccgtcggcaccgacgaggcgctgttggacatctaccgcaagctgcgtccgggcgagcccccgaccaaagagtcagcgcagacgctgttggaaaacttgttcttcaaggagaagcgctacgacctggcccgcgtcggtcgctataaggtcaacaagaagctcgggctgcatgtcggcgagcccatcacgtcgtcgacgctgaccgaagaagacgtcgtggccaccatcgaatatctggtccgcttgcacgagggtcagaccacgatgaccgttccgggcggcgtcgaggtgccggtggaaaccgacgacatcgaccacttcggcaaccgccgcctgcgtacggtcggcgagctgatccaaaaccagatccgggtcggcatgtcgcggatggagcgggtggtccgggagcggatgaccacccaggacgtggaggcgatcacaccgcagacgttgatcaacatccggccggtggtcgccgcgatcaaggagttcttcggcaccagccagctgagccaattcatggaccagaacaacccgctgtcggggttgacccacaagcgccgactgtcggcgctggggcccggcggtctgtcacgtgagcgtgccgggctggaggtccgcgacgtgcacccgtcgcactacggccggatgtgcccgatcgaaacccctgaggggcccaacatcggtctgatcggctcgctgtcggtgtacgcgcgggtcaacccgttcgggttcatcgaaacgccgtaccgcaaggtggtcgacggcgtggttagcgacgagatcgtgtacctgaccgccgacgaggaggaccgccacgtggtggcacaggccaattcgccgatcgatgcggacggtcgcttcgtcgagccgcgcgtgctggtccgccgcaaggcgggcgaggtggagtacgtgccctcgtctgaggtggactacatggacgtctcgccccgccagatggtgtcggtggccaccgcgatgattcccttcctggagcacgacgacgccaaccgtgccctcatgggggcaaacatgcagcgccaggcggtgccgctggtccgtagcgaggccccgctggtgggcaccgggatggagctgcgcgcggcgatcgacgccggcgacgtcgtcgtcgccgaagaaagcggcgtcatcgaggaggtgtcggccgactacatcactgtgatgcacgacaacggcacccggcgtacctaccggatgcgcaagtttgcccggtccaaccacggcacttgcgccaaccagtgccccatcgtggacgcgggcgaccgagtcgaggccggtcaggtgatcgccgacggtccctgtactgacgacggcgagatggcgctgggcaagaacctgctggtggccatcatgccgtgggagggccacaactacgaggacgcgatcatcctgtccaaccgcctggtcgaagaggacgtgctcacctcgatccacatcgaggagcatgagatcgatgctcgcgacaccaagctgggtgcggaggagatcacccgcgacatcccgaacatctccgacgaggtgctcgccgacctggatgagcggggcatcgtgcgcatcggtgccgaggttcgcgacggggacatcctggtcggcaaggtcaccccgaagggtgagaccgagctgacgccggaggagcggctgctgcgtgccatcttcggtgagaaggcccgcgaggtgcgcgacacttcgctgaaggtgccgcacggcgaatccggcaaggtgatcggcattcgggtgttttcccgcgaggacgaggacgagttgccggccggtgtcaacgagctggtgcgtgtgtatgtggctcagaaacgcaagatctccgacggtgacaagctggccggccggcacggcaacaagggcgtgatcggcaagatcctgccggttgaggacatgccgttccttgccgacggcaccccggtggacattattttgaacacccacggcgtgccgcgacggatgaacatcggccagattttggagacccacctgggttggtgtgcccacagcggctggaaggtcgacgccgccaagggggttccggactgggccgccaggctgcccgacgaactgctcgaggcgcagccgaacgccattgtgtcgacgccggtgttcgacggcgcccaggaggccgagctgcagggcctgttgtcgtgcacgctgcccaaccgcgacggtgacgtgctggtcgacgccgacggcaaggccatgctcttcgacgggcgcagcggcgagccgttcccgtacccggtcacggttggctacatgtacatcatgaagctgcaccacctggtggacgacaagatccacgcccgctccaccgggccgtactcgatgatcacccagcagccgctgggcggtaaggcgcagttcggtggccagcggttcggggagatggagtgctgggccatgcaggcctacggtgccgcctacaccctgcaggagctgttgaccatcaagtccgatgacaccgtcggccgcgtcaaggtgtacgaggcgatcgtcaagggtgagaacatcccggagccgggcatccccgagtcgttcaaggtgctgctcaaagaactgcagtcgctgtgcctcaacgtcgaggtgctatcgagtgacggtgcggcgatcgaactgcgcgaaggtgaggacgaggacctggagcgggccgcggccaacctgggaatcaatctgtcccgcaacgaatccgcaagtgtcgaggatcttgcg

SEQ ID NO: 26194 - DNA, 390 bp, Mycobacterium bovis
atggcaaagctctccaccgacgaactgctggacgcgttcaaggaaatgaccctgttggagctctccgacttcgtcaagaagttcgaggagaccttcgaggtcaccgccgccgctccagtcgccgtcgccgccgccggtgccgccccggccggtgccgccgtcgaggctgccgaggagcagtccgagttcgacgtgatccttgaggccgccggcgacaagaagatcggcgtcatcaaggtggtccgggagatcgtttccggcctgggcctcaaggaggccaaggacctggtcgacggcgcgcccaagccgctgctggagaaggtcgccaaggaggccgccgacgaggccaaggccaagctggaggccgccggcgccaccgtcaccgtcaag

SEQ ID NO: 26195 - DNA, 2361 bp, Mycobacterium bovis
atgccgcagccaagaacgcatctgccgattcccagtgctgctcgcaccgggctgatcacgtatgacgcgaaggatcccgacagcacctatccgccgatcgagcagctgcgcccaccggcgggtgccccgaatgtgttgctgatcctgcttgacgatgtcgggttcggtgcgtcgagcgcgttcggaggcccatgcaggacgtcgacggcggaactgcttgccggtaacgggttgcggtacaaccggtttcacaccaccgcgctgtgctcgccgacgcgtcaggcgttgttaactggacgcaaccatcactccgccggcatgggcggtatcaccgaaatcgccaccggtgcaccgggatacagctcagtactaccgaacaccatgtcgccgatcgcgcggacgctaaagctcaacggctacaacaccgcccagttcggcaagtgccacgaagtcccggtctggcagaccagcccggtcgggccgttcgacgcgtggcccagcggcggcggtggtttcgaatacttctacgggtttatcggtggcgaggctaaccagtggtatccgagtctgtacgagggcaccacgccggtcgaggtgaaccgcacgcccgaggagggttaccatttcatggcggacatgaccgacaaggccctcggctggatcggacagcagaaggcactggcccccgaccggccgttcttcgtgtacttcgccccgggcgccacccacgcgccccaccacgttccgcgggagtgggccgacaagtaccggggccgcttcgatgtgggctgggacgcactgcgagaggaaaccttcgcccggcaaaaggaactcggggtgatcccggcggactgccagctgaccgcgcggcacgccgaaatcccggcgtgggacgacatgccggaggacctcaaacccgtgctatgccggcagatggaggtctacgcgggctttctggaatacaccgaccaccacgtcggccggctcgtcgacggcctgcagcgcctcggtgtgctcgacgacacgctggtgttctacatcatcggcgacaacggcgcctcggccgagggcacgatcaacggcacctacaacgagatgttgaacttcaacggcctggccgacatcgagacgccgcggttcatgaccgaccggctcgacaagttcggcgggccggagtcctacaaccactattcggtgggttgggcgcatgcgatggataccccctatcagtggaccaaacaagtggcctcgcactggggtggcacgcgtaacggcacgattgtgcactggcccaacggaattgccgccaagggggagatgcgctggcagtttcaccacgtcatcgacgtggcgccgaccatcctggaggcggcggggttgccggaaccgttattcgtcaacggcgtgcagcaacaccccatcgaaggggtcagcatggcctattcgttcgacgacgcgcaggcgccggatcggcacgagacgcagtatttcgagatgttcggaaaccggggcatctaccacaagggttggaccgcggtgaccaagcacaagacgccgtggattttggttggcgagcagaccgtcgcgttcgacgacgacgtgtgggagctctacgacaccaccaaggattggagccaggccaaagacttggccaaggagatgccggaaaagctgcatgagctgcagcggctgtggctgatcgaggcgacgcgctacaacgtgcttccgctggacgacgacaccgccagccgcatcaaccccgatctggcgggcaggccggtgctcatcaggggcaacacccaggtgctgttttcgaacatgggccggttgtcggagaactgtgtgctcaacctcaagaacaaatcgcacacggtgaccgctgaggtcgaggtgcccgagaccggtgctgagggcgtgatcgtcgcgcagggcgccagcatcggcggctggagcctgtatgccaacgacggcaagctcaagtactgctacaacctgggtggtatcaagcacttctacgccgagtccgccgacccgctgccggccggcgcccatcaggtgcgcatggaattcgcttatgccggtggcggtttgggcaagggcggcgaggtaactctttatgtcgacggccaacaggtcggcgaaggacatgtcgaagccacccttgccatcgtcttctcggccgacgacggctgcgatgtcggcatggattcgggctcgcccgtctcacccgactatgccccggggagtaacgcgttcaacgggcggatcaagggcgtgcagctcgcgatcgccgaggccgccgctgctgcgggccatctggtcgacccggagcacgcgatccgcatcgcgctggcgcgccaa

SEQ ID NO: 26196 - DNA, 534 bp, Mycobacterium bovis
atggccagggctgacaaggccaccgccgtcgcagacatcgcagcgcagttcaaggagtcgaccgcgacgttgatcaccgaataccgcggcttgacggtggccaacctggccgagctacgcaggtctctgacggggtcggcgacctacgcggtggccaaaaacacactcatcaagcgggcggcctccgaggccggcatcgagggcctcgacgaactgtttgtgggccccaccgcgatcgcgttcgtcaccggtgagccggtcgacgccgccaaggccatcaagaccttcgccaaggagcacaaggcgctggtcatcaagggcggctacatggacggccacccattgaccgtggccgaagtcgagcgcatcgccgacctggagtcccgcgaggtgttactggccaagctggccggtgcgatgaagggcaacctggccaaggcggccgggttgttcaacgcgccggcctcgcagctggcccggctcgcggccgccctgcaggaaaagaaggcctgcccaggcccagactcagccgag

SEQ ID NO: 26197 - DNA, 798 bp, Mycobacterium bovis
atgaccattttggaaattaaggacctgcacgtcagcgtggagaaccccgcggaggcggaccacgagatcccgatcctgcgcggcgtcgacctcaccgtgaaatccggtgagacacatgccttgatgggacccaacggctcgggcaagtcgacgctgtcctacgccatcgcgggccatcccaaataccacgtgacgtcgggcaccattaccctcgacggcgcggacgtgctggcgatgagcatcgacgaacgtgcgcgggccggcctgtttctggccatgcaatatcccgtcgaggtgcccggtgtctcgatgtcgaacttcctgcgctcggcggcaaccgccattcgcggcgagccgccgaaactgcggcactgggtcaaagaggtcaaggccgcgatggccgcgctcgacatcgacccggccttcgccgagcgcagcgtcaacgagggtttctccggtggcgagaagaagcgccacgagatcctgcagctagaactgctcaagcccaagatcgccatcctggacgagaccgactccggcctggacgtcgacgcgctgcgcgtggtcagcgagggggtgaaccgctacgccgaatcccagcacggcggcatcctgctgatcacgcactacacccgcatcctgcgctacatccacccggaatacgtgcacgtgttcgtcggcggccgcatcgtcgagtccggtggttcggagctcgccgacgaactcgaccagaacggctacgtgcgtttctcccccgcaagcgggcggtacccccaccaacccgcgccaaccggagcc

SEQ ID NO: 26198 - DNA, 984 bp, Mycobacterium bovis
atgcacgcaatcgaagtcaccgaaaccggcgggccaggcgtcttacgccacgtcgaccagccgcaacctcaacccggccacggcgagctcctgatcaaggccgaggccatcggtgtcaacttcatcgacacctacttccgctccgggcaatatccgcgcgaactcccgttcgtcatcggctccgaggtatgcggcacggtggaggccgtcggcccaggagttaccgcagccgacaccgccatcagcgtcggcgaccgcgtggtcagcgcctcagccaacggcgcctacgccgaattctgcacagcgccagcatctctgaccgccaaggtccccgacgacgtcacgtctgaggtagcggcttcggcgctgctgaagggcctgacggcgcattacctactgaagtcggtgtacccggtgaagcgtggtgacaccgtcttggtgcatgctggcgccggcggcgtcggcttgatcctgacacaatgggccactcacctgggggtgcgggtgatcaccaccgtttcgacggcggagaaggccaagctgtccaaggatgccggcgcggacgtggttctcgactacccggaggatgcctggcagttcgccgggcgggttcgcgaactgaccggcggcaccggtgtgcaagccgtttacgacggtgtcggcgccaccaccttcgacgccagcctagccagcctggctgtccgcgggacattagcactgttcggcgccgccagcggtccggttccaccggtcgatccgcagcgcctcaatgccgccggatcggtgtacctcacccgtccctcgctgttccacttcacccgcaccggcgaggagttcagctggcgggccgctgagctgttcgacgcgatcggcagcgaagcgatcaccgtggcggtcggcggacgttacccgctggccgacgccttgcgcgcccatcaggacctggaggctcgcaagacggtcggctcggtcgtgctgctgccg

SEQ ID NO: 26199 - DNA, 486 bp, Mycobacterium bovis
gtgacgttgcgtctggagcagatctatcaggacgtgatcctcgatcactacaagcatccgcagcatcgggggctgcgggagccgttcggcgcccaggtgtatcacgtgaacccgatctgcggcgacgaggtcacgctgcgggtcgcgttgtccgaggacggcaccagggtcaccgacgtttcctatgacggacaaggctgttcgatcagccaggccgcgacctcggtgctcaccgaacaggtaatcggacaacgcgtgccgcgggcgctgaacatcgtcgacgccttcaccgaaatggtgtcctcccgcgggaccgtgccaggcgacgaggacgtcttaggcgatggggtcgcgttcgccggggtggccaaatacccggcccgggtgaaatgcgcgctgctcggatggatggcgttcaaagatgcgctggcccaagccagcgaagccttcgaggaggttacagatgagcgaaaccagcgcaccggc

SEQ ID NO: 26200 - DNA, 783 bp, Mycobacterium bovis
gtgacccaaaccaatcgccccgcttttcccgcgggcaccttcagcccggacccccgccccaacgccgtccccctgatgcttgccgcacagttcagcctggaattgaagctgctgttacgcaacggcgagcaactgctgttgaccatgttcatcccgatcaccctgctggtcgggctgactttgctgccgatgggctcgttcggccacaaccgcgccgccacctttgttccggtcatcatggcgcttgcggtgatctccaccgcattcaccgggcaagccatcgcggtcgcgttcgatcgccgctacggcgccctcaaacgactcggtgctaccccgctgccggtttgggggatcatcgccggcaagtcgctggcagtggttgccgtggtgttcttgcaggccatcatcttgggcgccatcggctttgcgctcggctggcggccggcgctgacggccctgacattgggcgccgggatcatcgcgctgggtaccgcgggctttgcggcgctcggcctgctactcggcggcaccttgcgagccgagatcgttctcgccgtcgccaacctgatgtggttcgtattcgccggtttcggtgcgctgaccttggagtcgaacgtgatcccgacggcgttcaaatgggtggctcgggttaccccgtcgggcgcgctcaccgaggcgctgtcgcaggccatgaccgtgtcggtggactggttcgggatcgtcgtcctagcggtgtggggcgcgctggccgcactggccgcactgcgctggttccggttcacc

SEQ ID NO: 26201 - DNA, 288 bp, Mycobacterium bovis
atgcgtccatacgaaatcatggtcatcctcgacccgaccctcgacgaacgcaccgtagccccgtccttggagacgttcctcaacgtcgtccgtaaggacggcggaaaagtcgaaaaggtggacatctggggcaagcgtcggctggcgtacgagatcgccaagcatgccgaaggcatctacgtggtgatcgacgtgaaagccgccccggcgacggtgtccgaactcgaccgccagctcagcctcaacgagtcggtgttgcgcaccaaggtaatgcgcaccgacaagcac

SEQ ID NO: 26202 - DNA, 2712 bp, Mycobacterium bovis
gtgcagacacacgagatcaggaagcggttcctcgatcatttcgtgaaggcgggccacaccgaggtgcccagcgcctcggtgatcctcgacgaccccaacctgttgttcgtcaacgccgggatggtccagttcgtgcctttcttcttgggacagcgcacgccgccgtacccgacggccaccagcatccagaagtgcatccgtacccccgatatcgacgaggtgggcataaccacccggcacaacacgttttttcagatggccggcaatttcagcttcggcgactatttcaaacgcggggccattgaactggcctgggcactgctgaccaacagcctcgccgccggcggctacggcctggacccggaaagaatctggacgacagtctatttcgacgacgacgaagctgtccggctatggcaggaggttgccgggctgccggcggagcgaatccagcgccgcggcatggccgacaactactggtcgatgggcattcccggaccgtgcgggccgtcatcggagatctattacgaccgcggacccgaattcggtcccgcaggcggtcccatcgtcagcgaagaccgttacctggaggtctggaacctggtgttcatgcagaacgagcgcggagagggaaccaccaaggaggactaccagatcctcgggccgctgccccgcaacaacatccacaccggcatgggcgtcgagcggatcgcgctggtgctgcaagacgtgcacaacgcctacgagaccgacctgctcaggccggtcatagataccgtggccagggtcgccgcgcgtgcctacgacgtcggcaaccacgaagacgacgtgcggtaccgcatcatcgcagaccacagccgcaccgccgcgatcctgatcggtgacggcgtcagccccggcaacgacggtcgcggttatgtgctgcgccggctgctgcgtcgggtgatccgctccgccaagctgctgggcatcgacgctgcgatcgttggcgacctgatggccacggtgcgcaacgcgatgggcccgtcatatcccgaactcgtcgccgacttcgagcggatcagccggatcgcggtcgccgaggagacggcgttcaaccgcacgctggcgtcgggttccaggctgttcgaggaggtggctagctccaccaagaaatccggagccaccgtgctgtccggatcggacgctttcacgttgcatgacacctacgggttcccgatcgagctcacgctggagatggcggccgaaaccggtctgcaggtagacgaaatcgggttccgtgagctgatggccgagcagcgccgccgtgccaaggccgacgccgccgcgcgcaaacacgcgcatgctgacctgagcgcctaccgcgagctggttgacgccggcgccaccgagttcaccggattcgacgagttgcgttcccaggcgcggattctgggcatcttcgtcgacggtaagcgggttccggtggtggcgcacggtgtagccggcggagccggggaagggcagcgtgtcgaacttgtcttagatcgcaccccgctctacgccgaatcgggtgggcagatcgccgatgagggcaccatcagcggaaccggttccagcgaagctgcccgggccgcggttaccgacgtgcagaagatcgccaaaacgctttgggtgcaccgagtcaacgtggaatccggggaattcgtcgagggtgacaccgtaatcgcggcggtggatcccgggtggcgccggggtgccacgcagggccactcgggcacccacatggtgcatgccgcgctgcgacaagtgctggggcccaacgcggttcaggcgggatcgctgaaccggccgggatatttgcgcttcgactttaactggcagggtccgttgaccgacgaccagcgcacccaggtcgaagaggtcaccaacgaggccgtgcaagcggacttcgaggtgcgcacgttcaccgaacagctcgacaaggccaaggcgatgggtgccatcgcgctgttcggcgagagctaccccgacgaagtgcgggtggtggagatgggtggaccgttctcgctggagctatgtggcggcacccatgtgagcaacacggcgcagatcggtcccgtgacgatcctgggcgagtcgtcgatcggctccggggtgcgccgggtggaggcctacgtggggttggattcgtttcgtcacctggccaaggagcgtgcgttgatggccgggttggcctcgtcactgaaggtgccgtccgaagaggtaccggcccgggtggccaatctagtggagcgcctgcgggccgccgagaaggaactcgaacgtgtccggatggccagcgcccgggcagccgccaccaatgccgccgccggggctcagcggatcggtaacgtccgtttggtggcgcagcgaatgtccggcgggatgaccgcggcagacctgcggtcgttgatcggcgacatccgcggcaagctgggtagcgagccggcggtggtggcgctgattgccgagggcgaaagccaaactgtgccgtatgcggtcgcggccaatcccgctgcccaggacctcggaatccgtgccaacgacctggtcaaacaacttgcggtggcggtcgaaggccgcggtggcggtaaggcggacctggcgcagggctcgggaaagaatccgaccggtatcgacgccgcgctcgacgcggtccgctccgagatcgccgtgatagcgcgggtcggt

SEQ ID NO: 26203 - DNA, 510 bp, Mycobacterium bovis
gtggtcccagcacagcaccgcccgcccgaccggcccggcgatccagcgcacgaccctggacggggacgacgcctcggtatcgacgtgggcgccgcgcgtatcggcgtggcttgcagcgacccggacgcgatcttggccaccccggtggaaacggtgcgccgcgatcgttccggcaagcacctgcgcaggctggctgcgctggccgccgagttggaggcggtcgaggtgatcgtcgggctcccgcgcacgctggccgaccgcatcggccgctcggcccaagacgcaatcgaactggccgaggcgctggcacgccgtgtttctcctacgccggtgcggctggccgacgagcggctcaccacggtcagtgctcaacgatctttgcggcaggcgggggtgcgggcctccgagcagcgtgcggtgatcgaccaagcggccgcagtggcaatactgcagagctggctggatgaacgtctcgcggcgatggccgggactcaagaaggctccgatgcc

SEQ ID NO: 26204 - DNA, 806 bp, Mycobacterium bovis
agcgaaggtcccaaaaagccggcgtgcttggttcgccgatcgcgcattcccgctccccgcagctgcacctggccgcctaccgggcgttggggctgcacgactggacctatgagcgcatcgaatgcggtgcggccgagttgcccgtcgtggtcggtggtttcggaccggagtgggtcggtgtttcggtgaccatgccgggcaagttcgccgccctgcggttcgccgacgagcgcaccgcacgcgcggaccttgtcggttcggccaacaccctggttcggacgccgcatggctggcgggccgacaacaccgacatcgacggggtggccggggcgttgggggcggctgctggacacgcgctggtgctggggtccggggggaccgcaccggcggccgtggtggggctggccgaactcggggtcaccgacatcaccgtggtggcgcgcaactcggacaaggcggcccggctggtggacctgggcacacgggtcggcgtggcgacccggttctgcgcgttcgacagcggtgggttggccgatgcggtggccgccgcggaagtgctggtcagcaccattccagcggaggtggccgcggggtatgccggcaccttggccgcgatcccggtgctgttggacgccatctacgatccgtggcccacaccgctggccgccgcggtcggatcggcgggcgggcgggtgatcagcgggctgcagatgttgctgcatcaggcgttcgcgcaggtggagcagttcaccgggctacccgccccccgcgaagcgatgacttgcgcgctggccgcgttggactag

SEQ ID NO: 26205 - DNA, 417 bp, Mycobacterium bovis
atgctggcggcggcggtgttggcctggatgggagtgttgtgcgtttgcgacgtccggcagcgccggctacccaactggctcaccctgcccggggcgggggtgatcctgctcttcgcgggccttgccggccgcggtgtgccggcgctggccggggcggccgccttggccggggtgtacctgctggtgcacctggctttgcccgccgcgatgggcgccggtgacgtcaagctggcgatcggtctgggcgggctgaccggctgcttcggggtcgaggtgtggtttctggcggcgctggccgcgccgctgctgaccgcggtgtgcggcgtgatggtgacgccatggggtgtccgcaccctgccgcacgggccgtcgatgtgtgtggccagcctgggggcggtggggttggcgctgctgggc

SEQ ID NO: 26206 - DNA, 1356 bp, Mycobacterium bovis
atgcctgaagccgtgtccgacggtctgtttgacgtgcccggcgtaccgatgacgtccggccatgacctgggcgcttcggccggggcaccgctggcggtgcggatgcgtccggcgtcgctggacgaagtggtcggccaggaccacttgctggcgcccggttcgccgttgcgccggctggtcgagggctcgggggtggcgtcggtgatcctctacggtcccccgggcagcggcaagacaacgctggcggcgttgatctcgcaggccaccggccgccggttcgaggccctgtcggcattgtcggccggcgtcaaggaagtgcgggcggtcatcgagaattcgcgaaaagcgctgcttcacggcgagcagaccgtgctgttcatcgacgaggtgcaccgattttccaagacccaacaagacgccctgctgtcggcggtggaacaccgggtggtgctgttggtggcggcgaccaccgagaacccgtcgttttcggtggtggcaccgctgctgtcgcggtcgctgatcctgcagctgcggccgctgacggccgaggacacccgcgcggtagtacaacgcgcgatcgatgacccccgcggcctgggcagggcagtcgcggtagcgcctgaggccgtcgacctgctggtgcaactcgcggccggcgacgcccggcgcgccctgaccgcgctggaagtagcggccgaggcagcccaggcggccggcgagctggtcagcgtgcaaaccatcgagcggtcggtggacaaagccgcggtgcgctacgaccgtgacggcgaccagcactacgacgtcgtcagcgccttcatcaaatcggtgcgcggttccgacgtcgatgccgcgctgcactatttggcccgcatgctggtcgccggggaggacccgcggttcatcgcccgccggctgatgattctggccagcgaggacatcggcatggccgacccgagcgcgctgcaggtggcggtcgccgccgcacagacggtggcgctgatcggcatgcccgaagcccagctgacgctggcgcacgccaccatccacctggccaccgcaccgaagtcaaacgccgtcaccacggcgttggccgcggcgatgaacgacatcaaggccggcaaggccggtctggtgccggctcatctgcgtgacgggcattactccggggcggcggcgctgggcaatgcacagggctacaaatattcccatgacgacccggatggcgttgtggcccagcaatacccgcccgacgagttggtggacgtggactactaccggcccactggtcgcggcggcgaacgcgagatcgccggccgcctggaccgcctgcgggcaatcatccgcaagaaacggggg

SEQ ID NO: 26207 - DNA, 651 bp, Mycobacterium bovis
atggcacgaaagggcattctcggtaccaagctgggtatgacgcaggtattcgacgaaagcaacagagtagtaccggtgaccgtggtcaaggccgggcccaacgtggtaacccgcatccgcacgcccgaacgcgacggttatagcgccgtgcagctggcctatggcgagatcagcccacgcaaggtcaacaagccgctgacaggtcagtacaccgccgccggcgtcaacccacgccgatacctggcggagctgcggctggacgactcggatgccgcgaccgagtaccaggttgggcaagagttgaccgcggagatcttcgccgatggcagctacgtcgatgtgacgggtacctccaagggcaaaggtttcgccggcaccatgaagcggcacggcttccgcggtcagggcgccagtcacggtgcccaggcggtgcaccgccgtccgggctccatcggcggatgtgccacgccggcgcgggtgttcaagggcacccggatggccgggcggatgggcaatgaccgggtgaccgttcttaaccttttggtgcataaggtcgatgccgagaacggcgtgctgctgatcaagggtgcggttcctggccgcaccggtggactggtcatggtccgcagtgcgatcaaacgaggtgagaag

SEQ ID NO: 26208 - DNA, 303 bp, Mycobacterium bovis
gtggcgggacagaagatccgcatcaggctgaaggcctacgaccatgaggccattgacgcttcggcgcgcaagatcgtcgaaaccgtcgtccgcaccggtgccagcgtcgtagggccggtgccgctaccgactgagaagaacgtgtattgcgtcatccgctcaccgcataagtacaaggactcgcgggagcacttcgagatgcgcacacacaagcggttgatcgacatcatcgatcccacgccgaagaccgttgacgcgctcatgcgcatcgaccttccggccagcgtcgacgtcaacatccag

SEQ ID NO: 26209 - DNA, 408 bp, Mycobacterium bovis
gtgatggcagaggctaagaccggcgcgaaggcggcgcctagggtggctaaggccgccaaggcggcccccaagaaggccgcacccaacgacgctgaggccataggtgcggccaacgcggcaaacgttaaggggcccaagcacactccgcgtactccgaagccacgcggccgccgcaagacacgaatcggctatgtggtgagcgacaaaatgcagaagaccattgtggtggagctggaagaccgcatgcggcacccgctatacggcaagatcatccggaccactaagaaggtcaaggcacacgacgaagacagcgttgccggcattggcgaccgtgtctcgctgatggagacgcgtccgctgtcggcgaccaagcgctggcggctcgtcgagatcctcgagaaggctaag

SEQ ID NO: 26210 - DNA, 231 bp, Mycobacterium bovis
atggcagtgggtgtctcgccgggcgaactgcgtgagctcaccgacgaggagctggccgagcggttgcgcgagtccaaggaagagttgttcaacttgcgtttccagatggcgaccggccagctcaacaataaccgccggctccgtacggtgcgtcaggaaatcgcgcgcatctacaccgtgctgcgcgaacgagaactgggtctggcgactgggcccgatggtaaggaatcg

SEQ ID NO: 26211 - DNA, 414 bp, Mycobacterium bovis
atgtggatttcccgtaaggttaaacatcgcaagcagcaccatcctcgccagcgcggcatcgccagcggcggcaccacggtgaacttcggcgactacggcattcaggcccttgagcacgcctatgtcaccaaccggcagatcgaatcggcgcgtatcgccatcaaccggcacatcaagcgtggcggcaaggtttggatcaacatcttccctgaccgcccgctgaccaagaagcccgccgaaacccgcatgggttcgggcaagggctcgccggagtggtgggtagccaacgttaagccgggccgggtgctgttcgagctcagttaccccaatgaaggtgtcgcccgggccgcgctcacccgagcgatccacaagctgccgatcaaggcacgcattattactcgagaggagcagttc

SEQ ID NO: 26212 - DNA, 822 bp, Mycobacterium bovis
gtgggccaaaagatcaatccgcatggcttccggctgggcatcaccaccgactggaagtcgcgctggtatgccgacaagcagtatgccgagtacgtcaaggaggacgtggcgatccgccggctgctgtccagtggcctagagcgtgctgggatcgccgatgtagagatcgagcggacccgcgaccgggtccgggtggacattcacaccgcgcgtccgggcatcgtcattggtcggcgtgggaccgaggccgaccggattcgtgccgacctggaaaagctgaccggcaagcaggtccagctcaacatcctggaggtcaaaaacccggagtcgcaagcgcaattagtggcccagggggtagccgagcagttgagcaaccgggtggcgttccgccgcgcaatgcgcaaggcgatccagtcggcgatgcgtcagcccaacgtcaagggaatccgggtgcagtgctcgggccgcctcggcggcgcggaaatgagccgctcggagttctaccgcgagggccgcgtcccgctgcacaccttgcgggcagatatcgactacggcctatacgaggccaagaccaccttcggccggatcggtgtgaaggtgtggatctacaagggtgacatcgtgggcggcaaacgtgaattggctgccgccgcgccagcgggcgccgaccgtccgcgccgtgagcggccgtcgggcacgcgcccccgtcacagcggtgcttcgggcaccacggcgaccggtaccgacgcgggtcgggccgcgggtggcgaagaggccgcgcctgacgccgcagcgcccgttgaagcgcagagcacggagagc

SEQ ID NO: 26213 - DNA, 591 bp, Mycobacterium bovis
atgactgcggctactaaggctaccgagtatccctcggcggtcgccaaggcccgatttgtgcgggtgtcgccaagaaaggcgcgccgggtgatcgatctggtgcgtggcaggtcggtgtcagacgcgctcgacatcctgcgctgggcgccgcaggccgccagcggtccggtggccaaagtgatcgccagtgcggcggccaacgcgcaaaacaacggcgggctggacccggcaaccttggtggtggccaccgtgtacgccgaccagggaccgaccgccaagcgcatccgtccgcgcgcccagggccgcgcgttccgcatccgccggcgcactagccacatcacggtggtggtggaaagccggccggccaaagatcaacggtcggcgaaatcgtcgcgggcccgccgcaccgaggccagcaaggccgccagcaaggtcggggctacggcgccggccaagaaagcggccgccaaagcgcccgccaagaaggcacccgccagttccggcgttaagaagacacccgcaaagaaagcgcccgccaagaaggcgcccgccaaggcttctgagacttctgcagcgaagggaggctcagac

SEQ ID NO: 26214 - DNA, 279 bp, Mycobacterium bovis
atgccacgcagcctgaagaagggcccgttcgtcgacgagcatctgctcaagaaggtcgatgtccagaacgagaagaacaccaagcaggtcatcaagacctggtcgcgtcggtcgaccatcattccggacttcatcggccatacctttgcggtgcacgacggccgcaagcacgtccccgtgttcgtcaccgaatcgatggtgggccacaaacttggtgagttcgcgccgacacgcaccttcaagggccacattaaagacgaccgaaagagcaagcggcga

SEQ ID NO: 26215 - DNA, 840 bp, Mycobacterium bovis
atggcaattcgcaagtacaagcccacgacgcctggtcgtcgcggcgccagcgtatctgatttcgccgagatcacccggtcaaccccggagaagtcgctggtgcgcccgctgcacggtcgcggtggacgcaacgcgcatggccggattaccacccggcacaaaggcggcggtcataagcgcgcttaccggatgatcgactttcgccgcaatgacaaagatggtgtcaacgccaaggtcgcgcacatcgagtacgacccgaaccgtaccgcacggattgcgttgctccactatctcgatggggagaagcgctacatcattgcacccaacggactttcgcaaggggatgtggtggaatccggcgctaacgccgacatcaagccgggcaacaacctgccattgcgcaacatcccggccggtaccttgatccacgccgtggagctccgcccgggaggtggcgctaagcttgcgcgctcggccgggtcgagcatccagctgctcggcaaggaggccagctacgcgtcgctgcgtatgcccagcggtgagatccgccgggtcgacgtccgctgccgcgcgaccgtcggcgaagtgggcaatgccgagcaggcaaacatcaactggggcaaggccggtcggatgcggtggaagggtaagcgcccgtcggtccggggcgtggtgatgaacccggtcgaccacccgcacggcggtggtgagggtaagacctccggcggccgtcacccggttagcccgtggggcaagcctgaggggcgtacccgcaatgcgaacaagtcgagcaacaagttcatcgtccgacgccggcgcaccggcaagaagcactcgcgt

SEQ ID NO: 26216 - DNA, 300 bp, Mycobacterium bovis
atggcgacgctcgctgacccccgcgacatcatcctggccccggtgatctcggagaaatcctatgggttgctggatgacaacgtgtacacgtttttggtgcgcccggattccaacaagacgcagatcaagatcgccgtcgagaagatttttgccgtcaaggtcgcatcggtgaacaccgcgaaccggcagggcaagcgtaaacgcacccggaccggatacggcaagcgcaagagcaccaagcgcgccatcgtcaccctggcgccgggcagcaggccgatcgacctgttcggggcaccggcc

SEQ ID NO: 26217 - DNA, 669 bp, Mycobacterium bovis
atggctgcgcaagagcagaagacactcaaaatcgacgtcaagacgccggcgggcaaggtcgacggcgctatcgagctgccggccgagctgttcgacgtcccggccaacatcgcgctgatgcaccaggtggtcaccgcccagcgggcggcggcacgccagggtacccactcgacgaagacgcgcggcgaggtcagtggcggtggccgcaagccctaccggcagaaggggaccggtcgtgcccggcagggctcgacgcgggcgccgcagttcaccggcggtggcgtggtacacggtcccaagccgcgcgactacagccagcgcacacccaagaagatgatcgccgcggcgctgcgcggggcgctgtccgaccgggcccgcaacgggcgtatccacgcgatcaccgagctagtggaaggtcaaaacccgtcgaccaagagcgccagggcatttctggccagcctgacagaacgtaaacaggtgctggtggtcatcgggcgcagcgacgaggccggcgcgaaaagcgtgcgcaatctgccgggcgtgcacatcctggcgccggaccagctcaacacctatgacgtgctgcgtgccgacgacgtggtgttcagcgttgaggcgctgaatgcctatatcgcggccaacaccacgacgtccgaggaggtttcggcc

SEQ ID NO: 26218 - DNA, 1119 bp, Mycobacterium bovis
atgacccgctccggcgatgaagcacagctcatgaccggcgtgaccggtgatttggcgggcaccgagctcggcctgactccgagcttgaccaagaacgctggggtgcccaccacggatcagccgcagaagggcaaggatttcaccagtgaccaggaggtgcgctggtgcccgggctgcggcgactacgtcatcctcaacaccatccgaaacttcctgcccgaactggggctgcggcgtgagaacatcgtgttcatcagcggtatcggatgctccagccggttcccctattacctggaaacctacggctttcattcgattcacggccgcgcgcccgcgatagcgaccggtctggcgctggctcgcgaggatctgtcggtatgggtggtcaccggcgacggtgacgccttgtcgatcggcggtaaccacctgatccacgcgctgcgccgcaacatcaacgtgacgattctgctgttcaacaaccggatctatgggctgaccaaaggacagtattcgccgacatcggaggtcggcaaggtcaccaagtcgacaccgatgggctcgctggatcacccgttcaatccggtgtcgttggcgctgggggcagaggcgacgttcgttggccgcgcgctggactcagaccgtaacgggctgaccgaagtgctgcgtgccgcggcccagcatcgcggtgctgccctggtcgaaatcctgcaggactgcccgatcttcaacgacggctcgttcgatgcgctgcgcaaggagggcgccgaggagcgggtcatcaaggtccgccacggcgagccgatcgtcttcggggccaacggcgaatactgcgtggtcaagtccggattcggcctcgaagtggccaagacggccgatgtggccatcgacgagatcattgtgcacgatgcgcaggtcgacgacccggcctacgccttcgcgctgtcccggctgtccgatcagaacctggaccacaccgtgctgggaatctttcggcacatcagccggccaacctacgatgatgcggcccgctcgcaggtagtcgcggcccgaaacgccgccccgtccggcaccgctgcactgcagtcactgttgcacgggcgcgacacttggaccgtcgac

SEQ ID NO: 26219 - DNA, 1254 bp, Mycobacterium bovis
atgtcgggcaccgttgtggcagtgccgccacgggtggcgcgtgcgctggacctgctgaatttctcgttggctgatgttcgcgacggtctgggcccctatctgtcgatatacctcctgttgatccacgattgggatcaagcctcgatcgggttcgtcatggcggtcggcggcattgcggccatcgtggcccagacgccgattggcgccctggtggaccggaccacggccaagcgggcgctggtcgtcgccggcgcggtgctggtcaccgccgccgcagtggcgatgccgctgtttgcgggcttgtattccatctcggtgctgcaggccgtcaccgggatcgccagctcggttttcgctccggcgttggcggcgatcacgttgggtgctgtcggtcctcagtttttcgccagacggattgggcgtaacgaagcgttcaaccacgccggtaacgcgtcggcggctggggcgaccggcgcgctggcgtacttcttcgggccggtggtggtgttctgggtgctggccggcatggcgttgatcagcgtgctggcgacactgcggatcccgccggacgcggtcgaccacgatttagcgcgtggtatggaccatgcgcccggcgagccgcatccgcagccgtcgcggttcaccgtgttggcgcacaaccgcgaactggtgatcttcggggcggcggttgtcgcgttccacttcgccaacgcggcgatgctgccgctggtcggcgagctgttggcgttgcacaatcgagacgaaggaacggcgctgatgtcgtcgtgcatcgtcgcggcgcaggtcgtgatggtgccggtggcgtatgtggtcgggaccagggccgacgcgtgggggcgaaagccgatctttttggtggggttcgctgtcttgaccgctcgcgggttcctctacacgttgtcggataactcctactggctggtgggcgtgcagttgctcgacggtatcggagccggcattttcggggcgttgtttccccttgtcgtacaggacgtcacacacggaacgggacatttcaatatcagcctcggggcggtaaccacggcaacgggcattggtgccgcgctgtctaatcttgttgccggctggatcgtggtcgtcgcgggctatgacgcggcattcatgtcgctgggtgcgctcgccggggccggcttcctcctgtacctggtcgcgatgccggaaaccgtggattcggatgtccgggtgcggtcgcggccaaccctcggggggaag

SEQ ID NO: 26220 - DNA, 1278 bp, Mycobacterium bovis
atggcgcgcataggagacggtggtgacctgctgaagtgctcgttctgcgggaagagccaaaaacaggtcaagaagctcattgccggccccggcgtgtacatctgcgatgagtgcatcgacctgtgtaacgagatcatcgaagaggaactcgccgacgccgacgatgtgaaactcgacgagctgcccaagccggccgagatccgggagttcctcgagggctacgtcatcgggcaagataccgccaaacgcacgctggccgtggcggtgtacaaccactacaagcggatccaggccggggagaagggccgtgactcccgatgtgagcccgttgagttgaccaagtcgaacatcttgatgctcggacccaccggttgtggcaagacctacctggcccagacgctggccaagatgcttaacgtgccgtttgccatcgccgacgccaccgcgctgaccgaggccggttacgtcggcgaggacgtcgagaacatcttgctcaaacttattcaggccgccgactacgacgtcaaacgcgccgagaccggcatcatctacatcgacgaggtcgacaagatcgcccgcaagagtgagaacccgtcgattactcgcgacgtctccggtgagggcgttcagcaggccttgctgaaaatcctggagggcactcaggcgtcggttccgccgcaggggggccgtaagcacccgcatcaagagttcatccagatcgacaccaccaacgtgctgttcatcgtcgcgggagcgttcgccgggctggagaagatcatttacgagcgcgtcggcaagcggggcctcggctttggcgccgaggttcgttccaaggccgagatcgacaccaccgaccactttgccgacgtgatgccggaggatctgatcaagttcggcctgatcccggaattcatcggccgcctgccggtggtcgcctcggtcaccaacctggacaaagagtcgttggtcaagatcctgtccgagccgaagaacgctttggtcaagcagtacatccggctgttcgagatggatggcgtggagttggagttcaccgacgatgcgctggaagcgatcgccgaccaggcgatccatcgcggcaccggtgcccgcggcctgcgggcgatcatggaagaagtcctgctgccggtgatgtacgacatcccgagccgcgacgatgtcgccaaagtggtggtcaccaaggagaccgtgcaggacaacgtgttgccgacaatcgtgccacgcaagccgtcccgttcggagcgccgcgacaagagcgcg

SEQ ID NO: 26221 - DNA, 1473 bp, Mycobacterium bovis
atgaccgcccccttggatcgtgcgccggtcacggatttgccggctaacaacaaaggccgagaccgcacccactggctgtatctcgcggtcattttcgcagtgatagccggtgtgatcgtggggctgacggcgccgtcgaccggaaaaagcctcacggtgctcgggacggtgttcgtcaacctgatcaagatgatgatcgcaccggtcatcttctgcacgatcgtgctcgggatcggctcggtgcgcaaagccgcggccgtgggcaaggtcggcgggctggctttggcctactttctaacgatgtcatcggtggcgctcgggatcgggttgatcgtcggcaacctactcagtccgggtagggatctgcaccttaggcctggtgcggtcggaagcggcgcagcattggccggccaggctgcggagtcacacggaatcgctgggttcatccagcagatcattccgaggtcgctcccctcagcccttactgaaggcaacgtgctgcaggtgttactcgtcgcgctgctggtcggtttcgcggtccaaggcctgggccccgcaggcgagtccatcctgcgtgccgtcgagaacctgcaaaagctggtgttcaaggtgctcgtgatggtactgtggctggctccgatcggcgcgttcggtgcgatcgccaatatcgtcgccacgactggcttcaacgccgtcaccaacctgctgctgctgatggccggcttctacctgacgtgcgtggtgttcgttttcggcgtcctgggagtgctactgcgcatcgtgtcgggtttgtcgatctttcggctgctgcgctatctagcccgcgagtacttgctgatcttcgcaacatcgtcgtcggaggtggtgctgcccagactgatcaccaagatgaaacacttgggcgtgcaatccagcacggtcggcgtggtggtgccgaccggctactcgttcaatcttgacggcaccgctatctatctgaccatggcgtcgctgttcatcgccgacgcgatgggacatcgcttgacatggggcgagcagatcgcgctgcttgcgttcatgatcatcgcgtccaagggcgctgccggggtcagcggtgcgggccttgcgacgctggccggcggcctgcaggctcatcgccccgagctgctggacggtgtcgggctgattgtggggatcgaccggttcatgtcggaagcccgttcgctcacgaacttctccggcaacgccgtcgcaaccatcctggttgcctcgtggacaaagaccattgacctgtccaaagccgacgaggtgttgcgcggtcgtgatcccttcgacgaatcgaccatggtcgatccccacgatgaggagccacccgccgccacaccccacgggggcggcgtcccgacgaaccctgcgctgtgcgatttcgagcaggtcagtctaggcggattggtgggccggccggccggcccgcaacgcgccgacgtggacggg

SEQ ID NO: 26222 - DNA, 2745 bp, Mycobacterium bovis
gtgctggatgcgctcaccgcgctcgacggacgggtccgcagcgcacattccacggtggatcgcgtcgatgcggtccgggtgcgcgatctgctggccactcatctcgagactgccggcgtgctggcggcctcggtccatgcgcccgaagcgtccgaggaacccgagtcccggctgatgctagagacccaggagactcggaatgccgacgtggagcggccgcactatatgccgctgttcgtcgcgccccagccgattcccgagccgttagcggacgacgaggacgtcgacgatggccccgactacgtcgccgacgattccgacgctgacgacgaagggcagctagaccggccggcgaaccggcggcgacgtcgcggccgtcggggtcgcggtcgcggacgcggggagcagggtggatccgacggtgatccggttgaccagcaatccgagccccgggcccaacaatttaccagcgcggacgccgccgaaaccgacgacggcgacgatcgagattccgaagataccgaagccggtgacaacggcgaggacgaaaacggttcgctggaggccggcaatcgtcgccggcgccgccggcgacggcgtaagtcggcttctggtgacgacaacgacgctgcgttagagggcccgttgcctgacgatccgcccaacactgtcgtacacgaacgcgtgccccgcgcgggtgacaaggccggcaactcgcaggatggcggctctggctccactgagatcaagggcatcgacggctcgacccgcctggaagccaagcggcaacgccgccgcgacgggcgcgacgccggccggcgccgcccaccggtgttgagtgaggccgagtttctggctcgccgtgaggcggtcgagcgggtgatggtggtgcgcgaccgggtccgcaccgagccaccgctgccgggcacgcggtacacccagattgcggtgctcgaagacggtatcgtcgtggagcatttcgtgacgtctgcggcctcggcttccctggtgggcaacatctacctgggaattgtgcagaacgtgctgccgtcgatggaggcggcgttcgtcgacatcgggcgcggtcgcaatggagtgctctacgccggtgaagtcaattgggatgcagcggggttgggcggggccgatcgcaagatcgagcaggccctcaaacccggcgactatgtcgtggtgcaggtcagcaaggacccggtagggcataagggcgcgcggctgaccacgcaggtgtcgctggccggtcgatttctggtttatgtgccgggcgcgtcgtcgaccgggatcagccgcaagctgcccgacactgaacgtcagcggctcaaggagatcctgcgcgaggtggtgccgtctgacgctggggtcatcatccgtaccgcgtctgagggcgtcaaagaggacgacattcgcgcagacgtcgctcggctacgggaacgctgggagcagatcgaggccaaggcacaagagaccaaggagaaggccgcgggcgctgcggtggcgctgtacgaagaaccggacgtgctggtcaaggttatccgtgacctgttcaacgaggacttcgtcggcctcatcgtttccggcgacgaggcttggaacacgatcaatgaatacgtgaattctgttgctcccgaattggtttcgaagttgaccaagtacgagtccgctgacgggccggatggccagtccgcgccggacgtcttcacggtgcaccgcattgacgagcagctggccaaagcgatggaccgcaaggtgtggttgccgtcgggcgggacgctggtgatcgaccggaccgaagccatgacggtcattgacgtcaacaccggtaaattcaccggagccgggggcaacctcgagcagacggtcaccaagaacaatctggaagcggccgaggagatcgtgcgccagctgcggctgcgcgatatcggcggcatcgtggtcatcgacttcatcgacatggtgctggagtccaaccgcgacttggtgttgcgccggttgaccgagtcgctggcccgcgatcgcacccgccaccaggtgtccgaggtgacgtcgctggggctggtgcagttgactcgcaagcggttgggaaccggactgatcgaagcgttctccacatcgtgtccgaactgcagtggccgcgggatcctgctgcacgccgacccggtcgattcggccgcggcgactgggcgaaagtctgagcccggtgctcggcggggcaagcgatcgaaaaagagccggtccgaagagtccagtgataggagcatggtcgccaaggtccccgtgcacgctcccggtgagcatcccatgttcaaggcgatggcagcgggcttgtcctcgctggctggtcgcggtgacgaggaatccggggagcccgctgccgaactcgccgagcaggccggcgatcaaccgcccactgacctcgacgacaccgcccaagcggacttcgaggacaccgaggacaccgacgaagacgaggacgagctcgacgccgacgaggacctcgaggacctcgacgacgaggacctcgacgaggatctcgacgttgaagactccgattccgacgacgaagactccgacgaagacgccgccgatgccgacgtcgacgaggaggatgcagccggcttggacggttccccgggcgaagtcgacgtccccggtgtcacggagctggcccctacccgtccacgtcggcgcgttgcgggccggccggccggcccaccaatccgcctagac

SEQ ID NO: 26223 - DNA, 2628 bp, Mycobacterium bovis
atgctgcccaagtcgtgggatccggccgcgatggagagcgccatctatcagaagtggctggacgctggctacttcaccgcggacccgaccagcaccaagccggcctattcgatcgtgctgccgccgccgaacgtgaccggcagcctgcacatgggccacgcgctggaacacaccatgatggacgccttgacgcggcgcaagcggatgcagggctatgaggtgctctggcagccgggcaccgaccatgccgggatcgccacccagagcgtggtcgagcagcagctggcggtcgacggcaagactaaagaagacctcggccgcgagctgttcgtggacaaggtgtgggattggaagcgagagtctggcggtgccatcggcggccagatgcgccgactcggtgacggggtggactggagccgcgaccggttcaccatggacgaaggtctgtcgcgggcggtgcgcacgatcttcaagcggctttatgacgccgggctgatctatcgggccgagcggctggtcaactggtcgccggtgctgcagaccgcgatctccgacctcgaggtcaactaccgcgacgtcgaaggcgagctggtgtcgtttaggtacggctcgcttgacgactcgcaaccccacatcgtggtcgccaccacccgggtcgagacgatgctgggcgataccgcgatcgccgtccatcccgatgacgagcgctaccgtcacctggtcggcaccagcctggcgcacccattcgtcgaccgggagctggccattgtcgccgacgagcacgtggaccctgaattcggcaccggcgcggtcaaagtcacacccgcccacgaccccaacgacttcgaaatcggggtgcgccaccagctgccgatgccctcgatcctggacaccaagggccggatcgtcgacaccggaacgcgattcgacggcatggaccgcttcgaggcacgggtcgcggtgcgccaagcgctcgcggcccagggccgcgtggtcgaagaaaagcgaccctacctgcacagcgtcggacactccgaacgcagcggcgagccgatcgagccgcggctatccctgcagtggtgggtccgggtggaatcgctggccaaagcggccggggatgcggtgcgcaacggggacaccgtgattcacccggccagcatggaaccccgctggttctcctgggtcgacgacatgcacgactggtgcatctcgcgacagctctggtgggggcatcggatcccgatctggtacggacccgacggcgaacaggtgtgcgtcggcccggacgaaacacccccgcagggctgggaacaggatcctgacgtgctggatacctggttttcgtcggcgctgtggccgttttccacgctgggttggccggacaagacggcggagctggaaaagttctatccgacaagcgttctggttaccggctatgacatcttgttcttttgggtggccagaatgatgatgttcggcaccttcgtcggcgacgacgccgccatcaccctcgacggccgccggggcccgcaggtgccgttcaccgacgtgtttctgcatgggctgatccgcgacgagtctggccgcaagatgagcaagtccaagggcaacgtcatcgacccgctggattgggtggaaatgttcggggccgatgcgctgcggttcacgctggcccgcggggccagtcccggtggtgacttggcggtgagcgaggatgccgtgcgggcgtcgcgcaatttcgggaccaagctgttcaacgccactcggtacgcactgctcaatggcgccgcgccagcacccctgccatcgccgaacgagctgaccgacgccgaccgctggattctcggaaggttggaagaggttcgggccgaagttgattcggccttcgacggatacgagttcagccgcgcttgtgagtccctgtatcacttcgcctgggacgaattctgcgactggtacctcgaactggccaaaacgcagcttgcccagggactcacacacaccaccgccgtgctggccgccgggctggacacgctgctgcgcctgctgcacccggtgattcccttcctcaccgaggcgctatggctggcgctgaccggcagggaatcgctggtcagcgccgactggccggagccttccgggattagcgtggaccttgttgccgcgcaacggattaacgatatgcagaagttggtgaccgaagtgcggcggttccgcagcgatcaaggtctggccgaccggcagaaggttccggcccgaatgcacggtgtgcgggactcggatctgagcaaccaggtggccgccgtgacctcgctggcgtggctcaccgagccgggcccggattttgagccgtcggtctcgttggaggttcggctcggccccgagatgaaccgcaccgtcgtcgtcgagctcgacacctcgggcaccatcgacgtggccgccgagcgtcgccgcctggaaaaggagttggccggcgcccaaaaggagctggcgtcgaccgccgccaagttggccaacgcggactttctggccaaagcgcccgacgccgtcattgccaagatccgggaccgccagcgcgtggcgcagcaggaaaccgagcgcatcaccacccggttggctgcgctgcaa

SEQ ID NO: 26224 - DNA, 702 bp, Mycobacterium bovis
atgagtcgcgccgccttggacaaggatccccgcgacgtggcgtcgatgttcgatggcgtcgcccgcaagtatgacctgaccaataccgtgttgtccctgggccaggaccggtattggcggcgagccactcggtcggcgctgcggatcgggcccggccaaaaggtcctggacctggccgcgggcaccgccgtgtccaccgtagagctcaccaaatcgggcgcgtggtgtgtggctgccgatttttcggtcggcatgcttgcggcgggcgctgcgcgcaaggttcccaaggtcgccggtgacgccacccggctgccgtttggtgacgacgtgttcgatgcggtcaccatcagtttcgggctgcgtaacgtcgcaaaccagcaagcggcgctgcgggaaatggctcgtgtcacccggccgggcgggcggctactagtgtgcgaattctccacgcccaccaatgcgttgttcgccaccgcctacaaggaatacttgatgcgggcgctgccccgggtggcgcgggcggtgtctagcaaccccgaggcctacgagtacctcgcggagtcgatcagggcctggcccgaccaggcggtgctggcgcaccagatttcgcgggccgggtggtcgggggtgcggtggcgcaacctgaccggcggcatcgtagctctgcatgccggatacaaacccggcaaacaaaccccgcag

SEQ ID NO: 26225 - DNA, 637 bp, Mycobacterium bovis
atggccaatccgttcgttaaagcctggaagtacctcatggcgctgttcagctcgaagatcgacgagcatgccgaccccaaggtgcagattcaacaggccattgaggaagcacagcgcacccaccaagcgctgactcaacaggcggcgcaagtgatcggtaaccagcgtcaattggagatgcgactcaaccgacagctggcggacatcgaaaagcttcaggtcaatgtgcgccaagccctgacgctggccgaccaggccaccgccgccggagacgctgccaaggccaccgaatacaacaacgccgccgaggcgttcgcagcccagctggtgaccgccgagcagagcgtcgaagacctcaagacgctgcatgaccaggcgcttagcgccgcagctcaggccaagaaggccgtcgaacgaaatgcgatggtgctgcagcagaagatcgccgagcgaacccagctgctcagccagctcgagcaggcgaagatgcaggagcaggtcagcgcatcgttgcggtcgatgagtgagctcgccgcgccaggcaacacgccgagcctcgacgaggtgcgcgacaagatcgagcgtcgctacgccaacgcgatcggtttcggctgaaattgccgagatttcggtgccg

SEQ ID NO: 26226 - DNA, 918 bp, Mycobacterium bovis
atgcacgagcacgtcttcatcatgaccaccgagattgcgcagaactacccggaagcctggggcgacgaggacaagcgggtggccggcgccatcgcccggctaggcgaactcaaggcccgcggcgtggacaccatcgtcgacctcacggtgatcgggctgggccgatacatcccgcgcatcgcccgggtggccgcggccaccgagctgaacatcgtcgtggccaccggcttgtacacctacaacgacgtcccgttctacttccactacctcgggccgggcgcacagctggacggcccggagatcatgaccgacatgttcgtccgcgacatcgagcacggcatcgccgacaccggcatcaaggcgggaatcctcaagtgcgccaccgacgaacccggcctcacccctggtgtcgagcgggtgttgcgcgcggtcgcccaagcacacaaacgcaccggggcgccgatctccacccacacccacgccgggctgcggcgcggccttgaccagcaacgcatcttcgccgaggagggggtggaactgagccgggtggttatcggacactgcggcgacagcaccgacgtcggctacctggaagagctcatcgccgccggctcctacctcgggatggaccggttcggcgtcgacgtgatctcaccgtttcaggaccgggtgaacatcgtggcccgaatgtgcgagcgcggccatgccgacaagatggtgctatcacacgacgcctgctgctatttcgacgcgcttcccgaggagctggtgccggtggcgatgccgaattggcattacctccacatccacaacgacgtcatccccgcactgaagcagcacggcgtcaccgacgagcagctgcacaccatgctcgtcgacaacccgcgccgcatcttcgagcggcagggcggctatcag

SEQ ID NO: 26227 - DNA, 777 bp, Mycobacterium bovis
ttgttcctcggttggttggcgctgagctgggaggatggcctcaatgcccttgttgcggaagggattgaggccatcgtgtttcgtactgtaggcgatcaggcatcgttgtgggaatccgtgctgcccgaggagttgcggcggctgcccgaagagctggcccgggtggatgcgctgctcgatgattcggcgttcttctgcccgtttgtgccgttcttcgacccgcggatgggtcggccgtccataccgatggagacctatttgcggttgatgttcttgaagttccgttaccggttgggctatgagtcgctgtgtcgggaggtcaccgattcgatcacctggcggcggttctgccgtattccgttggagggatcggtgccgcacccaaccacgttgatgaagctgaccacgcgctgcggtgaggatgcggtggccgggctcaatgaggcgctgctggccaaggcggccagcgaaaagctgttgcgcaccaacaaggtccgtgccgacaccaccgtggtggagggcgatgtgggctatcccaccgacactggactgctcgccaaggcggtcggctcgatggcgcgcaccgtggcgcggatcaaagccgcggacgcgggatcggcgccgctcggtgggtcgtcgggcccgcgcgatcgcctccaagctgcggttacgcggcgcgcagcaacgcgatcaggcgcaggccttcgtgcgccggatcaccggggagctagccgggatcgccgagcaggcgctgaccgaggctgccgcggtggtacg

SEQ ID NO: 26228 - DNA, 927 bp, Mycobacterium bovis
atgcgcgagccgttggcgacgatggcgggatatcaccttggctggtggaacgccgatcgatccacagcggcaggatcgtcgggcaagtattttcgcgccgcccttgtctacgcggcggccgcggcttgcggtggtgatgtcggtgatgctactccggtgtcggcggctgtggagttggtgcacaacttcacgttgttgcatgacgatgtgatggatggggatgcgactcgcaggggacggccgacggtatggagtgtgtggggtgtgggcggcgcgatcctgttgggagatgcgttgcacgccacggccgttcggatactgaccggcctgaccgacgagtgtgtggcggtcagggcgataaggcgattgcagatgtcgtgcctggacttgtgtatcggccagtttgaggattgtttattggagggacagcccgaagttacagtcgatgactatctgcggatggccgcgggcaagacggccgccctgaccggttgttgttgcgctctgggagctttagtggccaatgcagacgacgcgacgattgctgcgttggagcgttttggccatgagttgggtcttgcgtttcaatgcgtcgacgatctgatcggcatctggggtgaccctggtgtgacgggaaagccggtcggcaacgaccttgcccgacgtaaggcgacactgccagttgttgccgccctgaactcgcgatccgaagcggcgaccgaattggcggccctctatcaagcacctgccgcaatgacagcaagcgatgtcgagcgggctaccgcgcttgtcaaggtggccgggggtggtcatgtggcgcagcgatgcgccgatgaacgcatccaggctgctattgcggcactgcccgatgcggtgcgatccccagacctgatcgcgttgtcgcaactgatatgtcgccgggagtgc

SEQ ID NO: 26229 - DNA, 1110 bp, Mycobacterium bovis
atggtggatctgggcgctattgaacacaacgtgcgggtgctgcgtgagcacgccggccacgcgcagctgatggcggtggtcaaggccgacggctacggtcacggtgctacgcgcgtcgcccaaaccgccctgggagccggtgcggccgaactcggcgtcgccaccgtcgacgaggcgctagcgctgcgcgctgatggcattaccgcaccggtgctggcctggctgcatccgcccggcatcgacttcgggcccgcgctgctggccgacgtgcaggtcgcggtgtcctcgctgcgccaactcgacgaactgttgcacgcggtgcgccggaccggccggacggcgacggtgaccgtcaaggtggataccgggctgaaccgcaatggcgtgggaccggcacaattcccggccatgctgaccgcgttacgccaagccatggccgaggacgccgtccggctgcgggggctgatgtcgcatatggtttacgccgacaagcctgacgattccatcaacgatgttcaggcccaacggtttaccgcctttctggcgcaggcccgcgaacaaggggtgcggttcgaggtggcgcatctatcgaactcatcagcaactatggcgcgccccgacctgacgttcgacctggtgcggccgggcatcgcggtgtatgggctaagcccggtacccgccctcggtgacatggggctggtgccggcgatgaccgtgaaatgtgctgttgcgctggtgaaatcgattcgtgcgggggagggcgtgtcgtatgggcacacatggatcgcgccacgcgacaccaatctggcgctgctgccgatcggttacgcagacggcgtgttccggtcgctgggcgggcggctggaggtgctgatcaacggcagacgatgccccggtgtggggcggatctgcatggaccagttcatggtcgacctgggccccgggccgcttgatgtggccgaaggcgacgaggcgattttgttcgggccgggcatccggggtgagcccacggctcaggactgggccgatcttgtcggcaccatccactacgaagtggtcaccagcccgcgaggacgtatcaccaggacctatcgcgaggctgaaaaccgt

SEQ ID NO: 26230 - DNA, 1032 bp, Mycobacterium bovis
atgacgacagtcttgggcatcgaaacctcctgcgatgaaaccggtgtcggcatcgcgcggctcgatcccgatggcaccgtgacattgttggccgacgaggtggcttccagtgtcgacgagcatgttcggttcggcggcgtggtccccgagattgcctcccgtgcgcacctggaggcactgggtcccgcgatgcgccgcgcgctggcggccgccggcttgaaacagccagacattgtcgcggccaccatcggtcccgggctcgcgggcgccctgttggtgggagtggctgcggccaaggcatattcggctgcttggggggtgccgttctatgcggtgaatcatctgggcgggcacttggccgccgacgtctacgaacacgggccgctgcccgagtgtgtggcgttgttggtgtccggaggacatacccacctgttgcacgttcgctcgctcggtgagccgatcatcgagctgggcagcaccgtcgacgacgccgccggcgaggcctacgacaaggtggcccggttgctgggattgggctatccgggtggcaaggcgctcgacgacctggcgcgcaccggtgatcgggacgccatcgttttcccgcgcggcatgagtggcccggccgatgaccgctatgcgttcagcttctccgggctcaagacggccgtcgcgcggtatgtggaaagccacgcggctgacccgggcttccgtaccgccgacattgccgccggattccaggaggccgtcgcggacgtgttgaccatgaaggcggtacgggccgccactgcgctaggcgtctcaacgctgctgatcgcggggggagtggcggcgaactcccggctgcgagagctggccacacagcgctgcggcgaggcgggccggacgttgcggatccccagtccccggctatgcaccgacaacggggcgatgatcgcggcgttcgccgcgcagctggtggccgcgggagcgccgccgtcgccgctggacgtgcccagtgacccgggtctgcccgtgatgcaggggcaggtgcgg

SEQ ID NO: 26231 - DNA, 585 bp, Mycobacterium bovis
atgctcgtcggtaagctgctcggttggcgtgcggtacgccgggacctcgggtcaatgtcggtcgccgagaccaacccgccgttcacgcctgaccggcgcccggggcaccccgggatccacccgagagaaaagaaggtaagcgctgtgcccacgtacgcgcccaaggcgggtgacaccacgcgatcgtggtacgtcatcgacgccacggacgtggtgcttggccgccttgccgtcgcggcggccaacctgctgcgcggcaagcacaagccgacgttcgcccccaatgtcgatggcggtgacttcgtcatcgtgatcaacgccgacaaggtcgccatcagcggcgacaaactgcagcacaagatggtttaccggcactcggggtatcccggcggcctgcacaagcgcaccatcggtgagctaatgcaacgccaccccgaccgcgtggtggaaaaggcgatcctcggcatgttgcccaagaacaggctcagccgccagatccagcgcaagcttcgcgtctacgccggcccggagcatccgcacagcgctcagcagccggttccgtacgagctcaagcaggtggcgcaa

SEQ ID NO: 26232 - DNA, 453 bp, Mycobacterium bovis
atgaccgaaaccaccccagccccgcaaaccccggcggccccggccgggcccgcacaatcgttcgtgttggagcggcccatccagaccgttgggcgccgtaaggaggccgtggtacgagtgcggctggtgcccggcaccggcaagttcgacctcaacggccgcagcttggaggactacttcccaaacaaggtgcaccagcagttgatcaaggcacccctggtcaccgtggatcgggtggaaagtttcgacatctttgcccacctgggcggcggcggcccgtcgggtcaggccggcgcgctgcgcctgggtatcgcccgggcattgattctggtatcgccggaggaccggcccgcgctgaagaaggccggcttcttgacccgtgatccacgcgccaccgagcgcaagaagtacggcctgaagaaggcccgcaaggcgccccagtacagcaagcgc

SEQ ID NO: 26233 - DNA, 1344 bp, Mycobacterium bovis
atgggtcgactgtttggcaccgatggtgtgcgcggtgtcgccaatcgcgagttgaccgcggaactggccctggcactgggcgccgcggcggcgcgacgattgtcgaggtcgggcgcaccgggtcggcgagtcgcggtgcttggccgcgatccgcgggccagcggcgagatgctggaggccgccgtgatcgccggcctgaccagtgagggcgtcgacgcgctgcgggtcggggtgttgccgacccccgcggtggcctatctgaccggcgcctacgacgccgacttcggggtgatgatctcggcgtcgcataacccgatgcccgataacggcatcaaaatcttcgggcccggcggccacaaattagatgacgacaccgaggatcagatcgaggatctggtcctcggcgtctcccgcggacccgggttgcggccggccggcgcggggattggccgcgttatcgacgccgaggatgcgaccgaacgctacctgcgccacgtggccaaggccgccaccgcccggctcgatgacctggccgtggtggtcgactgcgctcatggggccgcgtcgtcggcggctccgcgcgcctaccgagcggccggtgcccgggttatcgcgatcaacgccgaacccaacggacgcaacatcaacgacggctgtggatcgactcaccttgacccgctgcgggcagcggtgctcgcccatcgggccgacctgggcctggcccatgatggagacgccgatcggtgcctggccgtcgacgccaacggtgacctcgtcgacggtgacgccatcatggtggtgctggcgctggcaatgaaagaggccggtgagttggcctgcaacacattggtggccaccgtgatgagtaacctcgggctgcacctagccatgcgctcggccggcgtcaccgtgcgtacaaccgccgtcggtgaccgctacgtcctcgaagagctgcgggccggtgactacagcctcggaggcgaacaatccggccacatcgtcatgccggcgctgggctccaccggtgacggcatcgtcaccgggctgcggttgatgacccgcatggtgcagaccggctcgtcgttgtccgacctggcgtcggcgatgcggacgttgccgcaggtgctgatcaacgtcgaggttgtcgacaaggccaccgccgccgcggcgccctcggtccgaacggcggtcgagcaggccgcggccgagctgggtgacacgggtcgaatcctcttgcgcccgtccggaactgagccgatgattcgggtgatggtggaggcagccgacgagggcgtcgcccagcggctggcggccacggtcgccgacgcggtgagcaccgcgcgc

SEQ ID NO: 26234 - DNA, 1821 bp, Mycobacterium bovis
atggacgcgctgcgccggatggagtaccgcggctacgactcgtcgggcatcgcgctggtcgacggtggcacactcaccgtgcgccggcgtgcgggccggctggccaacctcgaggaagccgtggcggaaatgccgtccacggcgctgtccggtactaccggcctgggccacacccgctgggccacccacggtcgtcccaccgaccgcaacgcgcacccgcaccgcgacgctgccggcaagatcgccgtcgtccacaacggcatcatcgagaacttcgccgtcttgcgccgggagctggagactgccggtgtcgagtttgccagcgacaccgataccgaggtcgcggcgcacctggtggcgcgggcgtatcggcacggcgagacggccgatgacttcgtcggctccgtacttgccgtgctgcgccggcttgaggggcatttcacgctcgtgttcgccaatgccgacgaccccggcaccctcgtggcggcccgccgttccacgcccctggtgctgggcatcggcgacaacgagatgttcgtcggttccgacgtggccgcgtttatcgagcacacccgggaagcggtcgagctcggccaggaccaggcggtggtgatcaccgccgacggctaccggatcagcgatttcgacggcaacgatggcctacaagctgggcgcgatttccgccccttccacatcgactgggatctggctgccgccgaaaagggcggctacgagtacttcatgctcaaggagatcgccgagcagcccgccgcggtggccgacaccttgctcggacacttcgtgggtggccggatcgtgctcgacgagcagcggttgagcgaccaggaactgcgcgagatcgacaaggtgttcgtggtggcctgcggtaccgcatatcactccgggctgctggccaagtacgcgatcgagcactggacgcggctgcccgtggaagtggaactcgccagcgagtttcggtatcgggatccggtgttggaccgtagcaccttggtggtggcgatctcgcagtccggggaaaccgccgacacgctggaagcggtccgacacgccaaggagcagaaagccaaggtgctggcgatctgcaacaccaacggctcgcagatcccgcgcgagtgcgacgcggtgctctacacccgcgccggcccggagatcggtgtggcgtccacaaaaacgtttctggcgcagattgctgccaactatctgctcggccttgccttggcgcaggcccgcggcaccaaataccccgacgaggtcgagcgcgagtaccacgaactggaagcgatgccggacctggtggcccgggtgatcgcggcgaccggaccggtggccgagctggcccaccggttcgcccagtcgtcgaccgtgctgttcctgggtcgccatgtcggctatccggtggcgctggagggtgcactcaaactcaaggagttggcctacatgcacgccgagggtttcgcggccggcgagctcaagcacggcccgatcgcgctgatcgaagacggcctaccggtcatcgtcgtcatgccctcacccaaggggtcggccacgctgcacgccaagctgctgtccaacatccgtgaaatccagacccgcggtgcggtgaccatcgtgatcgccgaggagggcgacgaaacggtgcgcccctacgccgatcacctgatcgaaatcccagcggtgtcaacgctattgcagccgctgctatcaaccattccgcttcaggtgttcgcggcttcggtggcgcgcgcccgcggctacgatgtcgacaagccgcggaatctggccaagtccgtcaccgtcgaa

SEQ ID NO: 26235 - DNA, 819 bp, Mycobacterium bovis
atgaacctgcgtgccgccggtccggggtggctgttctgccctgccgatcgtccggaacgctttgcgaaggctgccgccgcggccgacgtggtgattctcgacctcgaggacggcgtggccgaggcgcagaagcctgccgcgcgcaatgcgttgcgggacaccccgctggacccggaacgcacggtggtgcgtatcaatgcgggcggtactgctgatcaggcccgcgatctggaggccctcgcaggcaccgcctataccacggtgatgctgcccaaggccgaatcggcggcccaagtcatcgagcttgcgccgcgtgatgtcatcgcgctggtggagaccgcgcgcggtgccgtgtgcgccgccgaaatcgccgcggccgatcccaccgtgggaatgatgtggggtgccgaagacttgatcgccacccttggcggcagctcgagccggcgggccgacggtgcctatcgtgacgtggcccgacatgtccgctcgaccatcctgctcgccgcgtccgcgttcggccgtctcgcgctcgatgccgtacatctggatatcctcgatgtcgagggcttgcaggaagaggccagagacgccgcggcggtgggctttgacgtgaccgtgtgcattcacccgagtcagatcccggtggtgcgcaaggcctatcgacccagccacgagaagctggcctgggctcggcgggttttggccgcgtcgcgaagcgagcgtggggcgttcgcgttcgaaggccagatggtcgactctccagtgctcacgcacgcggaaacgatgttgcggcgagccggggaagccacctccgaa

SEQ ID NO: 26236 - DNA, 1962 bp, Mycobacterium bovis
atgtttgacaccgtactagtggccaaccgcggtgagatcgcggttcgggtgattcggacgctgcgccggctaggcatccggtcggtcgcggtctacagcgaccccgacgtcgatgcccgccacgtcttggaggcggacgctgcggtgcggctggggcccgccccagcacgcgaaagctacctcgatatcggcaaggtgctcgatgctgcggcgcgcaccggagcccaggcgatccatccgggctacgggtttcttgccgagaatgccgatttcgctgcggcgtgtgaacgcgcccgggtggtgttcctgggtccgccggcgcgcgcgatcgaggtgatgggcgacaagatcgccgccaagaacgcggtcgccgctttcgatgttccggtggtgcccggtgtggcgcgcgccgggctgacggacgacgcgctggtcaccgctgccgctgaggtgggctatccggtgctgatcaaaccgtcggccggcggcggcggcaaagggatgcggttagtgcaagatccggcgcggctgcctgaggcgctggtgagtgcccggcgcgaagccatgtcttcgttcggggacgatacgctattcctggagcggtttgtgttgcggcccaggcacatcgaagtgcaggtgcttgccgacgctcacggcaacgtggtgcatctgggtgagcgtgagtgcagcctccagcggcgccaccagaaggttatcgaggaggcgccgtcgccactgcttgacccgcagacccgcgagcgcatcggggtcgcggcctgcaacaccgcccgctgcgtggactacgtcggcgccggcacggtggagttcatcgtctccgcgcagcgccccgacgagttctttttcatggagatgaatacccggctgcaggtggaacacccggtcaccgaggcgattactggattggacctggtcgagtggcagttgcgggtgggtgcgggcgaaaagttgggcttcgcccaaaacgacatcgagctgcgtgggcacgcgatcgaggctcgggtgtatgcggaggatcccgcgcgggaattcctgcccaccggcggccgggtgctggcggtgttcgaacccgccggccccggggtgcgggtggattcgtcactgctaggcggcacggtggtcggcagtgattacgacccgttgctcaccaaggtgattgcgcacggggccgatcgcgaggaagcgctggatcggctggaccaggcgctggcgcggactgcggtgctgggagtgcagaccaatgtcgagttccttcgctttctgctcgccgacgagcgggtgcgggtcggggatttggacaccgctgtactggacgagcgatcggccgatttcactgcgcggccggcgcctgacgacgtgctagctgccggcggcctctaccgccagtgggccctggcccggcgcgcacagggcgacctgtgggccgcgccgtccggatggcgcggcgggggccatatggcaccggtccgcaccgccatgcgcaccccgctgcgcagcgagaccgtttcggtgtgggggccacccgagtcggcgcaggttcaggttggcgatggtgagatcgattgtgcgagcgtgcaggtcacccgagaacagatgagcgtgacgataagcgggctgcgccgggattatcggtgggcagaggctgaccggcacctgtggatcgccgacgagcgcgggacttggcacctgcgcgaggccgaggagcacaagattcaccgcgccgtgggtgcgcggccggcggaggtcgtcagccctatgcctggcagcgtgatcgccgtgcaggtcgagtccggctcccagatctctgcgggtgatgtggtggtggtggtggaagcgatgaagatggagcactcgctggaggcgccggtttcgggacgggtacaggtgttggtgtccgttggcgatcaggtgaaagtcgaacaggtactggcgaggatcaaggac

SEQ ID NO: 26237 - DNA, 1587 bp, Mycobacterium bovis
gtgaccaccccgtcgatagcaatagccccctcgttcgccgacgagcaccgccggctggtggcggaattgaacaataagctcgccgccgccgccctgggcggcaacgaacgcgcccggaaacgccacgtcagccgcggcaagctgttgccccgcgaacgggtggaccgcctgctcgacccgggcagccctttcctcgagctggctccgctggccgctggcggcatgtacagcgacgaatccccgggcgcgggaatcatcaccgggatcggccgggtatccggacgccagtgcgtgatcgtcgccaacgacgcgacggtcaagggcggtacctactacccgatgacggtcaagaagcacctgcgcgcccaggaggtcgcgctgcagaatatgctgccgtgcatctatctggtcgactccggcggcgccttcctgccccgccaagacgaggtgtttcccgaccgcgagcatttcgggcggatcttctacaaccaggcgacgatgagcgccaagggcattccgcaggtggcggcggttctcggctcctgcacggcgggtggcgcttatgtgccggcgatgagtgacgaggccgtcatcgtccgtgagcagggcacgatcttcctcggcggtccgccactggtgaaggcggccaccggcgagatcgtctcggccgaggaacttggcggtggcgacttgcactcgcgcacgtccggtgtcaccgaccatctggctgacgacgacgaggacgcgctgcggatcgtgcgcgcgatcgcggacaccttcggcccgtgcgaacccgcccaatgggatgtgcgccgttcggtcgagcccaagtacccgcaggccgagctctacgatgtggtgcccccggatccccgggtcccttacgacgttcatgaggtcgtcgtgcggattgttgacggcagcgaattcagcgagttcaaggctaaatacggcaagactctggtgactgcgtttgcacgcgtccacggccacccggtcgggatcgtcgccaacaacggcgtgttgttaagcgaatccgcgctcaagggagcgcatttcatcgagctgtgcgacaaacgcaagattccgctgctgttcctgcagaacatcgccggcttcatggtcggccgcgactacgaggccggcggaatcgccaagcatggcgccaagatggtcaccgcggtggcctgcgcgcgggtgcccaagttgaccgtggtgatcggcggatcctatggtgcgggtaactattcgatgtgcggacgcgcgtactcgccccggttcctgtggatgtggccgaacgcgcggatctcggtgatgggcggtgagcaggccgcgtccgtgttggcgaccgtgcgcggcgagcagctgtccgcggccggcacaccctggtcacccgacgaggaggaagcgttcaaggcgcccatccgagcgcagtacgaagaccagggtaacccctactattcaactgcccggctgtgggatgacggtatcatagaccctgcggacaccagaacggttgttgggcttgccctttcgttgtgtgcccacgctccgctggatcaggttggctacggcgtcttccggatg

SEQ ID NO: 26238 - DNA, 1641 bp, Mycobacterium bovis
gtggcagccgcggaagtcgtagaccccaatcggctttcctatgatcgcggtccgagtgcgccatcattgctcgagtcgaccatcggcgccaacctcgcagcgaccgctgccaggtacggacatcgggaagcactcgtggacatggtggcccggcgacggttcaattacagcgaactgctgactgacgtgcaccggctggcgacggggctggtgcgggcggggatcggcccgggcgatcgggtcggcatctgggcaccgaaccggtgggagtgggtgctcgtccagtacgcgaccgctgagatcggcgcgatcctagtgaccataaaccccgcctatcgggtccgcgaagtggagtatgcgcttaggcagtccggtgtcgcgatggtgattgccgtagcgagtttcaaggatgcggactatgccgcgatgctggccgaggttgggccgcgatgccccgatctggccgacgtgattttgctggaaagcgatcgctgggacgcgctggcgggtgccgagcccgatctgcctgcgctgcagcagaccgcggcgaggctagacggcagtgatccggtaaacatccaatacacctccggcacaacggcatacccgaagggtgtcacgctaagccaccgcaatatcctcaacaacggctacctggtgggcgagctgctcgggtacaccgcacaagatcggatttgcatcccggtgcccttctaccactgcttcggcatggtaatgggaaatctggcggccaccagtcacggggcggccatggtgatcccggcgccgggctttgaccctgcggccacgctgcgcgcggtgcaggacgagcgatgcaccagcttgtacggcgtgccgacgatgttcatcgccgagctgggcctgccggacttcaccgactacgaactgggcagtctgcgcaccgggattatggccggcgccgcgtgcccggtcgaggtgatgcgcaaggtgatctcacgcatgcatatgcccggggtctcgatctgctatggaatgaccgaaacgtcaccggtttccacgcagacgcgcgccgacgactcggtggatcgacgggtcggcacggtcggtcgggtgggtccacaccttgagatcaaggtggtggatccggccacgggcgagacggtcccgcgcggggtggtcggcgagttctgcacgcgaggctattcggtgatggccgggtactggaatgacccgcagaagactgcggaggtgatcgacgccgacggctggatgcacaccggagatctggctgagatggacccgtccgggtacgtgcggatcgccggccggatcaaagacctcgtcgtccggggcggcgagaacatctcgccgcgggagatcgaggaactcctccacacgcatcccgatattgtcgacggtcacgtcatcggggtgcccgacgccaaatacggcgaagagctcatggcggtggtcaagctgagaaacgacgcgccggaactgaccatcgagcggctgcgcgagtactgcatgggccgcatcgcgcgattcaagatcccgcggtacctgtggatcgtcgacgagttcccgatgaccgtcaccggcaaagtacgcaaagtggagatgcgacaacaggcgctcgaatacctccgcggccaacag

SEQ ID NO: 26239 - DNA, 957 bp, Mycobacterium bovis
atgtcatatgtgatcgcgacgccggagatgatggcaactgcggcttttgatctggcgcgtattggttcgcaggtgagcgcggctagtgcggtcgcggcgatgccgacgacggaagtggtggccgccggcgccgacgaggtgtcggcgggcatcgcggcgttgttcagcgcgcacgctcaggagtatcaggcgctaagtgcgcaggccgcggcgtttcacgaccagttcgtgcacacgctgaccgcggccgcgaggtggtacacggccaccgagatcgccaacgccgcggcgatgcgagtcgtgctcggagccgtgaatgcgcccacccagacgctactgggacgcccgctgatcggcgatggtgcgcacgggacagcgcctgggcagcccggtggggccggtggattgttgttcggcaatggcggcaacggcgctgccggtgccgtcgggcaggtgggcggcgccggcggggcggccgggttatttgggatcggcggcgccggtggcgcgggcggggcgggcgcacccggaggtaccggcgggacgggtggatggctggcgggtgggggcggcgtcggcggtatgggtggggctggtggtggcgccggcggggcgggtggcaacgcgggcctgttcggcaacggcggcgccggtggtgccggtggggctggtggtggcgccggcggcgcgggcggtaacgcggggtggtttggtcatgggggcgctggcggcgtgggtggtgtaggtgcggccggggccaacggtgctacgcccggtcaggatggggcggctggtgttgccgggtcggacgacggtgccggcggtgacggtttggcagggtcggacgggggcgatggcggtgccggtggggtgggcggcaacggtggtcggggagggtggcttctcggtaacggcggcgccggtggcgttggcggtgtcggcggggccgggggtgcc

SEQ ID NO: 26240 - DNA, 1044 bp, Mycobacterium bovis
atgactcaaatcgcagaccgtccggccaggccggatgagacgcttgcggtagcggtgagcgacatcacgcagtcgttgaccatggtccaggcgatcaaccgcgccctgtacgacgcgatggccgccgacgagcgggtattggtgtttggcgaggatgtcgcggtcgagggtggggtgtttcgggtgaccgagggactggccgatacgttcggtgcagaccggtgcttcgacacgccactggcggagtccgcgatcatcggaatagccgtcgggttggcactacgtggctttgtgccggtgccagaaatccagttcgacggcttttcctatccggctttcgaccaagtggtgagccatctggccaagtaccggactcgcacccgcggtgaggtggacatgccggtgaccgtccggatcccctcgtttggcggtatcggtgcggccgaacatcattcggactccacggagtcctactgggtgcacaccgcgggcctcaaggtggtggtgccgtcgacacccggtgacgcttactggctgctgcggcacgctatcgcctgcccggaccccgtgatgtatctggagcccaaacgccgctaccacagccgcgggatggtcgacactagccggccggaaccgccgatcgggcacgcgatggtgcgccggtccggcaccgatgtgaccgtggtaacgtacggaaacctggtgagcaccgccctgtctagcgcggatactgcagagcagcaacatgattggagtctggaggttatcgatctgcggtcgttggcgccgctggacttcgacaccattgctgcgtcgatccagcgcaccgggcgttgcgtggtgatgcacgaagggccgcgcagcctcggctatggtgccggtctggccgcgcgcatccaggaagagatgttctaccaattggaggctccggtgttgcgtgcctgcggttttgacacaccctacccgcctgcgcggttggaaaaattgtggttacccggccccgaccggctgttggactgcgtcgaacgtgtgctgcgtcagcca

SEQ ID NO: 26241 - DNA, 1071 bp, Mycobacterium bovis
atgttgatgtctgtcgatcttgagccggtgcaactcgtcggcccggacggtacgccgacggccgaacgccgctaccaccgtgaccttcctgaggaaacgctgcgttggctctacgagatgatggtggtcacccgcgagctggataccgaattcgtcaatctgcagcgccagggggagctggcgttgtacacgccctgtcgcgggcaggaagccgcgcaggtgggtgcggcggcttgcctacgcaaaaccgactggttgttcccccaataccgagaattgggcgtctacctagtgcgtggcatcccgcctggacatgttggggtcgcgtggcgtggaacctggcacggcgggctgcaattcaccacgaagtgctgtgcaccgatgtcggttcccatcggcacccagaccttgcacgcggtgggcgcggcgatggccgcgcaacgcctggacgaggactccgtgacggtggcctttctgggcgacggcgccaccagcgagggcgacgtacatgaggcgctcaatttcgcggcggtgttcaccacaccgtgcgtgttctacgtgcagaacaaccagtgggcaatctcgatgccggtatccaggcagaccgccgcaccatctatcgcgcacaaggcgattggctacgggatgccaggcatccgggtggacggcaacgacgtgctggcatgctatgcggtgatggccgaagctgccgctcgggctcgggccggcgacggtccaacgctgatcgaggcggtcacttaccgtcttggtccgcacaccaccgccgatgatccaacccggtaccgcagccaggaggaggtggaccgctgggcgacgctggacccgattccgcgctatcgcacttacttacaagatcagggcctgtggtcgcaacgcctcgaggaacaggtgacggctcgggcaaaacacgtgcggtccgagctacgcgacgcggtctttgatgcgcctgacttcgacgtcgatgaggtgttcaccacggtgtacgccgaaatcacacccgggttgcaggcgcagcgcgaacagctgcgtgccgaactggcgcggactgac

SEQ ID NO: 26242 - DNA, 1245 bp, Mycobacterium bovis
tccccgcaggtgttcggcgaccagaccgacgtgccggagtccggagattggtgggacgtggtgtggcaatgcgcctcggtgctgctgacctacccgaactcacggcaactcggcaccgcagaggaattgctggcccacatcgacggtccggccgcggatctgttggggcgcacggtctctgagctgcgccgtgccgatccgctgaccgcggcgacccgctacgtcgacaccttcgacctgcgaggccgcgccaccctgtacctgacctactggaccgccggcgacacccgcaaccgcggccgggagatgctggccttcgcccagacctaccgcagcaccgacgtcgcaccaccgcgcggcgagaccccggacttcctgccggtggtgctcgaattcgccgcgaccgtcgaccccgaggcggggcggcggttgctgagcgggtaccgggtgcccatcgccgcgctgtgcaatgccctgaccgaggccgcattgccatacgcacacacggtggccgcggtatgccggacgggtgacatgatgggcgaactcttctggaccgtcgtgccgtatgtgacgatgacgatcgtcgcggtcggctcctggtggcgctaccgctatgacaaattcggctggaccacccgctcgtcccagctgtacgagtcgcggctgctgcggatcgccagcccgatgtttcatttcggcatcctggtggtcatcgtcggccacggtatcgggctcgtgatcccgcagtcgtggactcaggccgccggtttgagcgagggcgcatatcacgtgcaggccgtcgtgctggggtcgatcgccggcatcaccaccttggccggcgttaccctgctgatctaccggcggcgcacccgcgggccggtgttcatggctaccaccgtcaacgacaaggtgatgtacctcgtgctggtggcggcgatcgtcgcgggactgggtgcgacggcgttgggctccggcgttgtcggcgaggcgtacaactaccgcgagacggtgtcggtgtggttccgctcggtgtgggtactgcaaccgcgcggggacctgatggccgaggctccgctgtattaccagatccatgtgctgatcgggttggcgttgttcgcgttgtggccgttcacccggctggtacacgcgttcagcgccccgatcggctatctgttccgcccgtacatcatctaccgcagccgcgaggagctggtgctaacgcggccgcggcggcgcgggtgg

SEQ ID NO: 26243 - DNA, 2823 bp, Mycobacterium bovis
gtgtccgaccattcgacgttcgcagaccggcacatcggtctggacagccaggccgtcgcgaccatgctcgccgtgatcggggtggattcgctcgatgacctggcagtcaaggcggtcccggcgggcatcctagacacactcaccgacaccggagccgcaccgggtttggacagtctgccaccggctgccagcgaagccgaggcgctggccgagctgcgagcgctggccgacgctaacaccgtcgccgtgtcgatgatcgggcaaggctactacgacacacacacccccccggtgctgttgcgcaacatcatcgagaacccggcctggtataccgcctacacgccgtaccagcccgagattagtcagggtcggctggaagccttgctgaacttccagaccctggtcaccgatctgaccggcctcgagatcgcgaacgcgtcgatgctcgacgagggcaccgcggcggccgaggccatgactttgatgcaccgcgcggcccgcgggccggtgaagagggtggtcgtggacgccgacgtgttcacccagaccgcggcggtgctggccacccgcgccaagccgctgggtatcgagatcgtcacggccgacctgcgcgccggtctgcccgacggcgaatttttcggcgccatcgcccagctgcccggggccagcggccggatcaccgactggtctgccctggtgcaacaggcccacgaccgtggcgcactggtggccgtcggcgccgacttgttggcgctgacgctgatcgcgccgcccggagagatcggcgctgacgtcgcctttggcaccacacaacggttcggagtgccgatggggtttggcggcccgcatgccgggtaccttgcggtgcacgccaagcatgcgcgtcagctgcccggccggctggtcggtgtgtccgtcgacagtgacggcacgccggcctatcggttggcgctgcagactcgcgagcaacacatccgccgcgacaaggccaccagcaacatctgcaccgcacaagtgctgttggcggtgcttgccgcgatgtacgcgagctaccacggcgcgggcgggctgaccgccatcgcacgccgggtgcatgcccacgccgaggctatcgccggtgcactgggcgatgcgttggtgcacgacaagtacttcgacacggtgttggcccgggtgcccggtcgtgccgacgaggtgctggccagggccaaggccaacggcatcaacctgtggcgtgtcgacgccgaccatgtgtcggtagcctgcgacgaagccaccactgacacccacgtggcggtcgttctggacgcgttcggtgtagcggccgccgcacccgcccatgcggacatcgcaacgcgcacatcggagttcctgacgcatccagcgttcacgcaataccgcaccgagacgtcgatgatgcggtacttgcgtgcgctggcggataaggatattgccctcgaccgcagcatgattccgctcggctcgtgcacgatgaaactcaacgccgccgccgagatggagtcgattacctggcctgaattcgggcgtcagcatccatttgccccggcatctgataccgctgggctgcgtcaacttgttgccgacctacagagttggctggtgctgatcaccggttatgacgcggtgtcgctgcaacctaacgcgggctcgcaaggcgagtatgcgggcctattggcgatccacgagtaccacgccagccggggtgaaccgcatcgcgacatctgcctgatcccgtccagcgcgcacggcaccaatgccgcgtcagccgccttggccggcatgcgcgtggtggtggtggactgccacgacaacggcgacgtcgacctcgatgacctgcgcgctaaggtcggggagcatgccgagcggttgtcggcgctaatgatcacctacccgtccactcacggcgtgtacgaacacgacatcgccgagatctgcgctgccgtgcacgacgcgggcggccaggtatacgtcgacggagccaacctcaacgccctggtcggcctggcccggccgggcaagttcggcggtgacgtcagtcacctcaacctacacaagacattctgcattccgcacggcggcggtggcccaggcgtcggcccggtggcggtgcgggcgcacctggcaccgtttctgccaggtcaccccttcgcccccgagctgcccaagggctatccggtgtcgtcggcaccatatgggtcggcttcgattcttccgatcacctgggcatacatccggatgatgggggctgagggactgcgggcggcatcgctgacagcgatcacgtcggctaactacattgcgcgccgccttgacgagtattacccggtgctgtacaccggcgagaacggcatggtcgcccacgagtgcatcctggacttgcgcggtatcactaagttgaccggtatcaccgtcgacgatgttgcaaaacggctggcagactatggttttcacgcaccaacgatgagttttccggtggccggtacgctcatggtggagcccaccgagagcgagagcctggccgaagtggacgccttctgcgaggccatgatcggcatccgcgccgagatcgacaaagtcggggccggggagtggcctgtcgacgacaatccgctgcgcggcgcaccgcacaccgcgcagtgcctgctggcgtctgattgggaccacccgtatacgcgggaacaggccgcctacccgctcggcaccgcattccgacccaaggtttggcccgcggtacgtcgcatcgacggcgcctacggggatcgcaacctggtctgctcatgcccgccggtagaggcttttgcc

SEQ ID NO: 26244 - DNA, 1032 bp, Mycobacterium bovis
atggtgttgggcttctgggacatcgcggtgccgatcgtcggcgccccgatggccggcggcccgagcaccccggcgttggccgcggcggtgtccaacgctggcgggcttggtttcgtcgccggcggctatctgagcgcggaccggctcgccgacgatatcgccgctgcgcgcgccgccactaccggtcctatcggagccaatctgtttgtgccccaacccagcgtcgccgactgggcgcagctggagtattacgcggacgagctcgaagaggtcgccgagtactaccacaccgaggtgggccagcccgtctatggtgacgacgacgactgggtgcgcaaactcgaggtggtagccgatgtccgtccggaggtggtgtcgttcaccttcggcgcgccgccgccggatgtcgtgcagcggttgagcgcgctgggactgttggtctcgatcaccgtgacgtcggtctacgaggccggtgtggccattgccgcgggcgcggacagcctggtggtccagggcccggctgccggcgggcaccgcggaacgttcgcgccggacatggaacccggtacggagtcgctgcaccaactcctcgatcggattggcagcgcccatgatgtgccgctggttgcagccggtggcctgggcacggctgaggacgtggccgccgtgctgcgccgcggagcgatcgccgcgcaggttggtaccgcattgctgctggccgacgaagccggtaccaatgccgcacaccgtgccgcgctgaagaatccagagttcgatgccaccctggtcactcgggcgttctcgggtaggtatgcgcgcggtctggccaacaacttcactcgcctgctcgaccacgtggcgccgctgggttatccggaggtccaccagatgacgaagccgatacgggcggcggcggtgcaggcggacgacccgcacggaacaaacctttgggcgggatcggcgcaccggaagacccggccgggacccgcggccgacatcatcgcttcccttactcccgacgtgtgctcggcg

SEQ ID NO: 26245 - DNA, 1314 bp, Mycobacterium bovis
atgccgcgacggtcaccagctgaccccgcggcggcgctggcgccgcggcgcaccaccctgccgggcgggctgcgagtggtcaccgaattcctgcccgcggtgcactccgcgtcggtcggggtgtgggtcggcgtcggatcgcgcgacgaaggcgccacggtggccggggcggcgcacttccttgagcatttgctgttcaagtcgacgcccacccgctctgccgtggacattgcgcaggcgatggacgcggtgggcggggaactgaacgcattcaccgccaaggagcacacctgctactacgcccacgtgctcggcagcgacttgccgttggccgtcgacctggtcgccgatgtggtgctcaacggccgctgtgccgccgacgatgtcgaggtggaacgtgacgtcgtcctcgaggagatcgcgatgcgcgacgacgaccccgaggacgccttggcggacatgttcctggcggcgttgttcggcgaccacccggtcggtcgcccggtgatcggcagcgcgcaatccgtgtcggtgatgacgcgggctcaactgcaatcgtttcacctgcggcgctataccccggagcggatggtcgtcgcggccgccggcaatgtggatcacgacgggctggttgcgttggtccgcgagcacttcgggtcccggttggtccgggggagacggccagttgcgccgcgcaagggtaccggccgggtcaacggcagcccccggttgacactggttagccgcgacgccgaacagacgcatgtgtcgctgggcatccgcacacccgggcgcggctgggagcatcgttgggcactgtcggtgctgcacaccgcgctgggcggtggcttgagttcccggctgttccaggaggtccgcgagacccgcgggctggcctactcggtctactccgcgctggatctcttcgccgacagcggcgcgctttcggtgtacgcggcctgcctgcccgaacgcttcgccgacgtgatgcgggtgaccgccgatgtgctggaaagcgtggcacgcgacggcatcaccgaggcggaatgcggcatcgccaagggatcgctgcggggtgggctggtgctagggctggaggattccagctcccggatgagccggctcggccgcagcgagttgaactacggcaagcaccgcagcatcgaacacaccttgcggcaaatcgagcaggtcaccgtggaggaggtcaacgcggtggcccgccacctgctgagcaggcgctacggtgctgccgttcttggcccacacggatcgaaacgatcactgccgcaacaacttcgagcgatggtaggg

SEQ ID NO: 26246 - DNA, 1377 bp, Mycobacterium bovis
atggcgaaattcgagattcctgagggctggatggttcaggctttccggttcacgctcgatccgaccgccgagcaggcccgcgcgttggcacggcatttcggtgcccgccgcaaggcctacaactggaccgtcgccaccctgaaagccgatatcgacgcctggcaggcgaccgggatccagacggcaaagccgtcgctgcgggtgttgcggaagcgctggaacaccgtcaagaacgacgtgtgcgtcaacatcgagaccggtgttgtgtggtggccggagtgctcgaaggaggcctacgccgacggtattgacggcgcggtcgacgcgtactggaactggcagaactcgcgatcaggcaaacgtgatggcaaaaggatgggctttccccggtttaagaagaagggacgcgacccagaccgggtgacgttcacgaccggagcgatgcgcgtcgagcccgaccggcgccacctcacgctgccggtcatcgggaccgtccgcacccacgagaacacgcgccgggttgagcggctcatcgccaaaggccggtcgcgggtgctcgcgatcacggtgcgccgtaacgggacccggatcgatgcgagtgtgcgggtcctcgtgcagcgcccgcagcaaccgaaggtgaccgaccccggttcacgggtcggcgttgatgtcggggtgcgccgcctggccacggtcgccaccgccgacggcgcggtgctcgaacgagtgccgaatccacggccactcgacgcggcactcaacgagctacggcatgtctgccgggcacggtcgcgctgcacgaaaggctcacgtcgctaccgtgagcgcaccaccgaaatatcccggctgcaccgccgggtcaacgatgttcgcacccaccacctgcactgtctgacaacgcatttggctaagacccacggccgcatcgttgtcgaaggcctggacgcggcagggatgctgcggcaacagggcctctcgggtgcccgcgctcgccggcgcggactctccgacgcggccctgggcaccccgcgccgccacctgtcctacaagacaggctggtacgggtcacaactagtggtcgctgaccgctggttcccatcgtcgaaaacctgccacgtctgcgggcatgtccaagagatcggatgggccgagcactggcaatgcgattcgtgctcggcatcgcatcagcgtgatgactgcgcagcgatcaacctcgcacgctacgaggacaccagtagcgtcgtcggcccagttggggccgccgtcaagcgtggagccgaccgtaagacccggcctggccgggctggtggccgtgaagcgcggaagggaagcagccgcaaggctgccgaacaaccccgagacggggtgcaagtcgcg

SEQ ID NO: 26247 - DNA, 2256 bp, Mycobacterium bovis
atgtctgccgctgaaattgacgaaggcgtgttcgagacgaccgccaccatcgacaacgggagctttggcacccggaccatccgcttcgagaccggccgattggccttgcaggccgccggcgcggtggtcgcctacctcgacgacgacaacatgctgctgtcggcgaccaccgccagcaagaaccccaaagaacacttcgacttcttccccctcacggtcgacgtcgaggagcgcatgtatgcggccggccgcatccccggttcgttcttccgtcgcgagggccgaccctccaccgacgcgatcctgacctgccggctcatcgaccgcccgctgcgcccgtcgtttgtcgacgggctgcgcaacgagatccaaatcgtggtgacgattctcagcctggatccgggcgatctctacgacgtattggcgatcaacgcggcgtcggcgtccacccagctgggcggtctgccgttctccgggcccatcggcggtgtgcgggtggcgctcatcgacggcacctgggtcggcttccccaccgtcgaccagatcgagcgcgccgtgttcgacatggtcgtggccggccggatcgtcgagggtgatgttgccatcatgatggtcgaagccgaggccaccgaaaacgtcgtcgagctcgtcgaaggtggtgcccaagcgccgacggaaagcgtggtggccgcgggcctggaggcggccaagccgtttatcgccgcgctgtgcaccgcgcagcaggagcttgccgatgccgctggaaagtcgggcaaaccgaccgtcgacttcccggtgttccctgactacggcgaagacgtgtactactcggtgtcctcggtggccaccgacgagttggccgccgcgttgaccatcggcggtaaagccgagcgcgaccagcgcatcgacgaaatcaagacccaggttgtgcagcggctcgccgacacctacgagggtcgcgaaaaggaggtcggcgccgcgttgcgtgccctgaccaaaaagctggttcggcagcgcatcctcaccgaccatttccgtatcgacggccgcggcatcaccgacattcgcgcattgtcggccgaggtggccgtggttccgcgcgcgcacggcagcgcgctgttcgaacgcggcgaaacccagatcctgggtgtgaccacactcgacatgatcaagatggcccagcagatcgactcgttggggccggagacatcgaagcggtacatgcaccactacaacttcccgccgttctccaccggcgagaccggtcgggtcggttcgcccaagcggcgtgagatcgggcacggcgcactggccgagcgggccctggtgccggtgttgccgagcgtcgaggaattcccgtatgccattcgccaggtgtcggaggctctgggctccaacgggtcgacctcgatggggtcggtgtgcgcgtcgacgctggcgctgctcaacgccggggtgccgctcaaggcgccggtggccggcatcgcgatgggcctggtctccgacgacattcaagtagaaggggcggtcgacggcgttgtggagcgtcgcttcgtcaccctcaccgacatcctcggcgccgaagacgcgttcggtgacatggacttcaaggtcgccgggaccaaggacttcgtcaccgcgctgcagctggacaccaagctcgacgggatcccttcgcaggtgcttgccggagcactcgagcaggccaaggacgcccgcctcacgatcttggaggtgatggctgaggccatcgatagacccgacgaaatgagtccctacgccccgcgggtgaccaccatcaaggttccggtggacaagatcggggaggtcatcggacccaagggcaaggtcatcaacgccatcaccgaggagaccggcgcgcagatctccatcgaagacgacggcaccgtgttcgtcggcgccaccgacgggccatcggcacaggccgcgatcgacaagatcaacgccatcgccaacccgcagctgccgacggtgggcgaacggttcctcggaaccgtggtcaagaccaccgatttcggtgcctttgtatcgttgctgcctggccgcgacggtctggtgcacatttccaaactcggcaagggcaagcgcatcgcgaaggtcgaggacgttgtcaatgtcggtgacaagctgcgggtggagatcgccgacatcgacaaacggggcaagatctccctgatcctggtcgccgacgaggacagcaccgccgccgctaccgatgccgcgacggtcaccagc

SEQ ID NO: 26248 - DNA, 894 bp, Mycobacterium bovis
atgagcgcaaccggccccggaatcgtggttatcgacaagcccgcgggaatgaccagccatgacgtggtggggcggtgccgccgcatcttcgccacccggcgggtcggccacgcgggcaccctggacccgatggccaccggggtgttggtgatcggcatcgaacgcgccaccaagatcctcggtctgctgacggcggcccccaagtcgtatgccgccaccatccgcttgggtcagaccacttccaccgaggacgccgaaggtcaagtgctgcagtcggttccggctaagcacctgaccatcgaggcgatcgacgccgcgatggagcggctgcgcggtgagatccggcaggtgccgtcgtcggtcagcgcgatcaaggtcggtggccgacgcgcctatcggttggcccgccaggggcgctccgtgcaattggaagcccggccgatccgcatcgaccggttcgagctgctggccgcacgccggcgcgaccagctcatcgatatcgatgtggagatcgactgctcctcgggaacctacatccgcgcgttggcacgcgacctcggcgacgcgcttggggtgggaggccatgtgacggcgttgcggcgcacccgcgtcggccgcttcgagctggaccaggcgagatcgctcgacgatctcgcggagcgccccgcgctgagcctgagcctcgatgaggcctgcctgctgatgtttgcgcgccgcgacctgaccgccgcggaggccagcgcggccgccaacggccggtccctgccggcggtcggtatcgacggcgtgtacgcggcctgtgacgccgacggccgggttatcgcgctgctgcgtgacgagggttcgcggaccaggtcggtggcggtgctccgcccggcgacgatgcaccccggg

SEQ ID NO: 26249 - DNA, 267 bp, Mycobacterium bovis
gtggcgctgacagccgagcaaaaaaaggagattctgcgctcctacggcctgcatgagaccgataccggatccccggaagcacagatcgcgttgctgaccaaacgcatcgccgacctcaccgagcatctcaaggtgcacaagcacgaccatcattcgcggcgaggactgctgttgctggtgggccggcggcgccggctgatcaagtacatttcccagatcgatgtggagcgttatcgttcactcatcgagcggctgggcctgcgtcgc

SEQ ID NO: 26250 - DNA, 921 bp, Mycobacterium bovis
gtgctcaccatcggggtatttgacggcgtgcaccgcgggcacgccgaactgatcgcgcacgcggtcaaggccggccgcgctcgcggtgtaccggccgtgctgatgacgttcgacccgcacccgatggaggtggtctatccaggcagtcacccggcgcagctgaccaccctgacccgacgcgcggagctcgttcaagacttgggcatcgaagtgttcctggtgatgccgttcaccaccgatttcatgaagctcacgccggatcgcttcatccatgagctgctcgtcgagcacctacatgtggtggaggtcgtcgtcggcgagaacttcaccttcggcaaaaaggccgccggcaatgtcgacacgctgcgtcgggctggcgagcggttcgggttcgcggtggaatcgatgtcgttggtgtccgagcaccacagcaacgagaccgtgacgttctcctccacctacatccggtcctgcgtggacgccggcgacatggtggcggccatggaagctctgggccgaccgcaccgcgtggagggggttgtggtacgcggtgaggggcggggcgcggagctgggctttcccaccgcgaacgtggcgccgccgatgtattcggcgattccggccgacggcgtgtacgccgcttggttcacggtgctcgggcatgggccggtgaccggcacggtcgtcccgggtgagcgctaccaggccgcggtgtcggtcgggaccaatcccaccttctccggacgcacccgcaccgtcgaagcgttcgtgctggacaccaccgctgacctctacggtcaacatgtggccttggacttcgtcgggcgtatccgcggccagaagaagttcgaatcggtgcgccagctggtcgctgcgatgggtgccgataccgagcgggcacgtgacctgttgtctacgggt

SEQ ID NO: 26251 - DNA, 735 bp, Mycobacterium bovis
atgcgggtaggcgtccttggagccaaaggcaaggtcggagcgacgatggtgcgggcggtggcggccgccgacgacctgaccctatccgccgagctggatgccggcgatccgctgagcctgctaacggacggtaacaccgaggtcgtcatcgacttcacccacccggacgtggtgatgggcaatctggagttcctcatcgacaacggaattcacgccgtggtcggtaccacggggttcaccgccgagcggtttcaacaagtcgaatcgtggctcgtcgcaaaacccaacacatcggtgttgatagcgccaaacttcgcgatcggagcggtgctgtccatgcatttcgccaagcaggccgcacggtttttcgactcggccgaggtcattgagctgcatcatccgcacaaggctgaagcgccgtcaggcacggccgcgcgtaccgcgaagctgatcgccgaggcccgaaaaggcttgccgcccaatcccgatgccaccagtaccagcctgccgggcgcgcgtggtgccgacgtcgacggcataccggtgcacgcggtgcggctggccggactggtcgcccaccaggaggtgctgttcgggaccgagggggagattctgaccatccgccacgatagcctcgatcgcacatcgtttgtgcccggtgtgctgttggcggtgcgccgcatcgccgaacgccctggtctcaccgtaggtcttgagcccctactcgatctgcac

SEQ ID NO: 26252 - DNA, 2765 bp, Mycobacterium bovis
gtcaagggtgcgcgcgaacacaatctgcgcagcgtcgacctcgacctgccccgcgacgcgctgatcgtcttcaccgggttatccggatcgggcaagtcctcgctcgcgttcgacaccatcttcgccgaggggcagcggcgttacgtggagtcgctgtcggcctacgcccgccaatttctcgggcagatggacaagccggacgtcgacttcatcgaggggctgtctccggcggtgtccatcgaccagaagtcgaccaaccgcaacccacgatcgacggtcgggaccatcaccgaggtgtacgactacctgcggctgttgtatgcgcgcgcgggcacgccgcactgcccgacctgcggggagcgagtcgcgcgccaaaccccgcaacaaatcgtcgatcaggtgctggccatgccggagggcactcggtttctggtgctggccccggtggtgcgtacccgcaagggcgagttcgccgatctgttcgataagctcaacgcccagggctacagccgggtgcgggtcgacggtgtggtgcatccgctgaccgatccgccgaagctgaaaaagcaggaaaagcacgacatcgaggtggtggtggaccgtctcaccgtcaaggccgccgccaagcggcggctcaccgattcggtggaaaccgcgctgaatttggccgacgggatcgtggtgctcgaattcgtcgatcatgaactgggtgcaccgcatcgcgagcagcggttctccgagaagctggcctgccccaacgggcacgcgctggccgtcgacgactggagccgcggtcgttctcgttcaactcgccctacggcgcctgccccgaatgcagtggtctgggcatccgcaaggaggtcgacccggagctggtggtgcccgatccggatcgcaccctggcgcagggtgcggtggcgccgtggtcgaacggccacaccgcggagtacttcacccggatgatggccggccttggcgaggcgctcgggttcgacgtcgacacgccctggcgcaagctgccggccaaggcccgcaaggcgattctggaaggcgccgacgagcaggtgcacgtgcgctaccgcaaccgctacggacgcacccggtcgtattacgccgatttcgagggtgtgctggcgttcctgcaacgcaagatgtcccaaaccgagtccgagcagatgaaggagcgctacgagggtttcatgcgggacgtgccctgcccggtgtgtgcgggcacccggctcaagcccgagattctggcggtgacgctggctggggagtccaagggggagcacggcgccaagtccatcgccgaggtgtgtgagctgtcgatcgccgactgcgcggacttcctgaacgcgctcacgctgggtccgcgcgagcaagcgatcgccgggcaggtgctcaaggagatccggtcgcggctcgggtttctgctcgacgtcgggctggagtacctgtcgctgtcccgggcggcggccacgctgtccggcggtgaggcacaacgtatccggctggccacccagatcggctccggcctggtgggtgtgctctacgtgctcgacgagccgtccatcgggctgcaccagcgcgacaaccgtcgtcttatcgaaaccctcacccggttacgggatttggggaacactttgatcgtcgtcgagcacgacgaggacaccatcgagcatgcggactggatcgtcgacatcggcccgggggccggtgagcacggtggccgcatcgtgcacagcgggccctacgatgaactgctacgcaacaaggattcgatcaccggcgcctacctgtccggccgggaaagcattgagataccggcgattcggcgttccgtcgacccccgtcgtcaactcaccgtcgtcggcgcccgcgagcacaacttgcgcgggatcgatgtgtctttcccgctgggtgtgctgacctcggtgaccggtgtctcgggttcgggcaagtcgacgttggtcaacgacatcctggccgcggtgctggccaaccgcctcaacggcgcccggcaggtccccggccggcacacccgggtcaccgggctggactatctggacaagctggtgcgggtggaccaatcgccgatcgggcgcacaccgcgatccaacccggccacctacaccggtgtgttcgacaagatccgcaccctgttcgccgccaccaccgaggccaaggtccgcggctatcaacccggacgattctcgttcaacgtcaagggcggtcgctgcgaggcctgcaccggcgacggcaccatcaagatcgagatgaacttcctgcccgacgtgtacgtgccgtgcgaggtctgccagggggcccggtacaaccgcgaaaccctcgaggtgcactacaagggcaagaccgtctcggaagtgctggacatgtccatcgaggaagcggcggagttcttcgagccgatcgccggcgtccatcgctatctacgcaccctggtcgacgtgggcctgggctacgtgcggctcggccagcccgcgcccacgctgtccggcggtgaggcccagcgggtcaagctggcctcggagctgcagaagcgctccaccgggcgcaccgtctacatcctcgacgagccgacgacgggactgcacttcgacgacatacgcaagctgctcaacgtgatcaacggcctggtcgacaagggcaatacggtgatcgtcatcgaacataacctggacgtgatcaagacatcggattggatcatcgacctgggcccggagggcggtgccggcggcggaaccgtt

SEQ ID NO: 26253 - DNA, 1969 bp, Mycobacterium bovis
atgcggctaccctacagctggctgcgcgaggtggttgcggtcggcgcttcgggctgggacgttaccccaggcgaactcgagcagacgctgttgcgcatcggccacgaggtcgaagaggtcatcccccttggtccggtggacggcccggtgaccgtggggcgggtggccgatatcgaggagctcaccggctacaagaagccgatccgggcctgcgcggtagatatcggcgatcggcagtatcgcgagattatttgtggtgcaaccaatttcgcggttggtgatctggtggtggtagcgctgcccggtgccacgctgcccggtggattcaccattagcgcccgcaaggcctacggtcgcaactccgacggaatgatctgctcggcagccgaactcaatttgggcgcagaccattccgggatcctggtgttgccccccggagccgccgagcccggagctgacggcgcgggcgtgctggggctcgacgacgtggtcttccatctggccatcaccccagaccgcggttactgcatgtcggtgcgcggcttggcccgcgagctcgcgtgcgcctacgacctggacttcgtcgaccccgccagcaactcgcgggtgccgccgctacccatcgaggggccagtctggccgctgacggttcagccctagacgggggtgcgccggttcgcgctacgcccggtcatcgggatcgaccccgccgcggtatcgccctggtggttgcaggcgccgactgctgctctgcggtatccggcgcgacctgtccggcggtcgacgtgaccaattacgtgatgctcgaacttggccaccccatgcacgcccacgaccgcaaccggatcagcggaaccctcggagtgcggttcgcccggtccggcgagaccgccgtgaccctcgacggtatcgagcgcaagctcgataccgccgatgtcctgatcgtcgacgatgctgcgacagcggcgatcggcggcgtgatgggggcggccagcaccgaagtgcgggccgactccaccgatgtcctgttggaggccgcgatatgggacccggctgcggtatcgcgtacccagcggcggctgcacctgcctagcgaggccgcccgtcgttacgagcggacggtggacccggccatctccgtggccgctttggaccggtgcgcaaggctgctcgccgacatcgccgggggggaggtttctcccacccttaccgactggcggggtgacccgccgtgtgatgactggtcaccgccgccgatccggatgggagtcgatgtgccggaccgcatcgccggggtggcctatccgcagggcactactgccaggcgcttggcccagatcggcgcggtggtgacccacgacggcgacaccttgaccgtgaccccgccgagttggcgacctgatctgcggcaacccgcagaccttgtcgaggaggtgctgcggcttgaggggctggaagttatcccgtcggtgctgccaccggcgcccgcgggtcgtggactcaccgctgggcagcagcgccgtcgcacgatcggcaggtcgctggcgctgtcgggctatgtcgagattctgccgactccatttctgccggccggtgtgttcgatttgtgggggctggaagccgatgactcacggcgcatgaccacgcgggtgctcaacccgctggaggccgatcgtccgcaactggcgaccacgctgctgccggccctgctggaagccttggtgcgcaacgtgtcccgagggctggtcgacgtcgcgctgttcgccatcgcccaggtggtccagccgaccgagcagacgcgcggtgtcaggttgatcccggttgaccggcggccgaccgatgatgagatcgccatgctggatgcctcgctgacccggcaaccccagcacgtcgcggcggtgctggccggactgcgcgagcctcgaaggccctgagggccgggcccgccggtagatgctgctgatgcgtt

SEQ ID NO: 26254 - DNA, 192 bp, Mycobacterium bovis
atgcccaaggccaagacccacagcggggcctcgaagcggttccggcgcaccggtaccggcaagatcgtccggcagaaggccaaccgtcggcacctgctcgagcacaagccgagcacccgcaccaggcgcctggacggccgcaccgtggtggcagccaacgacaccaaacgggtcacgtcgttgctgaacggc

SEQ ID NO: 26255 - DNA, 387 bp, Mycobacterium bovis
atggcacgcgtaaagcgggcggtcaacgcccacaagaagcggcgcagcatcctgaaggcatcgcgaggctatcgcggccagcgatcgcggctttaccgcaaagccaaagagcagcagctgcattcactgaactacgcctaccgtgaccgccgggcgcgtaagggcgagttccgcaagttgtggatcgcacggatcaacgcggctgcgcgcctcaacgacatcacctacaaccggcttatccaggggctgaaggccgccggcgtcgaggtggaccggaaaaacctcgccgacattgcgatcagcgacccggcggcgttcaccgcgctggtcgacgtcgcccgggcggcactgcccgaagacgtcaacgccccctccggggaggccgcc

SEQ ID NO: 26256 - DNA, 2712 bp, Mycobacterium bovis
gtggtgactactgccagtgcccccagcgaggatcgagccaagccgacgctgatgttgctggatggcaattcgctggcgtttcgggcgttctacgcactgcccgcggagaacttcaagacccgcggcgggctgaccaccaacgccgtctacggcttcaccgccatgctgatcaacctgctgcgcgatgaagccccgacgcacatcgcggcggctttcgacgtgtcccggcagaccttccgcttgcaacgctacccggagtacaaggccaaccgatcgtcgacccccgacgagttcgctggccagatcgacatcaccaaagaagtgctgggcgcactcggcatcaccgtgctctccgagccggggttcgaggccgacgacctcatcgccacgctggccacccaggccgagaacgagggctaccgggtgctggtggtcaccggggatcgtgacgcactgcaactggtcagtgacgatgtgacggtgctctacccccgcaagggcgtcagcgaacttacgcgcttcacaccggaggccgtcgtcgaaaagtacgggctcacccctaggcagtacccggacttcgccgcgctgcgcggcgaccccagcgataacctgcccggcatacccggggtgggggagaagaccgccgccaaatggatcgccgagtacggctcgctgcggtcactggtggacaacgttgacgccgtgcgcggcaaggtgggcgatgcgctgcgggcgaacctggccagcgtggtgcgcaaccgtgagctcaccgacctggttcgcgacgtgccgctggcccagaccccggacacgctgcggctgcagccctgggatcgcgaccacattcaccggctcttcgacgacctggagtttcgggtgttgcgcgaccggttgttcgacacgttggccgcggccgggggacccgaggtcgacgaggggttcgacgtgcgcggcggcgcgttggcgcccggcacggttaggcaatggttggccgagcacgccggcgacgggcgccgagcgggcctgacggtggtgggtacccatctgccgcacggtggggacgctaccgctatggccgtcgccgccgccgacggcgaaggcgcttacctcgataccgcgacgctgacgcccgacgacgacgccgcgttggcggcctggctagcggatccagctaaacccaaagccttgcatgaggcaaaggcggccgttcatgacctggcgggtcgtggttggaccttggagggcgtcacctccgacaccgcactggcggcctacctggtgcggccggggcagcgcagcttcaccctcgacgacctctcgctgcgctatctgcgtcgcgagctgcgtgcggaaacaccgcagcagcaacaactttcactgctcgatgacgacgatacggacgccgagaccattcaaacgacgatcctgcgggcgcgggcagtcatcgacctggccgacgcgctggacgccgagttagcgcgtatcgactccaccgcgctgctgggggagatggagctgccggtccagcgggtgctggcgaagatggaaagtgccggtatcgccgtcgacctgcccatgttgaccgagctgcaaagccagtttggcgaccagatccgcgacgccgccgaggccgcctacggcgtgatcggcaagcaaatcaacctgggctcacccaagcagctgcaggtcgtgctgttcgacgaactgggcatgccgaagaccaaacgcaccaagaccggctacaccacggatgccgacgcgctgcagtcgttgttcgacaagaccgggcatccgtttctgcaacatctgctcgcccaccgcgacgtcacccggctcaaggtcaccgtcgacgggttgctccaagcggtggccgccgacggccgcatccacaccacgttcaaccagacgatcgccgcgaccggccggctctcctcgaccgaacccaacctgcagaacatcccgatccgcaccgacgcgggccggcggatccgggacgcgttcgtggtcggggacggctacgccgagttgatgacggccgactacagccagatcgagatgcggatcatggcgcacctgtccggggacgagggcctcatcgaggcgttcaacaccggggaggacctgcattcgttcgtcgcgtcccgggcgttcggcgtgcccatcgacgaggtcaccggcgagctgcggcgccgggtcaaggcgatgtcctacgggctggcttacgggttgagcgcctacggcctgtcgcagcagttgaaaatctccaccgaggaagccaacgagcagatggacgcgtatttcgcccgattcggcggggtgcgcgactacctgcgcgccgtagtcgagcgggcccgcaaggacggctacacctcgacggtgctgggccgtcgccgctacctgcccgagctggacagcagcaaccgtcaagtgcgggaggccgccgagcgggcggcgctgaacgcgccgatccagggcagcgcggccgacatcatcaaggtggccatgatccaggtcgacaaggcgctcaacgaggcacagctggcgtcgcgcatgctgctgcaggtccacgacgagctgctgttcgaaatcgcccccggtgaacgcgagcgggtcgaggccctggtgcgcgacaagatgggcggcgcttacccgctcgacgtcccgctggaggtgtcggtgggctacggccgcagctgggacgcggcggcgcac

SEQ ID NO: 26257 - DNA, 1605 bp, Mycobacterium bovis
gtgccgagcgtgcatctggggcgggaattcggcgatttttccgccctgagttcacgctcggcgcaatcgggaccgagtttgtccagcgtgtacccgtcgagtagcctcgtcaggtaccaatctgtccctacgacccaaccctgtccggagcaacccaacaatatgccgagtcccaccgtcacctcgccgcaagtagccgtcaacgacataggctctagcgaggactttctcgccgcaatagacaaaacgatcaagtacttcaacgatggcgacatcgtcgaaggcaccatcgtcaaagtggaccgggacgaggtgctcctcgacatcggctacaagaccgaaggcgtgatccccgcccgcgaactgtccatcaagcacgacgtcgaccccaacgaggtcgtttccgtcggtgacgaggtcgaagccctggtgctcaccaaggaggacaaagagggccggctcatcctctccaagaaacgcgcgcagtacgagcgtgcctggggcaccatcgaggcgctcaaggagaaggacgaggccgtcaagggcacggtcatcgaggtcgtcaagggtggcctgatcctcgacatcgggctgcgcggtttcctgcccgcctcgctggtggagatgcgccgggtgcgcgacctgcagccctacatcggcaaggagatcgaggccaagatcatcgagctggacaagaaccgcaacaacgtggtgctgtcccgtcgcgcctggctggagcagacccagtccgaggtgcgcagcgagttcctgaataacttgcaaaaaggcaccatccgaaagggtgtcgtgtcctcgatcgtcaacttcggcgcgttcgtcgatctcggcggtgtggacggtctggtgcatgtctccgagctatcgtggaagcacatcgaccacccgtccgaggtggtccaggttggtgacgaggtcaccgtcgaggtgctcgacgtcgacatggaccgtgagcgggtttcgttgtcactcaaggcgactcaggaagacccgtggcggcacttcgcccgcactcacgcgatcgggcagatcgtgccgggcaaggtcaccaagttggttccgttcggtgcattcgtccgcgtcgaggagggtatcgagggcctggtgcacatctccgagctggccgagcgtcacgtcgaggtgcccgatcaggtggttgccgtcggcgacgacgcgatggtcaaggtcatcgacatcgacctggagcgccgtcggatctcgttgtcgctcaagcaagccaatgaggactacaccgaggagttcgacccggcgaagtacggcatggccgacagttacgacgagcagggcaactacatcttccccgagggcttcgatgccgaaaccaacgaatggcttgagggattcgaaaagcagcgcgccgaatgggaagctcggtacgccgaggccgagcgccggcacaagatgcacaccgcgcagatggagaagttcgccgccgccgagacggctggacgcggcgcggacgatcagtcgtcggccagtagcgcaccgtcggaaaagaccgcgggtggatcactggccagcgacgcccagctggcggccctgcgggaaaaactcgccggcagcgct

SEQ ID NO: 26258 - DNA, 1887 bp, Mycobacterium bovis
atgctgtcgctgagcggatgtggcggcttccacgcgggtgcgccaagcacggccggtccgtgcgagatcgtccccaatggcacgccggcgcccaagacacccccggctaccgtgccttcgtcgcgcaacctcgcgaccaaccccgagatcgccaccggctaccgccgggacatgaccgtggtgcggaccgcccactatgcggcagccaccgccaatccgctggccactcaggtggcctgccgagtattgcgcgacggtggtaccgccgccgatgccgtcgtggccgcccaggcggtgctggggttggtcgaaccgcaatcctccgggatcggcggcggcggatatctggtgtacttcgacgcccgcacgggctcagtgcaggcctacgacggccgtgaggtggccccagcggccgccaccgagaactaccttcgctgggtcagcgacgtcgaccgcagcgcgcccaggcccaacgcccgagcctcgggacggtcgatcggagtaccgggcatcctgcgaatgctggagatggtgcacaacgagcacgggcgcacaccctggcgcgacctcttcggccccgcggtaacgctggccgatggcggttttgacatcagcgccaggatgggcgcggccatctccgacgctgcgccgcaactgcgagacgacccggaggcccgcaagtatttcctcaatcccgacggcagcccgaaacccgcgggaacccggctgacgaaccccgcgtactcaaaaaccctgtccgccatcgcctccgccggcgccaacgccttctattccggcgacattgcccacgacatcgtggcggcggcgagcgacacatcgaatggccgcacgccgggcctgttgaccattgaggacctggcgggttacctcgccaagagacgccaaccgttgtgcacgacctatcgcggccgggagatctgcggcatgccatcgtcgggtggcgtcgccgtggccgcaaccttgggcatcctcgagcacttcccgatgagcgactacgcgcccagcaaggtcgacctcaacggcggtcgcccgaccgtgatgggggttcacctgatagcggaggccgaacggctggcctatgccgaccgcgaccaatatatcgctgacgtcgattttgtccagctgcccggcggctcgctcaccacgctggttgacccgggctacttggcagcacgcgccgcgctaatctcgccgcaacacagcatgggcagcgccagaccgggggacttcggcgcaccgacggccgtcgccccgccagtgcctgagcatggcaccagccacctcagcgtcgtcgattcgtacggcaatgcggccacgttgacgacgacggtggaatcttcgttcggctcctaccacctggtggacggattcatcctcaacaaccagctgagcgatttcagcgccgagccacacgctactgacggatcaccggtggctaaccgggtcgagcctgggaagcgaccgcgcagttcgatggcaccgacgttggtgttcgatcactcgtcggcggggcgcggtgcgctgtacgcggtgctcggttctccgggcggctccatgatcatccagttcgtcgtgaaaacacttgtggcgatgctggattggggtctgaatccgcagcaggcggtttccctggtcgatttcggcgccgcgaactcgccgcacactaacctcggcggtgagaatcccgagatcaacacttccgacgatggtgatcatgacccgctggtgcaaggcctgcgcgcgctggggcatcgagttaatcttgccgagcaatccagtgggctctcggcgatcacccgcagcgaggcgggttgggccggcggcgccgacccacgccgcgaaggcgcggtcatgggcgacgatgcc

SEQ ID NO: 26259 - DNA, 1680 bp, Mycobacterium bovis
ccgaaggcggcagatggccgccgacccagtcccgacggcggactgggtggctttgtaccgttccccgcggatcgggccgcgtcgtaccgggcggccggctattggtcggggcgaaccctggacaccgtgctctccgatgccgcgcggcgctggcctgaccgcctcgcggtggccgacgccggtgatcgtcccggccacggcggcctcagttacgccgaactcgaccagcgggccgaccgggccgccgcggcgctgcacggcctgggcatcacgccaggcgaccgggtactgctccagctgccaaacggctgccagttcgcggttgccctgttcgcgttattgcgggcgggagcgatcccagtgatgtgcctgcccggtcaccgcgccgccgaattgggccacttcgccgccgtcagcgcggccaccgggctggtggtcgccgatgtggccagcgggttcgactatcggccgatggcgcgcgaacttgttgccgatcaccccaccctgcgccatgtcatcgtcgatggcgatccgggaccgttcgtgtcgtgggcgcagctgtgcgcccaggccggcaccggttcgccggcaccgccggccgatcccggatcgccagcgctgctgctggtctccggcggcaccactggcatgcccaaactcattccacgcacccacgacgactacgtgttcaacgcgacggccagcgccgcactctgtcggcttagcgccgacgacgtctatctggtggtgctggccgccggccacaatttcccgctggcctgcccgggcctgctcggcgcgatgaccgtcggggccaccgccgtgttcgcccccgatcccagcccggaggccgccttcgccgccatcgagcgccacggtgtcaccgtcaccgcgttggttccggcactggccaaactgtgggcccaatcctgtgagtgggagccggtgacaccgaagtcactgcggttgttgcaggttggcgggtccaagctagaacccgaggacgctcgccgggtacgcaccgcgctcaccccgggcctgcagcaggtgttcggcatggcggaggggctgctgaacttcacccgcatcggcgacccacccgaagtggtggagcacacccaggggcggccactatgcccggccgacgaactgcgcatcgtcaacgccgatggtgagccggtggggcccggggaggaaggcgaactcttggtgcgcgggccctacacgctgaacggctattttgctgccgaacgcgacaacgagcgctgcttcgatccggacggcttctaccgcagcggcgacctggtccgccgccgcgacgacggcaatctggtggtcaccgggcgcgtcaaggatgtcatctgccgtgcgggagaaaccatcgccgccagcgacctcgaagaacagctgctgagccatccggcgatcttctcggccgcggcggtgggactacctgaccagtatctgggggaaaaaatctgcgctgcagtcgttttcgctggagctccgattacgcttgcggagttgaacggctaccttgaccggcgtggtgtggccgcgcatacgcgacccgaccagctggtcgcgatgccggcgctgcccacaacgccgatcgggaagatcgacaaacgagcgatcgtccgccagctcggcatcgcgacgggtcccgtgacgacccag

SEQ ID NO: 26260 - DNA, 1527 bp, Mycobacterium bovis
atgactgttgctgccggggcagccaaggccgcaggggctgaactgctcgattacgacgaggtcgtcgcgcgcttccagccggtactcggcctcgaggtgcacgtcgagctgtccactgcgaccaagatgttctgtggctgcaccaccacattcggcggcgagccaaacacccaggtgtgtccggtgtgtctgggcttgcccggttcgctgccggtgctcaaccgggccgccgtggagtcggcgatccgcatcgggctggcgctgaactgcgagatcgtaccctggtgtcgcttcgcccggaagaactacttctaccccgacatgcccaagaactaccagatctcacagtacgacgagccgatcgccatcaacggctacctggacgcgcctttggaagacggcaccacttggcgggtggagattgagcgagctcacatggaagaagacaccggcaagctcacccacatcggcagcgagacgggccggatccacggtgccaccggttcgctgatcgactacaaccgtgccggcgtgccgctcatcgagatcgtcaccaaacccatcgtgggcgccggtgcccgggcgccgcagatcgcccggtcctatgtgacggcgttgcgggatctgctgcgcgcattagatgtatctgatgtccggatggaccagggttcgatgcgctgtgacgccaacgtgtcgctgaagccggccgggacgaccgaattcggcacccggaccgagaccaagaacgtcaactcgctgaagagcgtcgaagtcgccgtccgctacgaaatgcagcgccagggcgctattttggcgtctggtggtcggatcacccaggaaaccagacactttcacgaggccggttacaccagcgcgggccgcaccaaggagaccgccgaggactatcggtacttcccggagccggatttggagcctgtcgcgcccagtcgcgagctggtcgagcgactacgccagacgatccccgaattgccgtggttgagccgcaggaggattcagcaggagtggggtgtttccgacgaggtgatgcgcgatctggtcaacgccggcgccgtcgaattggttgctgccaccgtcgagcacggcgcgtccagcgaggcggcgcgcgcctggtggggaaacttcctggcgcaaaaggccaacgaggccggcatcgggctggacgaactggccatcactcctgcccaggtcgcagccgtggtggcattggtcgatgagggcaagctgtccaacagcttggcccgccaagtcgtggagggtgtgctggccggtgaaggtgagcccgaacaggtgatgactgcgagagggttggcgttggtccgcgacgactcgttgacccaggccgcggtcgacgaggccctggccgcaaatcctgatgtggcggacaagattcgcggcggcaaggtggccgcggccggcgcgattgtcggtgcggtgatgaaggcgacccgcggacaggccgacgcggcccgagtgcgcgaactcgttctagaggcctgcgggcagggt

SEQ ID NO: 26261 - DNA, 999 bp, Mycobacterium bovis
atgttctacgacgacgacgcagacctgtcgatcattcagggccgcaaggttggtgtgatcggctacggcagccaggggcacgcgcactcgctaagcctgcgcgactcgggtgtgcaggtgcgcgtcgggctgaagcagggttcgcggtcgcggcccaaggtagaagagcagggcctggacgtcgacactcccgccgaggtcgccaaatgggccgatgtggtcatggtgttggcccccgacaccgcccaggccgagatcttcgcaggagacatcgaacccaacctcaagcccggtgacgcgctgttcttcggtcacggactcaacgttcacttcggcttgatcaagccgcccgccgacgtcgccgtcgcgatggtcgccccgaagggaccgggtcatttggtgcgccgccagttcgtcgacggcaagggtgtgccgtgtttggttgcggtagagcaggatccgcgaggcgacggcttggcgctggcgctgtcgtatgccaaagcgatcggcggcacccgggccggcgtcatcaagacgacgttcaaagacgagaccgaaaccgacctgttcggtgagcaaacggtgttgtgcggcggcaccgaggaattggtcaaggccgggttcgaggtcatggtcgaagccggctaccccgcggaattggcctacttcgaggtgctgcacgagctgaagctgatcgtcgacttgatgtacgagggtggcctggcgcggatgtactactcggtgtcggacaccgcggaattcggcggctacctctcaggcccgcgcgtcatcgatgccggcaccaaggagcggatgcgcgacatcctgcgggagatccaggacggtagctttgtccacaagctggtcgccgacgtcgagggcggcaacaaacagctcgaagagttgcgccggcaaaacgccgagcaccccatcgaggtcgtcggcaagaaactccgcgacctgatgagctgggtggaccgcccgatcaccgagacggcc

SEQ ID NO: 26262 - DNA, 504 bp, Mycobacterium bovis
atgagcccgaagacgcacacgttgtcggtgttggtcgaagacaagcccggcgtgctggcgcgggtggcggcgctgttctcccggcgcggtttcaacatcgagtcgttggcggtgggtgccaccgagtgcaaggacaggtcacggatgaccatcgtggtctccgccgaggacactccgctcgagcagatcaccaagcagctcaacaagctgatcaacgtcatcaagatcgtcgagcaggacgacgagcactcggtgtcacgggaattggcgctcatcaaggtccaagccgacgccggcagccgcagccaagtgatcgaagcggtgaatctgtttcgcgccaacgtgattgacgtatccccggagtcattgaccgtcgaggccaccggtaaccgcggcaagttagaggccctgctgcgggtgttggagccgttcggtattcgcgaaatcgcccaatccggaatggtgtcgctgtcccgcggtccgcgcggcatcggcaccgccaag

SEQ ID NO: 26263 - DNA, 360 bp, Mycobacterium bovis
atgtatccacggcgtttcggcagccggcgtcggccgtccggccacccattaggctttgcggtcgtgtcccagatctcccgcgacgaggttgcccacctcgccaggcttgcccggctggcattgaccgaaaccgagctggacagtttcgccggccaactcgacgccatcctgacccacgtcagccagatccaggccgtcgacgtcaccggtgtgcaggccaccgacaatccgctcaaggacgtcaacgtcacccgcccggacgagaccgtgccgtgcctgacccagcgtcaggtgctcgaccaggcgcccgatgccgtcgacggccgcttcgccgtcccgcagatcctgggggatgaacag

SEQ ID NO: 26264 - DNA, 1854 bp, Mycobacterium bovis
gtgagcgcaccaaccaagccacactcaccgacattcaagccagagccacacagcgcggcgaatgagccaaagcacccggcggctcgtccgaaacatgttgcactgcagcagcttaccggtgcacaggcggtcatccggtcgctggaggaactcggcgtcgacgtcattttcgggattccgggcggtgcggtgctgccggtgtatgacccgctgttcgactcgaaaaagctgcgccacgtgctggtccgccacgaacagggcgccgggcatgccgccagcggctacgcgcacgtcaccggccgggtgggcgtgtgcatggcaacgtcgggtcccggagcgaccaacctggtgaccccgctggccgacgcgcagatggactcgatcccggtggtcgctatcaccggtcaggtcgggcgggggctgatcggcaccgacgccttccaggaggccgacatctcgggcatcacgatgccgatcaccaagcacaactttctggtccgctccggtgacgacattccgcgggtgctggccgaggccttccacatcgcggcctccggccgtccgggcgcggtgctggtcgacatccccaaggacgtgctgcagggccagtgcacgttcagctggccgccgcggatggagctgcccggctacaagcccaacaccaaaccgcacagccggcaggtccgcgaggccgccaagctgatcgcggccgcgcgcaagccggtgctgtatgtcggcggcggcgtcatccgcggtgaggccaccgagcagctccgggagctggccgagctgaccggcatcccggtggtcaccacgctgatggcccgcggcgcgtttcccgacagccaccggcaaaacctcggcatgcccggcatgcacggcacggtggccgccgtggcggcgctgcagcgcagcgacctgctgatcgcgctgggtacccgcttcgacgaccgggtgaccggcaagctcgactcgttcgcgccggaagccaaggtcatccacgccgacatcgacccggccgagatcggcaagaaccgccacgccgacgtgcccatcgtcggtgacgtcaaggccgtcatcaccgaactgatcgcgatgctgcgccaccaccacattcccggcaccatcgagatggccgactggtgggcatacctgaacggtgtgcgcaagacctatccgctgagctatgggccgcagagcgacggcagcctgagcccggaatacgtgatcgaaaagctcggcgagatcgccgggccggacgccgtcttcgtcgccggcgtcggccagcaccagatgtgggccgcgcagttcatcagatacgaaaagccgcgcagctggctgaactccggcggtctgggcaccatggggtttgccatcccggcggccatgggcgccaagatcgccctccccggcaccgaggtctgggcgatcgacggcgacggttgcttccagatgaccaaccaggagctggccacctgcgcggtcgagggcataccggtcaaggtggcgctgatcaacaacggcaacctgggcatggtgcggcagtggcagagcctgttctatgccgagcggtactcgcagaccgacctggccactcattcgcaccgcatccccgacttcgtgaaactggccgaggccttggggtgtgtggggttgcggtgcgagcgggaagaggacgtcgtcgacgtcatcaaccaggcgcgggcgatcaacgactgcccggtggtgatcgacttcatcgtcggtgccgacgcgcaagtgtggccgatggtggccgcgggcaccagcaatgacgagatccaggccgcccgcggcattcgccccctgttcgacgacatcaccgaaggccacgcc

SEQ ID NO: 26265 - DNA, 1435 bp, Mycobacterium bovis
gtccgggtccgattctgcccttcacccaccggaactccgcacgtcggtctggtccgcaccgcgctgttcaactgggcctacgcccggcacaccggtggcaccttcgtgttccgcatcgaggacaccgacgcccaacgcgacagcgaggaaagctatctggcgctgctggacgcgctgcgctggcttggcctggattgggatgaggggcccgaggtgggtgggccgtacgggccgtaccggcagtcgcagcgcgccgaaatctaccgtgacgtgctcgcccgactgctcgccgcgggcgaggcctaccacgctttctccacacccgaggaagtggaggcccgtcatgtcgcggccgggcgcaatcccaagctgggttacgacaatttcgatcgtcacttgaccgacgcgcagcgtgcggcgtacctggcggagggccgccagccggtggtgcggctgcggatgcccgatgacgacctcgcttggaatgacctggtgcgcgggcccgtgacgttcgcggctggctccgtacccgacttcgcgttgacccgagccagcggtgatccgttatacaccttggtcaacccgtgcgacgacgcgctgatgaagatcacccatgtgttgcgtggcgaggacctgctgccgtcgacgccgcgccagctggcgctacatcaggcgttgatcaggatcggggtagctgagcggattccgaaattcgcgcacctcccaacggtcttgggggagggcaccaagaagctctcgaagcgcgatccgcagtcgaacctgtttgcccaccgcgaccgcgggttcatccccgaaggcctgctgaactacctcgcgttgctcggctggtccatagccgacgaccacgacctgttcggtctcgacgagatggtggccgcgttcgacgttgccgacgtcaactccagcccggcccggttcgaccagaagaaggccgacgcgctgaacgccgagcacatccggatgctcgacgtgggcgacttcacggtcaggctgcgcgaccatctggatacccacggccatcacatcgcgttggatgaggcgggcattcgccgccgccgccgagttggtgcagacccgcatcgtggtgctcggtgacgcgtgggagctgttgaagttcttcaacgacgatcagtatgtgatcgatcccaaggccgcggccaaggagctaggcccagacggggccgcggtgctcgacgcggccctggccgcgctgacaagtgtgacggactggacggcacccctgatcgaggcggcccttaaggacgccttgatcgaaggtttggcgctcaaaccccgcaaggcgttcagccccatccgggtggccgccaccggcacgaccgtcagcccgccgttgtttgaatcgctggagctgctcggtcgtgaccgcagcatgcagcggctgcgcgcggcgcgc

SEQ ID NO: 26266 - DNA, 795 bp, Mycobacterium bovis
atgcgtatcggtcgaatcgccagcccggacggtgtcgcttttgccagcatcgacggcgagctgggcgagccgagtgagatgacggcccgcgagatcgccgagcacccgttcggtacgccgaccttcaccggacgctcctggccgctggccgacgttcgcctgctggctccgatactggcgagcaaggtggtctgtgtcgggaagaactatgccgatcacatcgccgaaatgggtggccggccgccggcagacccggtgatattcctcaagcccaacaccgcgatcatcggtccgaatacgccaattcgattgcccgccaacgcatcaccggtgcacttcgagggtgagctggcgatcgtgatcggccgggcgtgcaaggatgtcccggccgcccaggccgtcgacaatatcctcggctacaccatcggcaatgacgtgtcggcccgcgatcagcagcaatccgacggtcagtggacgcgagccaaggggcacgacaccttctgcccggtcgggccgtggatcgtcaccgacctcgctccctttgacccggccgatctcgagctgcgcaccgtcgtcaacggcgacgtcaaacagcacgcccgcacctcgctgatgatccatgacatcggcgccatcgtggaatggatctcggcgataatgaccttgctgccaggtgatctcatcctcaccggcacacccgcgggagtcggtcccatcgaggacggcgacaccgtctcgatcaccatcgagggaatcggcaccctcaccaatcccgtagtccgcaaaggaaagccg

SEQ ID NO: 26267 - DNA, 872 bp, Mycobacterium bovis
atgtcggacagaaagccggttcgcggacgacatcaggcccgtaagcgcgcggtggacctgctgttcgaggccgaggtccgcggcatcagcgcggccgaggtggtcgacacccgtgccgcgctggccgaagcgaagcccgacattgcccggctacatccgtacacggccgcggtggctcgaggggtcagtgaacacgccgcccacatcgacgacctgatcaccgcgcatctgcggggctggacgctggaccggttgcccgccgtggatcgcgccattctgcgcgtctcggtatgggagctgctccacgcggcggatgtgccggagccggtggtcgtcgacgaggccgtccagctggccaaggagctgtcgaccgacgactcgccgggctttgtcaacggggtgctgggccaggtcatgctggtgaccccgcagctgcgtgcggccgctcaagcggtgcgtgggggggcgtgatgacccggctcgagctgcgcgtcgtggtcgcggccgtcctggctgcgacggtggtgctcggtgccgtggtgtgcgccgcctacgggctgaccattgtcgcctcggcaatgtcgatctacgcgctgggtgtcggcgcctggctgtatcacgcgatcgaacgcctgatcttggcacgccgcatcagcactgttcgcacggcggcaaagccgttgcagccgctgctaccggtgatggccgccatcatgggcctgacgcaggccgtggtgcgctcgctgggtgacgtcaccgatctgccggcacgccgccgggagctttcgcagctgccggtgctgcgctgggtggacaactccgggaatcgggctaatcggcggatcgcggacagcgacgacttagctgactga

SEQ ID NO: 26268 - DNA, 1236 bp, Mycobacterium bovis
gtggccgccggcggcgcatgggaagatggtcaggtgttgcgctggatcaccgcgggggagtcacacggccgcgccttggtggccgtggtcgaaggcatggtcgccggcgtgcacgtcacctcggccgacatcgccgaccagctggcccgacgccggctgggctacggccgcggcgcacggatgacgttcgagcgcgacgcggtgaccgtgctgtccgggatacgccacggcagcaccctgggcgggcccatcgccatcgagatcggcaacaccgaatggcccaaatgggagaccgtgatggccgccgacccggtcgaccccgccgagctggccgacgtcgcacgcaacgccccgctcacccggccgcggccgggccacgccgactacgcgggcatgctcaaatacggcttcgacgacgcgcggccggtgctggagcgggccagcgcccgcgagaccgccgcccgggtcgcggcgggcacggtcgcacgggcattcctgaggcaggcgctgggtgtcgaggtgctctcccacgtcatctcgatcggcgcgtcggcaccctacgagggtccgccgccgcgggccgaggacctacccgccatcgacgccagcccggtacgcgcctacgacaaggccgccgaggcggacatgatcgcccaaatcgaggcggccaagaaagacggcgacaccctcggcggcgtggtggaggcggtcgcgctgggcctgccggtggggctggggtcgttcaccagcggcgaccatcggctcgacagccagctggccgccgccgtcatgggcatccaggcgatcaagggcgtggagatcggcgacggattccagaccgcgcgccgccgcggcagccgcgcccacgacgagatgtaccccgggcccgacggcgtcgtccgctccaccaaccgggccggggggctggaaggcgggatgaccaacgggcagccgctgcgggtgcgtgcggcgatgaagccgatctccacggtgccgcgcgcgctggccaccgtcgacctggcgaccggcgatgaggccgtcgccatccatcagcgctcggatgtgtgcgcggtgccggcggccggggtcgtggtggagaccatggtggcgttggtgctggcccgggcggcgctggaaaaattcggcggggattcgctggccgaaacccagcgcaacatcgccgcctaccagcgcagcgtcgccgaccgcgaagcaccggccgcgcgggtctccggt

SEQ ID NO: 26269 - DNA, 390 bp, Mycobacterium bovis
atgggcatcgtcggtgtggggatcgacctggtctccattcccgatttcgccgagcaggtcgaccagcccggaacggtgttcgccgagaccttcaccccgggtgagcgccgggacgcctcggacaagagttcgtcggcggcccggcacctggcggcccgctgggccgcgaaggaggcggtgatcaaggcctggtccggatcgcggttcgcgcagcggccggtgttgccggaggacatccaccgcgatatcgaggtggtcaccgatatgtggggcaggccgcgggtcaggctgaccggggccatcgctgagtatttggccgacgtgacgatccatgtgtcgctgacccacgaaggggataccgcggccgcggtcgccatcctggaggccccg

SEQ ID NO: 26270 - DNA, 1590 bp, Mycobacterium bovis
gtgtatgtggcagcgaccaaagcaagcacggcgaccgatgagccggtaaaacgcaccgccaccaagtcgcccgcggcttccgcgtccggggccaagaccggcgccaagcgaacagcggcgaagtccgctagtggctccccacccgcgaagcgggctaccaagcccgcggcccggtccgtcaagcccgcctcggcaccccaggacactacgaccagcaccatcccgaaaaggaagacccgcgccgcggccaaatccgccgccgcgaaggcaccgtcggcccgcggccacgcgaccaagccacgggcgcccaaggatgcccagcacgaagccgcaacggatcccgaggacgccctggactccgtcgaggagctcgacgctgaaccagacctcgacgtcgagcccggcgaggacctcgaccttgacgccgccgacctcaacctcgatgacctcgaggacgacgtggcgccggacgccgacgacgacctcgactcgggcgacgacgaagaccacgaagacctcgaagctgaggcggccgtcgcgcccggccagaccgccgatgacgacgaggagatcgctgaacccaccgaaaaggacaaggcctccggtgatttcgtctgggatgaagacgagtcggaggccctgcgtcaagcacgcaaggacgccgaactcaccgcatccgccgactcggttcgcgcctacctcaaacagatcggcaaggtagcgctgctcaacgccgaggaagaggtcgagctagccaagcggatcgaggctggcctgtacgccacgcagctgatgaccgagcttagcgagcgcggcgaaaagctgcctgccgcccagcgccgcgacatgatgtggatctgccgcgacggcgatcgcgcgaaaaaccatctgctggaagccaacctgcgcctggtggtttcgctagccaagcgctacaccggccggggcatggcgtttctcgacctgatccaggaaggcaacctggggctgatccgcgcggtggagaagttcgactacaccaaggggtacaagttctccacctacgctacgtggtggattcgccaggccatcacccgcgccatggccgaccaggcccgcaccatccgcatcccggtgcacatggtcgaggtgatcaacaagctgggccgcattcaacgcgagctgctgcaggacctgggccgcgagcccacgcccgaggagctggccaaagagatggacatcaccccggagaaggtgctggaaatccagcaatacgcccgcgagccgatctcgttggaccagaccatcggcgacgagggcgacagccagcttggcgatttcatcgaagacagcgaggcggtggtggccgtcgacgcggtgtccttcactttgctgcaggatcaactgcagtcggtgctggacacgctctccgagcgtgaggcgggcgtggtgcggctacgcttcggccttaccgacggccagccgcgcacccttgacgagatcggccaggtctacggcgtgacccgggaacgcatccgccagatcgaatccaagactatgtcgaagttgcgccatccgagccgctcacaggtcctgcgcgactacctggac

SEQ ID NO: 26271 - DNA, 1179 bp, Mycobacterium bovis
gtggtggatttcggggcgttaccaccggagatcaactccgcgaggatgtacgccggcccgggttcggcctcgctggtggccgccgcgaagatgtgggacagcgtggcgagtgacctgttttcggccgcgtcggcgtttcagtcggtggtctggggtctgacggtggggtcgtggataggttcgtcggcgggtctgatggcggcggcggcctcgccgtatgtggcgtggatgagcgtcaccgcggggcaggcccagctgaccgccgcccaggtccgggttgctgcggcggcctacgagacagcgtataggctgacggtgcccccgccggtgatcgccgagaaccgtaccgaactgatgacgctgaccgcgaccaacctcttggggcaaaacaccccggcgatcgaggccaatcaggccgcatacagccagatgtggggccaagacgcggaggcgatgtatggctacgccgccacggcggcgacggcgaccgaggcgttgctgccgttcgaggacgccccactgatcaccaaccccggcgggctccttgagcaggccgtcgcggtcgaggaggccatcgacaccgccgcggcgaaccagttgatgaacaatgtgccccaagcgctgcaacagctggcccagccagcgcagggcgtcgtaccttcttccaagctgggtgggctgtggacggcggtctcgccgcatctgtcgccgctcagcaacgtcagttcgatagccaacaaccacatgtcgatgatgggcacgggtgtgtcgatgaccaacaccttgcactcgatgttgaagggcttagctccggcggcggctcaggccgtggaaaccgcggcggaaaacggggtctgggcgatgagctcgctgggcagccagctgggttcgtcgctgggttcttcgggtctgggcgctggggtggccgccaacttgggtcgggcggcctcggtcggttcgttgtcggtgccgccagcatgggccgcggccaaccaggcggtcaccccggcggcgcgggcgctgccgctgaccagcctgaccagcgccgcccaaaccgcccccggacacatgctgggcgggctaccgctggggcactcggtcaacgccggcagcggtatcaacaatgcgctgcgggtgccggcacgggcctacgcgataccccgcacaccggccgccgga

SEQ ID NO: 26272 - DNA, 1071 bp, Mycobacterium bovis
atgagagtccgcgccggcgtgcggtccagtccgctgttgttgcacgcgggcacgcctccgacggctgccgccgccgagagcgggatgcgtaccctggttaccggcagctccggtcacctgggcgaggcgctggtgcgcactctgcgtgcacggggcgccgacgtcgtcagcctcgacagcagaccgtcgcggtacacgaatatcgttggctgcgtgagtgatcgagcactgctgcgagacgtgatggccggcgttgaggtggtgttccacgcggccgcccatcacaagccgcaactggccttcctgccgcgtcaggcgtttctggacacgaacatcatcggtacccagaccgtgctggatgctgcggtcgccgccaacgtccgcgccttcgtcatgacatcatcgacgaccgttttcggcgacgccctgacaccgccggcagaccagcccgcggcgtggatcgacgaatccgtcacgcccattcccaagaacatctacggcgtgaccaaagctagctccgaggacctctgccagttggcacatcgcaacgacggtttggcctgcgtcgtgctgcgtgttgcccgattcttcgtcgagggcgatgacatgcctgacctgtatgacgggcgcagccaggacaacatcaaagccaacgaatatgcctgccggcgggtcgcgctcgaagacgcggtagatgcgcacctcaacgccgcgcagcgagctccccagctggggttcgggcgctatctggtgtcggcgaccacaccgtttacccgtgatgacctgacgcagctgcgcaccgacgcggcatcggtgttcgcccggcgggtaccgctggccgcggctgtgtggacccagcgtggttggcgcttccccgaccgcctcgaccgcgtgtacgttaactcccgcgctcgccgtgacttgaattggcgtccgcggttcgacctaaacgcggtcgccgccagactcgcacgcgggcagtcggtgcacacgccgttgtcacaactggtgggctccaaggcatatgcccacagctcctaccaccgtggcgtgtttgctccggccaggccc

SEQ ID NO: 26273 - DNA, 1284 bp, Mycobacterium bovis
atgtctgtcgtcggcaccccgaagagcgcggagcagatccagcaggaatgggacacgaacccgcgctggaaggacgtcacccgcacctactccgccgaggacgtcgtcgccctccagggcagcgtggtcgaggagcacacgctggcccgccgcggtgcggaggtgctgtgggagcagctgcacgacctcgagtgggtcaacgcgctgggcgcgctgaccggcaacatggccgtccagcaggtgcgcgccggcctgaaggccatctacctgtcgggctggcaggtcgccggcgatgccaacctgtccgggcacacctaccccgaccagagcctgtatcccgccaactcggtgccgcaggtggtccgccggatcaacaacgcactgcagcgcgccgaccagatcgccaagatcgagggcgatacttcggtggagaactggctggcgccgattgtcgccgacggcgaggccggctttggcggcgcgctcaacgtctacgagctgcagaaagccctgatcgccgcgggcgttgcgggttcgcactgggaggaccagttggcctctgagaagaagtgcggccacctgggcggcaaggtgttgatcccgacccagcagcacatccgcactttgacgtctgctcggctcgcggccgatgtggctgatgttcccacggtggtgatcgcccgtaccgacgccgaggcggccacgctgatcacctccgacgtcgacgagcgcgaccagccgttcatcaccggcgagcgcacccgggaaggcttctaccgcaccaagaacggcatcgagccttgcatcgctcgggcgaaggcctacgccccgttcgccgacttgatctggatggagaccggtaccccggacctcgaggccgcccggcagttctccgaggcggtcaaggcggagtacccggaccagatgctggcctacaactgctcgccatcgttcaactggaaaaagcacctcgacgacgccaccatcgccaagttccagaaggagctggcagccatgggcttcaagttccagttcatcacgctggccggcttccatgcgctgaactactcgatgttcgatctggcctacggctacgcccagaaccagatgagcgcgtatgtcgaactgcaggaacgcgagttcgccgccgaagaacggggctacaccgcgaccaagcaccagcgcgaggtcggcgccggctacttcgaccggattgccaccaccgtggacccgaattcgtcgaccaccgcgttgaccggttccaccgaagagggccagttccac

SEQ ID NO: 26274 - DNA, 354 bp, Mycobacterium bovis
gtgatgcgccgcggtgagatttggcaggtcgatctcgaccccgctcgaggtagcgaagcgaacaaccagcgccccgccgtcgtcgtcagcaacgaccgggccaacgcgaccgccacgcgtcttgggcgcggcgtcatcaccgtcgtgccggtgacgagcaacatcgccaaggtctatccgtttcaggtgttgttgtcggccaccactactggtctccaggtcgactgcaaggcgcaggccgagcaaatcagatcgattgctaccgagcggttgctccggccaatcggccgagtttcagccgccgaacttgcccagctcgatgaggctttgaaactgcatctcgacttatggtcg

SEQ ID NO: 26275 - DNA, 1371 bp, Mycobacterium bovis
gtgcccatcgccaccatcaacccggctaccggcgaaacagtcaagacattcactgcggcgaccgatgacgaagtcgacgcggcaatagcccgggcccaccggcggttcgccgactaccgccagaccagcttcgcccagcgcgcccggtgggccaatgccaccgccgacttgctggaagccgaggccgaccaggccgccgcgatgatgacgctcgagatgggcaagacgctggccgcggccaaagccgaggcactgaagtgcgccaagggttttcgctactacgccgaaaacgccgaggcgttgctggccgacgaacccgccgatgcggccaaggtcggggcgtcggcggcctacggccgataccagccgctcggggtgatcctggcggtgatgccatggaacttccccctgtggcaagcggttcggttcgccgcaccggcactgatggccggaaacgtcggcctgctcaagcacgcgtcgaacgtgccgcaatgcgcgctgtacctggccgacgtcatcgcccgaggcggcttcccggacggctgcttccagacgttgcttgttagctcgggagccgtcgaagccatcctgcgtgatccccgggtcgcggcggccacgctgaccggaagcgagccggccggccaatcggtgggcgctatcgccggtaacgagatcaagccgaccgtgctcgagctcggcggcagcgacccgttcatcgttatgccgtcggccgatctggacgccgcggtcagcaccgccgtcaccggccgggtgcagaacaacggccaatcctgcatcgccgccaagcggttcatcgtccacgccgacatttacgacgatttcgtcgacaagttcgtcgcgcggatggcggcgttacgggtcggcgacccgaccgacccggacaccgacgtgggcccgctggccaccgagcagggccgcaacgaggttgccaagcaagtcgaggatgctgccgcggcgggcgcggtgatccggtgcggcggaaagcgtctcgaccggccgggctggttctacccgccgaccgtgatcaccgacatctccaaggacatggctctctacaccgaggaggtcttcggtccggtcgcctcggtgttccgcgcggcgaacatcgacgaggccgtcgagatcgccaacgccaccaccttcgggctgggatccaacgcctggacccgcgacgagaccgagcaacgacgcttcatcgacgacatcgtggcgggccaggtttttatcaacggcatgacggtgtcctatcccgaattgccgttcggcggggtcaagcgctcgggctatggccgggaactgtccgcacaccagatacgcgagttctgcaacatcaagaccgtctggatcgcc

SEQ ID NO: 26276 - DNA, 807 bp, Mycobacterium bovis
atgacaggactgctggacggcaaacggattctggttagcggaatcatcaccgactcgtcgatcgcgtttcacatcgcacgggtagcccaggagcagggcgcccagctggtgctcaccgggttcgaccggctgcggctgattcagcgcatcaccgaccggctgccggcaaaggccccgctgctcgaactcgacgtgcaaaacgaggagcacctggccagcttggccggccgggtgaccgaggcgatcggggcgggcaacaagctcgacggggtggtgcattcgattgggttcatgccgcagaccgggatgggcatcaacccgttcttcgacgcgccctacgcggatgtgtccaagggcatccacatctcggcgtattcgtatgcttcgatggccaaggcgctgctgccgatcatgaaccccggaggttccatcgtcggcatggacttcgacccgagccgggcgatgccggcctacaactggatgacggtcgccaagagcgcgttggagtcggtcaacaggttcgtggcgcgcgaggccggcaagtacggtgtgcgttcgaatctcgttgccgcaggccctatccggacgctggcgatgagtgcgatcgtcggcggtgcgctcggcgaggaggccggcgcccagatccagctgctcgaggagggctgggatcagcgcgctccgatcggctggaacatgaaggatgcgacgccggtcgccaagacggtgtgcgcgctgctgtctgactggctgccggcgaccacgggtgacatcatctacgccgacggcggcgcgcacacccaattgctc

SEQ ID NO: 26277 - DNA, 1884 bp, Mycobacterium bovis
gtgccattccgcaacgttgccatcgtcgcgcacgtcgaccacggcaagaccaccctggttgacgccatgttgcggcagtccggggcgctgcgtgaacgcggtgagctgcaggaacgggtgatggacacgggcgatctggagcgggagaagggcatcaccatcctggccaagaacaccgccgtgcaccgccatcacccggatggaaccgtcaccgtaatcaatgtcatagataccccggggcacgcggacttcggtggcgaggtggagcgcgggctgtccatggtggacggggtgctgctgctggtcgacgcctccgagggtccattgccgcagacgcggtttgttctgcgtaaagcgctggccgcccatttgccggtgattctggtggtcaacaagacagaccggcccgacgcccgcatcgccgaggtcgtggacgccagccacgacctgttgctagatgtcgcgtccgaccttgacgacgaagcggccgcagcggccgaacacgcgctgggcctgccgacgctgtacgcatccgggcgcgccggggtggcgagcaccacggcgccgcccgacggccaggttcccgacggcaccaacctggatccgttgttcgaggtgctcgaaaagcatgtgccgccgccgaaaggagagccggacgcaccgctgcaggcgctggtcaccaacctggacgcgtcgacctttctgggtcggttggcgctgatccgcatctacaacggccgcatccgcaaaggccagcaggttgcgtggatccgtcaggtggatggtcagcagaccgtcaccactgccaagatcaccgaattgttggccaccgaaggcgtggaacgcaaaccaaccgacgctgccgtcgccggcgatatcgtcgccgtcgccggcctgcccgagatcatgatcggcgacacgctggccgcttccgcgaatcccgttgccctgcccaggattaccgtggacgagccggcgatctcggtcaccatcggcaccaacacctcgccgctggcgggcaaggtgggtggtcacaagctcaccgcgcgcatggtccgaagcaggctggatgccgagctggtgggcaacgtgtcgattcgtgtcgtcgacatcggcgccccggacgcctgggaggtacagggtcgcggcgagctggcgctggcggtgctggtcgagcagatgcgccgagagggtttcgaattgaccgtgggtaagccacaggtggtgaccaagaccatcgatggcacgctgcacgagccattcgagtcgatgaccgtcgactgccccgaggagtacatcggcgcggtcacgcaattgatggccgcgcgcaagggccgcatggtggagatggccaaccacaccaccggctgggtccgcatggacttcgtggttcccagtcgcggcctgattgggtggcgcaccgacttcctcaccgagacccgtggctccggtgtcgggcatgcggtgttcgacggataccggccatgggcgggggagatccgggcccgccacaccggttctctggtatcggaccgggccggcgccatcacaccgttcgcgttgctgcaactcgccgatcgggggcagttcttcgtcgagcccggccaacagacctacgagggcatggtcgtcgggatcaacccccgtccggaggacctcgacatcaatgtcacccgggagaagaagctgaccaacatgcgctcatcgaccgcggatgtcatcgagacgctggccaagccgctgcagctggatctcgagcgcgccatggagttatgtgcgcccgacgaatgcgtcgaggtgaccccggagatcgtgcggatccgcaaagtcgagctggccgccgccgcccgggctcgcagccgggcgcgcaccaaggcgcgtggc

SEQ ID NO: 26278 - DNA, 1086 bp, Mycobacterium bovis
gtgtcggcgtctctgcccgtcttcccctgggacaccttggccgacgcgaaagcgctggccggggcccatccggatggcatcgtcgacctctccgtcggcactccggtcgacccggtcgcaccgctgatccaggaggcgctggcggcggccagtgccgcccctggctatccggcgaccgccggcaccgcacggttacgtgagtctgtggtggcagcgctggctcgccgctacggcatcaccaggctgaccgaggcggccgtgttgccggttatcggcaccaaggaactcatcgcctggttgccgacgttgttgggcctgggcggtgcggatctggtcgtcgtgcccgaattggcatatccgacttatgacgtcggcgcccgcctggccggaacgcgggtgctgcgtgcggatgcgctgacccagctgggtccgcaatccccggcactgctctacctgaactcgccgagcaacccgaccggacgggtgctgggtgtcgaccatttgcgcaaggtggtcgagtgggcccggggcagaggcgttctcgtggtttccgacgagtgctacctgggattgggctgggacgccgaaccggtttcggtgctacatccctcggtgtgcgacggcgaccacaccgggttgctggctgtgcactcactatcgaagagctcatcgctcgccggctaccgagcgggtttcgtcgtcggtgacctcgagatcgttgccgagctactagcggtgcgcaaacacgccgggatgatggtgccggcgccggtacaggcggctatggtggccgcgctggacgacgacgcgcacgaaaggcaacagcgggagcgctacgcacaacggcgtgccgcgctgttgccggcgctgggctccgcgggttttgcggtcgactattcggacgccggattgtatctatgggccactcgcggcgagccgtgccgcgacagtgtcgcgtggctggcgcagcggggcatcctggtggcaccgggtgatttctacggcccgggtggggctcagcacgtgcgggtggcgctgacggccaccgacgagcgggttgcggcggcggtcggacggctcacctgt

SEQ ID NO: 26279 - DNA, 3696 bp, Mycobacterium bovis
gtgaccgttacacctcacgtcggtggaccgctcgaagagctgctggagcgcagcgggcgcttcttcaccccaggtgagttctcggccgacctgcgcaccgtaacccggcgcggcggccgcgaaggtgacgtgttctaccgcgatcggtggagtcacgacaaagtggtccgatccacgcacggagtcaactgcaccggatcctgctcatggaagatctacgtcaaagacgggatcatcacctgggaaacccagcagaccgactacccgtcggtgggcccggaccggcccgaatacgagccacgaggttgtccccgtggcgcgtcgttctcctggtacagctattcgccgacgcgggtgcgctatccgtatgcccggggcgtgctggttgagatgtaccgggaagccaagacccgcctgggcgacccggtgctggcgtgggccgacattcaggcggatcccgagcgcagacgccgctatcaacaggcccgcggcaagggtgggctggtccgggtgagctgggccgaggccagcgagatggtggccgccgcccacgtgcacaccatcaagacatacggcccggaccgggtcgccggcttctcgccgattccggcgatgtcaatggtcagccatgccgcggggtcccggttcgtggagctgatcggcggcgtgatgacgtcgttctacgactggtacgccgacttgccggtggcctcgccgcaggtgttcggcgaccagaccgacgtgcccgaatccggcgactggtgggatgcgtcgtatttggtcatgtggggctccaacgtcccgatcacccggacgcccgacgcacattggatggcggaggcccgttaccgcggcgctaaagtcgttgtcgtcagcccggactacgccgacaacaccaagttcgccgacgagtgggtgcggtgcgccgccggtaccgataccgcgctggcgatggcgatgggccacgtgatcctgtcggaatgttacgtccgtaaccaggttccgttctttgtcgactatgtgcgccgctacaccgacctgccgtttttgatcaagttggaaaagcggggcgacctgctggttcccggaaagttcttgaccgcggccgacattggtgaagaaagtgagaacgcggcgttcaaacccgccctgctggatgagcttacgaataccgttgtcgtgccgcagggctcactgggattccgtttcggtgaggacggtgttgggaagtggaacctggacctgggttcggtggtgccggcgctaagtgtggagatggacaaggctgtcaacggcgatcgcagtgctgaactggttacgctgcccagctttgacaccatcgacgggcacggtgagacggtgtcgcgtgggctgccggtgcgccgggcgggcaagcatctggtgtgcacggtgttcgatctgatgttggcccactacggggtggcgcgtgcggggctgcccggcgaatggccgaccggctaccacgaccgaacccagcagaacaccccggcctggcaggagtcgatcaccggtgtgccggccgcgcaggcaatccggtttgccaaggaattcgcccgcaacgcgaccgaatccggaggacggtcgatgatcatcatgggcggcggaatctgtcactggttccacagcgatgtcatgtaccgctcggtgttggcgctgctcatgttgaccggatcgatgggacgcaacggcggcgggtgggcgcactacgtcggccaggagaaggtgcgtccgttgaccgggtggcagacgatggcgatggccaccgactggtcgcggccgccgcgtcaggtgcccggcgcgtcgtactggtatgcgcacaccgaccaatggcgctacgacggctacggcgcggacaagcttgccagcccggtgggtcgcggcaggttcgccggcaagcacaccatggacctgctgacctcggccacggcgatgggctggagcccgttctatccacaattcgatcggtccagtctcgatgtcgccgacgaggcccgcgccgcgggccgcgacgtgggtgattacgtcgccgaacaacttgcccagcacaagctgaagctctcgattaccgatccggataacccggtcaactggccgcgggtgctcaccgtctggcgggcgaacctgatcggctcgtcgggcaagggcggcgagtatttcttgcggcatctgctgggcaccgactccaacgtacagtccgaccctcccaccgacggtgtgcatccccgggatgtggtgtgggacagcgacattccagagggcaagctcgacctgataatgtcgatcgacttccggatgacgtcgacgacgctggtgtcggatgtcgtgttgcccgccgcgacctggtacgagaaatccgacctgtccagtaccgatatgcacccgtacgtgcactcgttcagtccggcgatcgatccgccgtgggaaacccgttcggactttggcgcattcgccgccatcgcgcgtgctttcagtgcgctggcgaaacgtcatctgggcactcgcaccgatgtggtgctgaccgcgctgcagcacgacaccccggatgagatggcatatcccgatggcaccgaacgtgattggctggcgaccggagaagtcccggtgccaggcaggacgatgagcaagctcactgtggtggagcgggactacaccgcgatctacgacaagtggctgaccctgggaccgctcatcgaccagttcgggatgaccaccaagggatataccgtccatcccttccgggaggtcagcgagctggcagccaacttcggggtgatgaattccggtgtggcggtgggtcgtccggcgatcaccacggctaagcggatggctgacgtgatcctggcgctgtccggcacatgcaacgggcgactcgcggtcgagggattcctcgagctggagaagcgtaccgggcagcggctggctcatctggccgagggcagcgaggaacgccgcatcacctacgccgatacccaggcgcgtcccgtgccggtgatcaccagcccggaatggtcgggcagcgagagcggtggccgccgctacgcgccgttcacgatcaacatcgagcatcttaagccgtttcacacgctcaccgggcgtatgcacttctacctggcgcatgactgggtcgaagaactcggcgagcagttgcccgtctatcggccgccgctggacatggcgcggctgttcaaccagcccgagctcggaccgaccgacgatggactcgggctcaccgtgcgctatctgacgccgcactccaagtggtcgtttcactcgacctaccaggacaacctatacatgttgtcgttgtcccgtggcggtccgacgatgtggatgagcccgggtgacgcggcgaaaatcaatgtgcgcgacaatgattgggtagaggcggtcaatgccaacggcatctacgtgtgccgggcaatcgtcagccaccggatgcccgagggtgtggtgttcgtctaccacgtgcaggagcgcaccgtggacacgccgcgcaccgagaccaacggcaaacgcggcggcaaccataacgcgctgacccgcgtacgaatcaaacccagccacctggccggtggctacggccagcacgcgttcgcgttcaactacctgggtccgaccggtaaccagcgtgacgaggtgaccgtggtgcgccgccgcagccaggaagtgcggtac

SEQ ID NO: 26280 - DNA, 1674 bp, Mycobacterium bovis
atgaaggtcatggcgcagatggcgatggtgatgaacctcgacaaatgcattggttgccatacctgctcggtgacctgcaagcaggcctggaccaatcgctcgggaaccgagtacgtgtggttcaacaatgtcgaaacccgtccgggtgtgggctacccgcgcacctacgaggatcaggagcggtggcgcggggggtgggtgcgcgacaagaagggccggctgcggctgcgcgacggcggccggatccataagctgttgcgcatctttgccaaccccaagctgcccactatcggcgactactacgagccgtggacctatgactacgaaaacctgacatcggcgccggcgggtgacacctttccgaccgcggcgccgcgaagcctgatcagcggcaatccgatgaaggtgtcgtggggatccaactgggacgacaacctggccgggtcgccagagatcgtgccgaacgacccggtgctaaagaaggtcaaccaagtcaaccaagaggtcaagctgaagcttgaagagaccttcatgttttacctgccgcggatctgcgagcactgcctgaacccgtcgtgtgtggcgtcgtgtccgtcgggggcgatgtacaagcgcaccgaggacggcatcgtgctcgtcgaccaggaccgctgccgcggctggcggatgtgtgtgtccgggtgcccatacaagaaggtgtatttcaaccacaagaccggcaaggccgaaaagtgcaccctgtgctatccgcgcatcgaggtggggttgccgacggtgtgctcggaaacgtgtgtggggcggctgcgctatctgggtctggtgctctatgacgtcgatcaggtgctgcaggccgcgtcggtggaaagcgacaccgacctctacgaggcgcagcgccggatcctgctggacccgcacgatccgcgggtgatcgccggggcgcgcgcggaaggcatcgccgacgagtggatcgaggccgcccagcggtccccggtgtacgcgttgatcaacacctaccgggtggcgctgccgctacatccggagtaccggaccatgccgatggtctggtacatcccgccgctgtcgccggtggtcgacgcggtcagccgcgacgggcacgacggggaggacctgggcaatttgttcggcgcgctggacgcactgcggattccgattgcctatctggccgagctgttcaccgcgggcgacaccgaggtggtcgcgggcgtgttgcggcggctggcggcgatgcgctgctacatgcgcgacatcaacctgggccgggagacccagccccacatcccggaatcggtcgggatgaccgaggagcagatctaccagatgtaccgactgttggctgtggcgaaatatgaagagcgctatgtcattccgacgtcgtacgcgggggagctgccggccgcggcgatgaccgacgatatggggtgctcgttgtcggtcgacggcggaccgggaatgtacgagtccggtccgttcgggcagggcagccctactccggtgccaatcgccgtggagagcttccacgctctgcagcatgccggtagcgcggccaccggcggcgctggccgatcccgggtcaacctgctcaactgggaccccaacggcgcagcggcggggctcttcccggagcctcagcccagcaaggatgtggtccagcga

SEQ ID NO: 26281 - DNA, 1005 bp, Mycobacterium bovis
gtgaggactccggcgacggtggtggcaggcgttgacctgggcgacgctgtctttgccgcggccgtgcgtgctggtgtcgcgcgagtcgagcaactcatggacaccgagctgcgccaggccgacgaggtgatgagcgattcgctgctgcacttgttcaatgccggtggcaagcggttccgtccactgttcaccgtgctgtcggcgcagatcgggccgcagccggatgccgcagcggtgacagtcgccggggcggtgatcgagatgatccacctggcgaccctctaccacgatgacgtgatggacgaggcccaggtccgccgcggcgcgcccagcgccaacgcgcaatggggtaacaacgtcgcgatcctggctggcgactacctactggccaccgcatcgcggctggtggcgaggttgggaccggaggcggtgcggatcatcgccgacaccttcgcccagttggtgaccgggcagatgcgtgagacgcgcggcacgtcggagaacgtggactccatcgagcagtacctgaaggtggtccaggagaagaccggcagtctaatcggggcggccggccggctgggtgggatgttctccggtgccaccgacgaacaggtcgaacggctgagccgcctcggcggcgtggtgggcaccgcgtttcagatcgccgacgacattatcgacatcgacagcgagtctgacgagtcgggcaagctgcccggtaccgatgtgcgcgaaggagtacacaccctgccgatgctctacgcgttacgggaatcagggcccgattgcgctcggttgcgcgcactgctgaacggaccggtcgacgacgacgccgaggtgcgcgaggcgctgacattgttgcgggcgtcgccgggcatggcccgggccaaagacgtcctggcgcagtacgcggctcaggcacgtcacgagctggccttactgcccgacgtcccgggacggcgtgccctggcggcgctggtcgactacaccgtgagccggcacggc

SEQ ID NO: 26282 - DNA, 1427 bp, Mycobacterium bovis
ccggcgcggctgggcttcgccggcgcggtgctgatcaccgcaggcgggctgggagccggcagcgtccgccaacatgacccgctgctggagtcgattcacatgtcctggctgcgcttcggccacggactcgtgctgtcgtcgattctgttgtggacaggtgtgggtgtgatgctgcttgcgtggctgggtctaggccgacgggtcctcgccggcgaagccaccgagttcaccatgcgggcaaccaccgttatctggctggcgccgctactgctgtcggtgcccgtcttcagccgggacacttactcgtatctggcccaaggggcgcttctgcgcgacggtctggatccttacgctgttggcccggtcggtaatcccaatgcgctgctggacgacgtaagcccgatctggacgatcaccaccgcgccctacggtcctgcgttcattctggttgcgaagttcgtcacggtaatcgtcggcaacaatgtcgtcgccggaaccatgctgttgcgtttgtgcatgctgcccgggctggcgttgctggtctgggccactccacgcttggccagccatctcggcacccacggcccgaccgcgctgtggatctgcgtgctgaacccactggtcctcatccatctgatgggcggggtgcacaacgagatgctgatggtgggtctgatgaccgccggtatcgcgttgaccgtccagggccgtaatgtcgcggggatcatcctgatcaccgttgcgatcgcggtgaaggccaccgccggaatcgcgttgcccttcttggtctgggtttggctgcgtcatctgcgtgagcgacgggggtaccggccggtccaggcgttcctggcagccgccgcgatatcgctgctgatcttcgtcgcggtgttcgcggtgctgtctgcggtagccggcgttggcctagggtggctgaccgcgctggccggctcggtgaaaatcatcaactggctgacggtgcccaccggggcggccaacgtgatccacgcgctgggcagagggctcttcacggtcgacttctacaccttgctgcggatcacccggctgatcggaatcgtgatcatcgcggtgtcgctgccgctgttgtggtggcggttccggagcgacgaccgggccgcgctgaccggggtcgcatggtcgatgctgatcgtggtgctgttcgtacccgccgccctgccgtggtactactcctggccgctggcggtcgctgccccgttggcccagtcacgacgggcgatcgcggccatcgccgggctctcgacttgggtgatggtgatcttcaaacccgacggatcgcacgggatgtattcgtggctgcacttctggatcgccaccgcctgcgcactgactgcgtggtatgtcctgtatcggtcaccggaccggcgcggagtgcaggctgcaaccccggt

SEQ ID NO: 26283 - DNA, 1937 bp, Mycobacterium bovis
aaacggcccggcaaaacgcagaaagcccggcaagcccaggaagccacgaaatcccgccctgcgacacggtcagacgtcgcacccgcgggtcgctcgactcgtgcgaggcgcacccggcaggtggtggacgtcgggacgcgcggtgcgtcgttcgtctttcggcatcggaccggaaacgcggtcatcttggtgttgatgttggtcgcggcaacacaattgttctttctgcaggtatcacatgccgcgggcctgcgtgcgcaggcggccggccaactcaaggtcaccgacgtccagccagcggctcgcggcagcatcgtcgaccgcaacaatgaccggctcgcgttcaccatcgaggcgcgtgccctgacgttccagccgaagcggattcggcggcaattggaagaggccaggaagaagacgtcggctgcacccgacccgcagcagcgcctgcgcgatatcgcccaggaggtcgccggcaagctgaacaacaagccagatgccgcggccgtgctgaagaagctgcaaagcgacgagaccttcgtctacttggcgcgtgcggtcgacccggctgtcgccagcgcgatctgcgcgaagtatcccgaggtcggtgcggaaagacaggatctgcgtcagtacccgggtgggtcgctggcggcaaacgtcgtcggtggcatcgactgggatggtcatgggctgctgggtctggaggactccctggatgcggtgctggccggaaccgacggatcggtcacctacgaccgtgggtcagacggcgtcgtcatcccggcagctaccggaatcggcacaaggcggtccacggttccaccgtcgtgctcaccctcgacaacgacatccagttctacgtgcagcagcaggtgcagcaggccaagaacctatcgggggctcacaacgtctcggccgtcgtcctggacgccaagaccggcgaggtgctcgcgatggccaacgacaacaccttcgacccgtcgcaagacatcgggcgccagggcgacaagcagttgggcaacccggcggtgtcgtcgcccttcgagccgggctcggtgaacaagatcgtcgccgcgtccgcggtcatcgagcacgggttgagcagccccgacgaggtgctacaggtgcctggctcgatccagatgggcggtgttaccgtgcatgacgcttgggagcacggcgtgatgccctataccaccacgggggtgttcggaaagtcctccaacgtcggcacgctgatgctttcccaacgtgtcggaccggaacgctattacgatatgctccgcaagttcgggttgggacagcgcaccggcgtgggcctgcccggtgagagcgccggactggtgccgccaatcgaccagtggtcgggcagtacgttcgctaatcttcctattggccaaggtctttcgatgactttgctgcagatgaccggcatgtaccaggccatcgccaacgatggagtgcgggtacccccacgcattatcaaggccaccgtcgcacccgacggcagccggaccgaagaaccgcgccccgacgacattcgcgtggtgtcggcgcagaccgcccagaccgtgcgccagatgctgcgtgccgtggtgcaacgcgatccgatgggctaccagcagggtaccgggccgacggccggggtgcccggctatcagatggccggcaagaccggtaccgcgcagcagatcaaccctggctgcggctgctacttcgacgacgtgtattggatcaccttcgccggaatcgccactgccgacaatccccgctacgtgatcggcatcatgttggacaacccggcgcgcaactccgacggcgcgcctgggcactcggccgccccgctgttccacaacatcgcgggctggctgatgcagcgcgaaaacgtcccgctgtcacccgatcccgggcctcctttggtcttgcaggccacc

SEQ ID NO: 26284 - DNA, 984 bp, Mycobacterium bovis
ttggcgcaacgttgcttcgaactgcttacccccgcactaacccgctactatccagacggctcgcaggcggtccttctcgacgcgaccatcggcgcgggcgggcatgcggagcggtttttggagggattgccgggtctgcgcctgatcgggctcgaccgtgacccaaccgctctggacgtcgcgcggtctcggctggtgcgattcgctgaccgacttaccctggtgcacacccgctatgactgtctgggcgcagcgctggctgaatccggttatgccgcagtgggatcagtcgacggaatcctgttcgatctcggcgtctcatccatgcagctcgaccgcgccgagcggggcttcgcctacgccacggacgcgccattggacatgcggatggacccgacgacgccgttgaccgcagctgacattgtcaacacttacgacgaggcggcactagccgacatcctgcgtcgctacggagaggagcggtttgctcggcgcatcgctgccggtatcgtccgccgacgcgcaaaaaccccgttcacctcgaccgccgaactggttgccctgctgtaccaggcgattccagctccggcccggcgtgtcggcgggcatccagccaagcgaacattccaggcgctgcgcatcgcggtcaacgatgagctggaatcgctgcgcacggccgttcctgccgcgctggatgccctcgctatcggtgggcgcatcgcggtgctggcctaccagtcgctagaggacaggatcgtcaaacgggtgttcgccgaggcagtcgcgtcggccacccctgcgggacttccggtcgaacttcccggccatgagccgcgattccgttcgttaacgcacggcgccgaacgagcgagtgtggctgagatcgaacgcaatccccgcagtactccagtgcggttgcgggccctgcaacgagtcgagcaccgggcgcaatcgcagcaatgggcaaccgagaagggtgattca

SEQ ID NO: 26285 - DNA, 429 bp, Mycobacterium bovis
atgtttctcggcacctacacgcccaaactcgacgacaaggggcggctgacgctgccggccaagtttcgcgacgcgttggcaggggggttgatggtcaccaagagccaagatcacagcctggccgtttacccgcgggcggcgttcgagcagctggcgcgccgggccagcaaggcgccacgaagcaaccccgaggcgagagcgttcctacgtaatctcgccgccggtaccgacgaacagcatcccgacagtcaaggccggatcaccttgtcggccgaccaccgccgctacgcaagcctttccaaggactgtgtggtgatcggcgcggtcgactatctcgagatctgggatgcgcaagcctggcagaactaccaacaaatccatgaagagaacttctccgcggccagcgatgaagcactcggtgacatcttc

SEQ ID NO: 26286 - DNA, 1656 bp, Mycobacterium bovis
atgagcgacaatgccaaacaccacagggatgggcatttggtggctagcggacttcaggatcgcgcagcgcgcacaccgcaacacgagggcttcctcgggccggaccgaccatggcacctgtcgttcagtctgctgctggcgggttctttcgtgctgttctcgtggtgggcattcgactacgcagggtccggcgcgaacaaagtcatcctggtgctcgccaccgtcgtcggcatgttcatggccttcaacgtcggcggcaatgatgtcgccaactcgtttggcaccagcgtcggcgcgggcacgttgaccatgaaacaggcgcttctggtcgcggcgatcttcgaggtcagcggcgcggtgatcgccggcggcgacgtcaccgagaccatccgcagcggcatcgttgatctgtccggggtgtccgtcgacccacgcgacttcatgaacatcatgctgtcggcgctatcggcagccgcgctctggctgctgtttgctaaccgtatggggtacccggtgtcgaccacacactcgatcatcggcggcatcgtcggcgcggcgatcgcgctggggatggtgagcggccagggcggtgccgcactcaggatggtccagtgggatcaaatcggccagatcgtggtgtcctgggtgctgtcgccggtgttgggcggcttggtgtcgtacctgctctacggcgtcatcaaacggcacatcctgctgtacaacgaacaggccgaacgacggctaacagaaattaagaaagagcgcatcgcacaccgcgagcgccacaaggcggcgttcgaccggctcaccgagatccagcagatcgcctataccggcgccctggcgcgcgacgccgtcgcggcaaaccgcaaggactttgatcccgacgaactggaatccgattactaccgcgagctacacgaaatcgacgccaagacatcgtcggtcgacgcgttccgggccctgcagaactgggttccgctggtcgccgccgccggatccatgatcattgtcgcgatgctgctgttcaaggggttcaagcacatgcacttgggccttaccacgatgaataactacttcatcatcgcgatggtcggtgcagcggtgtggatggccacctttattttcgccaagacacttcggggcgaatcactttcacggtcaacgtttttgatgttcagctggatgcaggtctttacggcctcgggcttcgccttcagccacggcagcaatgacattgccaacgccatcgggccgttcgcggcaatcctggatgtgctgcgcacgggcgccattgaaggcaacgcagcggtgcctgccgcggccatggtaacgttcggcgtcgcgttgtgcgcggggttgtggttcattggacgacgggtgatcgccaccgttggacacaacctcaccacgatgcacccggcatcggggtttgctgccgaattgtcggccgccggggtggtcatgggagccacggtcctgggtcttccggtttccagcacgcacattcttatcggcgccgtcctcggcgtcggcatcgtaaaccggtccaccaactggggactgatgaaaccgatcgtgctagcgtgggtcatcacgctgccttcggcggcgatcctcgcctcggtcggtcttgtcgcgctacgcgcgattttc

SEQ ID NO: 26287 - DNA, 1050 bp, Mycobacterium bovis
atgttggccgcctgggcggtggtcgagggctgcctcatggccgtcttcttcgtcaccgacggcggcgaagtcttcatcagcgcgacgccgacgacagcgcaatgggtgatcctggcgctgctcgcggttgctcttccgctggcctccctcgtcggctggttggtgtcgcagatatcaagcgggcgtggccaagcggcggtggcgaccatggcggtggccttcgcggccgcatccgacgtcatcgaatccggcccgatccagctgttgcggaccgccgtcgtggtgggcctggtgctgctgcagaccggctgcggcgtcgggtcggtgcttggctgggcggtgcggatgacgctggagcaccttgcgacggtcggcacgctggcggtccgggccctgccgatcgtgctactgacggcattggtgttcttcaacacctatgtctggctgatggccgccaacatcaacggcgagcggctgccgctggcgatggtttttctgctcgccatcgccggggcgttcgtcgtgtccaagacggtggaacgggtgcgtccgctgcttcgctcaacgacggtgatgccccaaggcagccaaagcctggccggcacacccttcgcgaccatgggcgacccctctcccggcttccccctcacccgggccgaacgcctcaacgtggtcttcctgctggcggccttgcaactcgtcgagatcctggtagtggcgtcggtcggcgccgcgatatacctcgttctgggcatgatcattctcactccgccgctgcttcgggaatggacgcactacgattcgatgaccacgacggtgctcggcatgacgttcccggcgccggattcgctcatccgtatgtgtcttttcctgggcgcgctgacgttcatgtacatcagcgcccgcgcggtcgacgacgccgagtaccgcgcgatgttcctcgaccctctgatcgacgacctgcacaccgcgctgctcgcgcgcaaccgctatcgcaacaacgtggtgaccgcgccgtgcgccggtgttgacgccggtcacgtcgatgac

SEQ ID NO: 26288 - DNA, 3324 bp, Mycobacterium bovis
tcgggcctctccaacgtcggcgccgacctgaccggcgtgctccgcggcccgaacgggtcgaccttcaacgcgggcctggcaaacctcggccaattcaacgtgggcagtgcaaacctcggcagtgcaaacctcggcagtgcaaacctcggcaattcaaacgtcggcttcggcaacattggcaacgcgaacatcggcggcgcaaacatcggcgactttaacgtcgggatcgcaaacaccggtccggggctaacggcggctgtcaacaacatcggtatcggcaacaccggcaactacaacatcggtgtcggcaacaccggtaactacaacatcggcttcggcaacaccggcaacaacaacatcggcatcggcctgtccggcgacaaccagatcgggttcggcccgctgaacgccggcatcgccaacatgggcctgttcaacctgggcgacaacaactttggcatggccaacgcgggcaacttcaaccagggcattgccaacaccggcaacaacaacatcggcttgttcaacaccggcaacaacaacgtcggcatcgggctgaccggcgacggcttgtccggcttcagctccctgaactccggcgccggcaacaccggtttcttcaactccggcaccgccaacaccggcttgttcaactccggcaccggcaacaccggcttgttcaactcgggcaccggcaacgtcggcatcggcaacatgggcaccggcggcttcggcgtcggcctatccggcgacagccaggtgggcatcggcggcaccaactcgggcagtttcaacatcggcttgtttaactcgggcaccggcaatgtcggcatcggcaactcgggcaccggcaacgtcggcatcggcaacaccggcaccggcaacaccggcatcggaaacagcggcaactacaacaccggcttgctcaacgcgggcctggtcaacaccggcatcgccaacccgggcaaccacaacaccggcctgttcaacatcggcaccttcaacaccggcatcgccaacccgggccactacaacaccggctcctacaacaccggtagctacaacaccggcatggcaaacgccggagactacggcaccggcgcgttcatcaccggcagcatgaacaacggcttgctctggcgcgccgaccggcagggcctgctggcggccaactacaccatcaccatcgagcgacctgccgcgttcctcaatgtcgacatcccggtcaacatccccatcaccggcgacatcaccaatgtctccatccccgccattacgttccccagaatcgacgccagcggaagcgtcgacataggcatcctcagtggcaccgtcttggccccggtcggtccgatcaccctgcatggcggggacgcgtcggccccgctggacacacccatcgaaattgacttcggcccctcgccggcgatcaacctcaacatcggcaagcccgacggctccaccgtgatcaacatcgtgggcggcgccggcgccggcccgatcagcattccgatcatcgacttgcggccagcgcccggcttcttcaacgccaccaccggcccgtcgtcgggcttcctcaactggggtgctggcagcgcatcgggcttgctgaacttcggcaacaactcgggcctctacaacttcgccactagcagcatgggaaattcgggcttccaaaactatgggtcgctgcagtcgggctgggcgaatttgggcaacagcatctcgggcatctacaacaccggcttgggagcaccggcaaatgtctcgggcttgctcaacatcggcaccaacctggctgggtggttgcagaacggcccgaccgagacgaccttcagcgtgggcttggccaacctcgggttctggaatctgggtagcgcaaacatcggcaactacaacctgggcagcgccaacatcggcgtctacaacctgggcagcgccaacatcggcgacttcaacctgggcagcgccaacatcggcgacttcaacctgggcagcgccaacatcggcagctccaacatcgggttcggcaacgtcggtccggggctgacggcggccatcggcaacatcggcttcggcaacaccggaaacggaaacatcggcatcggcaataccggcaccggcaacatcggcttcggcaacaccggaaacggaaacatcggcatcgggctgaccggcgacaccatgaccgggttcggcggctggaactcgggcaccggcaacatcgggctattcaactccggcaccggcaacatcggcttcggcaactccggcaccggcaactggggcatcggaaactccggtgactacaacaccggcatcggcaacaccggcagcaccaactccggcttcttcaacaccggcctggtcaacaccggcattggcaactccggtgactacaacaccggcctattcaacgccgggaacaccaacaccggcagcttcaaccccggcgactacaacaccggcggcttcaaccccggtaactacaacaccggctacttcaacccgggcaactccaacaccggcttcgccaactccggcgatgtcaacaccggcgccttcaattcgggcaactacagcaacggcttcttctggcggggcgactaccagggcctaggcggtttcgcctaccagagcgccgtttccgaaatcccgtggagctacgacataggttccaacattgaaatacccatcgagggcgacatcaacgccatcacccaggacgcgttcactattgacgaattcgaaatacccatcaagttgcgggtgtcggtctgcgtgatctacatccctttcaaggggtgtgtaaagcatgtctcggtcaccatacccatcaccaccgaacatctcggcccctacgaaatcgatgccagcacgatcaaccccgaccagcccatcgacacggctttcacccaaaccctcgatttcgccggcagcggcaccgtgggcgcgttccccttcggcttcggctggcagcagagcccgggattcttcaactcgaccacaaccccgtcgtcgggcttcttcaactccggcgccggtggcgcatcgggcttcctcaacgacgccgcagccgccgtgtcgggcctgggaaacgtcttcaccgagacttcgggcttcttcaatgctggcggcgtagggaattcgggcttccaaaacttcggcaacctgctgtcgggctgggcgaacctaggcaataccgtctccggtttctacaacacgagcatgctggacctcgcgacccaagcccttatctccggcttcggcaaccacggagcccgactctccggcatcctcaacaacggtagcggaccctaactc

SEQ ID NO: 26289 - DNA, 1674 bp, Mycobacterium bovis
atggctgagttcatctacacgatgaagaaggtccgcaaggcgcacggcgataaggtgatcctcgacgacgtgacgttgagtttctatccgggcgccaagatcggtgtcgtcggccccaacggggccggtaagtcgagcgtcttgcggatcatggccggtttggacaagccgaacaacggcgatgccttcctggccaccggcgccaccgtgggcatcctgcaacaggaaccgccgctgaacgaggacaagaccgttcgcggcaatgtggaagagggcatgggggacatcaagatcaagctcgaccgcttcaacgaggtcgccgaattgatggccaccgactacaccgacgagctgatggaagagatgggtcggctgcaagaggaactggaccacgccgacgcgtgggacctcgacgcgcagctcgagcaggccatggatgcgctgcgctgtccgccggccgacgagccggtaaccaacctatccggtggcgagcgtcgccgggtggcgctgtgcaaactgctgttgtccaaacccgacctgttgttgctcgacgagccgaccaaccacctagacgcggaaagtgtgcagtggctcgaacagcatctggccagctaccccggtgcgatcctggcggtcacccacgaccgttacttcctggacaacgtcgcggaatggatcctggagctcgatcgtggccgcgcctacccctatgagggcaactactcgacctatctggagaaaaaagccgagcggctcgcggtgcaaggccgcaaggacgcgaagctgcaaaagcggttgaccgaggagttggcttgggtccggtccggggccaaggcgcgccaggccaaaagcaaggcgcgcctgcagcgctacgaggagatggcagccgaggcggagaagacccgcaagctcgacttcgaggagattcagatcccggtcgggccccgcctaggcaacgtggtggttgaggtcgaccacctcgataagggctacgacgggcgcgccctgatcaaggacctgtcgttcagcttgccccgcaatggcatcgtcggcgtcattgggcccaacggggtaggcaagaccacactgttcaaaaccatcgtcgggctcgagacgccggacagcggcagcgtcaaggtcggcgagaccgtcaagctgagttacgtggaccaggcccgtgctggcatcgatccgcggaagaccgtctgggaggttgtctcggacggtctggactatatccaggtcggtcaaaccgaagtgccgtcacgggcctacgtgtcggcattcgggtttaagggaccggaccagcaaaaaccggccggtgtgctatccggcggggagcgcaacaggctcaaccttgcgttgacgctcaaacagggcggcaacctgattctgctcgacgaaccgacgaacgacctggatgtcgagactctgggttcgctggagaatgctctgctgaacttccccggctgcgccgtggtgatttcgcacgatcgctggtttcttgaccgcacgtgcacgcacatcctggcgtgggagggtgacgacgacaacgaggcgaagtggttctggttcgagggcaacttcggcgcctacgaggagaacaaggtggaacggctcggtgtcgacgccgctcgaccgcatagggtcacccaccgcaagctgacgcgcggc

SEQ ID NO: 26290 - DNA, 4869 bp, Mycobacterium bovis
atgacgatcgatcccggggctaagcaggatgttgaggcgtggaccacgttcaccgcgagtgcggacattcctgactggatctcgaaggcctacatcgacagctatcgaggaccgcgcgacgactcgtcggaagccaccaaggccgccgaggccagttggcttccagcctccctgctgacgcccgccatgctgggcgcacattatcggcttggccggcaccgcgcggccggtgaaagctgtgtcgccgtctatcgggcggacgatcccgcggggttcggtccggcgctgcaggtggtcgccgagcacggcggcatgctgatggattccgttacggtgctgctgcaccggcttggaatcgcctacgcggcgattctgaccccggtgttcgacgtgcaccgcagccccacgggagagctgctgcgcatcgaaccgaaggccgagggcacgtcgccgcacctgggtgaggcctggatgcacgtagcgctctcgcccgccgttgatcacaaaggcctcgccgaggtggagcggttgctgcccaaggtgctggccgacgtccagcgggtggccaccgacgccacagcgctgatcgccaccctgagcgagctggcgggagaagtcgaatccaatgccggcggccgattttccgcgcccgaccgacaagacgtcggggaactgttgcgttggctgggtgacgggaacttcctgctgctgggctaccaacggtgccgggtggctgacgggatggtctacggcgaggggtcaagcggtatgggcgtcctgcggggccgcaccggttcgcgtccccggctgaccgacgacgacaaactgctggtgttggcccaagcgcgggtcggcagctacctgcgttacggcgcctatccctatgccatcgcggtccgcgaatacgtcgacggcagcgtggtcgagcaccgcttcgtcgggctcttcagcgtcgcggccatgaatgcggacgtgctggagatcccgacgatctcgcgccgggtccgcgaggcgctggcgatggccgaaagcgatcccagccacccaggccaattgctgctcgacgtcatccagaccgtcccgcgaccggagctgttcaccctgagcgcgcagcgcctgctgaccatggccagggccgtggtggacttgggatcgcaacggcaggcgttgttgttcctgcgcgcggatcggttgcagtacttcgtgtcgtgcctggtctacatgccccgagatcgctacaccaccgccgtgcgcatgcaattcgaggacatccttgtccgcgagttcgggggaacacgactggagttcaccgctcgggtcagtgaatcaccttgggcactcatgcatttcatggtgcggctacccgaagtgggtgtggcaggagaaggggcggccgccccgccggtggacgtttccgaagccaaccggatccggatccagggtctgctgaccgaagccgcgcgaacctgggccgaccgtttgatcggcgcggcggcggctggctccgtcggacaggccgacgctatgcattacgctgccgccttctccgaggcctacaaacaggccgtcaccccggccgatgccattggcgacattgcggtcatcacggagctgaccgacgattcggtcaagctggtgttttccgaacgcgacgagcagggtgtcgcccagttgacctggttcctcggtgggcgcaccgcttcgctgagccagctgctgccgatgctgcaaagcatgggagtcgtggtgctcgaagagcgaccgttctccgtcacccggccggacggtctgccggtctggatctatcagttcaagatctcgccgcatcccacgatcccgttggccccgacggttgccgagcgggccgcgaccgcgcaccgattcgccgaggcggtgaccgcgatctggcacggccgggtcgaaatcgaccgattcaacgagctggtgatgcgtgccgggctgacttggcagcaggtcgtgctgctccgtgcctacgcgaagtacctgcgccaggcgggcttcccgtacagccagtcctacattgaatcggtgctcaacgagcaccctgctaccgttcggtctttggtcgatctgttcgaagcgcttttcgttccggtgccgtcggggtcggcgagcaatcgcgatgcccaagcggccgctgccgctgtcgccgcggacatcgacgcgctggtgagcctggacaccgaccggatcctgcgcgccttcgcgtcgttggttcaggccacgttgcgcaccaattactttgtgacacgccagggttcggcccgctgccgtgatgtattggcgctgaaactcaatgcccagttgatcgacgaacttccgctgccgcgtccccggtacgagatttttgtgtattcgccccgcgtcgaaggcgtgcatctgaggttcggcccagttgcgcgtggcgggttgcgctggtcggaccgccgtgacgatttccgaaccgagattctcggattggtcaaggcgcaagcggtgaagaacgccgtcatcgtgccggtcggggccaagggcgggttcgtggtcaagcgtcccccgctgcccaccggcgaccccgccgccgaccgcgacgccacccgcgccgaaggggtcgcctgctatcagctgttcatctccgggttgctcgatgtcaccgacaacgtcgatcatgcgaccgcaagcgtcaaccccccgcccgaggtggtgcgacgtgacggcgacgacgcctacttggtagtggccgccgacaaaggtactgccaccttttccgatatcgccaacgatgtcgccaagtcctatgggttctggctgggcgacgcgttcgcctcgggcggatcggtgggctacgaccacaaggccatgggcatcaccgcccggggggcctgggaggccgtaaaacggcatttccgagagatcgggatcgacacccagacccaggatttcaccgtcgtgggaatcggcgacatgagcggcgacgtattcggcaacggcatgttgctgagcaagcacatccggctgatcgccgccttcgaccaccgccacatcttcctcgaccccaaccccgatgccgcggtgtcgtgggccgaacgccggcggatgttcgagttgccccggtccagctggggcgactatgacaggtctctgatcagcgagggcggcggggtgtacagccgcgaacagaaagccatcccgctcagcgcgcaggtccgcgccgtcctcggcatcgacggctcagttgacgggggggccgccgagatggccccgcccaaccttattcgggcgattctgcgggcgccggtggacctgctgttcaacggcggcatcggcacttacatcaaggccgagtcagagtcggatgctgatgtcggcgatcgcgccaacgatccggtgcgagtcaacgcgaatcaagtgcgcgccaaggtcattggcgaaggtggcaatctcggagtgacggcgttgggccgtgtcgaattcgatctgtccggcggccggatcaacaccgacgcgctggacaactccgccggcgtggactgctcggaccacgaggtcaacatcaagatcctgatcgactcgctggtgagcgccggcacggtcaaagccgacgaacgcacacagctgctcgagtcaatgaccgacgaggtagcgcaactggtgctcgccgacaacgaagatcagaacgacttgatgggcaccagtcgcgccaacgcggccagcctgctgccggtgcacgcaatgcagatcaagtatttggtggctgagcgcggggtcaaccgcgaattggaagcgctgccgtcggagaaggagattgcccggcgctccgaggccggcatcgggctcacctcgcccgaactcgccacgctgatggcgcacgtcaagctggggctcaaagaggaggtgctagccaccgaactaccggatcaggatgtcttcgcttccaggttgcctcgttatttcccgacggcgctgcgcgaacggttcaccccggagatccgttcccaccagctgcgccgcgagatcgtcaccaccatgctgatcaacgatctggtggataccgccggcatcacctatgcgttccggatcgccgaagacgttggtgtcacgccgatcgatgccgtgcgcacctatgtcgccaccgatgccatcttcggtgtcggtcacatttggcgccggatccgtgcggcgaacctgccaatcgcgctgtcagacaggttgacgctggacacccgtcggctgatcgaccgtgccggacgctggctgctcaactaccgtccgcagcccttggccgtcggcgccgagatcaaccgattcgcggccatggtcaaggcactgacaccgcgcatgtcggagtggttgcgtggtgatgacaaggccatcgtcgaaaagacagctgcggaattcgcatcgcagggtgtgcctgaagacttggcctaccgtgtctcgaccggcctgtaccggtacagcctgctcgacatcatcgacatcgccgacatcgccgacatcgacgccgccgaggtcgctgacacctatttcgccctgatggaccggctgggcaccgatggcctgctgaccgcggtatcccagctgccccgacacgaccgctggcattcgttggcgcgcttggcgattcgcgacgatatttacggtgcgctacggtcgttgtgtttcgacgtgctggccgtgggggaacccggcgagagtagcgagcaaaagatcgccgagtgggaacacctcagcgcctcccgggtggcgcgggcacgtcggacactcgacgacatccgtgccagcggccagaaggatctggcgacgttgtcggtcgccgcgcggcagatccgccgcatgacacggacaagcgggcgaggaatctcgggg

SEQ ID NO: 26291 - DNA, 2592 bp, Mycobacterium bovis
ttggacgccgtggcccttccaaacctcacgcgggaccaagccgtcgaacgcgccgccctgataaccgtggacagctaccagatcattctcgatgtgaccgacggtaacggcgctcccggcgaacgcaccttccggtcgaccaccaccgtggtgttcgacgcactccccggcgccgacacggtcatcgacatctccgcccacaccgtgcgccgcgccagcctcaacgaccaagacctggacgtctcgggatatgacgaggcggccgggatcccgttgcgcggactggcccagcgcaacgtcgtcgtcgtcgacgccgactgccactactccaataccggcgagggcctgcatcggtttgtcgatccggtggacggcgagacctacctgtactcgcaattcgaaaccgccgacgccaagcgcatgttcgcctgcttcgaccaacccgacctcaaggccacgtttgacgtgcgggtgaccgcgcccgcgcactggaaggtgatctccaacggcgcgccgctggccgcggcaaacggcgtacacaccttcgccactaccccgcggatgagcacctatctggtggccttgatcgccggaccatacgcggcctggacggacacttacatcgacgaccacggggaaatcccactcggcatctattgccgggcctcgcttgccgaatacatggacgccgagcggctgttcacccaaaccaagcagggattcggcttctaccacaagcactttggcctgccatacgcgttcggcaagtacgaccagctcttcgtccccgaattcaacgccggcgcaatggaaaacgccggcgcggtgaccttcttggaggactacgtcttccgcagcaaggtcacccgggcatcctatgagcggcgcgcggagaccgtgctgcacgagatggcccacatgtggttcggcgacctggtcaccatgacctggtgggacgatctgtggctgaacgagtccttcgccaccttcgcctcggtgctgtgccaaagcgaggccaccgaattcaccgaggcttggacgacgtttgcgaccgtggagaagtcttgggcgtatcgccaagaccagctgccgtcgacgcacccgatcgccgccgacatccccgacctggccgctgtcgaggtgaacttcgacgggatcacctacgccaagggcgcctcggtgctcaaacagctcgttgcctacgtcgggctggagcgctttctggccggcctgcgtgactacttccgcacgcacgcttttggcaatgccagctttgacgatctgctggccgcgttggaaaaggcctcgggccgcgacctgtcgaattggggcgagcagtggctgaagacgaccgggctcaacaccctgcgaccagatttcgaggttgatgccgagggcaggttcacccggttcgcggtgacacagagcggtgcggcacccggcgcaggtgagaccagggtgcatcggttggcggtgggcatctacgacgatgatggttccaagagttccggcaagctggtccgggtgcaccgcgaggaactcgatgtctccggtccgatcacgaacgtccctgcgctggttggcgtttcgcgcgggaaactgattctggtcaacgacgacgacctgacctactgttcgctgcggctggacgagcggtcgctacagaccgcgctagaccgcatcgccgacatcgccgagccgctgccgcgcacgctggtgtggtcggccgcctgggaaatgacccgtgaagccgaactgcgtgcccgcgacttcgtgtcactggtgtccggcggcgtgcacgcagaaacggaggtcggggtcgcgcagcggctgctgctacaggcgcagacagcgttgggttgctatgccgagcccggctgggcccgggagcggggatggccgcagttcgccgaccggctgctggagttggcgcgcgaagccgagcctgggtcggatcatcagctggcctatatcaactcgctgtgttcgtcggtgttgtccccccggcatgtgcagaccctaggggcgttgctcgagggtgagcccgccgcatgtggattggcaggcttagccgtcgacaccgacctgcgctggcggatcgtaaccgcgctggccaccgcgggcgccatcgacgccgacgggccggagacaccgagaatcgacgccgaggtgcagcgcgacccgactgccgccggaaagcggcatgccgcccaggcccgcgcggcgcggccacagttcgtcgtcaaggacgaggcattcaccacggtggtcgaggacgacaccctggccaacgccactggccgcgcgatgatcgccggcattgccgcacccggacaaggcgagctgctcaagccgttcgcgcgacgctactttcaggcgatccccggagtatgggcacggcgatccagcgaagtcgcgcaatcggtggtgattggcctgtatccgcactgggacatcagcgagcagggcatcaccgccgccgaggagttcctcagcgaccccgaggttccgcccgcattgcgccggctggtgctcgagggccaggccgcggtgcagcgatcgttgcgggcccgcaacttcgacgctgacggc

SEQ ID NO: 26292 - DNA, 414 bp, Mycobacterium bovis
gtgagcgtcgggttcgtcacgccggtgggggtgcgctggtctgacatcgacatgtatcagcacgtcaaccacgccaccatggtcacgattctcgaagaggcacgggtcccgtttcttaaggatgctttcggagccgacatcacgtccaccgggctgctgatcgccgatgtccgggtgacctacaagggtcaactgcggttgtccgactcgccgctacaggtgacgatctggaccaagcggctgcgggcggtcgacttcacgctcgggtacgaggtgcggtcggtcaacgcggagccagactcgaggcctgcggtcatcgccgagtcgcagctggccgcgttccatatcgaggaacagcggttggttcgactatcgccacaccatcgcgagtacctgcaacggtggtttcgggga

SEQ ID NO: 26293 - DNA, 477 bp, Mycobacterium bovis
atgcgcgtctacctgggggccgaccacgccggatatgagctcaagcagcggatcatcgagcacctgaagcaaaccggccacgagccgatcgactgcggcgcgttgcgctacgacgccgacgacgactacccggcattctgcattgccgcagcgacgcgcactgtcgccgatccgggcagcctgggcatcgtgctgggcggatcgggcaacggggagcagatcgccgccaacaaggtgcccggcgctcgctgcgcgctggcctggagtgtgcagaccgcggcgctggctcgcgagcacaacaacgcccagttgatcggcatcggcggccgcatgcacacggtggccgaggcactggcgatagtcgacgccttcgtcaccacgccgtggtcgaaagcgcaacgccaccaacggcgtatcgacattctcgccgagtacgaacggacccacgaagcgccgccggtgcccggcgctccggcc

SEQ ID NO: 26294 - DNA, 1560 bp, Mycobacterium bovis
atgggcgagccgtggtggtcgcgagccgtgttctaccaggtctatccccgatcgttcgccgacagcaacggcgacggggtgggcgacctggacgggttggcgagccggcttgaccacctgcaacagctcggtgtcgacgcgatctggatcaacccggtcaccgtctcgccgatggcagaccacggatacgacgtcgccgatccccgcgacatcgacccactcttcggcgggatgccggcgttcgaacggttggtcgctgcggcacaccggcagggcatcaaagtcaccatggacgtggtgcccaaccacaccagttcggcgcacccatggtttcaggccgcgctggctgacctcccgggtagcccggcgcgggatcgctatttctttcgcgacgggcggggccccgacgggtcgctgccgccgaacaactgggagtcggtgttcggcgggccggcctggacccgagtgcgcgaaccggacggcaacccgggccagtggtacctgcaccttttcgacaccgaacagccggacctgaactcggacaacccggaaatccttgacgacttcgagaaaacactgcgcttctggctggaccgcggcgtggatggcttccgcatcgacgtggcgcacggcatggccaagcccccgggcctgccggactcaccggacctgggcatcgaggtgctgcaccaccgcgatgacgacccgcgcttcaaccacccgaatgtgcacgcgattcaccgcgacatccgcacggtgatcgacgagtaccccggagcggtaaccgtcggcgaggtgtgggtacacgacaacgcccgctgggcggagtatctgcggcccgacgaactgcatctcggcttcaatttccggctggcgcgaaccgagttcgacgccgccgagatccgcgacgcggtggcgaactccctggccgccgcggcgctgcagaacgcgaccccaacctggacgctggccaatcacgatgtgggacgggaggttagccgctacggcggcggcgagatcgggctgcgccgggccaaggcgatggcggtggtgatgctcgccctgccgggcgtggtcttcctctacaacggccaggaactgggtttgcccgacgtggacctgcccgacgaggtgctgcaggatccgacgtgggaacgctcgggacgcaccgaacgcggtcgcgatggctgccgggtgccgattccctggtcgggcaacattcccccgttcgggttctcgacgtgtccagacacctggttgccgatgccgccggaatgggcggcgctgaccgccgaaaaacaacgcgctgatgccggctcgaccttgtcgttttttcgacttgcactcagattacgtagggaacgaaatgaattcgacggcgacgtcgactggctggccgcgcccgacgatgcgctgatattccggcgtcacggcgggggtttggtgtgcgcgctcaacgccgctgagcgtccgctggcgctgccggcaggtgaacccatcctggccagcgcaccgttgaccgacgccacgttgccacccaatgccgcggcctggctggtg

SEQ ID NO: 26295 - DNA, 402 bp, Mycobacterium bovis
atggaggggatggatcagatgccgaagtctttctacgacgcggtcggcggcgccaaaaccttcgacgcgatcgtgtcgcgtttctatgcgcaggtcgccgaggacgaagtactgcggcgggtgtaccccgaagatgacttagccggcgccgaggaacgattgcggatgttcctcgagcagtactggggcggcccacgaacctactcggagcagcgcggccacccccgattgcggatgcggcatgccccgtttcggatctcgctcatcgaacgcgacgcctggctgcggtgcatgcatacggctgtggcctccatcgactcagaaacgctcgatgacgagcaccgtcgagagttgctggattatctggagatggccgctcactcgctggtcaactccccgttt

SEQ ID NO: 26296 - DNA, 2379 bp, Mycobacterium bovis
gtgacgaacgtggccgaggaccagctcacggcgcaagcggttgcaccgtccacggaggcttctgcggctctcgagcccgctctcgagacgcccgagtcgccggtcgagactcttaagaccagcatcagcgcgtcgcgtcgggtgcgggcccgattggcccggcggatgaccgcccagcgcagcaccaccaatccggtgctcgagccgttggtggcggtgcaccgggagatctatcccaaggccgacctgtcgatcttgcagcgagcctacgaggtcgctgaccaaaggcatgccagccagttgcggcagtccggtgatccctacatcacccacccgttggccgttgccaacattctggccgagttgggcatggacaccaccactttggtggccgcgctgctgcacgacaccgtcgaggacaccggttacaccctggaggcgttgaccgaggaattcggcgaagaggtgggccatctcgtcgacggggtgaccaagctggatcgggtggtgttgggcagcgccgccgaaggcgagactattcgcaagatgatcaccgcgatggcccgcgatccgcgggtgctggtgataaaggtggctgaccggttacacaacatgcgcaccatgcgcttcttgccgccggagaagcaggcccgcaaggcccgtgagacgttggaagtcattgcacccctggcgcatcggctgggcatggccagcgtcaagtgggagttggaggacctgtccttcgcgatcctgcatcccaagaagtacgaggagatcgtccggctggtcgccggtcgcgcgccgtcccgggacacctacctggccaaggtgcgtgccgaaatcgtcaacacgctgaccgcgtcgaagatcaaggcgacggtggagggccgccccaagcactattggtcgatctaccagaagatgatcgttaagggccgcgacttcgacgacatccacgacctggtcggtgtgcgcatcctgtgcgacgaaatccgggactgctacgcggctgtcggcgtagtgcattcgctatggcagccgatggcgggtcggttcaaggactacatcgcccagcccagatacggtgtgtaccagtcactgcacaccactgtggtcgggcctgagggcaagccgctggaagtgcagatccgtacccgcgacatgcaccgcaccgccgaatacggcatcgccgcgcattggcgctacaaagaagccaagggccgcaacggtgttcttcatccgcatgccgccgcggagatcgacgacatggcctggatgcgtcagctgctcgactggcaacgtgaggcggccgaccccggtgagttcttggaatcattgcgctacgaccttgcggtgcaagagattttcgtgtttacccccaagggcgacgtgatcacgctgccaaccggttcgacgccggtggacttcgcttacgcggtgcacacagaggtgggccaccgctgcatcggcgcccgagtgaacggccggttggtagcgctggaacgcaagctggaaaacggagaagttgtcgaggttttcacgtccaaggcgccgaacgccgggccgtcgcgggactggcagcagttcgtggtgtcgccgcgcgcaaagacgaagatccgccagtggttcgccaaggagcggcgtgaggaggcgttggagaccggtaaggatgcgatggcccgcgaggtgcgccgcggtggacttccgttgcagcgcttggtcaatggtgagtccatggcggcggtggcccgcgagctgcactacgcggacgtgtcagcactctataccgccatcggtgaggggcacgtgtcggcgaaacacgtcgtgcagcggttgttggccgagctcggcggtatcgaccaggcggaagaggaactcgccgagcggtccacgccggcgaccatgccgcggcgcccacgcagcaccgacgatgtcggggtctccgtccccggcgccccgggcgtgctgaccaagctggccaagtgctgcacgccggttccgggcgatgtgattatggggttcgtcacccgtggcggcggggtcagtgtgcaccgcaccgactgcaccaacgccgcatcgctgcagcagcaggccgagcgcatcatcgaggtgctatgggcgccgtcgccgtcgtcggtgtttctggtggcaatccaggtcgaggcactcgaccggcaccggctgctgtcggatgtgacgcgcgcactggccgacgagaaggtcaatatcctgtccgcgtcggtcaccacttcgggggaccgggtggcgatcagtcgattcaccttcgagatgggtgaccccaagcacctcgggcacctgctcaacgccgtccgcaacgtcgaaggtgtctacgacgtctaccgggtgacctcggccgcg

SEQ ID NO: 26297 - DNA, 1833 bp, Mycobacterium bovis
gtgtttgtgctgcgcagccacgccgcgggtttgctacgggaaggcgacgccgggcagcaggtgacattggccggctgggtggctcgccgccgcgaccacggcggcgtgatcttcatcgatctgcgggacgcttcgggcatcgcacaggtggtgttccgcgacccccaggacactgaggtgctggcgcaggctcaccggctgcgtgcggaattctgcgtatcggtggccggcgtcgtcgagatccgcccggaaggcaacgccaacccggagatcgccaccggcgagatcgaggtcaacgccacgtcgttgaccgtgctgggcgaatgtgcgccgctgccgtttcagctggacgaaccggcgggtgaggagttgcgactgaagtaccgctacctcgatctgcgccgcgacgaccccgctgcggcgattcgactgcgttcccgggtgaatgccgctgcgcgcgcggtgctggcgcgtcacgacttcgtcgagatcgagacgccgacgatcacccgctcgaccccggagggagcgcgcgacttcctggtgccggcccgactgcaccccggttcgttttacgccctaccgcagagcccgcagctgttcaagcagctgctgatggtggcggggatggaacgctactaccagatcgcccgctgctaccgcgacgaggacttccgcgccgaccgccagcccgaattcacccagctcgatatggagatgagcttcgtcgacgccgaggacatcatcgcgatctccgaggaagttctgaccgagctgtgggcgctgataggctaccggattccgacgcccatcccgcggatcggctatgccgaagcgatgcgccgattcggtacggacaaacccgacctgcggttcgggctggagctcgtcgaatgcacggatttcttctccgacaccacatttcgtgtcttccaggcaccgtatgtgggcgcggtggtgatgcctggcggggcgtcgcagccgcggcgcacgctggacggctggcaggactgggccaagcagcgcggccaccgcggactggcctacgtgctggtcgccgaagacggcacgctgggcggtccggtggccaaaaacctgaccgaggccgagcgcaccggactggccgaccatgtcggggccaaacccggcgattgcatcttcttctcggccggtccggtcaaatcgtcgcgggcactgctgggcgcggcccgcgtcgagatcgccaaccggctgggcctgattgaccccgatgcgtgggcattcgtctgggtcgttgacccgccgctgttcgagccggccgacgaagcgaccgccgccggtgaggtcgcggtcggctcgggggcctggaccgcggtgcaccatgccttcaccgcgccgaaaccggaatgggaggaccgcatcgaatccgataccggcagcgtgctggccgacgcgtacgacatcgtctgcaacggccacgagatcggtggcggctcggtgcgtatccaccgccgtgatatccaggaacgggtgttcgcggtgatgggcctggacaaggccgaggtggaggaaaagttcggattcctgttggaggcgttcatgtttggcgcaccgccgcacggcggaatcgcgttcgggtgggaccggaccaccgcgctgctggccgggatggactcgatccgtgaggtgatcgcgttcccgaagaccggcggcggcgtcgatccgctcaccgacgcgccggcgcccattaccgctcagcaacgtaaggagtccggaatagatgcccagcccaagcgggtccagcggcatgaccagatctttgcggttacgacgtcgcacccgagtgtgaataaa

SEQ ID NO: 26298 - DNA, 1269 bp, Mycobacterium bovis
gtgacggaattctcgtcattttcggcccccaagggggtaccggactacgtcccgcccgactcggcgcagttcgtcgcggtgcgcgacgggctgctcgcggcggcccgtcaagccggctatagccacatcgagctgcccatcttcgaggacaccgccctgttcgcccggggcgtgggtgaatccaccgacgtggtgtccaaggagatgtatacgttcgccgaccgtggcgaccgctcggtgacgctgcggcccgagggcaccgccggggtggtgcgtgcggtgatcgaacacgggctggatcgcggcgcgctgccggtgaagttgtgttatgcgggcccgtttttccgctacgagcgtccgcaggccggccggtatcgccagttacagcaagtcggggtggaggcgatcggcgtcgacgacccggcgttggacgccgaggtgatcgccattgccgacgccgggttccgctcgttgggtctcgacgggttccggctggaaatcacctccctgggagacgagagttgccgtccgcagtaccgggaactgttgcaggagttcttgtttggactcgatctcgacgaggacacccgcaggcgcgcagggatcaatccgctgcgggtgctcgacgacaagcgacccgaattgcgtgcgatgacggcgtcggcgccggtgttgctggatcatctgtctgatgtcgccaagcagcatttcgacaccgtgctcgcccatctggacgcgcttggagtgccctatgtcatcaacccgcgcatggtgcgcggcctggactactacaccaagaccgccttcgagttcgtccatgacgggcttggtgcgcaatcggggatcggcggcggggggcgctacgacggcctgatgcaccagcttggcgggcaggacttgtcgggcatcgggttcgggctgggcgtggaccggaccgtgctggcgctgcgggccgagggcaagacggcgggggacagcgcccggtgcgacgtgttcggcgtgccgcttggcgaggcggccaagctcaggctggcggtgctggctggacgactgcgcgcggccggggtgcgggttgaccttgcctatggtgatcgcgggctcaaaggcgcgatgcgcgcggccgctcgttccggcgcccgtgttgcgttggtagcgggcgaccgcgacatcgaggccgggacggtcgcagtgaaggacttgacgacgggtgagcaagtttcggtctcgatggattcggttgtggccgaagtaatttcgcggctggctggg

SEQ ID NO: 26299 - DNA, 687 bp, Mycobacterium bovis
atgctgacggccatgcggggcgacatccgagcagcccgggagcgggatccggcggcccctaccgcgctggaagtcatcttctgctacccgggcgtgcacgccgtgtggggccaccgcctcgcccactggctgtggcagcgtggcgccaggctgctcgcgcgggcagctgccgaattcactcgcatcctgaccggtgtagatatccaccccggtgccgtcatcggtgctcgcgtgttcatcgaccacgcgaccggcgtggtgatcggagaaaccgcggaggtcggcgacgacgtcacgatctatcacggcgtcactctcggcggcagtggcatggttggcgggaaacgccatcccaccgtcggtgaccgcgtgatcatcggcgccggggccaaggtcctcggtccgatcaagatcggcgaggacagccggatcggcgccaatgccgtcgtggtcaagcccgtcccgccgagcgcggtggtggtcggggtgcccgggcaggtcatcggccaaagccagcccagtcccggcggcccgtttgattggaggctgcccgatctcgtgggagccagcctcgattcgctgctcaccagggtggccaggctggaggccctcggcggcggcccgcaagcagcaggagtcatccggccacccgaagccgggatatggcacggcgaggacttctcgatc

SEQ ID NO: 26300 - DNA, 861 bp, Mycobacterium bovis
atggctgagcacacggggttctggctcgatgcctggcgcgggttgcgccggcgtcctaaattcgtgatcgccgcggcgctgatcctgctgattcttgtcgtggcggcgtttccgtcgttgtttaccgcagccgatcccacctatgccgatcccagccaaagcatgcttgcgccatcggccgcgcactggttcggcaccgacctgcagggccacgacatctattcgcgcacggtgtatggtgcgcgggcttcggtcacggtcgggttgggggcaacgctggccgtgttcgtcgtgggcggggcgttaggcgcattggccggtttttacgggagctggatcgatgcggtggtttcgcgggtcaccgatgtgtttctcggcttgccgttgctgttggccgccatcgtgctcatgcaagtcatgcatcaccgcacggtgtggacggtgatcgccatcttggcattgttcggctggccgcaagtggccaggatcgcgcgcggtgcggtgctcgaggtgcgtgccagcgattacgtccttgcagctaaggcattggggttgaataggtttcagattctgcttcggcacgcgctgcccaacgccgtgggcccggtgatcgcggtggctaccgtcgctctggggatcttcatcgtcaccgaggccacgctgtcctacctcggggtcggattgccgacgtcggtggtgtcctggggtggcgacatcaatgtcgcgcagacccggctacggtcgggctcgccaattttgttctatcctgcgggcgcgctggcgattacggtgctggcgttcatgatgatgggcgacgctttgcgcgacgcgctggatccggcttcgcgggcatggcgggca

SEQ ID NO: 26301 - DNA, 2488 bp, Mycobacterium bovis
ccagaacgatcagggagcgtagctagtgggaatgcggtccgccgcaaggatgccgaaactgacacggcgcagccggattctgatcatgatcgcactgggtgtgatcgtgctgctgctcgctggcccgcgtttgatcgacgcttacgtcgactggctgtggtttggtgagcttggctaccgctcagtgttcaccaccatgctggctacccgcatcgtggtgtgcttggttgccggggtggtggtcggcggcatcgtgttcggcgggctcgccttggcctaccgcactcgcccggtgttcgtcccggatgccgacaacgatccggttgcacggtatcgcgccgtcgtgctggcacgcctgcggctagtcggcatcggaatccccgcggcgatcggcttgctggccggcatcgtcgcccaaagctactgggctcggatccagctgttcctgcacggcggtgactttggggttagggatccgcagttcgggcgggacctcggcttctacgcgttcgagttgccgttctaccggctgatgctcagctacatgctcgtttcggtatttctggcattcgtggcgaatctggtggcgcactatatcttcggtggcattcggctatccggacgcaccggtgcgctgagccgctcggcgcgcgtccagttggttagcctggtcggggtactggtgttacttaaagccgttgcttattggctggatcggtatgagctgctgtcgcacacgcgtggcggcaagccgttcaccggtgccgggtacaccgatatcaacgccgtcctgccggcgaagctgattctgatggcgattgcgttgatttgcgcggccgcagtgttctcggcgatcgccctgcgggacttgcggattccggcgatcggcctggtgttgttgctgctgtcgtcgctgattgtcggcgccggctggccgttgatcgtcgagcaaatcagcgtcaaacccaacgctgcgcaaaaagagagcgaatatatcagccgaagtatcaccgcaactcggcaagcctatggcctgacgtctgatgtggtgacctatcgcaattacagcggtgatagcccggctaccgcgcaacaggtcgctgccgaccgcgcgactacctcgaacatccggctactcgacccgacaatcgttagcccggcgttcacccagttccagcagggcaagaacttctactatttcccggaccagctgtcgatcgaccgctacctcgaccgcaacggtaacctgcgcgactacgtcgtcgcggcccgcgaactcaacccggaccggttgatcgacaaccaacgggactggatcaaccggcataccgtgtacacccacgggaacgggttcatcgcctcaccggccaacaccgtgcgcggtatcgccaacgacccgaatcaaaatggcggttaccccgaattcttggtcaacgtcgtcggggccaatggcaccgtggtgtctgatgggccggcgccactggatcagccgcggatctacttcggtccggtgatctctaacacgtccgcggactatgcgatcgttggacgcaatggcgacgaccgcgaatacgactacgaaactaacatcgacaccaagagatacacctacaccggaagcggtggagtcccgctcggtggttggttagcccgtagcgtgttcgctgcgaagttcgcggagcgaaactttttgttctccaatgtgattggctccaacagcaagatcttgttcaaccgcgatccggcgcagcgggtggaggcggtcgcgccgtggctgacgacagacagcgctgtgtatcccgcgatcgtcaacaagcgactggtgtggatcgtcgacggctacaccacgttggacaattacccgtactccgagctcacctcgctgtcctcggcgaccgcggactccaacgaggtggcgttcaaccggttggtcccggacaagaaggtttcctacatccgcaattcggtgaaggccactgtggatgcctacgacggaacggtcacgctgtaccaacaggacgaaaaggatccggtgctcaaggcctggatgcaggtcttccccggcacggtaaagcctaagagcgacattgcgccggagcttgccgagcacctgcggtatcccgaggacctgttcaaggtgcagcgcatgttgttggccaaataccacgtcaatgatccggtgacgttcttctccacatcggatttctgggacgtgccgctggacccgaatccgaccgccagcagttatcagccgccgtattacatcgtcgcgaaaaacattgctaaggacgataattcagcctcatatcagttgatcagcgcgatgaacagattcaagcgtgactatctggccgcctacatcagcgccagttccgatcccgcgacctacggcaatctcacggtgttgaccatcccaggccaggtcaacgggcccaagttggccaacaacgcgatcaccaccgatccggcggtgtcccaggacctcggt

SEQ ID NO: 26302 - DNA, 366 bp, Mycobacterium bovis
atggcgcaatcagtttccgcgactcgacgaatctcccgcctgcgccggcacacgcggctgcggaagaagctctcgggcaccgcggagcgcccgcggctggtggtgcatcggtccgcgcggcacatccacgtgcaactggtgaacgacctcaacggcaccaccgtggccgccgcttcgtcgatcgaggccgatgtgcgcggcgtgccgggtgacaaaaaggcccgcagtgtgcgggtcggccagttgatcgccgagcgggccaaagccgccggcatcgacaccgtggtattcgaccgcggcgggtatacctacggcggacgaatcgccgcgctggccgacgccgcacgcgagaacggattgagtttc

SEQ ID NO: 26303 - DNA, 660 bp, Mycobacterium bovis
atggcggagcagccggccggacaggcaggcactaccgacaaccgtgacgcacggggtgatcgggagggccggcgccgcgacagcggccgcggcagtcgtgaacgggatggcgagaagagcaactatctagagcgggtcgtcgccatcaaccgcgtctccaaggtggtcaagggtggtcggcgcttcagcttcaccgctttggtcatcgtgggcgacggtaacgggatggtcggtgtcggctacggcaaggccaaggaagtaccggccgcgatcgccaagggcgtcgaagaggcgcgcaaaagcttcttccgggtaccgctgatcggcggcaccatcacgcacccggtgcagggcgaggcggccgccggtgtggtgttgctacggccggccagcccgggtaccggtgtgatcgccggtggtgcggcccgcgcggtgctggaatgtgcgggggtgcacgacatcttggccaagtcgctgggcagtgacaacgcgatcaatgtggtgcacgccaccgtggccgcgctcaagctgctgcagcgtccggaggaggtggcggcgcgccgcggtttgccgatagaggacgtcgccccggccgggatgctgaaggcgcgtcggaaaagtgaagcgctggccgccagcgttttgccggatagaacgata

SEQ ID NO: 26304 - DNA, 195 bp, Mycobacterium bovis
atgtcacagctgaagatcacccaggtgcgcagcaccatcggagcacgctggaagcagcgcgagagcctgcgcactctgggcttacgaaggattcgtcattcggtgatccgtgaagacaacgcagcgactcgcggactgatcgcggtggtgcgtcacctcgtggaggttgagcccgcgcagaccggagggaagaca

SEQ ID NO: 26305 - DNA, 438 bp, Mycobacterium bovis
gtgacgctcaagctgcatgacctgcgccccgcgcgggggtccaagaccgcccgcacccgagtcggtcgaggtgacggctccaagggcaagacggccggccgtggcaccaagggcaccagggcccgcaagcaggtgccggtgaccttcgagggcgggcagatgccgatccacatgcggctgcccaagctcaagggcttccgtaaccggtttcgcaccgaatacgaaattgtcaacgtcggcgacatcaaccggctgtttccgcagggtggtgccgtcggcgtggatgatttggtggccaaggggggcgtccgcaagaacgctctggtcaaggtgttgggtgacggcaagctgaccgccaaggtcgacgtgtccgcgcacaagttcagcggcagcgcgcgcgcgaagatcaccgcagcgggcggttcagccaccgagctc

SEQ ID NO: 26306 - DNA, 1323 bp, Mycobacterium bovis
gtgctttcggctttcatctcgtcgctgcgaacagtcgacttgagacgaaagatcctcttcacgctgggcatcgtcattctctaccgtgtcggtgccgcgctgccgtcccccggtgtcaattttccgaacgtgcagcagtgcatcaaagaagccagcgcgggcgaagccggacagatctattccctgatcaacctgttctccggcggtgcgttattaaagctcacggtgttcgcggtgggggtgatgccctacatcaccgccagcatcatcgtgcagctgctcaccgtggtcatcccgaggttcgaggaactccggaaggaaggccaggcgggtcagtcgaagatgacccagtacacccgttacctagcgatcgcgttggctatccttcaagccaccagcatcgtggcgttggctgccaacggcgggttgctacaaggttgctcgctggacatcatcgccgaccagagcattttcacactggtcgtcatcgtgctcgtgatgacgggcggcgccgcgttggtgatgtggatgggcgagttgatcaccgaacgcggcatcggcaacggcatgtcgctgctgatcttcgttggcatcgctgcccgcatcccggccgaaggtcaaagcatcctggaaagccgcggtggagtcgtcttcaccgcggtctgcgcggccgcgttgatcatcatcgtcggtgtggtgttcgtcgaacagggtcagcgccggattccagtgcaatacgccaagcgcatggtgggccggcggatgtatggcgggacttcgacttatctgccgctcaaggtcaaccaggccggcgttatcccggttatcttcgcgtcgtcgctgatctacattccgcacctgatcacccagctgattcgcagcggcagcggtgtcgtgggaaacagctggtgggacaaattcgtcggcacgtacctgtccgacccgagcaacctggtctacatcggcatctacttcggcctcatcatcttcttcacctacttctacgtgtcgatcaccttcaaccccgacgaacgtgccgacgagatgaagaagttcggcggcttcattccgggaattcggccgggccgtccgaccgcagactatctgcgctatgtgctgagccggattaccttgccgggctcgatttacctcggcgtgatcgccgtgctgcccaacctgttcctccagatcggcgccggtggaaccgtgcagaacctgccctttgggggtaccgcggtgctgatcatgatcggtgtcggtttggatacggtcaagcagatcgagagtcagctcatgcagcgcaactacgaagggttcctcaag

SEQ ID NO: 26307 - DNA, 543 bp, Mycobacterium bovis
gtgagagttttgttgctgggaccgcccggggcgggcaaggggacgcaggcggtgaagctcgccgagaagctcgggatcccgcagatctccaccggcgaactcttccggcgcaacatcgaagagggcaccaagctcggcgtggaagccaaacgctacttggatgccggtgacttggtgccgtccgacttgaccaatgaactcgtcgacgaccggctgaacaatccggacgcggccaacggattcatcttggatggctatccacgctcggtcgagcaggccaaggcgcttcacgagatgctcgaacgccgggggaccgacatcgacgcggtgctggagtttcgtgtgtccgaggaggtgttgttggagcgactcaaggggcgtggccgcgccgacgacaccgacgacgtcatcctcaaccggatgaaggtctaccgcgacgagaccgcgccgctgctggagtactaccgcgaccaattgaagaccgtcgacgccgtcggcaccatggacgaggtgttcgcccgtgcgttgcgggctctgggaaag

SEQ ID NO: 26308 - DNA, 499 bp, Mycobacterium bovis
gtggcctcagataatcgcgaccccatcgccgcagcacgggccaactgggagcgttcccgggtggggtgatgtgtcgctaggcatggtggcggtgacgtcggtgatgcgtgcgcatcagattctgctggcccgcgtcgagacggcgctgcgcccctatgacctgagtttctcccgcttcgagctgctgcggctgctggcgttcagccgtatcggagcgctaccgatcaccaaagcgtcggaccgattgcaggttcacgtgaccagcgtcacccacgcgatccgccggctggaggccgatggattggtgcggcgggttccgcaccccaccgacgggcggaccacactggtgcagatcaccgagctgggtcgctccacggtcgaggacgccaccgtcaccctcaacgagcaggtgttcgccaacgttgggatgggcgccgaggaatcgcaggcgctggtgtcggccgtcgaaacgttgcggcgcaacgccggcgacttttga

SEQ ID NO: 26309 - DNA, 366 bp, Mycobacterium bovis
gtgattcagcaggaatcgcggctgaaggtcgccgacaacaccggcgccaaggagatcttgtgcatccgggtgctgggcggttcgtcgcgacgctacgccggcatcggtgacgtcatcgtcgccaccgtgaaggacgccattccgggcggcaacgttaagcggggggatgtcgtcaaggccgtcgtggtgcgcacagtcaaggaacgccgacgtcccgacggcagctacatcaagttcgacgagaacgccgcggtgatcatcaagcccgacaacgacccgcgcggcacccgcatttttggaccggtcggtcgcgagctgcgggagaagcggtttatgaagatcatttcgctggccccggaggtgttg

SEQ ID NO: 26310 - DNA, 315 bp, Mycobacterium bovis
atgaaggtccacaaaggcgacaccgtgctggtgatttcgggcaaagataaaggggccaagggcaaagtcttgcaggcgtatccggaccgcaaccgggtattggtcgagggtgtcaaccggatcaagaagcacaccgcgatctcgaccacccagcggggcgcgcgttcgggtgggatcgtcacccaggaagcgccgatccatgtctccaacgtgatggtggttgactccgacggcaagcccacccgaatcggctatcgggtcgacgaggagaccggcaagcgcgtccgtatctccaagcgcaacggcaaggacatt

SEQ ID NO: 26311 - DNA, 561 bp, Mycobacterium bovis
atgaccactgcacagaaggttcagccgcgcctcaaggagcgctaccgcagtgagattcgggatgcgctgcgcaagcagttcggctacggcaatgtcatgcagatcccgacggtgacgaaagtcgtcgtcaacatgggtgtcggcgaggccgcccgggacgccaagttgatcaacggggcggtcaacgatttggcgctgatcaccgggcagaagccggaagtccgccgggcgcgcaagtccatcgcgcagttcaaattgcgtgagggcatgccggtgggcgtccgagtcacgctgcgcggtgaccggatgtgggagttccttgaccggctcacgtcgatcgcactgccacgcatccgtgacttccgtgggctttcgcccaaacagttcgacggtgtgggcaactacaccttcgggctggccgagcaggcggtattccacgaggtcgacgtggacaagattgaccgggtccgtggcatggacatcaacgtcgtcacttccgcggcgaccgacgacgaaggccgagcgctgttgcgggccctcggctttcccttcaaggagaac

SEQ ID NO: 26312 - DNA, 183 bp, Mycobacterium bovis
atggcgaagaaggcactggtcaacaaggccgcaggcaaaccgaggtttgccgtgcgcgcctacacccgttgcagcaagtgcggccgcccgcgtgcggtctaccgcaagttcgggctgtgcaggatttgcctgcgcgagatggcgcacgcgggtgagttgcccggcgtgcagaagagcagctgg

SEQ ID NO: 26313 - DNA, 396 bp, Mycobacterium bovis
atgacgatgacggacccgatcgcagactttttgacccgtctgcgtaacgccaactcggcgtatcacgacgaggtcagcttgccgcactccaagctcaaggccaacatcgcgcagattctcaagaacgaggggtacatcagcgacttccgaaccgaggacgctcgggtcggtaaatcgctggttatccagctcaagtacggccctagccgggagcgcagcatcgccgggttgcggcgggtgtccaagcccggcctgcgggtgtacgcgaaatccaccaatctgccgcgggtgctcggcggcctgggcgtggcgatcatctcgacctcctcgggcctgctgactgaccggcaggcagctagacagggcgtgggcggcgaagtcctcgcatatgtctgg

SEQ ID NO: 26314 - DNA, 537 bp, Mycobacterium bovis
atgtcgcgtattggtaagcagccgattccggtgcccgccggggtcgacgtcacgatcgagggacagagcatctcggttaaggggcccaagggcaccctaggactgacggtcgccgagccaatcaaagtggcacgcaatgacgacggcgctatcgtggtcacccgtcccgacgatgagcggcgtaatcgctccttacacgggctgtcccgtaccctggtgtccaacctggtcactggcgtgacgcaggggtacaccaccaagatggagatcttcggggttggctatcgggtgcagctcaagggctccaatctggagtttgcgctggggtacagccacccggtggtgatcgaggctcccgaaggaatcacgttcgccgtccaggcaccgacgaagttcaccgtttccgggatcgacaaacaaaaagtcggccagatcgccgccaatatccgccgtcttcgccgtcccgatccgtacaagggcaagggcgtgcgctacgagggcgagcagatccgccgcaaggtcggaaagacaggtaag

SEQ ID NO: 26315 - DNA, 1293 bp, Mycobacterium bovis
gtggccgacaccgacgacaccgcaaccctccgttacccgggaggcgagatcgacctgcagatcgtgcacgccaccgaaggcgccgacggcattgcgctcgggccgctgctggcaaaaaccgggcacaccacgttcgacgtcggcttcgccaacacggccgccgctaaaagctccatcacctacatcgacggagatgccggcattctgcgttatcgcggctacccgatcgaccaactggcggagaagtcaaccttcatcgaggtctgctacctgttgatttacggcgagctgcccgataccgaccagcttgcccagttcaccggccggatccagcgccacaccatgctgcacgaggatctcaagcggttcttcgacggctttccgcgcaatgcccacccgatgccggtgttgtccagcgtggtcaatgcgctgtcggcgtactaccaggatgctctggaccccatggacaacggtcaagtcgagctgtcgaccattcggctgctggccaagctgcccaccatcgccgcgtacgcctacaagaaatcggtcggccagcccttcctctacccagataactcactgacgctggtggagaacttcctacggttgacgttcggatttcccgccgagccctaccaggccgaccccgaggtggtgcgggcgctggacatgttgttcatcttgcacgccgaccacgagcagaactgctcgacgtcgacggttcggctggttggctcgtcgcgagccaacctgttcacctcgatctcgggtggcatcaacgcactatggggtccgcttcatggcggcgccaatcaggctgtcctggagatgctcgagggcattcgcgacagcggcgacgacgtcagcgagtttgtacgcaaggtcaagaaccgcgaggccggggtcaaattgatgggtttcggtcatcgtgtctacaagaactacgatccgcgggcccgcatcgtcaaggaacaggccgacaagatcctggccaagctcggcggcgatgactccttgctgggcatcgccaaggagctcgaagaggcggcgctgaccgacgactacttcatcgaacgcaagctttaccccaacgtcgacttctacaccggcctgatctaccgggccctcggcttcccgaccaggatgttcaccgtgttgtttgccctgggcaggcttcccggctggatcgcgcactggcgtgagatgcacgacgagggcgacagcaagatcggccggccccgccagatctacaccggctacgcggagcgcgactacgtcaccatagacgcgcgg

SEQ ID NO: 26316 - DNA, 804 bp, Mycobacterium bovis
atgtcgaactaccggatcgacactcggacaattgtcccgggtctcgccgtcaccctggccgacggggtgctgtcggtgaccatcgatcgcccggagagtctcaactcgctgaccaagccggtgctggcagggatggccgacgcgatcgagggcgcggccaccgacccacgggtgaaggtggtgcgcctcgggggcgccggtcgcggcttcagctccggaggggcaatcagcgttgacgatgtgtgggccagtggcccgcctaccgacaccgtcgcggaggccaaccgcacggtgcgtgccattgtggcactaccacaaccggtcgttgccgtcgtgcagggaccaaccgtcggctgtggcgtctccctggcgctcgcttgtgacctcgtattggcctccgacaatgcgtttttcatgctcgctcacaccaacgtggggttgatgcccgacggcggcgcgtcggcgttggttcaggccgcgatcggccgcatccgcgccatgcatatggcgctgctgccggaccgggtgccggccgccgaggccttgtcctggggcctggtcagcgccgtctatccggccgccgacttcgatgccgaggtggacaagttgatctcacggctgttggccggcccagcgctggctatcgccaagacgaagaacgcgatcaatgcggccacgctcaccgagttggcacccactctcctgcgcgaattggatggccaggccctcctcctgcgtactgacgacttcgccgagggcgcaacggcattccagcagcgccggacccccatgttcaccggccgt

SEQ ID NO: 26317 - DNA, 1026 bp, Mycobacterium bovis
atggatcagatcggggctgacctcgctgaggccgtcgagcgtcacctcaccgaatacggagtgcgggtgctcggtggcctatcagcattgaactccgcgcatcccgaatcactagaccttgagatcgacgctcaccccctcacgatcactgccctctaccttcctcacctgtcggcaacggcagcactgcaggcctgggataccgccggcgctggttcgccgctgcttgtggtgggcccgcgtctgcatccgtcgagcgctgaaacgctgcgggctcgcggactctggtacatcgacggagctgggaacgcttatttgcggcaccagggtggactgctcatcgacgtgcgcggccgacggtcagctgtgtccgcacaaccgggcaccctcggtgacggactgcacagcgatggaccgcgtaacccgtttacccccaagcgcgcgcaggttgtctgcgtactgcttgacgcaccgcaactggtcgacgcgccgctgcgtgcgatcgccgcgagcgccggcgtctcggtcggtatggccaaggagacgatggatacgttgcgcactaccggcttcttcgaacacctcggctcccgccgcaggctggtgcgcaccgatgagctgctggacctgtgggcggctgcctatccggggggtctgggccgggccaacaaactcctggtcgccagtggtgatatccacacgtggtccgcacccgacggactcgcagtggcggtcagcggggaacaggccctgcccgacgaaatccgcaatcccgaatcactgatgctctacgtcgacaccccagcgcccgggctacccgccgacctgcttatacacaaccgctggcaccgcgacccacacggcagcatcgtgatccgaaagctattctggcgcaacctacctgacgagcaaccggggttggctcccacggccttgatctatgccgacctccttgcctcgcgcgagccgcgccaggtcgaagtcgcccacctcatgagaaggcaggatgagcgactcgcccgatta

SEQ ID NO: 26318 - DNA, 924 bp, Mycobacterium bovis
atgggctggtatgttgcgcgccgagtcgccgtgatggtgccggttttcctgggcgcgacactgctgatctacggcatggtctttctgctgcccggtgacccagttgccgcgctggcgggcgaccgtccgttgactcccgcggtggccgcgcagctgcgttcgcattaccacctcgacgatccgttcctcgtgcaatacttgcgctatctgggcggaattctgcacggtgacttgggtcgtgcgtattctgggctgccggtcagtgccgttctggcgcatgcgtttccggtcaccatcaggctggccttgatcgccctggcggtggaggcagtgctcggaatcggattcggcgtgatcgccggcctacgtcagggtggaatcttcgattccgcggtgctggttaccggacttgtcattattgcgatccccatcttcgtgctgggctttctggcgcagttcttattcggggtccagctcgaaatcgcgccggtcacggtgggcgaacgggcgagcgtcggccgcctgctgctacccgggatcgtgctgggcgccatgtcattcgcctacgtggtgcgattgacccgctcggcggtggcggccaacgcacacgctgactatgtccgcaccgccaccgccaaggggttgtcgcggccccgggtggtgacggtgcacattctgcgcaattcgctgattccggtggtgaccttcctgggcgcggatctgggcgcgctgatgggcggagcgattgtgaccgaaggaatcttcaacatccacggcgtcgggggcgtgctgtatcaagcggtcacgcgtcaggagacgccgacggtggtgtcgatcgtgacggtgctggtgctgatctacctgatcaccaatctgttggtggatctgctgtatgcggccctggacccgcggatccgctatggc

SEQ ID NO: 26319 - DNA, 1281 bp, Mycobacterium bovis
atggcgatcactgacgtcgacgtattcgcgcatctgacggacgccgacattgaaaacctggccgccgagctagatgccatccgccgagacgttgaagaatcgcgcggcgaacgcgatgcccgctacatccgccgcaccatcgccgcacagcgggcgctcgaggtgtccggtcggctactgctggctggcagctcacgacgcctcgcctggtggacaggtgccctgacccttggcgtggccaagatcatcgaaaacatggagatcggccacaacgtcatgcacggccagtgggactggatgaacgacccggagattcactcctcgacgtgggagtgggacatgagcggatcgtccaagcactggcgctacacccacaacttcgtgcaccacaaatacaccaacatccttggtatggatgacgacgtcggatacggcatgctgcgcgtcacccgtgaccagcgctggaagcgctacaacatcttcaacgtggtgtggaacaccatccttgcgatcggcttcgagtggggagttgcgctgcagcacttggagatcggcaagatcttcaagggtcgggccgaccgcgaggccgctaaaacccggttgcgtgaattctcagccaaagcgggccgccaggtgttcaaggactatgtcgcgttcccggcgctgacctcgttgtccccgggggcgacgtatcggtccactttgaccgccaacgtggtggccaacgtgatccgcaacgtgtggtccaacgcggtgatcttctgcggccatttcccggatggcgcagagaaattcaccaagacggacatgatcggtgagccgaagggccagtggtacctacggcagatgctgggcagcgcaaacttcaacgctgggccggcgctgcggttcatgagcggcaatctgtgccaccaaatcgagcatcacctctatccggacctgccgagcaaccggcttcacgagatttcggtgcgggtgcgtgaggtctgcgacagatacgacttgccatacaccacgggctcgttcttggtgcagtacggcaagacctggcgcacccttgccaagctgtcgttgccggataagtacttacgtgacaacgctgacgatgcacccgagacccgcagtgagcggatgttcgctggtctggggccgggtttcgcgggcgccgatccggtgaccggacgtcgtcgggggttaaagaccgcgattgccgccgtgcggggtcggcggcgcagcaagcgtatggctaagtcggtcaccgaacccgacgatctggcagcc

SEQ ID NO: 26320 - DNA, 1140 bp, Mycobacterium bovis
atgagcaagaaacacacgacgcttaacgccagcatcatcgacaccaggcgccccaccgtcgccggagccgaccggcatccgggctggcatgcgctgcgcaagattgccgcgcgcatcacgacgccattgttgcccgacgactaccttcacctggcaaatccgctgtggtccgcgcgggaattgcgggggcgcatcctaggggtccgccgagagacggaagactccgcgaccctgttcatcaaaccgggctggggcttcagtttcgactaccagccgggccaatacatcgggatcgggctgctggtcgacgggtgctggcgctggcggtcgtattcgctgacgtcgagtccggcggcatccgggtccgcgcgcatggtgaccgtcacggtgaaggcgatgcccgagggcttcctgtccacccacttggtggccggggtaaagccagggaccattgtgcggctggctgcgccccagggcaatttcgtattaccggatccggcgcccccgttgattctgtttttgactgccgggtcggggattacgccggtaatgtcgatgcttcgaacgttggtgcgccgcaaccaaatcaccgacgtagtgcacctgcattcggcgcccaccgcagctgacgtgatgttcggtgccgagctggctgccctggcggccgaccatcccggttatcggttgtcggtgcgcgagacgcgcgcccagggccggctggacctgacccggatcggtcagcaggtgccggactggcgtgaacgccagacctgggcgtgcgggccggagggcgtgctcaaccaggccgacaaggtctggtcatcggcgggtgccagcgaccgactgcacctggagcggttcgcagtgtccaaaacggcgcccgctggagcgggcgggaccgtcacgttcgcccgaagtggcaagagcgtagccgccgatgctgccacgtcgttgatggacgccggtgagggcgccggcgtgcagctacccttcggctgccggatgggcatctgccagtcgtgtgtggtcgacctggtggaaggccatgttcgggatctgcgcacgggccagcggcatgagcccggaacccgggtccagacctgcgtgtcggccgcctcgggtgattgcgtgctggacatc

SEQ ID NO: 26321 - DNA, 1230 bp, Mycobacterium bovis
atgagtgctgccatcgccgaaccgaccagtcacgatcctgattccggcggccatttcggcggccccagtggttggggtggccgctacgttcccgaggcgctgatggcggtgatcgaagaggtcaccgccgcctaccaaaaggagcgcgtcagccaggactttctggacgacctagacaggctgcaggcgaactatgcgggccggccttcgccgctttacgaggcgacccggttgagccagcacgctgggtcggcgcgaatctttctgaagcgagaagacctgaaccatactggttctcacaagatcaacaacgtgctcgggcaggcactgctggcgcgcaggatgggcaagacccgggtgatcgccgagaccggtgccggccagcacggggtcgccacggccaccgcatgcgcattgctcggcctggactgtgtcatctacatggggggcatcgacaccgcccgtcaggcgctaaacgtggcccggatgcgattgctgggtgccgaagtcgtcgcggttcagacgggctcgaaaacgctcaaagacgccatcaatgaggcgttccgggattgggttgccaacgccgacaacacctactactgctttggtactgcggccggaccgcatccgtttccaaccatggtgcgcgatttccagcgaatcatcggcatggaggcacgtgtgcagatccagggtcaggccggtcggctgcctgacgccgtcgtcgcgtgcgttggtggcgggtccaatgccattggtatttttcatgcgtttctcgatgacccaggcgtacggctggtcggattcgaggcagccggcgacggcgttgagaccggccggcatgccgcgacattcaccgctggttcgcccggggcatttcacggatcgttctcgtacttgctgcaagacgaggacggtcagaccattgaatcccattcaatttccgcgggtctggattatccgggggtgggcccggaacatgcgtggctcaaggaggccgggcgtgtcgattatcggccgatcaccgactccgaggcgatggacgcgtttggcctgctgtgtcgcatggaaggcatcatcccggctattgaatccgcgcacgcggtggccggcgccctcaagctaggtgttgagttgggaaggggcgcggtgattgtggtgaacctgtcgggacgtggcgacaaagatgtcgagacggccgcgaaatggtttggcttgctgggcaacgac

SEQ ID NO: 26322 - DNA, 846 bp, Mycobacterium bovis
gtgggtgacagtgggaagggaacggcaggcatgagtccggcaaccgtgctcgactccatcctcgagggagtccgggccgacgttgccgcgcgtgaagcctcggtgagcctgtcggagatcaaggctgccgccgctgcggcgccgccgccgctcgacgtgatggccgccctacgcgagcccggcatcggcgtcatcgctgaggtcaagcgcgctagtccttcggcaggcgcattggcgaccatcgccgacccggcaaagctggcccaggcctaccaggatggcggtgcccggatcgtcagcgtggtgactgagcagcggcgttttcagggatcgctcgacgacctcgacgcggtgcgggcctcggtttcgattccggtgctgcgcaaggactttgtggtgcagccgtaccagattcatgaggcgcgtgcgcacggcgccgacatgttgttgctcatcgtcgccgcattggagcagtcggtgttggtgtcgatgttggaccgcaccgaatcgttgggtatgacagcactcgtcgaggtccataccgagcaggaagccgaccgagcgctgaaggccggggccaaggtgattggcgttaacgcccgcgacctcatgacgctggacgtggaccgggattgcttcgcgcgaatagctcctggtttgccgagcagtgtgatcaggattgctgaatccggcgtgcgtggcaccgctgacctgctggcgtacgccggcgcgggcgctgacgcggtgttggtaggcgaaggtctggtcaccagcggcgacccacgtgccgcggttgccgatctggttaccgcgggcacccatccgtcctgtccgaaaccggctcgc

SEQ ID NO: 26323 - DNA, 1095 bp, Mycobacterium bovis
atgggttccgcgcgtgcggagatgacgaaggatgcaggggagtacctggtgacgcaagcggcaacgcgaccgacgaacgacgccggccaggatggcgggaacaactcggacattctggtggttgcccgccaacaggtgctgcagcgcggtgagggcctgaaccaggaccaggtgctggcggtgctgcagctacccgacgaccggctcgaggagctgttggcgctggcccacgaggtgcggatgcgctggtgcggacccgaggtcgaggtcgaaggcatcatcagcctgaaaaccggtggctgcccggaggattgccatttctgctcgcaatcggggctgttcgcctccccggtgcgcagcgcctggctggacatacccagcctggtcgaggcggccaaacagaccgccaagtccggcgccaccgagttctgcatcgtggccgcggtgcgcggacccgacgagcgattgatggcccaggtcgcggccggcatcgaggcgattcgcaacgaagtcgagatcaacatcgcctgctccctagggatgctgaccgccgagcaagtggaccaactggcggcgaggggggtgcatcgctacaaccacaacctcgaaacggcgcgctcgttcttcgccaacgtcgtcaccacccacacctgggaagagcgctggcagacgctatcgatggtgcgtgacgcgggcatggaggtttgctgcggcggcatcctcggcatgggggagacgctgcagcagcgcgcggaattcgccgccgagcttgccgagctgggccccgacgaggtcccgctgaacttcctcaacccgcggcccggtaccccgttcgccgacctggaggtaatgccggtcggtgacgcgctcaaggcggtggccgccttccggttggcgttaccgcgcaccatgctgcggttcgccggtggccgcgagatcaccctgggtgacctcggcgccaagcgaggcatcctgggcggcatcaacgccgtgatcgtcggcaactacctgaccaccctcggccggcccgcggaagccgacctggaactgctcgacgagctacagatgccgctgaaggcactcaacgccagcctg

SEQ ID NO: 26324 - DNA, 1332 bp, Mycobacterium bovis
atggacgtcgcccgaatgaacttcagccacggcgactacgacgatcacaaggtcgcctatgagcgggtccgggtagcctccgacgccaccgggcgcgcggtcggcgtgctcgccgacctgcagggcccgaagatcaggttgggacgcttcgcctccggggccacccactgggccgaaggcgaaaccgtccggatcaccgtgggcgcctgcgagggcagccacgatcgggtgtccaccacctacaagcggctagcccaggacgcggtggccggtgaccgggtgctggtcgacgacggcaaagtcgcattggtggtcgacgccgtcgagggcgacgacgtggtctgcaccgtcgtcgaaggcggcccggtcagcgacaacaagggcatctcgttgcccggaatgaacgtgaccgcgccggccctgtcggagaaggacatcgaggatctcacgttcgcgctgaacctcggcgtcgacatggtggcgctttccttcgtccgctccccggccgatgtcgaactggtccacgaggtgatggatcggatcgggcgacgggtgccggtgatcgccaagctggataagccggaagccatcgacaatctcgaagcgatcgtgctggcgttcgacgccgtcatggtcgctcggggcgacctaggtgttgagctgccgctcgaagaggtcccgctggtacagaagcgagccatccagatggcccgggagaacgccaagccggtcattgtggcgacccagatgctcgactcgatgatcgagaactcgcggccgacccgagctgaggcctccgacgtcgccaacgcggtgctcgatggcgccgacgcgctgatgctgtccggggaaacctcggtagggaagtacccccttgctgcggtccggacaatgtcgcgcatcatctgcgcggtcgaggagaactccacggccgcaccgccgttgacacacattccccggaccaagcgtggggtcatctcgtatgcggcccgtgacatcggcgaacgactcgacgccaaggccttggtggccttcactcagtccggtgataccgtgcggcgactggcccgcctgcataccccgctgccgctgctggccttcaccgcgtggcccgaggtgcgcagccaactggcgatgacctggggcaccgagacgttcatcgtgccgaagatgcagtccaccgatggcatgatccgccaggtcgacaaatcgctgctcgaactcgcccgctacaagcgtggtgacttggtggtcatcgtcgcgggtgcgccgccaggcacagtgggttcgaccaacctgatccacgtgcaccggatcggggaagatgacgtc

SEQ ID NO: 26325 - DNA, 2835 bp, Mycobacterium bovis
gtgaccgccattggacgacttatccatcgctacgcgatatggatcgtcggcgtctgggcgctcgcggccatcatcgggaataactttgccccgccactcgagcaggtcatcaccgccgaggatcagccgttctcgccggctggcaccgccacttcgcgtgccgtggaacggtcagcggcggccttctcccaagcgcccggcgacaacatcggatatctcgtgctggagcgaaacggagtcctcaacgaccaggaccgggcttactacgatgcgctggtcgtggccctacgccgtgattcccgccacgtcatcgaggtggtggactggtggggaaccccggccatcgcggaggtcgcccgcagcgacgaccatcacgcggtgacagctgccctgcgctttgggggcatggtcggaacgtcgcaagccggggagtcgataaccgccgcgcgcagcatcgttacccaactgcatccccccgacggtttgcacgtattcgtcaccggtcctggcgccaccatcgtggacgagttcgcggcaatcgacagacagacccagctcattacggcaacgacaatcgtggtgttactgatcctcttgttgatcgtctaccgatccgcgatcaccgcgacggtgccgttgttgtcggtcgtcgtttccctagccgtggccaagccgatcgtttccgtccttgtcgaccgcgatttcatcgggatatccctgttttccctcggacttagcgttgcggtggttgtcggcgcgggaaccggcttcgcgatgttcctgatcgggcgttaccacgaacgacgaaggcaacatattgccccggcggcggcgctggcagacgcgtaccgcggggtggcgccggcgatcgcgggtgcgacgttcatcgtggtcacatcgctgggcgctgtgggatggctgagcctggcacggatcggtatgttcgcaacaaccggaatcctttgctcgattggcgttctcgcagtgggcctggccgcactgacgttgacgccagctctcgtcgcgctggccagccgtgccaacctcctcaaaccgccacaacacaagcgcatacagcgccaatttcggcgactcggcacacatgtggcgcgctggccggcgccgatattggtagccagcggtgtgttcgtactcatcatgatgatcgcgctccctagggtgccgatcggctgggacgaagccgcggcaaccccgtccgcggcggaatccaatcgcggttaccgggcggccgatcgccactttgccccgaaccaactgctgcccacccaggtgatgatcgagaccgaccacgacatccgcaatcccgccggtctgaccgcgatcgaacgaatcactgccgcgatcatggctattggcggtgtgcgcatggtgcagtcggcgagtcatcccaacggaatggtgtccaagcaggctgccttgacagcatcggcggggaatctcggtgatcagctcgacgaattttccgatcagctcacatccaggcaggcaacgttcaccaatctcgaagctgcggtccgcgacgtggtgtcagccctcgatctggttcaggctggcatacgacaggatggctatggacttggccaggtcagtctggccgtccggctgatgcaacaggcgataaccaaacttcagggcagcgccggtgacgtcttcgacatattcgacccgttgcgtcgtttcgtcgcggcgatacccgagtgccgggccaaccccgtgtgttcggtcgcccaagaggtggtgcagtgggcaaacaccgtcaccgagagctgtgcgaagctggccgatgcggcagggcagctcgcgcgggggatcgctgatgtcgcctcggcgacatcgggtgtgtccgggctaccgaatgccctggacggcattggaggtcagctggcgcaggtacgagaatcggccgcaggcgttcaagagttacttaacaatgtcggcgcagcaccattgcgagagcttcccgactatttacgcgaacttgccgccgtctcccagagtgcgccgggcgtggatctctacgccgctcggcgaattctgaccgacccgaatatgcgcgcggtcttggactattttgtctcaccaaacggccatgcaacgcgtttactcgtctacggcgacgggagcgagtggggtgacgatggcgcccaacgcgctcgcgcgatcgtgactgcggtggccgaggaaaccgacgagggcacgctgcgacccaccgctgttgagctgaccggcgttggaccggctacccgtgacctgcaggatctggtgggcagtgacctgaccttgctggcggtcatcacactggccgttatcttcgcgatagccgcactgctgctgcgcagtccgcttgccgggcttgtggtcgtcggcacaatcgcgacatcgtatatctgtgcgcttggcgccagcgtagtgatttggaaacacatacttggcgataacttgcactggtcggtattgccgattgcgtttgttttgctgatatcggtgggttcggcctacaacctgctcttcgcgctgcgcatccgcgaagaaagtcctgccgggccacgaaccagtgtcatccgagcgttcgcggcgaccggaatggtagtcacggccgctggaatcgtgtttggcacaacgatgttcgcgctggccgcgagtacctcgctgagcgtggcacagatcggcgttaccgttggcatggggttattgctggacgcccttgtgatacgaggctttgtcctgccggccctgatggttttgctgggccgctggctgtggtggccgcgccgatcggttagcaaccggcaggtacccgagccgtcgccggcc

SEQ ID NO: 26326 - DNA, 1236 bp, Mycobacterium bovis
atgggcgagacaaccacgtgcgcgatcatcggcggcggcccggccgggatggttctgggcctgctgttggcgcgggcaggtgtgcaggtcaccctgttggagaagcacggagacttcctgcgcgactttcgtggcgacacggtgcatccgacgacgatgcggctactcgacgagcttgggctgtgggaacgctttgcggctttgccctacagcgaggtccgcacggccacattgcattcgaatggtcgcgcggtgacctacatcgacttcgagcgactgcatcagccctacccctatgtcgcaatggtgccgcaatgggacctgctgaacctgctggcggaggccgcccaagcggaaccgagctttacgctgcggatgaaaaccgaggtgaccgggttgctgcgggagggcggcaaagttacgggggtgcgctatcaaggagccgagggcccgggtgaattgcgggcggaattgaccgtggcgtgcgacggccgatggtcgatcgcccggcacgaggctggactgaaggcgcgtgaattcccggtgaactttgacgtgtggtggttcaagctgccacgtgaaggtgacgccgagttctcgttcctgccgcgattctccccgggcaaggggctcggcgtgatcccacgcgaaggttatttccagatcgcctacctcgggcccaagggaaccgacgctcagttgcgcgagcgaggtatcgaggaattccgtcgggacgtcagcgaactgctgcccgaagcgacggcatcggtggcggcgctagcgtccacggacgaggtcaagcacctcaacgtcaaggtgaatcggttgcgtcgttggcacattgatgggctgctgtgcatcggcgacgcggcgcacgcgatgtcaccggtggcgggagtcggcatcaacctagcggtccaagatgcggtcgcggcagcgaccatcttggccgaaccgctgcgtgagcatcgagtcagcagccgccacctggcagcggtacggcgtcgtcgcgcatttcccaccgcggtgacccaagcggtgcagcgggtgttgcaccgaaggctgctcggcccgctgctgcagggccgggaccccacgccgccggcggccctgcttggcctggtcgaacggctgccatggctctcggcggtgcccgcctactttgtgggagttggagtccggcctgagcatgctccggccttcgcacgtcgcgggcccggcaaccgcaaaggccct

SEQ ID NO: 26327 - DNA, 3642 bp, Mycobacterium bovis
atgtaccgcaagttccgcgacgacccctcctcggtcgatcccagctggcacgagttcctggttgactacagccccgaacccacctcccaaccagctgccgaaccaacccgggttacctcgccactcgttgccgagcgggccgctgcggccgccccgcaggcaccccccaagccggccgacaccgcggccgcgggcaacggcgtggtcgccgcactggccgccaaaactgccgttcccccgccagccgaaggtgacgaggtagcggtgctgcgcggcgccgccgcggccgtcgtcaagaacatgtccgcgtcgttggaggtgccgacggcgaccagcgtccgggcggtcccggccaagctactgatcgacaaccggatcgtcatcaacaaccagttgaagcggacccgcggcggcaagatctcgttcacgcatttgctgggctacgccctggtgcaggcggtgaagaaattcccgaacatgaaccggcactacaccgaagtcgacggcaagcccaccgcggtcacgccggcgcacaccaatctcggcctggcgatcgacctgcaaggcaaggacgggaagcgttccctggtggtggccggcatcaagcggtgcgagaccatgcgattcgcgcagttcgtcacggcctacgaagacatcgtacgccgggcccgcgacggcaagctgaccactgaagactttgccggcgtgacgatttcgctgaccaatcccggaaccatcggcaccgtgcattcggtgccgcggctgatgcccggccagggcgccatcatcggcgtgggcgccatggaataccccgccgagtttcaaggcgccagcgaggaacgcatcgccgagctgggcatcggcaaattgatcactttgacctccacctacgaccaccgcatcatccagggcgcggaatcgggcgacttcctgcgcaccatccacgagttgctgctctcggatggcttctgggacgaggtcttccgcgaactgagcatcccatatctgccggtgcgctggagcaccgacaaccccgactcgatcgtcgacaagaacgctcgcgtcatgaacttgatcgcggcctaccgcaaccgcggccatctgatggccgataccgacccgctgcggttggacaaagctcggttccgcagtcaccccgacctcgaagtgctgacccacggcctgacgctgtgggatctcgatcgggtgttcaaggtcgacggctttgccggtgcgcagtacaagaaactgcgcgacgtgctgggcttgctgcgcgatgcctactgccgccacatcggcgtggagtacgcccatatcctcgaccccgaacaaaaggagtggctcgaacaacgggtcgagaccaagcacgtcaaacccactgtggcccaacagaaatacatcctcagcaagctcaacgccgccgaggcctttgaaacgttcctacagaccaagtacgtcggccagaagcggttctcgctggaaggcgccgaaagcgtgatcccgatgatggacgcggcgatcgaccagtgcgctgagcacggcctcgacgaggtggtcatcgggatgccgcaccggggccggctcaacgtgctggccaacatcgtcggcaagccgtactcgcagatcttcaccgagttcgagggcaacctgaatccgtcgcaggcgcacggctccggtgacgtcaagtaccacctgggcgccaccgggctgtacctgcagatgttcggcgacaacgacattcaggtgtcgctgaccgccaacccgtcgcatctggaggccgtcgacccggtgctggagggattggtgcgggccaagcaggatctgctcgaccacggaagcatcgacagcgacggccaacgggcgttctcggtggtgccgctgatgttgcatggcgatgccgcgttcgccggtcagggtgtggtcgccgagacgctgaacctggcgaatctgccgggctaccgcgtcggcggcaccatccacatcatcgtcaacaaccagatcggcttcaccaccgcgcccgagtattccaggtccagcgagtactgcaccgacgtcgcaaagatgatcggggcaccgatctttcacgtcaacggcgacgacccggaggcgtgtgtctgggtggcgcggttggcggtggacttccgacaacggttcaagaaggacgtcgtcatcgacatgctgtgctaccgccgccgcgggcacaacgagggtgacgacccgtcgatgaccaacccctacatgtacgacgtcgtcgacaccaagcgcggggcccgcaaaagctacaccgaagccctgatcggacgtggcgacatctcgatgaaggaggccgaggacgcgctgcgcgactaccagggccagctggaacgggtgttcaacgaagtgcgcgagctggagaagcacggtgtgcagccgagcgagtcggtcgagtccgaccagatgattcccgcggggctggccactgcggtggacaagtcgctgctggcccggatcggcgatgcgttcctcgccttgccgaacggcttcaccgcgcacccgcgagtccaaccggtgctggagaagcgccgggagatggcctatgaaggcaagatcgactgggcctttggcgagctgctggcgctgggctcgctggtggccgaaggcaagctggtgcgcttgtcggggcaggacagccgccgcggcaccttctcccagcggcattcggttctcatcgaccgccacactggcgaggagttcacaccactgcagctgctggcgaccaactccgacggcagcccgaccggcggaaagttcctggtctacgactcgccactgtcggagtacgccgccgtcggcttcgagtacggctacactgtgggcaatccggacgccgtggtgctctgggaggcgcagttcggcgacttcgtcaacggcgcacagtcgatcatcgacgagttcatcagctccggtgaggccaagtggggccaattgtccaacgtcgtgctgctgttaccgcacgggcacgaggggcagggacccgaccacacttctgcccggatcgaacgcttcttgcagttgtgggcggaaggttcgatgaccatcgcgatgccgtcgactccgtcgaactacttccacctgctacgccggcatgccctggacggcatccaacgcccgctgatcgtgttcacgcccaagtcgatgttgcgtcacaaggccgccgtcagcgaaatcaaggacttcaccgagatcaagttccgctcagtgctggaggaacccacctatgaggacggcatcggagaccgcaacaaggtcagccggatcctgctgaccagtggcaagctgtattacgagctggccgcccgcaaggccaaggacaaccgcaatgacctcgcgatcgtgcggcttgaacagctcgccccgctgcccaggcgtcgactgcgtgaaacgctggaccgctacgagaacgtcaaggagttcttctgggtccaagaggaaccggccaaccagggtgcgtggccgcgattcgggctcgaactacccgagctgctgcctgacaagttggccgggatcaagcgaatctcgcgccgggcgatgtcagccccgtcgtcaggctcgtcgaaggtgcacgccgtcgaacagcaggagatcctcgacgaggcgttcggc

SEQ ID NO: 26328 - DNA, 2140 bp, Mycobacterium bovis
aacgtgatgaacgaggcctacatcgagtcgatgggcaaggccgtcgatcgccttgtcgccgaaaaggattcgatcaccggagtggtagtcgccagcgcgaagaaaaccttcttcgccggcggcgacgtcaagacgatgatccaggccaggcccgaggacgccggcgatgtattcaacaccgtcgagaccatcaagcggcagctgcgcaccttggagacattgggtaagccggtcgtcgcggccatcaacggggcggcgttgggcggcggcctggagatcgcgctggcgtgtcatcaccggatcgccgccgacgtcaagggcagccagctcggtctgccggaggtgacgctgggtctgctgccgggtggcggtggggtgacccgcacggtacggatgttcggcatccagaacgcgttcgtgagcgtgctggcgcaaggtacccggttcaagccggccaaggccaaggagatcggtctggtcgacgagctggtggcaacggtcgaggagctggtgcccgccgccaaggcttggataaaggaggagctcaaggccaaccccgacggtgccggggtgcagccgtgggacaagaagggctacaagatgcccggcggcaccccgtcgtcgccgggtctggcggcgattttgccgtcgttcccgtcgaacctgcgcaagcagctcaagggtgccccgatgccggcgccgcgggccatcctggccgccgcggtcgagggggcacaggtcgacttcgacaccgccagccgcatcgagagccgctacttcgcgtcgttggtcaccggccaggtcgccaagaacatgatgcaggcgttcttcttcgacctgcaggccatcaatgccggcgggtctcggcccgaaggcatcggcaagaccccgatcaagaggatcggtgtgctgggtgcgggcatgatgggcgccggcatcgcctacgtctctgccaaggccggctatgaggtggtactcaaagatgtcagccttgaggccgccgctaaaggcaagggctactccgaaaagctggaggccaaggcgctggagcggggccgcaccacacaggagcgcagcgacgccctgctggcgcgcatcaccccgaccgccgacgccgccgatttcaagggcgttgatttcgtgatcgaggcggtttttgaaaaccaggagctcaagcacaaggtgttcggcgagatcgaagacatcgtcgagcccaacgcgatcctgggatccaacacctcgacgctgccgatcaccggtctggcgaccggcgtcaagcggcaggaagactttatcgggatccacttcttctcgccggtcgacaagatgccgctggtggagatcatcaagggcgagaagacttctgacgaggccctggcccgggtgttcgactacaccttggccatcggcaagaccccgatcgtggtcaacgacagccgcggctttttcacctcgcgggtcatcggcacgttcgtcaacgaggcgctggcgatgctcggtgagggtgtcgagccggcttctatcgagcaggcggggtcgcaggccgggtatccggcgccgccgctgcagctgtccgacgagctcaacttagagctgatgcacaagatcgccgtcgccacccgtaagggtgttgaggacgccggcggcacgtaccagccgcatccggcggaggccgtggtggagaagatgatcgagctcggccggtccggccggctgaagggcgcgggcttctacgagtacgccgacggcaagcgatccgggttgtggcccggcttgcgcgagacgttcaagtcgggctcgtcgcagccgccgctgcaggacatgatcgaccgcatgctgttcgccgaggcgctggaaacccagaagtgcctcgacgagggggtgctgacgtcgacggccgacgccaacatcggctcgatcatgggcatcggcttcccgccgtggacaggtggcagtgcccagttcatcgtcggctactccggcccggccggtaccggtaaggcggctttcgtggcccggacccgcgagctggcggccgcctacggcgaccgcttcctgccgccggagtcgctgctaagctgagcgcgagctgagaggtgtttgcgggcgaatcggtgcacccgattcgtccgccgggccc

SEQ ID NO: 26329 - DNA, 615 bp, Mycobacterium bovis
gtgccgccagtcagcgaggcggcgcgggcagccgggttggtcgatgttcgcggtgttgttcccgatgccgccatcgacctgcgctacgcgacggcgaacaatttcaccggcacacagctgtacccgcccggggcaagatgcctggtgcacgagtccatggccgagggtctcgcggccgccgcggcggtgctgcgcccacacgggcaggtgctggtcttctgggactgctatcggccccacgacgttcaggtcaggatgttcgatgtggtccccaacccggcctgggtggcgcggccgggcaagtacgcgcatagccatgaggcggggcgttcggtcgatgtgacgtttgccagcgctcagcggcagtgcccatcagtgcggcgatccggcgaattgtgcctggccgacatgggcaccgacttcgacgacttttcttcgcgggcgacagcgtttgcaacgcagggcgtcagtgctgaggcccaggccaaccgtgcccacctgcgagccgccatgcaggccggggggttgacggtgtactccggtgagtggtggcatttcgacggccccggccccggcgccggcgtcgatcgcccgattctcgaagtgccagttgac

SEQ ID NO: 26330 - DNA, 813 bp, Mycobacterium bovis
atgaattcgccgttggcgcccgtcggagtctttgattccggcgtcgggggactgacggtcgcgcgggccatcatcgaccaactgcccgacgaggacatcgtctacgtcggcgacaccggcaacggcccgtacggtccgctgaccatcccggagatccgggcgcacgcgctggccatcggcgacgatctggtcggccgaggcgtcaaggcgttggtgatcgcctgcaactcggcgtcgtcggcgtgcctgcgggatgctcgcgagcgctaccaggtgcccgtcgtcgaagtgatactgccggcggtgcggcgtgcggtggccgccacccgcaacggccgcatcggggtaatcggcacgcgggcgaccatcacttcacacgcctatcaggacgcgttcgctgcggcccgcgacaccgaaatcaccgcggtggcttgccctcgcttcgtggacttcgtcgagcgcggcgtcaccagcggtcgtcaggtgctcggtctggcgcagggctacctggaaccgctgcagcgcgccgaggtcgacacgctagtgctgggctgtacgcactatccactgctgtccggactgattcaactggcgatgggcgagaacgtcacgctggtctccagcgccgaggagaccgctaaggaagtggtccgggtgctcaccgagatcgacttattgcgtccgcatgacgcgccgccggcaactcggatatttgaagctacgggcgaccccgaagcgtttaccaaattggccgcacgattcctgggtccggtgctcggtggtgtgcaacccgttcacccatcgcgcattcat

SEQ ID NO: 26331 - DNA, 612 bp, Mycobacterium bovis
gtggcgcttgtgaccaagcttctggtcgccagccgcaaccgcaaaaagctggccgaactgcgccgggtgttggacggcgccggactatcgggtttgacgctgttgtcgctgggcgatgtgtcgccgctgcctgaaacaccagaaaccggtgtgacattcgaggacaacgcgctggccaaggcgcgcgacgcgttctccgcgaccggacttgccagcgttgccgacgactccggtttggaggtggccgcactgggcggcatgcctggcgtgctgtcggcccggtggtccggcaggtatggcgacgatgccgcgaacaccgcgctgttgctggcgcagttgtgcgatgtgcccgatgagcggcgcggagcagcgttcgtgtcggcctgcgcgttggtctcggggtccggcgaagttgtcgtgcgcggtgaatggcccggcacgatcgcccgtgagccgcgcggtgacggcgggttcggctacgacccggtcttcgtcccgtacggtgacgaccgcacagcggcccagctgagcccggcggaaaaggacgcggtatcccatcgcggtcgcgcgttggctctgctgctgccggcgctgcgctccctggcgacaggc

SEQ ID NO: 26332 - DNA, 1131 bp, Mycobacterium bovis
ttgcgcatcggcccgatcgagctcgccagcccggttgtgctggctccgatggccggtgtgacgaacgtcgcattccgggcgctgtgtcgtcagctggaacagtcgaaggtcggcacggtcagcggactgtatgtctgcgagatggtgaccgcacgtgcgctcatcgagcggcacccggtcaccatgcacatgacaacgttctccgcggacgaatcaccacgctcgctgcagctgtacaccgtcgatccggacaccacgtatgcggccgctcggatgatcgctggcgaagggttagccgatcacatcgacatgaatttcggctgcccagtgcccaaagtcaccaagcgcggctgcggggcggcgctaccgttcaaacggcggctattcggtcagatcgtggccgcggctgtgcgcgccaccgaaggcaccgatataccggtgacggtcaagtttcgcattggcatcgatgacgcccaccacacacatctggatgccggccgcatcgctgaggccgaaggagccgctgcggtcgcgctgcacgcccgtaccgcggcacaacgctattccggcaccgccgactgggaacagatcgcccggctcaagcagcatgtccggacgattccggtgctcggcaacggcgacatctacgatgccggcgacgcactggccatgatgtccaccaccggctgtgacggcgtggtcatcggccgtggctgcctgggccgtccctggctatttgccgagttgtccgcggctttcaccggcagcccggcccccaccccacccacgctcggcgaagtcgccgacatcatccgccgtcacggcaccttgctggccgcacacttcggcgaggacaagggcatgcgcgatatccgcaagcacatcgcctggtatctacatggcttcccggcgggctccgcgctccggcgggcgttagcaatggtcaagacgctcgacgagctcgactgcctgctggaccggttggacggcacggtaccgttcccggactccgcgactggcgcccggggccggcagggttcccccgcccgggtggcccttcccgacggctggctaaccgaccccgacgactgccgagtgccggaaggggcggacgccatggggtcgggtggc

SEQ ID NO: 26333 - DNA, 2052 bp, Mycobacterium bovis
atgagtgacggcgagagcgccgcgccgtgggcacggctctccgagtcagcattccccgatggtgttgaccgatggatcacggtaccgcccgccacatgggtggcagcccagggtccgcgggacacccagaatgtcggctgtcatgccaccggcgccgttagtgtggccgatctgatcgccaggctcggccccgcttttcctgacctccccacgcaccgccatgtcgcccccgaacccgagccatccggccgcggcccgaaggtccccgacgacgccgacgaccagcaggacaccgaggctatcgccatcccggcccactcgctcgagttcctctcggagcttcccgacctccgggcagccaactatccgcgcgccgaccacgcccgccgtgaacccgagctacccggcaagcagctaaccggatcggctcgagtgcggccattgcggatccgccgaacgtcgcccgcgcccgccaagccagcgccgaactccggccggcgcccgatggtgctggccgcgcgctcgctggcggctctgtttgccgctctggcgttggcgctgaccggcggggcatggcagtggagcgcgtcgaagaacagccggctgaacatggtaagcgcgctcgacccgcattcgggcgacatcgtcaaccccagcgggcagcatggcgacgagaacttcttgctcgtcggtatggactctcgtgccggggcgaacgccaatatcggcgccggcgacgccgaggacgccggcggcgcacgttcggacaccgtcatgctggtcaacattccggccagccgcgagcgggtcgtcgcggtgtcgttcccccgcgacctggcgatcactccaatccaatgcgaggcgtggaaccccgagaccggtaagtacggacccatctacgacgagaagacgggaacgatgggtcccagactggtgtacacggagaccaagctgaactcggcattctccttcggcgggcctaagtgtctagtgaaggtcattcagaaactgtcgggcttgagcatcaaccggttcatcgcgattgacttcgtcggtttcgcgcggatggtcgaggccctcggcggcgtcgaggtatgcagcaccaccccgttgcgggactacgaactgggcacggtgctggagcacgccggacgccaggtcattgacgggccgaccgcgctgaactatgtgcgcgctcgccaggtcaccaccgagagcaatggcgactacgggcgcatcaaacgccagcagttgtttttgtcgtcgctgctgcgttcgatgatctcgacggacaccttgttcaacctcagcaggctcaacaacgtcgtcaacatgttcatcggtaacagctacgtggacaacgtcaagaccaaagacctggtcgaactcggtcgatcgttgcagcatatggcggccgggcacgtcacgttcgtgaccgttccgaccggtataaccgaccagaacggcgacgagcccccgcgtacctccgacatgaaggcgcttttcaccgccatcatcgacgacgatccgctgcccctggaaaacgatcacaacgcccagcgtctgggcaacacgccgtcgaccccgccgaccaccaccaagaaggcgccgcaggcgggtctgaccaacgagattcagcaccagcaggttacgacgacctcgccaaaagaggtcacagtgcaggtctctaactcgaccggccaggccggtttggccaccaccgccaccgatcagctcaagcggaacggcttcaacgtgatggctccggacgactacccgagttcgctgctggccaccacagtgtttttttcgcccggcaacgaacaggctgccgccaccgtggccgccgtgttcggccagtcaaagatcgagcgggtgaccgggatcggccaactggtccaggtggtgctgggccaagacttcagcgcggtgcgcgctcccctgccgagtggctccaccgtcagcgtgcagataagccgcaactcctccagcccaccgaccaagctgcccgaggacctgacggtcaccaacgccgccgacaccacctgcgag

SEQ ID NO: 26334 - DNA, 885 bp, Mycobacterium bovis
atgttgaggcagacgggcgtggtggtcacgcttgacggtgagatcctgcagccgggtatgccgctgctgcacgccgatgatcttgccgctgtgcggggggatggcgttttcgagacactgctggtgcgcgacggccgagcctgtctggttgaagcgcacctgcagcggctgacccaatcagccaggttgatggaccttcccgaaccggatctccccaggtggcgccgcgcggtcgaggtggcaacgcagcggtgggtggctagcaccgctgacgagggcgcgctgcgcttgatctacagtcgcggtcgggagggcggctcggcgccgacggcctatgtcatggtcagtccggtcccggcgcgagttatcggggcccgccgcgatggtgtgtcggcgatcacgctggaccgcggtttgccggctgacggtggcgacgccatgccgtggctgatggccagcgccaaaacactgtcctatgcggtgaacatggccgtcctgcgtcatgccgcccggcagggcgccggcgacgtcatcttcgtcagcacggacggctacgtcctggaaggccctcgctcgacggtggtgatcgccaccgacggtgaccaagggggcgggaacccctgcttgctgacgccgcctccgtggtatccaatcctgcggggaaccacgcaacaagcgctcttcgaagtggcccgcgcgaaaggctacgactgcgactaccgtgccctacgcgtcgccgatctcttcgattcccaaggtatttggttggtatcgagcatgactctggccgcccgcgtacacaccctggacgggcggcgattaccccgcaccccgatcgctgaggtgtttgccgaattggtggacgccgctattgtcagcgaccgg

SEQ ID NO: 26335 - DNA, 2298 bp, Mycobacterium bovis
atgtctccgctcgcccggaccccgcgcaaaacgtcggtgctggacaccgtcgaacacgccgcgaccacacccgaccaaccacaaccgtatggtgagctgggcctcaaagacgacgagtaccggcggattcgccagatcctgggccgccggcccaccgacaccgagctggccatgtactcggtgatgtggagcgaacactgttcgtacaagtcctccaaggtgcacctgcgctacttcggtgagaccacctccgacgagatgcgcgcggccatgctggccggcatcggcgagaacgccggcgtcgtcgacatcggcgacggctgggcggtcaccttcaaggtggagtcacacaaccacccgtcctacgtcgagccctaccagggcgcggccaccggggtgggcggcatcgtccgcgacatcatggccatgggcgcccgaccggtcgccgtgatggaccagcttcggttcggcgccgccgacgcccccgatacccgccgcgtgctcgacggcgtggtccgcggcatcggcggatacggcaactccctgggcctgcccaacattggcggagagaccgtcttcgacccgtgctacgccggcaaccccttagtgaacgcgttgtgtgtcggcgtattacggcaggaggacctgcatttggcgttcgcctccggcgccggcaacaagatcatcctgtttggcgcgcgcaccgggctcgacggtatcggcggggtgtcggtgctggcgtcggacaccttcgatgccgagggatcccgcaagaagctgccctcggtgcaggtcggcgacccgttcatggagaaggtgctcatcgaatgctgtctcgagctctacgcgggcggcctggtgatcggcatccaagacctgggcggagccggattatcttgtgccacatcggagttagcatccgccggtgatggcggaatgacgatccagctggacagcgtcccgctgcgggccaaggagatgacgcccgccgaggtgctctgcagcgaatcgcaggagcggatgtgcgcggtggtctccccgaagaacgtcgacgcattcctggcggtgtgccgcaagtgggaggtgctggcgacggtgatcggcgaggtcaccgacggcgaccggctgcagatcacctggcacggcgagacggtggtcgacgtgccgccgcgcaccgtagctcacgaaggtccggtatatcagcgcccggtcgcccgccccgatacgcaggacgcgctgaacgccgaccgctcggccaagctgtcacggccggtcaccggcgacgagctgcgcgcgactttgcttgcgttacttggcagcccgcacctgtgcagccgcgcgttcatcaccgagcagtacgaccgctatgtgcgcggcaacacggtgctcgccgagcacgccgacggcggcatgctgcgcatcgacgagtcgaccggccggggcatcgcggtatcgaccgacgcgtcgggacgctacacgctgctggatccctacgctggcgcgcaactcgcgttggccgaggcgtaccgcaacgtcgccgtcaccggcgccaccccggtcgcggtgaccaactgcctgaacttcggttcccccgaggaccccggcgtgatgtggcagttcacgcaggcggtccgcggtctggccgatggctgtgcggacctcgggattccggtgaccggtggcaacgtgagtttctacaaccaaaccggttcggcggcaatcctgcccacgccggtggtcggggtgctcggcgtcatcgacgatgtgcgtcggcgcatccctaccggcctgggcgccgagcccggggaaacgttgatgctgttgggcgacacccgcgacgagttcgacggttccgtgtgggcgcaggtgaccgcagaccacctgggtggattgccgccggtagtcgatctggcgcgggagaagctgctggccgcggtgctgagctcggcgtcgcgggacgggctagtgtccgcggcgcacgatctgtccgagggtgggctggcccaagccatcgtggaatcggcgttagcgggtgaaaccggttgccgcatagtgcttcccgaaggggctgacccgtttgtgctgctgttctccgagtcggcgggtcgggtgctggtcgcggtgccacgcaccgaggagagccggtttcgcgggatgtgtgaggcgcggggacttcccgcggtccgcatcggcgtcgtcgatcaaggttcggacgcggttgaggtgcagggcttgttcgcggtgtcgttggccgaactgcgtgcgacatccgaggcggtgttgccgcgatacttcgga

SEQ ID NO: 26336 - DNA, 774 bp, Mycobacterium bovis
gtggccaagcggttggacctcacggacgtcaacatctactacgggtcatttcatgcggtcgctgatgtgtcgctggcgattctgccccgcagcgtcacggcgttgatcggtccctcgggctgcggcaagacgacggtgctgcgcaccttgaaccggatgcatgaggtcatccccggagctcgagtcgagggtgccgtactgctcgatgatcaagatatctacgcccccggtatcgacccggtcggtgtccgccgggcaatcgggatggtgtttcagcggccgaatccattccccgccatgtcgattcgcaacaatgtggttgccggcctgaagctgcagggtgtgcgcaatcgcaaggtgctcgacgatacggccgaatcctcgctgcgcggcgcaaacctgtgggacgaggtcaaggatcgactggataaacccggcggcggattgtctggggggcagcagcagcggttgtgcatcgcacgggcaatcgccgtgcaacccgacgtgttgctgatggacgagccctgctcctcgctggacccaatctcgaccatggccatcgaagacctgatcagcgagctcaagcagcagtacaccatcgtcatcgtcacccataacatgcagcaggctgcccgggtgagtgatcagacggcattcttcaacctggaagcggtgggaaagccggggcggctggtagagatcgccagcaccgagaaaatcttctccaacccgaaccagaaggccaccgaggactacatctccgggcgcttcggc

SEQ ID NO: 26337 - DNA, 963 bp, Mycobacterium bovis
ttgactccggccgcgatcttcctggtcgccaccatcggcgccgacggcgaggcgacggtgcacgacgcactgtcgaagatctccggcctggtgcgtgcgatcggcttccgtgacccgaccaaacacttgtccgtggtcgtctcgatcgggtccgacgcctgggaccgcttgttcgccggacctcgacccaccgagctgcatccgttcgtcgagctgaccggaccacggcataccgccccggcaactcccggcgatctgttgttccacatccgggccgagaccatggacgtgtgcttcgagttggctggccgcattctcaagtcgatgggcgatgcggtgaccgttgtcgacgaagtgcacggcttccggtttttcgacaaccgtgatctgctgggctttgtcgatggcaccgaaaacccaagtggcccaatcgccatcaaggccaccacgatcggtgacgaggatcgaaatttcgccggctcgtgttatgtgcacgtgcagaagtatgtgcacgatatggcctcgtgggaatccctctcggtcaccgagcaggagcgtgtgatcggccggaccaagctcgacgacatcgaactcgacgacaacgcgaagccagccaattcacacgtagcgctcaacgtcatcaccgacgacgacggcaccgagcgcaagatcgtgcgacacaacatgccgttcggcgaagtcggcaagggcgagtacggcacttacttcatcggatattcgcgcacgccaacggtgaccgagcagatgctgcgcaacatgtttctcggcgatccggcaggcaacaccgatcgagtgcttgacttttccaccgcggtgaccggcggactgttcttctcacccaccatcgactttctcgaccatccaccgcccctaccgcaggcggcgacgccaactctggcagccgggtcgctatcgatcggcagcttgaaaggaagcccccga

SEQ ID NO: 26338 - DNA, 4587 bp, Mycobacterium bovis
gtgggtatgacgcctaagcgcgtcgggttgtataaccccgcgttcgaacacgattcgtgcggggttgccatggttgtggacatgcacggccgtcgtagccgcgacatcgtggacaaggcgatcaccgccctgctcaacctcgagcatcggggcgcgcaaggcgccgaaccccgcagcggtgacggcgcgggcatcctgattcaggttccggacgaattccttcgcgaagccgtggatttcgagttgcctgccccaggcagctatgccacgggtatcgcgttcttgccgcagtcatctaaagacgccgccgcggcctgcgccgccgtacagaaaatcgccgaggccgaggggctgcaagtcctgggttggcgcagcgtccccaccgacgactcatcgctgggcgcgctgtcccgtgatgccatgcccaccttccggcaggtgttcttggctggcgcgtccggcatggcgttggagcggcgctgctatgtggtccgcaagcgggccgagcatgaactcggcaccaagggtccgggtcaagacgggccgggccgggaaaccgtgtacttcccgagcctgtccggccagacgctcgtctacaagggcatgctgaccaccccgcagctcaaggccttctacctcgatttgcaggacgagcgactgaccagcgcgctaggcatcgtgcactcgcggttctccacgaacactttcccgtcctggccgctggcgcatccattccggcggatcgcgcacaacggggagatcaacaccgtcaccggtaacgagaactggatgcgggcccgcgaggcgctgatcaagaccgacatctttgggtcggcggccgatgtcgaaaagctgttcccgatctgtaccccgggtgcctcggacaccgcgcgcttcgacgaggtgctcgaactgctgcacctgggcggacgcagcctggcccacgcggtgctgatgatgatccctgaggcctgggagcgccacgagtcgatggaccccgcgcggcgggcgttttaccagtatcacgcctcgttgatggagccgtgggacggcccggcgtcgatgacgttcaccgacggcaccgtcgtgggcgccgtgctggaccgcaatggcctacgcccgtcgcgaatctgggtcaccgacgacggtttggtggtgatggcttccgaggccggtgtgttggacctgcatccgtcgacggtggtgcgccggatgcggctgcagccgggccggatgttcttggtggacaccgcgcagggccgcatcgtctccgatgaggagatcaaggccgacctggcggccgagcatccgtatcaggagtggcttgacaacggactagttccgctcgacgaattgccggagggcaaagacgtgcggatgccccaccatcgaatcgtcatgcggcagttggcattcggctatacctacgaggagctcaacctgctggtagcgccgatggctcggctcggtgccgagccaatcgggtcgatgggcaccgacactccagttgcggtgttgtcgcagcgtccgcgcatgctctacgactacttccatcagctgttcgcccaggtgaccaacccgccgttggacgccatccgcgaggaggtggtgaccagcctgcagggcaccaccggcggcgaacgtgacttgctcaacccggacgagaactcctgccaccagatcgtgctgccccagccgattctgcgtaaccacgagctcgccaagctggtcagcctcgatcccaacgacaaggtcaatgggcgcccacacggattgcggtccaaggtgattcgctgtctgtaccgggtctccgagggaggtgctgggctggctgccgcgctggaagaggtacgtggcgcggcggcggcggcaatcgccgacggcgctcggatcatcatcttgtccgaccgcgagtccgacgaggaaatggctccgataccgtcgctgctcgccgttgcgggagtgcaccaccacctggttcgggaacggacccgcacccaagtgggtctggtggtcgagtccggtgatgcccgcgaggtgcaccacatggccgcgctggtcggattcggcgcggccgcgatcaacccctacctggtgttcgagtcgatcgaggacatgctcgaccgcggtgttatcgagggcatcgaccgtacggcggcgctgaacaactacatcaaagccgcaggtaagggtgtgctgaaagtgatgtcgaagatgggcatctcgacgctggcctcctacaccggtgcgcaactgttccaggctgtcggcatctccgagcaagtgctcgacgaatacttcaccgggcttacctgccccaccggcgggatcaccctggatgacatcgcggccgatgtcgcagcccggcaccggctggcctatctggaccggccggacgaacgcgctcaccgcgaactcgaggtgggtggggaataccagtggcgccgcgagggcgagtaccacctgttcaacccggagactgtgttcaagctgcagcactccacgcgaaccggccagtacaagatcttcaaggagtacacccgtctggtcgacgaccagagcgagcggatggcatcgctgcgtggtctgctcaagttccgtaccggggttcgtcctccagtcccgctggacgaggtcgagccggccagcgaaatcgtcaagcgcttctcaacgggggcgatgagctacggctcgatttccgctgaagcgcacgagacgctggccatcgcaatgaaccggcttggtgcccggtcaaactgtggtgaaggcggcgaggacgtcaagcgatttgaccgcgaccccaacggggattggcgccgaagcgccattaagcaggtagcctccgcccggtttggcgtcacctcgcattacctgaccaactgcaccgacctccagatcaagatggcgcagggcgcgaaacctggtgagggaggtcagcttccggggcacaaggtgtacccttgggtggccgaggtccggcactccacgcccggtgtcggtctgatctcaccgccgccccaccacgacatctactccattgaggatctggcgcagctgatccacgacctaaagaacgccaatccatccgcgcgggtacacgtcaagctggtctccgaaaacggggtagggacggttgcggctggcgtttccaaagcccacgccgacgtggtcttgatctcagggcacgatggtggcaccggcgcgaccccgctgacatcgatgaagcacgccggagcaccctgggagttgggtctggctgagacacagcagacgttgctgctcaacgggttacgtgatcgaattgtggtccaggtggacggtcagctcaagacgggtcgcgatgtgatgatcgctacgctgctcggggcagaagagttcggattcgcgaccgcgccgttggtagtggccggctgcatcatgatgcgggtgtgccacctggacacgtgcccggttggtgtggccacccagaatccgttgctccgggagcggttcaccgggaagcccgagttcgtggagaacttcttcatgttcatcgccgaggaagtccgggaatatttggcgcagttgggcttccgcactgtgaacgaggcggttggacaggcaggtgcgctggacaccacgctggcacgcgcgcactggaaggcgcataagctggatctggcgccggtgctccacgagccggagtcggccttcatgaatcaggatctgtactgcagttcgcgccaggatcacggtctagacaaggcgctcgatcagcagctgatcgtgatgagcagggaagcactggattccggcaagccggtccgcttctccaccaccataggcaatgtcaaccgcacggtgggcaccatgctcggccacgagctgacgaaggcctatggcggccaaggcttgccggacggaaccatcgatatcacgttcgacggatccgcgggaaacagcttcggagccttcgtgcccaagggaattaccttgcgggtgtatggcgacgccaatgactacgtcggcaaagggctatccggtggccggattgtggtgcggccgtcggatgacgcgccgcaggattatgtcgccgaggacaacatcatcgggggcaatgtgattctgttcggcgcaaccagtggcgaggtttacctgcgcggtgtggtaggcgaacggttcgcggtgcgcaattccggggcccacgccgtggtagagggtgtcggcgatcacggctgcgagtacatgaccggcggcagggttgtcattctgggccgcaccggccgtaactttgcggcgggtatgtccggcggtgtggcctatgtttacgatcccgacggtgaactgccggccaacctcaactcggagatggtcgaactcgagaccctcgacgaggatgacgcggactggctgcacggcaccatacaagtgcacgtcgacgctaccgattccgctgtcggccagcggattctgtccgactggtcgggacagcagcgccacttcgtcaaggtgatgccgcgtgactacaaacgggtcctgcaggcgatcgccctggctgaacgtgacggcgttgatgtcgacaaggcgatcatggcggctgcgcatggc

SEQ ID NO: 26339 - DNA, 1464 bp, Mycobacterium bovis
atggctgatccgggcggcttcctcaaatacacccaccggaaattgccgaagcgacggccggtcccgctgcggctgcgagactggcgggaagtctacgaggaattcgacaacgagagcctgcgccaacaggcgacccgctgcatggattgcggcattccgttctgtcacaacggatgtccgctgggtaacttgatcccggaatggaacgatctggtccgccggggccgctggcgcgacgcaatcgaacggctgcacgccaccaacaacttccccgacttcaccggccggttgtgcccggctccgtgcgagccggcgtgtgtgctgggcatcaaccaggatccggtgacgatcaagcagatcgagctggagatcatcgacaaggccttcgacgaaggatgggtgcaaccacgtccgccgcggaagctgaccgggcaaacggttgctgtggtgggttcggggccggcgggtttggccgccgcccagcaactcacccgggcgggtcacaccgtcaccgttttcgagcgcgaagaccgcatcggcgggctgctgcgttacggcatcccggaattcaagatggaaaagcggcatcttgatcggcgtttggaccaaatgcgctccgaaggaaccgaattccggccgggcgtcaacgtcggggtcgacattagcgccgaaaagctgcgcgctgatttcgatgcggtcgtattggccggtggcgcaaccgcttggcgcgagctgccgattcccggccgcgagctggagggcgtccatcaggcgatggagtttctgccgtgggccaaccgggtgcaagaaggagatgacgtcctcgatgaggacgggcagccgccgatcaccgcaaagggcaagaaggtcgtcatcatcggtggcggcgacaccggggcggactgcctgggtaccgtgcaccgccagggcgcgatcgccgtgcaccagttcgagatcatgccgcgtccaccggacgcccgcgccgaatccaccccatggccgacttacccgctgatgtatcgggtatcggccgcgcatgaggagggtggcgagcgggtgttctcggtcaacaccgaggcgttcgtcggcacggacgggcgcgtgagcgcgctgcgggcacacgaagtgaccatgctggatggcaagttcgtcaaggttgagggctccgacttcgagctcgaagccgacctggtgttgctggcgatgggtttcgtcggcccggaacgggcgggcctgttgaccgacctcggagtgaagttcaccgagcatgggaacgtggcccgtggcgacgacttcgacacctcggttcctggtgtgttcgtagccggtgacatgggccggggccagtcattgatcgtctgggcgattgccgagggccgggccgctgccgcggccgtagaccggtacttgatgggttccagtgccctgccggcgcctgttaagccgaccgctgcaccgcttcaa

SEQ ID NO: 26340 - DNA, 909 bp, Mycobacterium bovis
atgactcacatgtccatatttctgagcagggacaacaaggtcattgtgcagggcatcaccggcagtgaggccaccgtccataccgcgcgaatgctgcgggcgggcacgcaaatcgtcggcggtgtgaacgcacgcaaagcgggcaccaccgtcacgcatgaggataagggcggccggctgatcaagctgccggtgttcggcagtgtcgcggaggcgatggaaaagaccggcgccgatgtgtcgatcatcttcgtgccgccgacgttcgccaaggacgccatcatcgaggccatcgacgccgaaattccgctgttggttgtgatcaccgagggaattccggtgcaggacaccgcctatgcctgggcctacaacctcgaggctggccacaagacccgcatcattggccccaactgtcctggcattatcagtcccggtcagtcgctggccggtatcacgccggccaacatcaccggacccggtccaattggtctggtgtccaagtcggggacgttgacctaccagatgatgttcgaactgcgcgaccttggattctccacggcgatcggcatcggtggtgatccggtgattggcactacccacatcgacgccatcgaggccttcgagaaggatccggacaccaagctcatcgtgatgatcggcgagatcggtggtgacgccgaggagcgggccgcagacttcatcaagaccaacgtgtccaagccggtcgtcggctatgtcgccggatttaccgcacccgaaggcaagacgatgggccacgccggcgccatcgtctccggctcgtctggcacagcggcggccaagcaagaggccctggaggccgccggtgtgaaggtcggcaagaccccatcggcgaccgcggcgctggcccgggagatcttgctcagtctc

SEQ ID NO: 26341 - DNA, 1626 bp, Mycobacterium bovis
atgaatggtcgacgcaccataggcgaggatgggctggtgttcgggctcgtcgttatcgttgcgctggtcgccgccgtggtcgtggggaccgtcctgggccaccgctatcgcgtgggccctccagtgttgctcatcctgtccggttccctgctgggtctgattccccgtttcggtgacgttcagatcgatggcgaggtggtgctgctgctgttcctgccggcgatcctttattgggagagcatgaacaccagctttcgcgagatccgctggaacctgcgcgtcatcgtcatgttcagtatcgggctggtgattgccaccgcggtcgcggtgtcgtggacggcacgagcgctgggcatggagtcccacgccgcggctgtcctcggtgccgtgctctcccccaccgatgccgcggcggtggccggcctggcgaaacggttgccgcgccgggcgctgacagtgctacgcggcgagagcctcatcaacgacgggaccgcgctcgtgctgttcgccgtcaccgtggcggtcgcggaaggtgccgctgggatcggcccggccgcgctggtcggccggttcgtcgtctcctatctcggcggaatcatggccgggctgctggtcggcggcctggtgacattgctacgccgcagaatcgacgcaccattggaggagggagccctgagcttgctgacgccgttcgcagcgttcttgctcgctcaatctctgaagtgcagcggtgtggttgcggtgctggtttcggccctggtcctcacctacgttggtccgacggtgatacgcgctcgttcccgcctgcaggcgcatgcgttttgggacatcgccacgttcctgatcaacggctcgttgtgggtgtttgtcggcgtccagatcccgggcgcgatagaccacatcgccggcgaggacgggggactaccacgggccacagtcctggccctggcggtgacgggtgtcgttatcgccacccggatcgcctgggtacaggcaaccacggtcctgggtcacaccgtggaccgggtcctgaagaagcccacccgccacgtcggcttccgtcagcgttgcgtcacaagctgggccggtttccgcggcgcggtatcgcttgccgcagcgctggcggtgccgatgaccaccaatagcggcgctccattcccagaccgcaacctgatcatcttcgtcgtctcggtcgtcattctggtcaccgtgctggtccaagggacttccttgcccaccgtcgttcggtgggcgaggatgcccgaagacgtcgcgcacgccaacgaattgcagctggcccgcacccgtagcgcccaagccgccctcgacgctttgccgacggtcgccgacgaactcggggtcgcccccgatctcgtcaaacacctggaaaaggaatacgaagaacgcgcggtgctcgtcatggccgatggcgccgactccgcgaccagcgatctggccgagcgcaacgatctggtccggcgcgtgcgtctaggcgtgctgcaacaccagcggcaggccgtcaccacgttgcgcaaccaaaacctcatcgacgacatcgtgctgcgcgagctgcaggcggcgatggatctagaggaagtgcaactcttggaccccgccgacgccgag

SEQ ID NO: 26342 - DNA, 996 bp, Mycobacterium bovis
atggcagcgattcgcacacctcgcgatcgttggccgcatcatcaccgtaacgaagtcaccgaaatcatcccgctggacggattcctcgacggcttagcactctacgatgagctggatttcgcagagctcgatgacctggacctaggggacgactgcgtcttcgactacgaagcgcagttgctagcggctccagaactcgacgacctggacgacgccgacgatctggcccccgaatggctggtagcccccacggtcgtgctgaccccggaggtcaccccggtgtcccggcgcgtcgggcagcaccgcaagcaaccgatcggtgcggcccgggggcgcctgctgatctcggcgatggccgcgggcgcggcggccgcagcagcgcatacggcgatccaacagtcggaaaccccacgcaccgagaccgtgctgaccgctcatgcatcggcgctcaacgaagggtcgggaagcaacccaccgcggggcgtccaggtcatcgccgcccagccggcggcgagtgctgcggtgcacaacgcggagttcgccaggggggttgccttcgccgaggagcgcgccgagcgcgaggcgcgactacagcgcccgctgtatgtcatgccgacgaagggcatcttcacgtcgagtttcggttatcgatggggtgtactgcacgccggtatcgacctggctaacgcgatcggaaccccgatttatgcggtgtccgacggcgtcgtcatcgacgccggccccaccgccggctacggaatgtgggtcaagctgctgcacgccgacggcacggtcacgctatacggccacgtcaataccacgttggtcagcgtcggtgagcgcgtgatggcaggcgaccagatcgccaccatgggcagccgtggcttttccaccggcccgcacctgcacttcgaggtgctcctgggcggcaccgagcgcgtggacccagtgccgtggctcgccaagcggggacttagcgtcggcaattacaccggt

SEQ ID NO: 26343 - DNA, 2313 bp, Mycobacterium bovis
atgagtgtgcacgcgaccgacgccaagcctcccggtccatccccagcggaccaactgctcgacggcctcaacccgcaacagcgccaggcggtcgtgcatgagggttcgccgctgctgatcgtcgcgggcgcgggttcgggtaagaccgcggtgttgacccgccgcattgcctatctgatggcggcccgcggcgtcggggtgggccagattctggccatcaccttcaccaacaaagccgccgccgagatgcgcgaacgggtggtgggcctggttggggagaaggcccggtacatgtgggtgtcgacgtttcactccacctgcgtgcgtatcctgcgcaaccaggcggcgctgatcgagggcctcaactccaacttttcgatctatgacgccgacgattcgcggcggttgctgcagatggtgggccgcgacctgggcctagacatcaagcggtactcgccgcgactgctggctaacgccatctccaacctgaagaacgagttgatcgacccgcatcaggcgctggccggcttaacggaggactccgatgacctagcgcgcgccgtggcgtcggtttatgacgaataccagcggcggctgcgggcggccaacgcgctggacttcgacgacctgatcggcgagaccgtcgcggtgctgcaggccttcccgcagatcgcccagtactaccgtcggaggttccggcatgtcctggttgacgaataccaggacaccaaccacgcccagtacgtattggtgcgcgagctggtcggccgcgacagcaatgacggtattccccccggcgagttgtgcgtcgtcggggatgccgatcagtcgatctatgcgttccgcggcgccaccatccgcaacatcgaagacttcgaacgtgactaccccgacaccagaaccattctgctggaacagaattaccgctcgacgcagaacatcctgtcggcggccaactcggtgattgcccgtaacgcggggcgccgggagaagcggttgtggaccgacgccggcgccggggagttgatcgttggctatgtcgccgacaacgagcacgacgaggcccggttcgtggccgaggagatcgatgcgctcgccgagggtagcgagatcacctacaacgatgtcgccgtcttctaccgcaccaacaactcgtcgcggtcactggaagaggtgctgatccgcgccggtattccgtacaaggtcgttgggggagtgcgcttttacgagcgcaaggagattcgcgacatcgttgcctacctgcgcgtgctggacaacccgggcgacgcggtcagcctacggcgcatccttaacaccccgcgccgcggtatcggggatcgtgccgaggcgtgtgtggcggtgtacgccgagaacaccggcgtcggcttcggtgacgcgctcgtcgccgcggcccaaggcaaagtaccgatgctgaatacccgggcggagaaggcgatcgcgggtttcgtcgagatgttcgacgagctgcggggccgcctcgatgacgacctgggggagctggtcgaggcggtgctggaacgcaccggataccgccgcgagctggaagcgtccaccgatccacaggaattggcccgcctggacaacctcaacgaattagtcagcgtcgcacacgaattcagtaccgaccgggagaatgccgccgcacttggcccagacgacgaagacgtccccgacaccggtgtgctggcggattttctggaacgggtgtcgctggtcgccgacgccgatgagatcccggagcatggcgcgggtgtggttaccttgatgaccttgcacaccgccaagggtttggagttcccggtggtgtttgtgaccggctgggaggacgggatgttcccgcacatgcgggcgttggacaacccgaccgagttgtccgaggagcggcggctggcctatgtcggcatcacccgcgcccggcagcggttgtacgtgagccgggcgatcgtgcgttcgtcttggggccagccgatgctcaacccggagtcgcggtttctgcgggaaatcccgcaggagctcatcgactggcggcgcaccgccccgaagccgtcgttcagtgccccggtgagtggcgccggtcggttcggtagcgcgcgtccatcaccgacccgctcgggggcgagcaggcgcccgctgctggtgcttcaggtcggcgaccgcgtgacccatgacaaatacggcctgggccgtgtcgaggaggtctccggtgtcggcgaatcggcgatgtcgctgatcgacttcggtagctcggggcgggtgaagctgatgcacaaccacgcccctgtcaccaagctc

SEQ ID NO: 26344 - DNA, 1659 bp, Mycobacterium bovis
atgacctccgcgccaatccccgacatcaccgctaccccggcatgggacgccctgcgcagacatcacgatcagatcggaaacacccatcttcgccagttcttcgccgacgatccgggtcgcggccgggagctcaccgtcagcgtcggcgatctctacatcgactacagcaaacaccgcgtcacccgcgagacgctggcgctgctgatcgatctggcccggacggcccacctcgaagagcgtcgcgaccagatgttcgccggtgtgcatatcaacacctctgaggatcgagcggtgttgcacaccgcgctgcggctgccccgagacgccgaactcgtcgtcgacggccaagacgtcgtcaccgacgtacatgccgtgctcgacgcgatgggcgccttcaccgaccgcctgcgcagcggcgagtggaccggagcaactggaaagcggatcagcaccgtcgtcaacatcggcatcggtggttcggatttgggtccggtgatggtgtaccaagcgttgcgccactatgccgacgcgggcatttccgcgcgcttcgtgtccaacgtcgatcccgccgacctgatcgccacgctcgccgatctagaccccgccacaacgcttttcatcgtcgcgtcgaagacgttctcgacgctggagacattgaccaatgcgaccgcggcgcgtcgctggctgaccgatgcgctgggcgacgccgcggtgtcgcggcattttgtcgcggtgtccaccaacaagcgcctggtcgacgacttcggcatcaacaccgacaacatgttcggtttttgggattgggtcggcgggcgttattcggtggattcggcgatcgggctgtcgttgatgacggtgatcggccgcgacgccttcgccgatttcttggccggattccacatcatcgaccgccatttcgcgaccgctccgctggaatccaacgcgccggtgctgcttggcctgatcggactgtggtactccaatttcttcggtgcgcaatcacgcaccgtgctgccgtattccaatgacttgtcgcgttttccggcctaccttcagcagttgaccatggaatccaacggcaagtccacgcgcgccgacggcagcccggtcagcgccgacaccggtgaaatcttttggggtgaaccgggaaccaacggccagcacgccttctaccagttgctgcaccagggcacccggctggtgccagccgatttcatcggctttgctcaacccctcgacgacctgccgaccgccgagggcaccggcagcatgcatgatctgctgatgagcaacttcttcgcccaaacccaggtgctggcgttcggcaagaccgccgaggagatcgccgccgacggcacccccgcccacgtggtagcgcataaggtgatgcccggcaaccggccgtccacctcaattctggccagtcggctcacgccgtcggtgctggggcagttgatcgcgctctacgagcatcaggtgttcaccgagggtgtggtgtggggtatcgactcgttcgaccagtggggggtggagctgggcaagacgcaggccaaggcgctgcttccggtaatcaccggcgccggttcaccgccaccgcagtcggacagctcgaccgacgggctggtgcgccgctaccgcaccgaacgtggccgcgcgggc

SEQ ID NO: 26345 - DNA, 873 bp, Mycobacterium bovis
gtgacctggccgttgcccgatcgcctgtccattaattcactctctggaacacccgctgtagacctatcttctttcactgacttcctgcgccgccaggcgccggagttgctgccggcaagcatcagcggcggtgcgccactcgcaggcggcgatgcgcaactgccgcacggcaccaccattgtcgcgctgaaataccccggcggtgttgtcatggcgggtgaccggcgttcgacgcagggcaacatgatttctgggcgtgatgtgcgcaaggtgtatatcaccgatgactacaccgctaccggcatcgctggcacggctgcggtcgcggttgagtttgcccggctgtatgccgtggaacttgagcactacgagaagctcgagggtgtgccgctgacgtttgccggcaaaatcaaccggctggcgattatggtgcgtggcaatctggcggccgcgatgcagggtctgctggcgttgccgttgctggcgggctacgacattcatgcgtctgacccgcagagcgcgggtcgtatcgtttcgttcgacgccgccggcggttggaacatcgaggaagagggctatcaggcggtgggctcgggttcgctgttcgcgaagtcgtcgatgaagaagttgtattcgcaggttaccgacggtgattcggggctgcgggtggcggtcgaggcgctctacgacgccgccgacgacgactccgccaccggcggtccggacctggtgcggggcatctttccgacggcggtgatcatcgacgccgacggggcggttgacgtgccggagagccggattgccgaattggcccgcgcgatcatcgaaagccgttcgggtgcggatactttcggctccgatggcggtgagaag

SEQ ID NO: 26346 - DNA, 852 bp, Mycobacterium bovis
atgctgcgggtcgcggttcccaacaagggtgcgctgagcgagccggccaccgagatcctcgcggaggccggctaccgccgccgcaccgattccaaagacttgaccgtcatcgatccggtcaacaacgtcgagttcttcttcttgcggcccaaagacattgccatatatgtcggttcgggagagctcgacttcgggatcaccggacgcgacctggtgtgcgattccggtgcacaggttcgggaacgcctggcgctgggcttcgggtcgtccagcttccgctatgccgctcccgccgggcggaactggacgactgccgacctagccgggatgcggatcgccaccgcctacccgaatctggtccggaaagatctggccaccaagggaatcgaagcaacggtcatcagacttgatggtgccgtggagatctcggtgcagctcggggtggccgatgccatcgccgatgtggtggggtcgggtcgcacgctgagccagcacgacctggtggcctttggtgagccgctgtgcgattcggaggcggtgctcatcgagcgggccggtacggacggccaagaccagaccgaggcgcgcgatcaactggtcgctcgggtgcagggggtggtcttcggccagcagtatctgatgctcgactacgattgcccgcgctcggcgttgaagaaggccacggcgatcacgccggggctggagtcaccgaccatcgccccgctggccgacccggactgggtggcaatccgcgccctggtgccgcgccgggacgtcaacggcatcatggatgagctcgctgcgatcggggccaaagcgattctggcgtcggacatcaggttctgccgattc

SEQ ID NO: 26347 - DNA, 3576 bp, Mycobacterium bovis
gtgactgcggccgacaagcacctctacgacaccgatctgctcgacgtcttgtcgcagcgagtgatggtcggcgacggtgcaatgggaacccaactacaggccgcggacctcacgctcgacgacttccgcggcctggagggctgcaacgagatcctcaacgaaacccgccctgacgtgctggaaaccattcaccgcaactatttcgaagcgggcgccgacgccgtcgagacgaacacgtttggctgcaacctgtccaacctcggcgactacgacatcgccgacaggatccgcgatctatcacagaagggcaccgcgatcgcacgccgggtggccgacgagctgggcagtcccgaccgcaagcgctacgtgctggggtcgatggggccgggcaccaagctgccgactctgggccacaccgaatacgcggtgatccgcgacgcctacaccgaggccgcgctgggcatgctggacggcggagccgacgccatcctggtggaaacctgccaggacctactgcagctgaaggcggcggtgttggggtcgcggcgggcgatgacgcgggccgggcggcacattccggtgtttgcccacgtcaccgtcgagaccaccggcaccatgctgctgggcagcgagatcggggcggcgttgaccgctgtcgagccgctcggtgtggacatgatcggcttgaactgcgcgacgggtccggccgagatgagcgagcacctgcgccacctgtcccggcacgcccgcatcccggtgtcggtgatgcccaacgccgggttgccggtgctgggcgccaagggcgccgaatatccgttgctgcccgacgaattggccgaggcgctggccggcttcatcgccgagttcgggctctcgctggtcggtggctgctgcggcaccaccccggcccatatccgcgaagtggctgccgcggttgcgaacatcaagcgtcccgagcgacaggtcagctacgagccgtcggtgtcgtcgctgtacaccgcaatcccgttcgcccaggacgcctcggttctggtgatcggggagcgaacgaacgccaacggctccaagggttttcgtgaggcgatgatcgccgaggactaccagaagtgcctggacatcgccaaggaccagacccgcgacggcgcccacctgctggacctgtgtgtggactacgtgggccgcgacggtgtgcccaacatgaaggcgctggccagccgactggccacgtcctggacgctgccgatcatgctggactccaccgaaaccgcggtgctgcaggcgggtttgaagcatctgggtggccggtgcgcgatcaactcggtgaactacgaggacggcgacggcccggaatcgcgctttgccaagaccatggcgctggtcgccgagcacggcgcggcggtggtcgcgctgaccatcgacgaagagggccaggcccgcaccgcgcagaagaaggtcgagatcgccgagcggctgatcaacgacatcaccggcaactggggcgtcgacgaatcatccatcctcatcgacaccttgacgttcaccatcgccaccggtcaggaggagtcccgccgcgacggcatcgagaccatcgaggcgatccgcgaactgaaaaagcgccacccggatgtgcagaccacacttggtctgtccaacatctcgtttggtctcaatcccgcagcgcgccaggtgctcaactcggtgttcctgcacgaatgccaagaagcggggctggattcggcgatcgtgcacgcgtcgaagatcctgccgatgaaccggattcccgaggagcaacgcaacgtcgccctggatctggtctacgaccgccgccgcgaggactacgatccgctgcaggagctgatgcggctgttcgaaggcgtgtcggcggcctcctcgaaagaggaccgactggctgaactagctgggctgccgctgttcgaacggctggcccaacgcatcgtcgacggcgagcgcaacggcctggacgccgatctcgacgaggcgatgacgcaaaagccgccgcttcagatcatcaacgaacatctgctggccggcatgaagacggtcggcgagctcttcggctccggccagatgcagctgccgttcgtgctgcagtcggcggaggtaatgaaagccgccgtcgcgtatctggaaccgcacatggagcgctcggacgacgattcgggcaagggacgcatcgtgctggccaccgtcaagggcgacgtgcacgacatcggcaagaacctggtcgacatcgtcttgagcaacaacggctacgaagtggtcaacatcggcatcaagcagccaatcgccaccatcctcgaagtcgccgaggacaagagcgccgacgtggtcggcatgtcgggcctgctggtgaagtcgaccgtggtgatgaaggaaaacctcgaggagatgaacacccggggagtcgccgaaaagttcccggtgctgctcggcggcgcggcgttgacgcgcagctatgtcgaaaacgacctggccgagatctaccagggcgaagtgcattacgcgcgagacgctttcgagggcctgaagttgatggacaccatcatgagcgccaagcgcggcgaggcgcccgacgaaaacagcccggaagccattaaggcgcgtgagaaagaagccgaacgtaaggcccgccaccagcgatccaaacgcattgccgcacagcgcaaagccgccgaagaaccagtcgaggtgcccgaacgctccgatgtcgcggccgacatcgaggtcccggcgccgccgttctggggttcgcggatcgtcaagggcctggcggtggccgactacaccggtctgctcgatgagcgcgcattgtttttgggccagtggggtttacgcggccagcgcggcggtgagggtccgtcctacgaagatctcgtcgagaccgagggccggccgcggctgcggtactggttggaccggctgtccaccgacggcatcttggcgcacgccgccgtggtgtacggctatttcccggcggtgtccgagggcaacgacatcgtggtgctcaccgagcccaagcccgacgccccggtgcgctaccggtttcacttcccgcgccagcagcgcggtcggtttttgtgcattgccgatttcatccgctcgcgggagctggccgccgagcgtggcgaggttgacgtgctgccgttccagctggtgaccatgggtcagccgatcgcggatttcgccaacgagctgttcgcgtccaacgcctaccgcgactacctggaggtgcacggtatcggcgtgcagctcaccgaggcgctggccgagtactggcaccggcggatccgtgaggagctcaagttctccggggatcgggcgatggcggccgaggatccggaggcgaaagaagactatttcaagctcggctaccgcggtgctcgctttgccttcggctacggcgcatgcccggatctggaggaccgcgccaagatgatggcgctgctggagcccgaacgcatcggtgtgacgttatccgaggaattacagctgcatcccgaacagtcgaccgacgcgttcgtcctgcaccatccggaagccaagtacttcaacgtt

SEQ ID NO: 26348 - DNA, 1731 bp, Mycobacterium bovis
atggcgcgactgtcaagggagcgctacgcacagctgtacggacctaccaccggcgaccggatacggctggccgacaccaacctgctggttgaggtcaccgaagaccggtgtgggggaccgggactggccggtgacgaggcggtgttcggcggcggcaaggtgctgcgcgagtccatgggccagggccgtgcgagccgggccgacggtgcccccgacaccgtgatcaccggtgcggtgatcatcgactactggggaatcatcaaggccgacatcgggattcgcgatggccgcatcgtcgggatcggaaaggccggcaatcccgacatcatgacaggtgtgcatcgggatctcgtcgtcgggccgtccaccgaaatcatcagcggcaaccgtcgaatcgtcaccgcaggcaccgtcgactgtcacgtgcacttgatctgtccgcagatcatcgtcgaagccttggccgcgggcaccaccacgatcatcggcggtggcaccggacccgccgagggcaccaaggccaccacagtcactcccggcgagtggcacctggcccggatgctggagtcactggacggttggccggtgaacttcgcgctgctcggcaagggaaacaccgtgaatcccgacgcactgtgggaacagttgcgcggtggcgcatcgggtttcaaactccacgaagactggggatcgaccccggcggccatcgacacctgcttggcggtcgccgacgtggccggggtgcaggttgcgctgcactccgacactctcaatgagaccggattcgtcgaggacaccatcggcgcgatcgccggacgttcgattcacgcctaccacaccgagggcgccggcggcgggcacgcaccggacatcattaccgtcgcggcgcaaccgaatgtactgcccagctcgaccaatccgacccgcccgcatacggtgaacacccttgacgagcatctcgacatgctgatggtgtgccaccacctcaacccccggatcccggaggacctcgcgtttgccgaaagccggatccgaccgtccaccattgcggcagaagatgtgttgcacgatatgggggcaatctcgatgattggcagcgattcccaggcgatgggccgtgtcggcgaggtggtgctgcgcacctggcagaccgcgcacgtgatgaaagcccgccgcggggcactggaaggtgacccgtctggtagccaagccgccgacaacaaccgggtccgccgctacatcgccaaatacaccatctgcccggccatcgcacacggcatggatcacctgatcggttcggtggaggtgggaaagttggccgacctggtgttgtgggagccggcgtttttcggggttcgcccgcacgtcgtgctcaaaggtggggcgatcgcctgggcagcgatgggcgatgcgaacgcgtcaatcccgaccccgcaaccggtgctcccgcgaccgatgttcggcgcggccgcggcaaccgcggcggcgacctcggtgcacttcgtcgcgccgcaatccatcgacgcgcgcctggcggaccggctcgcggtcaatcggggactagcgccggtggccgacgtgcgcgcagtgggcaagaccgacctgccgctcaatgatgccctaccgagcatcgaggtcgatcccgacaccttcaccgtgcgaatcgacggccaggtgtggcaaccgcagccggccgccgaactacctatgacacaacggtatttcctgttc

SEQ ID NO: 26349 - DNA, 633 bp, Mycobacterium bovis
atgacctcgctggccgtgctgctcaccctcgccgactcgcggctgcccacgggtgcgcacgtgcactcgggcggcatcgaagaagccatcgccgccggcttggtgaccggcctggccaccctggaagcgttcctgaaacggcgggtccgcacccacggcctgctgacggcgtccatcgcggccgcggtgcaccggggcgagctggccgtcgacgacgccgaccgggaaaccgacgcgcgcacaccggctcccgcggccagacacgcctcacgcagccagggccgcgggctgatcaggctggcacggcgggtgtggcccgattccggctgggaggaactgggcccgaggccgcatctggcggttgtggccggacgggtcggcgcgctgagcgggctggcgcccgagcacaacgccttgcacctcgtctacatcacaatgaccggctcggccatcgccgcccagcgactgctggcgctagatcccgccgaagtgaccgtggtgaccttccagctgtccgaactgtgcgagcagatcgcgcaggaggccacagccggactggcagacttgtctgatccgctgctggacacgctcgcccagcggcatgacgagcgcgtgcgtcccctgttcgtttcc

SEQ ID NO: 26350 - DNA, 303 bp, Mycobacterium bovis
atggacatcacggcaacaaccgaattttccgccatgaacctcgacggcaagacgggtataggttggctcggctacatcgtcatcggcggtatcgccggctggctcgccagcaagatcgttaaggggggcggctcgggcatcctgatgaacgttgtgatcggcgtcgtcggggcattcggcgccggcttggtccttaacgcgctgggcgtcgacgtcaaccatggcgggtactggttcaccttcttcgtcgccctgggcggggctgtcgtcctgctgtggatcgtcggcatggtgcgcaagacc

SEQ ID NO: 26351 - DNA, 672 bp, Mycobacterium bovis
atggcaacgcattcccatccccactcgcacaccgtgcccgctcggccaaggcgggtccgcaaaccgggcgagccactgcgcatcggcgtcggcggcccggtcggctccggcaagaccgcactggtggcggcgctgtgccggcaattgcggggagagctgtcgctggcggtgctgaccaacgacatctacaccaccgaagacgccgacttcttgcgcacacatgcggtgctgccagacgaccggatcgcggccgtgcagaccggcggctgcccgcacaccgcgatccgcgacgacatcaccgccaacctggatgcgatcgacgagttgatggccgcccacgacgcgttggacctgatcctggtcgaatccggcggcgataacctcacggccaccttctcttcggggctggtggatgcgcagatcttcgtcattgacgttgccggcggcgacaaggtgccgcgcaagggcgggccgggggtgacctattcggatttgttggtagtcaacaagactgacctggctgcattggtgggcgccgacctggcggtgatggcccgcgatgcggacgcggtgcgcgacggccgcccgacggtgctgcaatcgttgaccgaggacccagctgccagcgatgtcgtggcctgggttcgtagtcaactggccgccgatggagtc

SEQ ID NO: 26352 - DNA, 1215 bp, Mycobacterium bovis
gtgcgcgatctggcacccctgctccagttcaacaggccgcagttcgacacctccaagcgccgcctgggcgccgcgctgaccatccaggacctgcgacgcattgccaaacggcgtacccctagggcggcgttcgactacgccgacggggctgccgaggacgaactgtccatcgcgcgtgctcgacaagggttccgcgacatcgagtttcacccgacaatcctgcgtgacgtcaccaccgtgtgcgccggctggaacgtcctcggtcagcccaccgtcttgccattcgggatcgcgccaaccgggttcacccgcttgatgcacaccgagggcgagatcgccggcgcgcgggcggcggccgcggctgggatcccgttttcgctatccaccctggccacctgtgccatcgaagacctcgtcatcgctgtgccgcagggccgcaaatggttccagctgtatatgtggcgtgatcgagaccgctcgatggcattggtgcggcgcgccgccgccgcgggatttgacaccatgctggtcacggtcgacgtcccggtcgccggtgcccggctacgcgatgtccgcaacgggatgtccatcccgccggcgctgacgctgcgaaccgttctcgacgcgatgggacacccgcggtggtggttcgacttgttgaccaccgaaccgctggccttcgcttcactggatcgctggcctggcaccgtcggcgagtacttgaacaccgtgttcgaccccagcctcaccttcgacgatttggcctggatcaagtcgcagtggccgggcaagctcgttgtcaaagggatccaaacactcgacgacgcccgcgccgtggtggaccgcggcgtcgacggcatcgtgttgtccaatcacggcggccgccagcttgaccgagccccggtacccttccacctgttgccccacgtggcacgcgaactgggcaaacacaccgaaatcctggtggacaccggcatcatgtcgggcgccgatatcgtcgcggcgatcgcgttgggggcacggtgcacgctgatcgggcgggcctacctttacgggctgatggccggtggtgaggcgggcgtcaaccgcgcgatcgagatccttcagacaggtgtgatccggaccatgcggctactgggcgtgacctgccttgaggagctgtcacctcggcacgtgacacaactgcggcggctcggccctatcggggcaccaacg

SEQ ID NO: 26353 - DNA, 1047 bp, Mycobacterium bovis
atggatgtgctgtccgcggtgttgctggcgcttttgctgatcggcgccaacgcgttcttcgtgggcgcggaattcgcgttgatctcggcgcgtcgtgaccgcctcgaagcgctggccgagcagggcaaggccactgccgtcaccgtgatccgggcgggcgaacagctcccggcgatgctgaccggcgcacagctgggggttacggtgtcctcgatcctgcttggccgggtcggcgaaccggcagtcgtcaagctgctacagctgtcgttcgggctgagcggtgtaccgccggcgctgctgcacaccttgtcgttggcggtggcgttggcgatcgtggtggcgctgcatgtcctgctcggtgagatggtgccgaagaacatcgctttggctggtccggagcgaacagcgatgttgctggtcccgccgtacctggtctacgtgcgcctcgcccggccgttcatcgcgttctacaacaactgcgccaacgcgatactgcggctggttggggtgcagccgaaggatgaactcgacatcgccgtctccactgcggaactgtccgagatgatcgccgaatcgctatccgaaggcctgctggatcacgaggagcacacgcggctaacccgagcccttcggattcgaactcgcctggttgccgatgtcgcggtgccgctggtcaacattcgggcagtgcaggtgtcggcggtagggtccgggcccaccatcggcggggtcgaacaggccttggcgcaaaccggctactcccgctttccggtggtggatcgcggtggaaggttcatcggatatctgcacatcaaggacgtgctgaccctcggtgacaatccgcaaaccgtgatcgatctggccgttgtgcgcccgctgccgcgggttccccaatcgttgccgctggccgacgccctgtcgcggatgcggcgcatcaacagccatctggccttggtaaccgccgacaacggttctgtcgtggggatggtggcgctggaggacgtggtggaggacctggttggcaccatgcgcgacgggacgcatcgt

SEQ ID NO: 26354 - DNA, 1319 bp, Mycobacterium bovis
atcgcgcagatcggcgtcactggcctggccgtgatgggttccaacatcgcccgaaacttcgcccggcacggctacaccgtggcagtgcacaatcggtcggtcgccaagaccgacgcgctgcttaaggagcacagctcagacggcaagttcgtgcgcagtgaaacgatccccgaatttcttgccgcactggaaaaaccgcgtcgggtgctgatcatggtcaaggccggagaggccactgacgctgtcatcaacgaacttgctgacgccatggaacccggcgacatcatcatcgacggcggcaatgcgttgtacaccgacaccatgcgccgcgagaaagcgatgcgtgagcggggcttgcacttcgtcggggccgggatctccggcggcgaagagggcgcgttgaacgggccgtcgatcatgcccggcggacccgccgagtcataccaatcgctgggtccgctgctcgaggagatctccgcgcatgtcgacggcgtgccgtgctgcacccacattggcccggacggctccgggcacttcgtcaagatggtccacaacggcatcgagtactccgacatgcagctcatcggtgaggcctaccagctgatgcgcgacgggctaggtctgaccgcgccggcgatcgccgatgtgttcaccgagtggaacaatggcgatctggacagctacctggtcgagatcaccgccgaggtgctgcggcagaccgatgccaagaccggcaaaccgctcgtcgacgtcatcgtggaccgggccgagcagaaaggcaccggccgttggaccgtcaagtccgcgctggacctgggtgtgccggtgaccggcatcgccgaagcggtgtttgcccgcgctctctcgggatccgtggggcaacgctcggccgccagcggtctggcttcgggcaagctcggcgagcagcccgccgaccccgccacgttcaccgaagacgtccgccaggcgttgtacgcctccaagatcgtggcctacgctcagggcttcaaccagatccaggccggcagcgccgaattcggctgggacatcacgccgggcgacctggccaccatctggcgtggcggctgcatcatccgggcgaagttcctcaaccacatcaaggaagcctttgacgccagcccgaacctggccagtctgattgtggccccgtatttccgcgcgccgtcgaatcggcgatcgacagttggcggcgtgtggtgtcgacggcggcccaactgggtatcccgaccccgggattctcgtcggccctgtcgtattacgacgcgctgcgcaccgcgcggctgcccgctgcactcacc

SEQ ID NO: 26355 - DNA, 300 bp, Mycobacterium bovis
atgcgcctgacgccgcacgaacaggagcgtttgctgttgtcctacgccgccgagttggcccgccggcgtcgggcccgcggcctgcgcctcaatcatccggaagccatcgcggtgatcgccgaccacatcctggaaggcgcgcgtgacggccgcaccgtcgcagagttgatggcatccgggcgtgaggtgctcggccgtgacgatgtgatggagggagtgccggagatgctcgccgaggtacaggtggaggcgacgtttccggacggcaccaagttggtcaccgtgcatcagccgatcgca

SEQ ID NO: 26356 - DNA, 1002 bp, Mycobacterium bovis
atggccggaatagcaagcaccgtcgcggtgatgggcgccggtgcatggggcacggccctggctaaggtgctggccgacgcgggcggagaggtcacgctgtgggcgcggcgagctgaggtggccgatcagatcaataccacccgatataaccccgactatctgcccggtgcgctgttaccaccgagcattcatgccaccgcagatgccgaggaggcacttgggggcgcatccacggtgctgttgggagtgcccgcgcagaccatgcgggccaatctcgagcggtgggctcccctgttgcccgagggtgcgaccttggtcagtctggccaagggcatcgagttgggcaccctgatgcggatgagccaggtcatcatctcggtgaccggtgccgagccggcgcaggtcgcggtgatctctggacccaacctggccagcgagatcgccgaatgccagcccgccgctaccgtcgtcgcgtgcagcgactccggccgcgcggttgccttgcagcgcgcgctgaacagcgggtacttccgcccctacaccaacgccgatgtcgtcggcaccgagatcggcggggcgtgcaagaacatcatcgcgcttgcgtgcggaatggcggtgggcatcgggctgggcgaaaacaccgcggccgcgatcatcacccggggcctggcggagatcatccggctcgggacggcgctcggcgccaacggcgcgacgttggccggtctggcaggggtcggtgatctggtggccacctgcacctcaccgcgttcgcgcaaccgatcgtttggcgaacgcctgggccggggcgaaacgttgcagtcggcgggcaaggcttgtcatgtcgtcgaaggcgtgacgtcgtgcgaatccgtgctcgcgctggcgtccagctacgacgtcgaaatgccactcaccgacgcggtgcatcgggtctgtcataaagggctgtcggtggacgaggcgataacgctgctgctgggtcgccgcaccaagcccgaa

SEQ ID NO: 26357 - DNA, 1074 bp, Mycobacterium bovis
gtgttcggcgggcgcagcaacgagcacgccatctcgtgtgtgtccgccggcagcatcctgcgcaacctggactcgcggcggttcgacgtgatcgcggtgggtatcaccccggcaggttcgtgggtgctcaccgacgccaaccccgacgccctgacgatcaccaaccgggagcttcctcaggtcaaatcaggatcgggcaccgagctggcgctgccggccgatccgcggcgtggtggccagttggtgtcgctgccgcccggggccggcgaggttctggagtcggtcgacgtggtgttcccggtactgcacggcccgtacggcgaggacggcacgatccagggactgctcgaactcgccggggtgccctacgtgggcgccggtgtgctggccagtgccgtcggcatggacaaggagttcaccaagaagctgctcgccgccgatggacttccggtgggtgcgtacgcggtgctgcgtccgccgcggtcgacactgcaccgccaggagtgcgaacggctgggcttaccggtgttcgtcaaacccgcccgaggcggctcgtcgatcggtgttagccgggtgtcgagttgggatcaactgcccgccgcggtcgcgcgggcccgccggcatgaccctaaggtcatcgtcgaggccgcgatcagcggccgcgagctggaatgcggtgtgctcgaaatgccggacggcacactggaagccagcacgctgggggagatccgggtggccggggtgcggggacgcgaggactctttctacgacttcgcaaccaagtatctcgacgacgcagccgaattggacgtgcccgccaaggtcgatgaccaggtcgcagaggcgattcgtcagctggcgatccgggcgttcgcggctatcgactgccggggtctggccagggtggacttcttcctcaccgacgacggtccggtgatcaacgagatcaacacgatgccgggattcaccacgatctcgatgtacccgcggatgtgggcggccagcggtgtcgactatccgaccctgctggcgacgatgatcgagacggcattggcccgcggcgtgggcctgcac

SEQ ID NO: 26358 - DNA, 930 bp, Mycobacterium bovis
atgggcaaagggagcatgaccgcgcacgcaacgccgaacgagccggattatccgccaccgcctggcggtccaccgccgccggccgatattggccggttactgcttcggtgccacgaccgccctggaatcatcgccgcggtgagcaccttcctggcccgggccggcgccaacatcatttctctggaccagcactccaccgcgccggagggcggaacgttcttgcagcgcgcaatctttcacctgcccggtctcacggccgccgtcgacgaactgcagcgcgacttcggcagcactgtggcggacaagttcggcatcgactaccgatttgccgaagcagccaagcctaagcgggtcgcaatcatggcatcgacagaggaccactgcttgctggacttgttgtggcgcaaccgtcgcggcgagctagaaatgtcggttgtcatggtgattgccaatcatcctgacctggccgcgcacgtacgcccgttcggtgtgccattcatacatattcccgccactcgcgacactcgtacggaagccgaacagcgtcagcttcagttgctaagcggcaatgtggatttagtagtgctggcacgctacatgcagatactcagcccggggttcttggaggcgatcggctgcccgctgatcaacattcaccattcgttccttccagccttcaccggcgcggccccgtaccagcgcgcacgagaacgcggcgtcaaactgatcggcgcgaccgcccactacgtgaccgaagttctcgacgaggggcccatcatcgaacaagacgtcgttcgtgtcgaccacacccacaccgtcgatgatctggtgcgtgtcggcgccgacgtcgaacgcgcagtgctttcccgcgccgtgctctggcactgccaagaccgcgtcatcgtgcatcacaaccagaccatcgtcttc

SEQ ID NO: 26359 - DNA, 573 bp, Mycobacterium bovis
gtgtatgagagcaaagaggtggccgcgcaggtgacaggcgagtccgacgggccgccgcgcgccgtgctgatcgccgcggcggcgctggcggcggcggtgatcggggtaatcctggttgtcgcggcgaaccgccagccgccggagcgaccggttgtcattccggccgtgcccgctccgcaggccaccggtcccggctgcaaagcactgctggcggcgctgcctcaacgactcggcgagtatcggcgcgcgcccgtcgcggagccgaccactgcgggtgccacggcctggcgaacggggccaaacagcacaccggtgattttgcgctgtggactcgaccgcccggccgagttcgtggtgggttcggccatccaagtcgtcgatcgggtgcagtggtttcaggtggccgcgcaaaacccggacgagccaggccggtccacctggtacaccgtggaccggccggtgtatgtggcgctgacactcccctcgggatcggggcccaccgcgatccaggaattgtcagacgttatcgaccacaccatccccgcggtacccatcgacccggcgccggctcgc

SEQ ID NO: 26360 - DNA, 999 bp, Mycobacterium bovis
gtgaccactaaagatcactcacttgcaacggagtccccgacgctgcagcagctcggcgagttcgccgtgatcgaccggctggtgcgggggcgccgacaacccgccacggtactgctcgggcccggcgacgatgccgcgctggtgtctgccggcgatggtcgcactgtggtgtcgacggacatgctggtgcaagatagtcacttccggctggactggtcgacaccgcaggacgtcggccgcaaggcgatcgcccagaatgccgccgacatcgaggcgatgggggcgcgggccaccgcgttcgtggtcggctttggagcacccgctgagacgccggcggcgcaggcgagcgcgttggtcgacggaatgtgggaggaggcggggcgcattggtgccggcatcgtcggcggcgatctggtcagctgccggcagtgggtggtgtcggtcaccgcgattggtgaccttgacggtcgtgccccggtgctgcgctccggggcgaaggccggctcggtgctggccgtcgtcggtgagctgggccgctcggctgctggctatgcgctgtggtgcaacgggattgaagacttcgccgaactgcgccgccgccatttggtgccgcagccgccctacggccacggcgcggcggccgcggctgtcggggctcaagcgatgatcgatgtctccgacgggctgctcgccgatctgcggcacatcgccgaggcatccggcgtgcgcatcgacctgtccgccgcggcgttggccgctgaccgcgacgctttgactgcggccgcaaccgctctgggcaccgacccctggccgtgggtgctaagcgggggtgaagatcatgccctggtcgcctgtttcgtcggtccggtgccggccgggtggcgcaccattggccgggttctcgacgggccggctagggtgctggtcgacggcgaggagtggactggatacgcgggctggcaatcgtttggggagccagacaatcaaggttcgctaggg

SEQ ID NO: 26361 - DNA, 768 bp, Mycobacterium bovis
atggccgcaccaatgttttcgatcatcatccccaccttgaacgtggctgcggtattgcctgcctgcctcgacagcatcgcccgtcagacctgcggtgacttcgagctggtactggtcgacggcggctcgacggacgaaaccctcgacatcgccaacattttcgcccccaacctcggcgagcggttgatcattcatcgcgacaccgaccagggcgtctacgacgccatgaaccgcggcgtggacctggccaccggaacgtggttgctctttctgggcgcggacgacagcctgtacgaggctgacaccctggcgcgggtggccgccttcattggcgaacacgagcccagcgatctggtatatggcgacgtgatcatgcgctcaaccaatttccgctggggtggcgccttcgacctcgaccgtctgttgttcaagcgcaacatctgccatcaggcgatcttctaccgccgcggactcttcggcaccatcggtccctacaacctccgctaccgggtcctggccgactgggacttcaatattcgctgcttttccaacccagcgctcgtcacccgctacatgcacgtggtcgttgcaagctacaacgaattcggcgggctcagcaatacgatcgtcgacaaggagtttttgaagcggctgccgatgtccacgagactcggcataaggctggtcatagttctggtgcgcaggtggccaaaggtgatcagcagggccatggtaatgcgcaccgtcatttcttggcggcgccgacgt

SEQ ID NO: 26362 - DNA, 1419 bp, Mycobacterium bovis
atggccttgcagaccggcgagccacgcacactggccgagaagatttgggacgaccacattgtggtatcaggcgggggctgtgcgcccgacttgatctacatcgatctgcatctggtgcatgaggtcaccagcccgcaggcgttcgacggcctgcgcctggccgggcgccgggtgcggcggcccgagctcaccctcgccaccgaggatcacaacgtgcccaccgtcgacatcgaccagccgatcgccgacccggtgtcacgcacccaggtggagacgttgcgccgaaactgcgccgaattcggaatccggctgcattcaatgggcgatatcgagcagggcatcgtgcacgtcgtcggaccgcaattgggtctcacccagccgggaatgacgatcgtctgtggcgatagccacacctcaacccacggcgcattcggcgcgttggcgatgggcatcggtacgtcggaggtcgagcacgtgctggccacccagacgctgccgctgcggccgttcaagaccatggcggtcaacgtcgatgggcggctgcccgacggtgtgtcggccaaggacatcatcctggcgttgatcgccaagatcggcaccggcggcggccaggggcatgtcatcgaataccggggcagcgccatcgaatcgctgtccatggaaggccggatgacgatctgcaacatgagcatcgaagccggcgctcgtgcgggcatggtggctccggacgaaaccacctacgcgttcttgcgtggtcgtccgcacgcacccaccggtgcccagtgggacaccgcactcgtctactggcaacggcttcgcaccgacgtcggcgccgttttcgacaccgaggtgtatctcgacgccgcgtcgttgagcccgtttgtcacctggggcaccaacccaggccaaggggtaccgctggcggccgcggtgccagatccgcaactgatgaccgacgacgccgagcggcaggccgccgagaaagcattggcgtacatggaccttcgacccggaaccgcgatgcgcgaaatcgcggtcgacgccgtgttcgtcgggtcgtgtaccaacggtcgcattgaagatctgcgggtggtcgccgaagtgctgcgtggccgcaaggtggccgacggcgtgcggatgctgatcgttccgggctcaatgcgggtacgcgcgcaggccgaggccgaagggctcggtgagatcttcaccgacgcgggcgcgcaatggcggcaggcgggatgctcgatgtgtctgggcatgaatcccgatcagctggcgtccggggagcgctgcgccgcgacgtccaaccgcaacttcgaagggcggcagggcgcgggcggccgcacacatttggtgtccccagcagtggcggccgccaccgcggttcgcggcacactgtccagcccggccgatttgaat

SEQ ID NO: 26363 - DNA, 642 bp, Mycobacterium bovis
atgaacaaagcagagctcattgacgtgctcacacagaaattgggctcggaccgtcggcaggcgaccgccgccgtcgagaatgtcgttgacacgattgtgcgtgcggtacacaaaggcgacagcgtcaccattaccgggttcggtgtgttcgaacagcgtcgccgcgcggctcgagtggcccgcaatccgcgtaccggcgagacagtaaaggtgaagccgacgtcggtgccggcgttccgcccgggcgcgcaattcaaagcggttgtgtctggcgcgcagcgtctcccggcagaaggacccgctgttaagcgtggtgtgggggccagtgcagccaagaaggtagcgaagaaggcacctgccaagaaggcgacaaaggccgccaagaaggcggcgaccaaggcgcccgccaggaaggcggcgaccaaggcgcccgccaagaaagcggcgaccaaggcgcccgccaagaaagctgtcaaggccacgaagtcacccgccaagaaggtgaccaaggcggtgaagaagaccgcggtcaaggcatcggtgcgtaaggcggcgaccaaggcgccggcaaagaaggcagcggccaagcggccggctaccaaggctcccgccaagaaggcaaccgctcggcggggtcgcaaa

SEQ ID NO: 26364 - DNA, 5163 bp, Mycobacterium bovis
atgttggcggccgcggcggcctgggacggactagccgacgaactggcggtggcggcgtcgtggtttgggtcggtgacctcgggcctggcggatgcggcgtggcgcggccccgcggcggttgcgatggcgcgcgcggtagccccctacctgggctggttgatttcggcaacggcccaggctgagcaggccgccgctcaggcacgggtagccgtggccacgttcgaggcggcgcgggcagcgacggtgcatccggcgatcgtcgcggccaaccgcgccgtgctggtgtcgctggtgagctcgaatctgctgggattcaacgctccggcgatcgcggccaccgaggccgcctatgagcggatgtgggcccaggatgtggccgcgatggttggctatcacgctggagcgtcggcggccgtctccgcgttgatgccgttcacccagcagctgaagaagctggcgggcctatcggagcggctgaccagcgccgcggcagccgctgccggccccccgagcgcggcgggcttcaatctcggcttggcaaacgtcggcgccaacaacgtgggcaacggaaacgtcggcgtgttcaacgtcggcttcggcaatttgggcagctacaacctcggctttgcaaacctgggcagcgacaacctgggtttggccaacctgggcggccacaacatcggctttgcgaacaccggcagcaacaatgtcggctttgggaatacgggcagcaacaatgtcggcatcgggctcaccggcaacggacagatcgggttcggcagcttcaactcgggcagccacaacatcggcctgttcaactccggcagcggaaacgtcgggttgttcaactcgggcaccggcaatttcggcatcggaaacagcggcaccggaaacttcggcctcggcaacacgggcagcaccaacaccggctggttcaacaccggcgacgtcaacaccggcggcttcaacccgggcagctacaacaccgggaacttcaacaccggcaactacaacaccggcagcttcaacgcaggtaactacaacaccggctacttcaacaccggcgactacaacactggagtggccaacaccggcaacgtcaacaccggcgccttcatcgccggcaactacagcaacggcgtcttgtggcggggcgactaccaaggcctgatcggtgccgatatcgccctcgagattcccgccattccgataaacgcgcagctattcagcatgccgatacatcaggtgatggtcatgcccggaagcgtgatgacgattccgggcatgcgtttgcccttcacatccattgttcccttcgttgtttactacggcccggtcgagctcccgcaatccacgctcacccttcccacggtgacgatcaccgtgggcggaccaaccaccacgatcgacggcaacctcaccggcatggtggggggcgtcagcatcccgctcatcaagattccggcggccccgggcttcgggaactcgaccaccagcccgtcgtcgggcttcttcaacgctggcgccggcaccgcctcgggcttcggcaacttcggcggcggcgcttcgggcttttggaacctggcctcggcaacctcgggactttcgggcttcgggaacgtcggcgcgctgggatcgggtgtagctaacgttggcaacaccatctcgggtctctacaacacgagcacgtcgaatctggcgacgccagcctttaactccggcctgctgcaccacagcgtgggcaccatgacccttaacttcgggttggcaaacgtcggcggcaacaatgtcggcggtgcaaacgccggaatcttcaatgtgggcttggcaaacctgggcgactacaatattggcttcggcaatctaggcggcgacaacctgggcttcgcccacgcgggcagctacaacatcggctttgcgaacaccggcagcaataatcttggcttcgcgaacacgggtgacaacaatatcggttttgcgaatatcggcagcaacaatatcgggatcgggctcaccggcagcggccagatcgggttcggcagcctgaactcgggcagccacaatatcggcttgttcaactcgggtgacggaaacatcggattgttcaactcgggcagcggaaacttcgggataggaaacgcgggcaccggaaactggggcatcggaaactcgggcgccggaaacttcggcatcgggaacgcgggcagcaccaacacgggcttgttcaactccggagacctcaacacgggtagcttgaacccgggcagctataacaccggcagcgtcaacaccggcagcgtcaacaccggtggcttcaatgcaggtaactacaacaccggctacttcaacaccggcgactacaacaccggcatggcgaacaccggcaatatcaacaccggcgctttcatctccggcaaccacagcaacggccttctgtggcggggcgacaaccagggtctgatcgacctcgccatcggcgtcgacattcccgaaatcccgattgtgagcgtcgacgtgaatatcccgattcacataccgatcaccgccagcttcacggacatcgtatacagcgggctcgatcttccaccgaacacagccgtcactgttatttttttcggacccgtcgatatcgaccccttcaccgtcccagtgatacggataaccggtcccacacctgtggtcatggtgggtggacccactaccgcgatcaatatcggcgccactgtgggcgtcgacgccatcaacatcccgattatccatattccagcgactccaggcttcggcaactcgaccggcggactgtcgtcgggcttcttcaatagcggcgctggcagcgcctcgggcttcggcaacttcgggggcgccgcgtcgggctttatgaacctggtctccacaacgtcgggaatgtcgggcttcctcaacgtcggcgcgctgggatcgggtgtggcgaatgtgggcaacaccatctcgggtatctacaacgtgggcacgtcggacctctcgacgcccgccgttaactccgggttggcaaatatcggaaccaatattgccggcctgctgcgcgacggcgcgggtactgcggctattaacttgggcttggccaaccacggcaacctcaacgtgggcttcgcaagtctcggcggctttaacttcggcggcgccaccatcggccacaacaacgtcggcatcgggaacaccggaatcttcgatgtcggcctggcgaacctgggcagctacaacatcggcttcggaaaccttggcgacgacaacctgggcttcggcaacttcggcagctacaacatcggcttcggcaacgtcggcaacgacaatctgggtttcgctaacgcgggcggcggcaacatcggctttgcgaacaccggcagcaacaatgtcggctttgggaacacgggcagcaacaatgtcggcatcgggctcacgggcaacggacagatcgggttcggcagcttcaactcgggcagcggaaacatcggcttgttcaactcgggcagcaacaacatcggattcttcaattccggcagcggcaacttcggcatcgcaaactcgggcagcttcaacactggcatcggaaacaccggcaacaccaataccggcctattcaactccggcgacgtcaacacgggcgccttcaacccgggcagcttcaacaccggtagcttcaacaccggcagcttcaacaccggtggcttcaatccgggcaataccaacaccggctacctcaacattggcaactacaacaccggcatcgccaacaccggcgacgttgacaccggggctttcatcaccggaaactacagcaacgggttgttcttaagcggcgattaccagggcctggtcggcctcaacctggtgatcgatatgcctctccccataagcctcggcgtgaatattcccatcgatatcccgatcaccgcctcggccggcaacatcacccttatgggcgtcacgattccgcccaccggcgatatcgtcctttcgtcaatagcgggccagcgagcccactttggccccattaccattccgaacatcacggttgtcggccccacgacgacagtcgccataggagggccgaataccgcgatcaccataactggcggtggcgccattaggatcccgctcatcagtatcccggcggcgccaggtttcggaaactcgaccaccaacccgtcgtcaggtttcttcaataccggcgccggcggcgcctcgggcttcggcaacttcggcggcgccaattcgggcttttggaacctggcctccgcgacctcgggggcgtcggggctcctcaacgtcggcgccctgggatcaggtctggcgaacgtgggcaccaccgtctcggggttctacaacaccagcacgtcggacctcgcgacgccggccttcaattcaggcctggccaacatcagcaccagtatcgccggcctgctgcgcgacagcacgggcaccatggtcctcaacctgggcttggcaaaccacggcaccctcaacgtcggcattgcaaacctcggcgactacaacatcggctttgcaaacctcggcagcgccaacttcggcagcgccaatatcggtggcaacaacatcggcggcgcaaacaccggaatattcgacatcggtttggcaaatctgggcagttacaacatcggcttcggaaacttcggcgatgacaacctgggcttcggaaacctcggcagctacaacgtcggcttcggaaacttgggcaacgacaacctgggcttcgccaacaccggcagcaacaatatcgggttcgcgaacaccggcagcaacaatatcggcattgggctcacgggcgacggccagatcgggttcggctccctgaattctggcagcggaaacatcggcttgttcaactcgggcagcggaaacatcggctttttcaactcgggcaacggaaacgttggcatcggcaacaccggcaccgcaaacttcgggcttggaaacaccggcagcaccaacaccggcttcttcaactccggcgacgtcaataccggtatcggcaacaccggcagcttcaacaccggcagcttcaatccgggcgattccaacaccggggatttcaacccaggcagctacaacacgggactcggaaacaccggcgatgttgacaccggcgccttcatctccggcagc

SEQ ID NO: 26365 - DNA, 678 bp, Mycobacterium bovis
atggctggacagtccgatcgtaaggcggcgttgttggaccaggtagcgcgcgtgggcaaggcgctggccaatgggcggcgattgcaaatcctggacttgctcgcccaaggtgagcgcgcggtagaagcgatcgcgacggcgaccgggatgaacctgaccacggcatcggcgaatctgcaggcgctgaagagcggcgggctggtcgaggctcgccgcgaggggacccggcagtactaccggattgctggggaagacgtggcaaggctgttcgcgctggtgcaagtggttgccgacgagcatctggccgacgtggcggtcgcggccgcagacgtgctcggttcgccggaggatgcgatcacccgtgcggagctgctgcggcggcgcgaagccggcgaggtcaccctggtcgacgtgcgaccgcacgaggaataccaggccggccatatcccgggcgccatcaatatcccgatagccgaactggccgaccggctcgccgaactagctggcgaccgcgacattgtcgcctactgtcgtggtgcctactgcgtcatggcccccgatgccgtccgcatcgcgcgcgacgcggggcgggaggtgaaacgcctcgacgacggaatgctcgaatggcgattggccggactgccggtcgacgagggtgcaccggtcgggcatggggat

SEQ ID NO: 26366 - DNA, 1275 bp, Mycobacterium bovis
atggcgcaactgggacacgaggtcgtcggggtcgatatcgatcccggtaaggtcgccaagctcgccgggggtgacattccgttctacgaacccggcctgcgaaagctgttgactgataacctggctgccggccgcttgcggttcaccaccgactacgacatggcggccgatttcgccgacgtgcatttcctgggggtcggcacgccgcaaaagataggcgaatatggcgccgacctgcggcatgtccacgccgtcatcgatgcgctggtgccgcgtctggtcagggcgtcgattctggtcggcaagtcgacagtcccagtgggcaccgcagccgaactgggacatcgggccggtgcactggcaccccggggagtcgacgtggaaattgcctggaatccggaattcctgcgcgagggcttcgcggtgcacgacaccctcaaccccgaccgtatcgtccttggggtacaagatgattcgacgcgcgccgaggtagccgtccgcgagctgtacgcgccgctgctggcagcgggcgtgccgtttctggtgaccgatctgcagaccgcggagttggtcaaggtatccgccaatgcctttctggcgaccaagatttcgtttatcaatgcgatctccgaagtgtgcgaggcggcgggtgccgacgttagccagctggccgatgcgctcggatacgacccgcggatcggacgccaatgcctcaacgcgggcttgggtttcggcggcggctgcttgcccaaggacatccgcgctttcatggcccgcgccggcgaactgggagccgaccaggcgttgacgttcctgcgtgaagtggacagcatcaacatgcgccggcgcaccaagatggtggaactggccaccaccgcatgcggtggctcgttgctgggcgccaatattgcggtgctcggcgcggcgttcaaacccgaatccgatgacgtgcgcgattcgcccgccctcaatgtggcgggccagctgcagctcaacggcgccacggtccacgtgtacgatccaaaggccttggacaacgcccaccgactgttccctaccttgaactatgcggtttcggttgcggaggcctgcgagcgcgcggacgccgtgttggtgcttaccgaatggcgggagttcatcgatctcgaacccgctgatctagccaaccgggtgcgggcccgggtgatcgtggacggccgcaactgcctcgacgtgacccgctggcggcgggcaggctggcgggtgttccggctgggagtgccgcgattagggcac

SEQ ID NO: 26367 - DNA, 765 bp, Mycobacterium bovis
atggcggtgacggtcggcgtcatttgtgcgatcccgcaagagctggcgtatctgcgcggtgtcctggtcgatgcgaaacgccagcaggtcgcgcagatcctcttcgatagcggccaactcgacgcgcaccgggtcgtgttggccgccgccggcatgggcaaagttaacacgggcctgaccgcaacgctgcttgccgatcgattcggctgccgcaccatcgttttcacgggagtggccggcgggctggatcccgagctatgcatcggtgacatcgtcatcgccgatcgggtcgtccaacacgacttcggtctgctcaccgatgagcggctgcgcccctatcagcccggacacatccccttcatcgaaccgaccgagcggctcggatacccggttgatcccgcggtcatcgatcgggtcaaacaccgcctcgacgggttcacgctggcgccgctgtccaccgccgcgggaggtggtggccggcagccacgcatctactacggcaccatcctgaccggtgaccaataccttcactgcgagcgcacccgcaaccggctgcaccacgaactcggcggtatggccgtcgaaatggaaggcggtgcggtggcgcaaatctgcgcgtccttcgatatcccatggctggtcattcgcgcgctctccgatctcgccggagccgattcgggggtggacttcaatcggtttgtcggcgaggtggcggccagttcggcccgcgttctgctgcgcttgctgccggtgttgacggcctgt

SEQ ID NO: 26368 - DNA, 1371 bp, Mycobacterium bovis
atgacccctagatcgcgtgggccgcgccgccggccgctggacccggcgcgtcgtgcggccttcgagacgctgcgggcggttagtgcgcgcgacgcctacgcgaacctggtgttgcccgcgctgctggcccaacgcggtatcggcggtcgcgacgccgcgttcgccaccgagctgacatacggcacctgccgagcccgcggcctgctcgacgcggtcatcggtgcggccgccgagcgttcgccgcaggcgatcgatccggtgctgctagacctgttgcggctcggcacctaccaattgctgcgcacgcgggtcgacgcacacgccgcagtgtcgaccaccgtcgagcaggccggaatcgaattcgattcggcgcgagcaggtttcgtcaacggtgtactacgaacgatcgccggccgagacgagcggtcctgggttggcgaactcgctcctgatgcgcagaacgatccgatcgggcatgccgcgttcgtgcatgcgcatccccgatggatcgcccaggcctttgctgacgcgttgggcgcggcggtcggggagctcgaggcagttttggccagcgacgacgaacggccagcggtgcacctggcggcacgccccggggtgctgaccgccggcgaactggcccgcgcggtgcgcggaaccgtcggtcggtattcgccgtttgcggtgtatctgccgcgcggtgacccggggcgactggcgccggtgcgcgacggccaagcgctggtccaggacgagggcagccagttagtcgcccgagcattgaccctggcgccagtcgacggcgataccggacggtggctggacctgtgtgccggaccgggcggcaagaccgcgctgttggccgggctgggtttgcagtgcgcagcccgggtgaccgcggtggaaccctcgccacaccgcgcggacctggtagcacagaacacccgcgggctgccggttgagctcttgcgtgtcgacgggcggcacaccgacctcgacccgggtttcgaccgggtgctggtggatgcgccctgcaccgggctgggcgcgttacgccgtcggccggaggcccgttggcgtcgtcagccggcggacgtagcggcactggccaagctacaacgcgagttgttgagcgccgccatcgcgctgactcggcccggcggtgtcgtgctctatgccacatgctcgccgcacctggccgagactgtgggtgctgtcgccgacgcgctacgccgacatccggttcacgcgctcgatacccgcccactgttcgagccggtgctcgcggggctgggggaggggccccacgttcagctgtggccgcaccggcacggtaccgacgccatgttcgccgcggcgttgcgccgcctgacg

SEQ ID NO: 26369 - DNA, 480 bp, Mycobacterium bovis
gtgaagggtggcgccggggtgccggatctgccgtcgctggatgcgtctggtgtgcggctggcgattgtcgccagcagctggcacggaaagatctgcgacgcgctgttggacggcgcccgcaaggtggccgccgggtgtggcctcgatgacccgactgtggttcgggtgctcggcgcgatcgagattccggtggtggcgcaggaattggcccgcaatcatgatgccgtcgtcgcacttggcgtcgtgatccgcggtcagacaccacatttcgactacgtgtgcgatgcggtaacccagggactgacccgggtatcgctggattcctcgacgccgatcgccaacggcgtgctgaccaccaacaccgaggagcaggcgctggatcgggcggggctaccgacgtcggccgaggacaagggcgcccaggcgactgtggcagccctggccaccgcgttgaccctgcgcgagctgcgcgctcactcg

SEQ ID NO: 26370 - DNA, 1275 bp, Mycobacterium bovis
atgacgaggttggactccgtcgagcgggcggttgccgacattgcggcgggtaaggccgtcatcgtcatcgacgacgaagaccgggagaacgagggtgacctgatcttcgccgccgagaaggcaacgccggagatggtggccttcatggtccgctacacctccggatacctgtgcgttccgctggacggtgccatctgcgaccggctgggcctgttgcccatgtacgcggtgaaccaggacaagcacgggacggcatacaccgtcacagtcgatgcacggaatggcattggaactggcatttcggcgtccgatcgggctaccaccatgcggttgctggccgatccgaccagtgtggccgacgatttcacccgccccggtcacgtggtccccttgcgggccaaggatggtggggttctgcgccggcccggccacaccgaggccgccgtggacctggcccggatggccgggctgcaacccgcgggggcgatttgcgagatcgtcagccaaaaagatgagggctcgatggcgcacaccgatgaattgcgggtgttcgccgatgagcacggtctggcgctgatcaccattgctgacttgatcgaatggcggcgcaagcacgagaagcacattgagcgggtcgccgaggcgcggattccgactcgtcatggggagtttcgcgccatcggctacaccagcatctacgaggacgtggaacatgtcgcgctggtccgcggcgagatcgccgggcccaacgccgacggtgacgacgtgctggtccgggtgcattcggagtgcttgaccggcgatgtgtttgggtcacgccgctgcgattgcgggcctcagctggacgccgcgctggcgatggtcgcccgtgaggggcgcggcgtggtgctgtacatgcgtggccacgagggccgcggcatcggcctgatgcacaaactgcaggcctaccaactgcaggacgccggtgccgacaccgttgacgccaatctcaagcttggactacctgccgacgcaagggattacgggatcggcgcacagatcctggtcgatcttggggtacgttcgatgaggctgctgaccaacaacccggccaagcgggtgggactggatggatacggattgcacatcatcgagcgcgtgccgctgccggtgcgggccaacgcggagaacatccgttacctgatgaccaagcgtgacaaattggggcacgacttggctgggttggacgattttcacgaatccgtgcatctgcccggagaattcggcggtgccttg

SEQ ID NO: 26371 - DNA, 975 bp, Mycobacterium bovis
atgacgaccgatgtcaaagacgagctgagccgactggtggtgaagtccgtcagcgcgcggcgcgcggaggtcacctctctgctgcgattcgccggcgggttgcacatcgtgggcggccgcgtggtggtcgaagccgagctggacctgggcagtatcgcacggcggctgcgtaaggagatcttcgagctctacggctacacggcggtggtgcatgtgttgtcggccagcgggattcgcaagagcacccgctacgtgctgcgggtcgccaacgacggcgaggcgttggcacgccaaaccggactgcttgacatgcgcggtcgtcccgtgcggggtctgccggcccaggtcgtcggcggcagcatcgatgacgctgaagctgcgtggcgaggagcatttttggcgcacgggtcgctgactgagccgggacgctcctcggcgttggaggtcagttgcccgggcccggaggccgcgctggcgctggtgggtgcggcacgccggcttggggtcggcgccaaggctcgtgaggtgcgcggtgccgatcgcgtggtggtgcgcgacggtgaggcgatcggcgcactgctgacccggatgggggcccaagacacccggctggtctgggaggagcggcggctgcgtcgtgaggtgcgtgcgacggccaaccggctcgccaatttcgacgacgccaatctgcgccgctcggcgcgggccgcggttgccgcggccgcccgggtggagcgtgccttggagatcctcggcgatacggtgcccgagcacttggcctcggccggcaaattgcgtgtcgagcaccggcaggcgtcgctggaggagctgggccggcttgccgatcctccgatgacgaaagacgctgtagccggacgtattcggcgattgttgtcgatggcggatcgtaaggcgaaggtggacggcatccccgatacggagtccgtagtgacgcccgatctgctggaagacgcc

SEQ ID NO: 26372 - DNA, 1026 bp, Mycobacterium bovis
atgaccgatggcatcgtcgcgctgggcggcggacacggcttgtatgcgacgctgtctgcggcccgccggttgacaccctacgttaccgccgtggtgaccgtcgccgatgacggtggctcgtcgggccggctgcgcagcgagctcgatgtggtgccgccgggcgatctgcgaatggccttggcggcgttggcatccgatagcccgcacggacgcctgtgggcaactattctgcagcacagattcggcggcagtggtgtgctggccggacatccgatcggcaatctgatgctagcgggcctgtccgaggtgctggccgatccggtcgcggctcttgacgaactcgggcgcatcctcggggtgaaaggcagggtgctgccgatgtgcccggtcgcgcttcagatcgaggccgatgtctccggtctggaggccgacccgcgcatgttccgcctgatccgtggccaggtggcgatcgcgaccacgcccggaaaggtgcgccgggtgcggctgctgccgactgacccgccggcgacccggcaggctgtcgacgccatcatggctgccgatctggtggtcctggggcccgggtcgtggttcaccagcgtgataccccatgtgctggtgccgggtctggccgcagcgctgcgagcaacgtcggcccgccgtgccctggtgctcaacctggtggctgaaccgggagagacggccggtttctcggtggagcgtcatctgcacgtgctagcccaacacgcgcccgggttcaccgttcacgacatcatcatcgacgccgaacgagtgccgagcgaacgggagcgggagcaactgcgccgcacggcgacgatgctgcaggccgaggtccacttcgccgatgtcgccagacctggtacacctttacatgacccgggcaagctggcggcggtcctcgacggggtgtgtgcgcgcgacgtcggcgcgtcggagcctccggtggcggccacacaggagataccgatcgacggtggacgaccgaggggtgacgacgcgtggcga

SEQ ID NO: 26373 - DNA, 603 bp, Mycobacterium bovis
atgttcaccggaattgttgaggaacgcggagaagtgaccgggcgtgaggccctggtcgatgcggcgcggctgaccatccgcggtccgatggttaccgccgacgccggccacggcgactcgatcgctgtcaacggcgtgtgtctgacggtcgtcgatgtattgcccgacggccaattcaccgccgacgtgatggccgagacactgaaccggtccaacctgggtgagctacggcccggcagccgggtgaacctggaacgcgccgcggcgctgggcagccggctcggcgggcacatcgtgcagggacatgtggacgccaccggtgaaatcgtggctcgttgtccctccgagcactgggaagtggtgcgcatcgagatgccggcttcggtggctcgctatgtcgtcgaaaagggctcgatcaccgtcgacgggatttctctgacggtctccgggctcggcgccgaacagcgggactggtttgaggtctcgctgatcccgacgacccgggagctgaccacgctggggtccgctgcggtgggaacccgggtgaacctcgaagtcgacgtagtcgcaaagtatgttgagcggttaatgcggagcgccggc

SEQ ID NO: 26374 - DNA, 903 bp, Mycobacterium bovis
atgatgaaccatgctaggggcgtcgagaatcgttcggaaggcggcggtatcgacgtcgtcttggtaaccgggctgtccggggccgggcgcggcacggcggctaaagtgctggaagacctgggctggtatgtggccgacaatctgccgccccagctgattacccgcatggtggacttcgggctggccgccggatcacggatcacccagctggcggtggtaatggatgtgcgatcgcgcggattcaccggcgacctcgattcggtccgcaacgagctggccacgcgtgccatcaccccgcgtgtggtgttcatggaggcgtccgatgacacgttggtgcgccgctacgaacagaatcgccgcagtcatccgctgcagggtgagcagactctggccgagggcattgccgcagagcgcaggatgctagcaccggttcgcgccaccgccgacctgatcatcgacacgtcgacactgtcggtggggggcttaagggatagcatcgagcgtgccttcggcggtgatggcggcgcgaccaccagcgtcaccgttgaatccttcgggttcaagtacggcctgccgatggacgccgacatggtcatggacgtgcggttcctgccgaacccgcactgggtggacgagttgcggccactgaccggccaacatccggccgtgcgcgactatgtgctgcaccggccgggcgcggctgagttcctcgagtcctaccatcggttgctatccctggttgtcgacggctaccgtcgagaggggaagcgctatatgacaatcgccatcggctgtaccggtggtaagcatcgcagcgtcgcgatcgctgaagcactgatgggacttctgcgctccgatcagcaactgtcggtgcgggcgctgcaccgggatctgggtcgcgaa

SEQ ID NO: 26375 - DNA, 1017 bp, Mycobacterium bovis
atgaacgtggagcaggtcaagagcatcgacgaggctatgggtctcgccatcgagcactcctaccaggtcaaaggcacgacttatccaaaccccccagtgggggccgtcattgtggatcccaacggtcggatcgtcggcgccggcggcaccgagccggccggtggcgatcatgccgaggtggtggcgctgcgccgggccggcggattggctaccggcgccatcgtggtggtcaccatggaaccctgtaaccactacggcaagactccgccatgcgtgaacgctctgatcgaagccagggtggggacggtggtctacgccgtcgccgacccgaacgggatcgctgggggtggcgcgggccggctgtcagcagcgggcctacaggtgcggtccggggtgttggctgaacaggtggcggccggaccgctgcgggagtggctccacaagcaacgcaccggtctgccgcatgtcacctggaagtacgccaccagcatcgacggccgcagcgccgccgccgacggctccagccagtggatctccagcgaggccgcacgcctggatctgcatcgccgccgcgccatcgccgacgcgatcttggtcggcaccggcaccgtcctcgccgacgacccggccctgaccgcgcggctggccgacggctcgctggcgccgcagcagccgctgcgcgtggtggtgggcaagcgcgacataccgccggaagcacgggtcctcaacgacgaggcacgcaccatgatgatccgcacccacgaacctatggaggtgctcagggcgttgtcggatcgcaccgacgtgctgctggaaggaggtcccaccctcgccggcgccttcctacgagcgggtgcgatcaaccggatcctggcctacgtcgcaccgatcctgttgggcggtccggttaccgcggtcgatgacgtcggggtgtccaacatcaccaacgcgttgcgttggcagttcgacagcgtcgaaaaggtcggaccggatctgttgctgagcttggtggctcgt

SEQ ID NO: 26376 - DNA, 1970 bp, Mycobacterium bovis
gtttcggggcgtggagtgctggtgcgctccgatctcaacgttccgctcgacgaggacggcaccattaccgatgcgggccgcatcatcgcgtcggcgccgacgttgaaggcgttgctcgacgccgacgccaaggtggtggttgccgcgcacttgggacgtcccaaggacgggccggacccgacactgtcgctggcgccggtcgccgtggcgctgggtgagcaactcggccggcacgtccagctggctggagacgttgtcggcgccgatgcgctggcccgcgccgaggggctcaccggcggcgacatcctgctgctggagaacatccgcttcgacaaacgcgaaaccagcaagaacgatgacgaccggcgggcactggccaagcagctggtcgaactggtcggaacgggaggcgttttcgtctccgacggctttggggtggtgcaccgcaagcaagcctcggtctatgacatcgcaaccctgttgccgcactacgccggcacgctggtcgccgacgagatgcgggtactggagcagttgaccagctcgacccagcggccctatgcggtagtgctcggcggatcaaaggtgtccgacaagctgggtgtcatcgagtcgctggcgaccaaggcggacagcattgtgattggcggcggaatgtgcttcacattccttgctgcacagggattttcggttggcacatcgctgctggaagacgacatgatcgaagtctgtcgcgggctgctggaaacctatcacgacgtgttgcggctgcccgtggatctagtggtcacggagaagttcgccgccgactcgccgccccagacggtcgacgtcggcgctgtgcccaatggcttgatgggcctggatatcgggccgggatcgatcaaacggttcagcacgctgctgtccaacgccgggaccatcttctggaacgggccgatgggagtattcgagttcccggcttatgcggccggcaccagaggcgtcgccgaggcgatcgtcgccgccaccggcaaaggggcgtttagtgtggtcggcggcggtgactccgcggccgcagtgcgcgcgatgaacatccccgagggcgccttctcacacatatccaccggcggcggtgcctcgctggaataccttgagggcaagacgcttcccggcatcgaggtactgagccgtgagcagccaaccggaggagttttgtgagccgcaagccgctgatagccggcaactggaagatgaacctcaaccactacgaggcgatcgcgctggtgcaaaagatcgcgttctcgttgccggacaagtattacgaccgggttgacgtcgcggtgatcccgccgtttaccgacctgcgcagcgtgcaaaccctggtcgacggcgacaagctgcggttgacctatggtgcacaagacttgtcaccacatgactccggtgcctatacgggtgacgtcagcggcgcctttctggccaagttggggtgcagttacgttgtcgtcgggcactccgagcggcgcacctatcacaacgaggatgacgcgctggtggccgccaaagccgccaccgcactcaagcatggcttgaccccaatcgtgtgtattggcgagcacctcgacgtccgcgaggcgggaaatcatgtggcccacaacatcgaacagttgcgtggatcgctggccgggctattggccgagcagatcggcagcgtcgtcatcgcctacgaaccggtctgggcgatcggcaccgggcgggtggccagcgccgccgacgcccaggaggtgtgtgcggcgatccgaaaagagttggcctcgttggcctcgccgaggattgccgatacggtgcgggtgctctacggcggctcggtgaacgccaaaaacgtcggcgacatcgtggcccaggatgacgtcgatggtggcctggtcggcggggcgtcgctggacggggagcatttcgcgacgctggccgcgattgcggccggtggt

SEQ ID NO: 26377 - DNA, 1017 bp, Mycobacterium bovis
gtgacggtccgagtaggcatcaacgggtttggtcgaatcggacgcaacttctaccgggccttactggcccaacaggagcagggcaccgccgacgtggaggtggtcgccgccaacgacatcaccgacaacagcacgctggcgcatctgctcaaattcgactcgattctgggccggctgccttgcgatgtcggcctcgaaggcgacgacaccatcgtcgtcggccgcgcgaaaatcaaggcgctcgcggtccgggaggggccggcggcattgccatggggagacctcggcgtcgacgtcgtcgtcgaatccaccggcctgttcaccaatgcggccaaagccaaaggccacctggacgccggcgccaagaaggtgatcatctctgcgcccgccaccgacgaggacatcaccatcgtcctgggagttaacgacgacaagtatgacggcagccagaacatcatctccaatgcgtcgtgcaccacgaactgccttgcgccgctggccaaagtgctcgacgatgagttcggcatcgtcaagggcctgatgaccaccatccacgcctacactcaggatcagaacctgcaggacgggccgcacaaggacctgcgtcgcgcccgcgccgccgcgctgaacatcgtgccgacctccaccggcgcggccaaggccatcggcctggtgatgccgcagctaaagggcaagctcgacggttatgcgctgcgggtgccgatccccaccggctcggtcaccgaccttacggtcgacttatccacacgggccagtgtcgatgagatcaacgcggcgttcaaagccgcggccgaaggcaggctcaagggcattctgaagtactacgacgcgccgatcgtctcgagcgacatcgtcaccgacccgcacagttcgattttcgactctgggttgaccaaagtcatcgacgaccaggccaaggtggtgtcgtggtacgacaacgagtggggctactccaaccgcctggttgatctggtcacgctggtcggcaagtcgctc

SEQ ID NO: 26378 - DNA, 1296 bp, Mycobacterium bovis
atgccggcgatcgtcctcatcggcgcccaatggggcgacgagggcaagggtaaggccaccgacctgttgggtggccgcgtgcagtgggtggtgcgctatcaggggggcaacaacgccgggcacaccgtcgtcttgcctaccggcgagaatttcgcattgcatctcatcccgtcgggtgtgctgacgcccggggtcaccaacgttatcggcaacggcgtggtgatcgatcccggtgtcctgctcaatgagctgcggggactgcaagaccgcggcgtggacaccgccaagctgttgatctccgccgacgcccatctgctgatgccttaccacattgctatcgacaaggtcaccgagcgctatatgggcagcaagaagatcggcaccaccggccgtggtatcgggccgtgctaccaggacaagatcgcccgtattgggatccgggtcgccgatgtgctggacccggaacaattgacccacaaggtcgaggccgcgtgcgagttcaagaaccaagtgctggtcaagatctacaaccgcaaggccctggaccccgcgcaggtggtcgacgcgctgctggagcaggccgagggtttcaagcatcgcatcgccgacacccggctgctactcaatgctgccctggaggccggcgaaacggtgctgctggaaggctctcaaggcaccctgctcgatgtcgaccacggcacctacccgtatgtgacatcgtcgaatccgacggcgggtggcgcggccgtgggctctggtatcggcccgacccgcatcggcaccgtgctggggattctcaaggcctacaccactcgggtgggctccggcccgttccccaccgagctgttcgacgaacacggcgaatacctgtccaagactggccgcgagttcggtgtgaccaccggccggcgccggcgctgcggctggttcgacgccgtcattgcccgctacgccgcccgggtcaacggcatcaccgactacttcctgaccaagctcgacgtgctgtccagcctggaatcggtgccggtctgcgtcggatatgagatcgacggccggcgcacccgcgatatgccgatgacccagcgggatctttgccgcgccaagccggtttacgaggagctgccgggctggtgggaagacatctccggggcgcgcgagttcgacgacctgcccgccaaagcgcgtgattatgtgctgcgactggaacagcttgccggagcaccggtttcgtgcattggagtcggtccggggcgggaacagaccatcgtgcgccgggacgtcctgcaggatcgcccg

SEQ ID NO: 26379 - DNA, 1875 bp, Mycobacterium bovis
atggctcgtgcggtcgggatcgacctcgggaccaccaactccgtcgtctcggttctggaaggtggcgacccggtcgtcgtcgccaactccgagggctccaggaccaccccgtcaattgtcgcgttcgcccgcaacggtgaggtgctggtcggccagcccgccaagaaccaggcggtgaccaacgtcgatcgcaccgtgcgctcggtcaagcgacacatgggcagcgactggtccatagagattgacggcaagaaatacaccgcgccggagatcagcgcccgcattctgatgaagctgaagcgcgacgccgaggcctacctcggtgaggacattaccgacgcggttatcacgacgcccgcctacttcaatgacgcccagcgtcaggccaccaaggacgccggccagatcgccggcctcaacgtgctgcggatcgtcaacgagccgaccgcggccgcgctggcctacggcctcgacaagggcgagaaggagcagcgaatcctggtcttcgacttgggtggtggcactttcgacgtttccctgctggagatcggcgagggtgtggttgaggtccgtgccacttcgggtgacaaccacctcggcggcgacgactgggaccagcgggtcgtcgattggctggtggacaagttcaagggcaccagcggcatcgatctgaccaaggacaagatggcgatgcagcggctgcgggaagccgccgagaaggcaaagatcgagctgagttcgagtcagtccacctcgatcaacctgccctacatcaccgtcgacgccgacaagaacccgttgttcttagacgagcagctgacccgcgcggagttccaacggatcactcaggacctgctggaccgcactcgcaagccgttccagtcggtgatcgctgacaccggcatttcggtgtcggagatcgatcacgttgtgctcgtgggtggttcgacccggatgcccgcggtgaccgatctggtcaaggaactcaccggcggcaaggaacccaacaagggcgtcaaccccgatgaggttgtcgcggtgggagccgctctgcaggccggcgtcctcaagggcgaggtgaaagacgttctgctgcttgatgttaccccgctgagcctgggtatcgagaccaagggcggggtgatgaccaggctcatcgagcgcaacaccacgatccccaccaagcggtcggagactttcaccaccgccgacgacaaccaaccgtcggtgcagatccaggtctatcagggggagcgtgagatcgccgcgcacaacaagttgctcgggtccttcgagctgaccggcatcccgccggcgccgcgggggattccgcagatcgaggtcactttcgacatcgacgccaacggcattgtgcacgtcaccgccaaggacaagggcaccggcaaggagaacacgatccgaatccaggaaggctcgggcctgtccaaggaagacattgaccgcatgatcaaggacgccgaagcgcacgccgaggaggatcgcaagcgtcgcgaggaggccgatgttcgtaatcaagccgagacattggtctaccagacggagaagttcgtcaaagaacagcgtgaggccgagggtggttcgaaggtacctgaagacacgctgaacaaggttgatgccgcggtggcggaagcgaaggcggcacttggcggatcggatatttcggccatcaagtcggcgatggagaagctgggccaggagtcgcaggctctggggcaagcgatctacgaagcagctcaggctgcgtcacaggccactggcgctgcccaccccggcggcgagccgggcggtgcccaccccggctcggctgatgacgttgtggacgcggaggtggtcgacgacggccgggaggccaag

SEQ ID NO: 26380 - DNA, 1380 bp, Mycobacterium bovis
gtgagcatccgccccgccgagaactcaacactcgacatccgccacgtcatcggtatcggcaccccgaaagccgtcgatttgtggctcgacgtcgtcaccgagctgccggatcgcgcccgcgaactcgggtcgttatccaaagccgaactcggaaagcttggcccactgctcgacggcaccaacgccgtcgagctattcgagtcgatcgacgacaagctggccgcagaggcactgcacgcgatggatccgtcgctggccgccaccttcctcgaggccctcgactccgaccacgccgccaacatcctgcgcgaattcaaggagcccaagcgggaggcgctgctgacgttgctaccgctggagcgggcgatggtgctgcgtggcttgttgagctggccggaggactgcgccgcggcccacatggtgcccgaaacgctgaccgtacgcccgaacatgacggtgtcgcaggccgtcgccagcgtgcgggaacgcgcctcgggcctgcgcagcgatgcacgaaccaccgcctacgtctatgtgacagacgccgactcccacctgctgggtgtgatcgcctttcgcgccctggtgctggccaatcccgaacagcgagtccgtgagctgatgggtgacgacctcatcgtcgtgtcgccgttgactgacaaggagctcgcggcgcagacaatcatgggccacaacctgatggcggttcccgtcgtcgatgccgacaaccggctactgggcatcatcgccgaagacgaagccatcgacattgccgaggaggaagcaaccgaagacgccgagcgccagggtgggtcggccccgctcgaggtgccctacctgcgggcgtcgccgtggctgctatggcgcaagcgggccgtctggctcctggtactttttgctgccgaggcctacaccggcagcgtcctgcgggcgttctccgacgaaatggaggcggtgatagcgctcgcgttcttcatcccactgctgatcggcaccggcggcaacaccggcacccagatcgccaccactctggtccgcgcgatggccaccggtcaggtccggtttcgcgatgtgcctgcggtgttagccaaggagctgtcaaccggtgtgctggtcggcctcactatggccgccgccgcggtggtgcgcgcctggacattgggcgtgggcccgcaggtgaccctgacggtcgcgctgacggtggccgccatcgtggtgtggtcgtcgctggtggctgccgtccttccgccgctgctgaagaagttgcgcatcgacccggccatcgtttcggggccgatgatcgccaccatcgttgacggcacgggtctgctcatctacttcctggtcgcgcacctgacgctgaccgagctgcacggcttg

SEQ ID NO: 26381 - DNA, 1032 bp, Mycobacterium bovis
atgcctatcgcaacgcccgaggtctacgcggagatgctcggtcaggccaaacaaaactcgtacgctttcccggctatcaactgcacctcctcggaaaccgtcaacgccgcgatcaaaggtttcgccgacgccggcagtgacggaatcatccagttctcgaccggtggcgcagaattcggctccggcctcggggtcaaagacatggtgaccggtgcggtcgccttggcggagttcacccacgttatcgcggccaagtacccggtcaacgtggcgctgcacaccgaccactgccccaaggacaagttggacagctatgtccggcccttgctggcgatctcggcgcaacgcgtgagcaaaggtggcaatcctttgttccagtcgcacatgtgggacggctcggcagtgccaatcgatgagaacctggccatcgcccaggagctgctcaaggcggcggcggccgccaagatcattctggagatcgagatcggcgtcgtcggcggcgaagaggacggcgtggcgaacgagatcaacgagaagctgtacaccagcccggaggacttcgagaaaaccatcgaggcgctgggcgccggtgagcacggcaaatacctgctggccgcgacgttcggcaacgtgcatggcgtctacaagcccggcaacgtcaagcttcgccccgacatccttgcgcaagggcaacaggtggcggcggccaagctcggactgccggccgacgccaagccgttcgacttcgtgttccacggcggctcgggttcgcttaagtcggagatcgaggaggcgctgcgctacggcgtggtgaagatgaacgtcgacaccgacacccagtacgcgttcacccgcccgatcgccggtcacatgttcaccaactacgacggagtgctcaaggtcgatggcgaggtgggtgtcaagaaggtctacgacccgcgcagctacctcaagaaggccgaagcttcgatgagccagcgggtcgttcaggcgtgcaatgacctgcactgcgccggaaagtccctaacccac

SEQ ID NO: 26382 - DNA, 2385 bp, Mycobacterium bovis
atgagcatgaccgcggttgtgggggtgttcgctctgcggcgagtctggtggctttacaagctggtcatgtccgggcagccggccagcgggcgaaccgacaacctcggcacccgcatctggacccagatctccgaggttctagggcagcgccgactgttgaaatggtcgatcccgggcctggcgcactttttcaccatgtggggcttcttcatcctgctcaccgtctatatcgaggcttacggcctgctgttcgaggagagattccacatcccggtcatcggccggtgggacgcgttgggcttcctgcaggacttctttgccaccgccgtctttctcggtatcacgaccttcgccatcatccgtatcctgcgcaacccccgcgagatcggtcggagctcccggttctacggatcgcacaacggcggcgcgtggctcgtcctgttgatgatcttcaacgtcatctggacctacgtgttggtccgcggctcagcggtcaacaacggcaccctgccctacggcaacggggccttcctatcgcagctattcggcgcgattcttcgccccctcgggcagcccgccaacgaaatcatcgaaaccacagcgctgttgctgcacatcggggtcatgcttgcgttcctgatcctcgttttgcattccaagcacctgcacatcttcctggcgcccattaacgtcacgttcaaacggctgccggatgggctgggcccgctgttgccgctcgaagccgatggcaaaccaatcgacttcgagaatcccagcgaggatgccgtattcggccgcggcaagatcgaagacttcacctggaaggggatgctcgacttcgctacctgcaccgagtgcggacgctgtcagtcgcaatgcccggcctggaacaccggcaaaccgttgtcgcccaagctggtcatcatggacctgcgcgaccattggatggccaaggcgccctacatcctgggccaaaaggatgccagcgcgggcggcgaggccggtcaccaagagcatcatcacgtgccggaatcggggttcggtcgagtgcccgggcatggaccggagcaggcgactcgcccgctggtcggcaccgaggaacagggtggcgttatcgatcccgacgtcttgtggtcatgtgtgacctgtggtgcctgcgtcgagcagtgcccggtggatatcgaacatgtcgatcacatcgtcgatatgcgccgctaccaggtgatgatggagtcggagttcccctccgagctgtcggtgctgttcaagaacctggagaccaagggcaacccgtggggtcagaacgcctcagatcgcaccaactggatcgacgaggttgacttcgacgtccccgtgtacggccaggacgtcgacagcttcgacggctacgagtacctgttctgggtgggttgtgcgggcgcctacgacgacaaggccaagaagaccaccaaggccgtcgccgagctgctcgccgtcgccggggtgaaatacttggtgctgggcgctggggaaacctgcaacggcgactcggcgcgccgctccggcaacgagttcctcttccagcagctggcacaacaggccgtcgagaccctggacggtttgttcgagggtgtggagaccgtcgaccgcaagatcgttgtcacctgcccgcactgcttcaacaccatcggcaaggaatatcggcagctgggcgccaactacaccgtgctgcaccacacccagctgctcaatcggttggtgcgcgacaagaggctggtccctgtcactccggtttctcaggacatcacctaccacgacccgtgctacctgggtcggcacaacaaggtctacgaggcaccacgggagctgatcggtgccgcgggggccagcctgaccgagatgccgcgccatgccgaccgcagcttttgttgcggcgcatgcggcgcccgcatgtggatggaagaacacatcggcaagcggatcaaccatgaacgcgtcgatgaggcgctggccaccgatgccaccgcaatcgccaccgcgtgcccattctgccgggtgatggtcaccgacggtgtgaacgatcggcaggaagaagccggccgcagcggcgtcgaggtgctcgacgtggcccaggtgctactcggatcactagaccacgacaaggcgcagctgccggccaagggtacggccgccaaacaggctcaggagcgcgccccgaaagccgctcctaaggctgccgcaccggtgacgcccgtggaggcacccgccgaggcaccacaggcgccagcgccggccgctcccgcagcacccgtgaaaggcctcggcatggccgccggcgccaagcggcctggcgccaagaaagcgggccccaacgcccgcagcccctgctgcgcccgccgcgcccgt

SEQ ID NO: 26383 - DNA, 1167 bp, Mycobacterium bovis
atgactgaagccttgatcccggcaccgtcgcagatatcgctgacccgcgatgaggtgcgcaggtacagcaggcacctcatcatcccggatatcggcgtcaacggccaacagcggctgaaggatgcgcgcgtattgtgtatcggcgccggaggattgggttcgcctgctctcctgtatcttgcggccgccggagtcggtaccatcggcatcatcgatggagaccacgtggatgagtcgaatctgcaacgccaaatcattcatggcacatccgacgtgggtaggccgaaagtagaatcagcagccgaggcggtggcggaaatcaacccgcacgtccgggtgacgcaatatcgcgaaatgctcacccacgacaacgcactggaaatttttggcgatcacgacctcattgttgacggcacagacaacttcacgacgcgctacctgatcaatgatgccgcggtcttggccggcaaaccatatgtttgggggtcgatctaccgattcaacggccagaccagtgtgttttggcccggccgggggccgtgttatcgatgccttcatccagctccgcccccgcccggattggtgccgtcgtgcgctgaaggcggtgtactcggtgccatctgcgccacgattgcgtcgatccaggtaactgaagtgctgaagctccttaccggagtcggaactcccctcgtcggtcgcctgctcatgtatgaagctctcgacgcgacataccatcaaatccggatcgcgaagaatcctgactgcgccatttgcggcgatgcgcccacgatcaccgaattggtagatgacagcgtcagctgcgcatcgacacaatcggtggatcccgaactagtgatcagttgtgatgagttgcgaaccaaacagcagtcggaccagaacttcctcttggtcgacgtgcgagagcccgccgagttcgacatcgcgcacattccgggcagcatcttgatacccaaaggcgaaatcggctcggcggcgggcctagcccagctaccgctggacaaggaaattgtcctgtactgcaagagtggaatccgatcggcccaggcgctaaccacgttgaaagcagccggactgcacaacgtgaagcatctcgacggcggtatcgcggagtggacacgaaccatcgactcctccttgttggtgtac

SEQ ID NO: 26384 - DNA, 1017 bp, Mycobacterium bovis
atgacggagccagcggcgtgggacgaaggcaagccgcgaatcatcactttgaccatgaaccccgccttggacatcacgacgagcgtcgacgtggtgcgcccgaccgagaaaatgcgttgtggcgcacctcgctacgatcccggcggcggcggtatcaatgtcgcccgcattgtgcatgtcctcggcggttgctcgacagcactgttcccggccggcgggtcgaccgggagcctgctgatggcgctgctcggtgatgcgggagtgccatttcgcgtcattccgatcgcggcctcgacgcgggagagcttcacggtcaacgagtccaggaccgccaagcagtatcgtttcgtgcttccggggccgtcgctgaccgtcgcggagcaggagcaatgcctcgacgaactgcgcggtgcggcggcttcggccgcctttgtggtggccagtggcagcctgccgccaggtgtggctgccgactactatcagcgggttgccgacatctgccgccgatcgagcactccgctgatcctggatacatctggtggcgggttgcagcacatttcgtccggggtgtttcttctcaaggcgagcgtgcgggaactgcgcgagtgcgtcggatccgaactgctgaccgagcccgaacaactggccgccgcacacgaactcattgaccgtgggcgcgccgaggtcgtggtggtctcgcttggatctcagggcgcgctattggccacacgacatgcgagccatcgattttcgtcgattccgatgaccgcggttagcggtgtcggcgccggcgacgcgatggtggccgcgattaccgtgggcctcagccgtggctggtcgctcatcaagtccgttcgcttgggaaacgcggcaggtgcagccatgctgctgacgccaggcaccgcggcctgcaatcgcgacgatgtggagaggttcttcgagctggcggccgaacccaccgaagtcgggcaggatcaatacgtttggcacccgatcgttaacccggaagcctcgcca

SEQ ID NO: 26385 - DNA, 1603 bp, Mycobacterium bovis
cccaccacacggaccgcggtgcggacgcggctgacgcgcctggtggtcagcatcgtggccggtctgctgttgtatgccagcttcccgccgcgcaactgatggtgggcggcggtggttgcgctcgcattgctggcctgggtgctgacccaccgcgcgacgacaccggtgggtgggctgggctacggcctgctattcggcctggtgttctacgtctcgttgttgccgtggatcggcgagctggtgggccccgggccctggttggcactggcgacgacgtgcgcgctgttccccggcatcttcggtctgttcgccgtcgtggtacgcctgttgccgggttggccgatctggttcgcggtggggtgggcggcgcaggagtggttgaagtcgatccttccgttcggtggatttccgtgggggtcggtcgccttcggtcaagccgaaggcccgctgttgccgttggtccagctcggcggtgtggcgctgctgtcaacgggggtagcgctggtcggatgcggcttgaccgcgatcgcgctggaaatcgagaagtggtggcgaaccggtggtcagggggatgcgccgccggcggtggtgctgccggccgcgtgcatatgcctggtcttgttcgccgccatcgtcgtctggccgcaggtgcggcatgcgggtagcggatcgggcggcgaacccacggtcaccgtcgcggtggtccagggcaatgtgccccggctcggtctcgacttcaatgcgcaacgtcgggcggtgctagacaaccacgttgaggagacgttgcggctggccgccgacgtgcatgcggggctggcgcagcaaccccagttcgtcatctggccggagaactcgtcggacatcgacccgttcgtcaaccccgacgccggtcaacggatctccgcagcggccgaagcgatcggcgcgccgatcctgatcggcaccctgatggatgttccgggccgtcctcgtgaaaatccggagtggaccaatacggccattgtctggaatcccggcaccgggccggccgaccgccacgacaaggcaatcgtgcagcccttcggcgagtacctgcccatgccgtggctgtttcggcacctctccggctacgccgaccgcgccggccacttcgtgcccggcaacggcaccggtgtggtgcgcatcgctggggtcccggtcggggtggctacctgctgggaggtgatcttcgaccgcgccccgcggaagtcgattctgggcggcgcgcagctgttgaccgtgcccagcaacaacgccaccttcaacaagacaatgagcgaacagcagctggcattcgccaaggtacgggccgtcgagcacgacagatacgtggtggttgccggtaccactgggatcagtgcggtgatagcaccagacgggggtgagctgatccggaccgactttttccagcccgcatacctggacagccaggtgcgcctcaagacgaggctgacaccggcaactcgatggggtccaatcctgcaatggattctcgtcggggcagccgcagcggtcgttctcgtcgccatgcggcagaatgggtggttcccgcgtccgaggcgctcggagccaaagggcgaaaatg

SEQ ID NO: 26386 - DNA, 486 bp, Mycobacterium bovis
atggctgtgaagatcaagctcactcggcttggcaagatccgcaatcctcagtaccgcgtcgccgtcgccgatgcgcgcacccgccgcgacggccgagcgatcgaggtaatcggccggtaccaccccaaagaagagccgagtctcatcgagatcaactccgagcgtgcccagtactggctctcggtgggtgctcagcccaccgagcccgtcctcaagctgctgaagatcaccggggattggcagaagtttaagggcctacctggcgctcagggccggttgaaggtcgccgcacccaagcccagcaagctcgaggtgttcaacgccgcgttggccgccgccgacggtggtcctaccaccgaggccaccaaaccgaagaagaagtcgccggccaaaaaggctgccaaggctgctgagccagcgccgcagcctgagcagccggacacgccggcgctgggtggcgagcaggccgagctgacggcggaaagc

SEQ ID NO: 26387 - DNA, 240 bp, Mycobacterium bovis
atgagcgccgtcgtcgttgacgctgttgagcatctggtccgtgggatcgtcgacaatcctgacgatgtccgggtagacctgataaccagtcggcgggggcgcaccgtcgaagtccacgttcatccagacgacctgggcaaggtgatcggtcgtgggggacgcaccgctaccgcattgcgcactctggtagccggtatcggtggccgcggtatccgcgtcgacgtggtggacaccgaccag

SEQ ID NO: 26388 - DNA, 861 bp, Mycobacterium bovis
atggccgtagtcaccatgaagcagctgcttgacagcggcacccacttcgggcatcagacccgtcgctggaatcccaagatgaagcgtttcatcttcaccgaccgcaacggcatctacatcatcgacctgcagcagacgttgaccttcatcgataaggcgtacgagttcgtgaaagagaccgtcgctcacggtgggtcggtgctcttcgtcggcacaaagaagcaggcgcaggagtcggtggccgccgaagccacccgggtcggcatgccgtatgtgaaccagcgctggctgggaggcatgctcaccaacttctccaccgtgcataagcggctgcaacgcctcaaggagcttgaggcgatggagcagaccggtggcttcgagggccgcaccaagaaggaaatcttgggattgacccgcgagaagaacaagctcgagcgcagcctcggcggcatccgcgacatggccaaggtgccgtcggcgatctgggtcgtcgacacgaacaaagagcacattgccgtcggtgaggcccgcaaactgggcatcccggtcatcgcgatccttgacacgaactgcgaccccgacgaggtcgactacccaatcccaggcaacgacgacgcgatccgctcggccgcgctgctgactagggtgatcgcttccgcggtcgccgagggcctgcaggcccgtgccggactggggcgcgccgacggcaagccggaggccgaagccgccgagccgctggccgaatgggagcaagagctgctggcctcggcgacagcttcggcaacgccatcagcaaccgcgtcaacaactgccctcaccgacgcccccgcaggcgcaaccgaaccaaccacagatgcatcc

SEQ ID NO: 26389 - DNA, 528 bp, Mycobacterium bovis
atggagctggtagtcgggcgggtggtgaagtcgcacggtgtcaccggcgaggtcgtcgtcgagatccgcaccgacgacccagctgaccggtttgcgccgggtaccaggttgcgcgctaaggggccttttgacggtggtgccgagggcagtgcggtgagttacgtcatcgaaagtgtgcggcagcacggcggccgcctgttggtgcgactcgctggagtggccgatcgagacgcagccgatgcgttgcgcggcagcttgttcgtgatcgacgccgatgacttgcccccgatcgacgagccggacacctattacgatcaccagctggtggggcttatggtccagacggcgacgggggagggtgttggtgtcgtcaccgaagtggtgcacaccgccgctggtgagttgctggcggtcaagcgtgattccgatgaggttttggtgccgtttgtgcgtgccatcgtcacgtcggtgtcattggacgacggcatcgttgagattgatccgccccatggcttgctgaatctggag

SEQ ID NO: 26390 - DNA, 1143 bp, Mycobacterium bovis
atgccgcagcccccggcacccacgctcgctccccggcgcgccacccgtcagctgatggtcggcaacgtcggcgtgggcagtgaccatccggtctcggtgcaatcgatgtgcaccaccaaaacccacgacgtcaactcgacattgcaacaaatcgccgagctgaccgcggccggatgcgacatcgtgcgggtggcctgcccgcgccaggaggacgccgacgcgctggccgagatcgcccggcacagccagatcccggtagtcgcggacatacatttccagccgcgctacatattcgccgccatcgacgctggatgtgccgcggtgcgggtcaacccgggcaacatcaaggagtttgacggccgggtgggtgaggtcgccaaggcggcgggtgcggccgggatcccgatccgaatcggtgtcaacgccggttcgctggacaaacggttcatggagaagtatggcaaagccacgcccgaggcgctggttgagtcggcgctgtgggaggcttcgcttttcgaggagcatggcttcggtgacatcaagatcagcgtcaagcacaacgacccggtggtgatggtcgccgcctacgagctgcttgctgcacggtgcgactacccactgcacctcggtgtcaccgaggccggccctgctttccagggcaccatcaagtccgcggttgccttcggcgcgttgctgtcgcggggcataggcgacaccatccgggtgtcgttgtcggccccgccggtcgaggaagtcaaggtgggcaatcaggttctcgagtcgttgaacctgcggccgcgttcgctcgagatcgtgtcttgcccgtcgtgcggtcgcgcgcaagtcgacgtctacaccctggccaacgaggtaaccgccggcctggatggtctcgatgtgccgttgcgggtggccgtgatggggtgtgtcgtcaatggtccgggtgaagcacgtgaggccgacctgggcgtggcgtccggcaacggcaaaggtcagatctttgtacggggcgaagtgatcaagaccgtgcccgaagcacagatcgtcgagacgctgatcgaggaggcgatgcggctggccgccgaaatgggcgagcaagctccgggcgcgacaccgagcggttcgcctattgtgaccgtaagc

SEQ ID NO: 26391 - DNA, 813 bp, Mycobacterium bovis
atggcgaacttcactgccgctgacgtcaagcggctgagggagctgaccggcgccggcatgctcgcctgtaagaacgcgctggccgaaaccgacggggacttcgacaaggccgtcgaggcgctgcggatcaagggcgctaaggatgtcggcaagcgtgccgagcgggctacggccgagggcttggtggcggccaaggacggcgcgctgatcgagctcaactgcgagactgactttgttgccaagaacgcggagttccaaacgctggccgaccaagtggtcgcggcggcggcagcagctaagcccgccgacgtcgacgcgctcaagggtgccagcatcggcgacaagaccgtcgagcaggcgatcgccgagctgtcggccaagatcggcgagaagctcgagctgcgtcgtgtggcgattttcgacgggaccgtggaagcctacctgcatcgacgttccgctgacctgccgccagcggtgggtgtactggtcgagtaccgcggcgacgacgcggccgccgcgcacgccgttgcgttgcaaatcgccgcgctgcgggcgcggtacctgtcccgcgacgacgtgcctgaagacatcgtggccagcgaacgccgcatcgccgaggagacggcaagggccgagggcaagccggagcaggcgctgcccaagattgtcgagggccggctgaacggcttcttcaaggatgcggtgctgcttgagcaggcgtcggtgtccgacaataagaagaccgtcaaggccctgctcgacgtggccggcgtgatggtgacacggttcgtccgcttcgaggtgggccaggct

SEQ ID NO: 26392 - DNA, 690 bp, Mycobacterium bovis
gtgcgcatcgatatcgtgacgatcttccccgcctgcctggacccgttgcgacagtcgttgccgggcaaggcgatcgaatcgggcctggtcgaccttaacgtgcacgacctgcggcgctggacccacgatgtgcatcactcggtggacgacgcaccctacggcggcggcccgggaatggtgatgaaggcgccggtgtggggtgaagcgcttgacgaaatttgttccagcgaaacgttgttgattgttcccacgcccgccggtgtgttgtttacccaggccaccgcccagcgctggaccaccgagagccatctggtgttcgcctgcggccgctacgaaggcatcgaccagcgggtcgtgcaggatgccgcccggcgaatgcgcgtcgaagaagtctcgatcggcgactacgtattgcccggcggggagtcggcggccgtggtgatggtcgaagccgtgctgcgactgttggccggtgttctcggcaatcccgcttcccaccaagatgattcgcactcaacgggcctggacgggctccttgagggtccgagctacacccggccggcgagctggcgtggcctcgatgtacccgaggtcctactctccggcgaccatgcccgaattgccgcctggcgcagagaggtctcgctgcagcgcacccgcgaacgacgccccgacctgtcccaccccgac

SEQ ID NO: 26393 - DNA, 339 bp, Mycobacterium bovis
atgaaccggctggacttcgtcgacaagccgtcgttgcgcgacgacatcccggcgttcaacccgggcgacaccatcaacgtgcatgtcaaggtgatcgagggcgccaaggaacgtctccaggtgttcaagggcgtggtgatccgccggcagggcgggggcatccgcgagacgttcacggtgcgcaaggagagctacggcgtcggcgtcgaacggacctttcccgtgcactcgccgaacatcgaccatatcgaggtggtgacccgtggcgatgttcgccgcgccaagctgtactacctgcgcgaactgcgcggaaagaaggccaagatcaaggagaagcgc

SEQ ID NO: 26394 - DNA, 882 bp, Mycobacterium bovis
gtgaccgaaaccacggactccccatcggagcgccagccgggtccggcagagccggagctctcctcccgggacccggacattgccggccaggtcttcgacgcagccccgttcgacgcagccccggatgcggactccgaaggcgactccaaggcggccaaaacggacgagccgcggcccgcgaagcgatcaacgctgcgggagttcgcggtgctggcggtgattgctgtggtgctctactacgtcatgctgacgtttgtcgcgcgcccttatctgattccgtcggaatcgatggaacccacgttgcacgggtgttcgacgtgcgtcggcgaccgcatcatggtggacaaactcagctaccgcttcggctcaccgcaacctggcgacgtcatcgtcttcaggggaccgccgtcgtggaacgttggttacaagtcgatccgttcgcacaacgtcgccgtgcgctgggtgcagaacgcgttgtcgttcatcggtttcgtgcctcccgacgagaacgacctggtcaagcgtgtcatcgcggtcggcggacagacggttcaatgccggtccgacaccggcctgacggtcaacggcaggccactgaaggagccatacctggatccggccaccatgatggccgacccgtcgatatacccgtgcctgggcagcgagttcgggccggtcaccgtcccgcccgggcgtgtctgggtgatgggcgacaaccgcacccattcggcggattcccgcgctcactgcccgttgctatgtactaacgatccgctaccggggaccgtgccggtggccaacgtcatcggtaaggccaggttgatcgtgtggccgccgtcgcgttggggtgttgtgcgttcggtgaatccccagcaaggtcgg

SEQ ID NO: 26395 - DNA, 792 bp, Mycobacterium bovis
atgaccaagacctggccaccgcggacggtgatccgtaaatctgggggtttgcggggaatgcgcaccctggagtccgcgctgcatcgtggtggtctggggccggtggccggggtcgacgaagtgggtcgcggcgcctgcgctggcccgttggtggtcgcggcctgcgtgcttggccccgggcggatagcaagtcttgccgcccttgatgattcgaagaagctcagcgagcaagcgcgggagaagctgttcccgctgatctgccggtatgcggtggcctatcacgtggtgttcatcccgtcggccgaggtcgaccgccacggcgtgcacgtggccaatatcgaaggtatgcggcgcgcggtggccggtctggcggtgcggcccggttatgtgctcagcgacggctttcgcgtgccaggactgccgatgccgtcgttgccggtgatcggtggcgacgcggcagccgcctgcatcgccgcggctagcgtgctcgccaaggtcagccgggaccgcgtgatggttgcgttggacgccgatcaccccgggtacggtttcgcggagcacaagggttacagcaccccggcgcacagccgggcgctggcccgattgggaccctgcccgcagcaccgttactcgttcatcaatgttcgccgggtggcgagtgggtcgaacaccgcagaggtcgccgacggccaacccgaccctcgggacgggacggcacagacgggtgagggaagatggagcaagagttcccacccagcgacaatgcgggccacgggtcgcgctcagggcact

SEQ ID NO: 26396 - DNA, 783 bp, Mycobacterium bovis
atgacagagcccgatgtcgccggcgcgccggcttcgaagccggagcctgcgagcactggcgccgcgtcggcggctcagctgtccgggtactcgcgagtgttgctcaagctcggcggggaaatgttcggcggaggccaggtcgggctggatcccgatgtcgtcgcgcaggtggcccgccagatcgccgatgtggtgcgcggcggcgtccagatcgccgtcgtgatcggcggcggcaactttttccggggcgcacagctgcagcagctcggtatggagcgcaccaggtcggactatatgggaatgctcggcactgtcatgaacagccttgcactgcaagacttcctggagaaggaaggcatcgttacccgagtccagaccgcgatcaccatgggccaggtggccgaaccgtacctgccgttgcgggccgtccgccacctggagaagggacgggtggtgatcttcggtgccggcatggggctgccgtacttttcgacggataccaccgcagcgcagcgtgcgctggagatcggtgccgacgtggtcttgatggccaaagcggtcgacggtgtgtttgctgaggatccgcgggtgaaccccgaggccgaactgctcaccgccgtcagtcatcgtgaggtcctcgaccgcgggctgcgagtagccgacgccaccgcgttcagcctttgcatggacaatggcatgccgatcctggtgttcaacctgctgaccgatggcaatatcgcccgtgctgttcggggtgagaagatcggaacgctggtcaccacc

SEQ ID NO: 26397 - DNA, 2337 bp, Mycobacterium bovis
atgtacgttgaggcggtgaggtggcagcggtcggcggcgtctcgcgacgtcctcgccgactatgacgagcaggcggtaacggtggcgccgcgcaaacgcgaggccgcgggcgtgcgggcggtgatggtatcgctgcagcgggggatgcagcagatgggcgcgctgcgcaccgcggcggcgctggctcggttgaatcagcgtaacggcttcgactgcccaggctgcgcgtggccggaggagcccggcggacgcaagctggccgagttctgcgagaacggcgccaaggcagtcgccgaagaggccaccaagcgtaccgtcactgcggagttcttcgctcggcactcggtggcggagctgtccgcgaagcccgaatattggctgtcccagcaaggccggctcgcccacccgatggtcttgcgccccggtgatgaccactaccggcccatcagctgggatgccgcttatcagctgatcgccgagcagctcaacgggttggacagtcccgaccgggccgtgttctacacatcggggcgcaccagcaacgaagcggcgttctgttaccagctgctcgtgcgctctttcggcaccaacaacctgcccgactgctccaacatgtgccacgagtcctcgggtgcggcgctgaccgactcgatcggaatcggaaaaggctcggtgaccatcggtgacgtcgagcacgccgacctgatcgtgatcgccggacaaaaccccggtaccaatcatccccgcatgctgtcggtgctggggaaagcgaaggccaacggcgccaagatcatcgccgtgaacccgctgcccgaggccgggttgattcggttcaaagatccgcagaaggtgaacggggttgtgggacatggtatcccgatcgccgacgagttcgtgcagatccgcctcggcggggacatggcattgttcgccgggttaggcaggttgttgttggaggccgaggagagggtccccggcagcgttgtcgaccggtcgttcgtcgacaaccattgtgccggattcgacgggtaccgccgccggactctgcaggtcggcttggacaccgtgatggacgccaccggcatcgaactcgcgcaacttcagcgggtcgccgcgatgttgatggcgtcgcagcgcacggtcatctgctgggctatgggcttgacccaacacgcccacgccgtggccaccatcggtgaggtcaccaacgtgctgctgctgcggggcatgatcggcaaacccggcgcgggggtgtgcccggtgcgcgggcattccaacgtacaaggggaccgcacgatggggatctgggagaagatgcccgagcagttcctggcggcgctggatcgtgagttcggcattaccagcccccgagcgcacggctttgacaccgtggccgcaatccgggccatgcgcgacggtcgggtcagcgtcttcatgggcatgggcggaaacttcgcgtcggccacccccgacaccgccgtcaccgaggcggccttgcgcaggtgcgcgctgactgtgcaagtctcgaccaagctcaaccgcagccaccttgtccacggcgccaccgcgctgatcctgccgacgctgggtcggaccgatcgcgatacccgcaatggtcgcaaacaattggtgtcggttgaggattcgatgtcgatggtgcatctgtcgcgtggtagcctgcacccgcccagcgatcaggtgcgcagcgaggtgcagatcatctgccagctggcccgcgccttgttcggccccggacatccggtgccatgggaacggttcgcagatgactacgacaccatccgtgacgccatcgccgcggtggtgcccggctgtgacgactacaaccacaaggtgcgtgtgcccgacggattccaattgccgcacccgccgcgcgatgcgcgcgaattccgtaccagcacaggcaaagctaacttcgcggtcaatccgttgcagtgggtgccggtgccgcccggccggctggtgctacagaccctacgcagccatgaccagtacaacaccacgatctacgggctcgacgaccgatatcgcggcgtgaagggcggacgccgggtggtgttcatcaacccggccgacatcgaaacgttcggtttgacggcgggtgaccgtgtcgacctggtgtcggagtggaccgacggccaaggcggtctgcaagaacggcgggcaaaagactttctggtggtggcatattcgacgccggtcggcaatgctgcggcctactacccggagaccaatccgctggttccgctcgaccataccgcggcccaatcgaacaccccggtgtcgaaggcgatcatcgtgcgattggagccaacggcc

SEQ ID NO: 26398 - DNA, 555 bp, Mycobacterium bovis
atgattgatgaggctctcttcgacgccgaagagaaaatggagaaggctgtggcggtggcacgtgacgacctgtcaactatccgtaccggccgcgccaaccctggcatgttctctcggatcaccatcgactactacggtgcggccaccccgatcacgcaactggccagcatcaatgtccccgaggcgcggctagtcgtgataaagccgtatgaagccaatcagttgcgcgctatcgagactgcaattcgcaactccgaccttggagtgaatcccaccaacgacggcgcccttattcgcgtggccgtaccgcagctcaccgaagaacgtcggcgagagctggtcaaacaggcaaagcataagggggaggaggccaaggtttcggtgcgtaatatccgtcgcaaagcgatggaggaactccatcgcatccgtaaggaaggcgaggccggcgaggatgaggtcggtcgcgcagaaaaggatctcgacaagaccacgcaccaatacgtcacccaaattgatgagctggttaaacacaaagaaggcgagctgctggaggtc

SEQ ID NO: 26399 - DNA, 918 bp, Mycobacterium bovis
gtgacaaccaacgatgccggcaccggaaaccccgccgagcagccggcgcgtggtgctaaacagcagccggcgaccgaaacgtcccgcgccggccgtgatttgcgcgcagcgatcgtggtgggcctttccataggcctagtcctcatcgcggtgctggtgttcgttccgcgcgtttgggttgccatcgtggccgtcgccaccttggtcgctacccatgaggtggtgcggaggttgcgggaagcgggctatctcatcccggttatcccgttgctgattggcgggcaggccgcggtgtggctgacctggccgttcggcgcggtcggcgcattggcgggctttggtggcatggtcgttgtctgcatgatttggcgactgttcatgcaggacagcgtgacgcgcccgacgaccggcggtgcaccgtcgccgggaaactacttgtccgacgtctcggccacggtcttcctggccgtgtgggtcccattgttctgctctttcggcgcaatgctggtctacccggaaaatggctcgggatgggtgttctgcatgatgatcgcggtcatcgcttccgatgtcggcggctacgccgtgggggtgctgtttggcaagcatccgatggttccgacgatcagcccgaagaagtcgtgggagggctttgccggttcgctggtgtgcgggatcaccgcaacgatcatcaccgcgactttcctggtcggcaaaacgccgtggattggtgcactgctcggcgtgcttttcgtgctcaccaccgcgctgggcgacctggtggagtcgcaggtcaaacgtgacctcggcatcaaagacatgggccgcctgctacccggccacggcggtctgatggaccggctcgacggcatactgccttccgcggtggcggcctggatagtcctcacactgctgccc

SEQ ID NO: 26400 - DNA, 2424 bp, Mycobacterium bovis
atggaggcagaaagtccttgtgccgcaagcgatttagctgtcgcccgacgcgagctgctgtccggcaaccatcgcgagctggatccggtcgggctgcggcagacgtggctggatctgcatgagtcttggctgatcgacaaggccgacgagatcgggatcgccgatgccagtggttttgcaatcgtcggggtcggcgggctcggccgccgcgagctgctgccgtattcggacctggacgtgttgctgttgcacgatggcaagcctgctgacatcttgcggcccgtcgccgacaggttgtggtatccgttgtgggatgccaacattcggctcgatcacagtgtgcgaacggttagtgaggcattgaccatcgccaattccgatctgatggccgctctaggcatgctggaagcccgccacatcgccggcgatcagcagctctcgttcgcgttgatcgacggcgtgcgacgccagtggcgcaacggaattcgttcccgcatgggcgaactcgtcgaaatgacatatgcgcgttggcggcgctgtggccggatcgcgcagcgcgcagagcccgatctcaaattgggtcgcggcggccttcgggacgtccagttgctagacgcgctggctctcgcccagctcatcgaccggcacggtatcggccacacggaccggccggcgggttcgctggacggtgcgtatcgcaccttgctggatgtgcgcaccgaactgcaccgggtgtcgggccgcggacgcgaccacctgctggcccagttcgccgacgagatcagcgccgcgttgggtttcggtgaccgattcgatttggcgcgcacactgtcgagtgctggccgcaccatcggttaccacgccgaagccgggctgcggactgcggcgaatgcattgccgcggcgcggcatctcggccttggtgcggcggccaaagcggcgaccgctcgacgagggtgtcgtcgagtatgccggcgaaatcgtgctcgcccgcgacgccgaacccgaacacgatcccggcctggtgctccgagtggccgccgcgtcggccgacaccggattgcccattggcgccgccaccctgagccggttggccgccagcgtcccggatctgccgactccctggccgcaagaggcattggacgacttactagttgtgctctccgccggccccaccacggtggctaccatcgaagcgctcgaccgaaccgggctctggggccggttgttgccggaatgggagcccattcgcgaccttccgccgcgcgacgtcgcccacaagtggacggttgaccgacacgtggtcgagaccgcggtgcatgcggcgccactggccacccgggtggcacgtcccgacctgcttgcgcttggcgcgctgctgcacgacatcggcaagggacggggcaccgatcacagtgtgctcggggccgaattggtaatcccggtttgcaccaggctggggttgtcgccgccggacgtgtggacgctctccaagctggtccgccaccacctgctgctgccgattacggcaacccgacgtgacttaaacgaccccaaaaccatcgaggcggtgtccgaggcgctgggtggggatccgcaactgctcgaagttttgcacgccctgtcggaggcggactcgaaggccaccggccccggggtgtggagcgattggaaggcgtcactggtcgatgacctggtgcgtcgctgccggatggtgatggccggagagtcgctgcctcaagccgaaccgactgcaccccattatctttcgctggcggccgaccacggggtgcatgtggagattagtccgcgcgacggtgaacgcatcgacgccgtaatagtggcgccggacgagcggggactggtgtcgaaagccgccgcggtgctggcgctgaactcgctgcgcgtacattcggcgtcggtcaacgtccaccagggtgtcgcgataaccgagtttgtggtgtcaccactgtttgggtccccgcccgcggcggagttggtgcgtcagcagtttgtcggtgccctcaacggcgacgtcgacgtgctgggcatgctgcagaagcgggacagcgatgccgccagcttggtatccgctcgggccggggacgtgcaggccggggtgcccgtgactcgtacggccgctccgccccgcatcctgtggctcgacaccgccgcgccggccaagctgatcctcgaagttcgggccatggatcgggcgggtttgctcgcgttgctggccggggcgctggagggcgcgggagccggcattgtctgggcgaaggtcaatacgttcggatcgaccgcggccgatgtgttctgtgtgacggtccccgcggagttggacgcgagagccgcggtcgagcaacacctgctggaggtgttgggcgccagcgtcgacgttgtggtcgacgaacccgtcggcgat

SEQ ID NO: 26401 - DNA, 1575 bp, Mycobacterium bovis
gtgtttgaatcgctgtctgaccgtttgaccgccgccctgcaggggctgcgcggcaagggccgactgaccgatgccgatatcgatgccactacccgcgaaattcggttggcgctgctggaagccgatgtttcgctaccggtggtccgggcattcatccaccggatcaaagaacgcgcccgcggggccgaggtgtcaagtgccctcaacccggctcaacaggtcgtcaagatcgtcaacgaggaactgataagcatcctcggcggcgaaacccgcgagttggcgtttgcgaagaccccgccgaccgtcgtgatgctcgccggcctgcagggctccgggaagacgacactggccggcaaattggccgcccgcctgcgtggacaaggacacacgccactgctggtcgcttgtgacctgcaacggccggccgcggtgaaccagctgcaggtcgtcggcgagcgtgccggagtgccggtgttcgcgccgcatccgggtgcctcgccggagtccggccccggtgacccggttgcggtggcggcggccgggctggccgaggcccgggccaagcacttcgacgtcgtcatcgtcgacaccgccggacgactgggcatcgacgaggagctgatggcccaggccgcggccatccgcgacgccatcaaccccgacgaggtgctgttcgtcctggacgcgatgatcggccaggacgcggtcaccaccgctgcggcgttcggcgagggcgtcgggttcaccggtgtggccttgaccaagctcgacggtgacgcccgcggtggtgccgcgttatcggtgcgcgaagtgaccggtgttccaatccttttcgcctccaccggggagaagctggaggacttcgacgtcttccacccggaccggatggccagtcgcatcttgggcatgggcgatgtgctgagcctgatcgaacaggccgagcaggtcttcgatgcacaacaggccgaggaggccgcagccaagatcggcgccggcgagctgaccctggaggacttcctcgagcagatgctcgcggtacgcaagatgggcccgatcggcaacctgctgggcatgctgcccggcgcggctcagatgaaggacgcgttggccgaggtcgacgacaaacaactcgatcgtgtccaggccatcattcgcggcatgacgccgcaggaacgggcagaccccaagatcatcaatgcctcgcggcggctgcgcatcgccaacggctcgggcgtcacggtgtccgaggtcaaccagctggtcgagcgcttcttcgaagcccgcaagatgatgtcgtccatgctcgggggcatgggcataccgggcatagggcgcaaatccgcgacgcgaaagagcaagggcgcaaaaggcaaatccggcaagaagagtaagaaggggacgcgcggtccgacgccgccgaaggtcaagagcccgttcggcgtgcccgggatgccgggcttggctgggctacctggggggctccctgatctctcacagatgcccaaaggtctcgacgagctgccgcccggcctggccgacttcgacctgtccaagctgaagttcccaggcaagaag

SEQ ID NO: 26402 - DNA, 1233 bp, Mycobacterium bovis
atgccgccgtcgctgcacctgtccgattccgcggctgcgtccgtcttccgggccgtgcgtttgcgtggtccggtcggtcgggacgtaattgctggatctacgtcgctgagcatcgcgacggtgaaccgccaggtcatcgcactgctggaagcgggcctcctgcgtgagcgggcggacctggcggtttccggggctatcgggcgcccacgcgtgcctgtcgaagtaaaccacgagccttttgtcaccctgggcatccacatcggtgcccggaccaccagcatcgtggccaccgacctgttcggccgcacgctcgacacggtggagaccccgaccccgcgtaacgctgccggggccgcgctgacctcactggccgacagcgctgaccgatacttgcagcgctggcgccggcgccgtgcgctgtgggtcggggtgacgcttggtggtgcagtcgacagtgccaccggtcatgtcgaccatccgcggctcggttggcgtcaggctccggtcggacccgtgctggcggatgccctaggcctgcccgtgtcggtggcgtcccacgtcgacgccatggccggggccgagctgatgctcggcatgcggcggttcgcaccgagctcgtcgacgagcctctacgtctacgcccgcgaaaccgtaggctatgcgctgatgatcggtgggcgggtgcactgcccggccagtggtcccggcaccatcgcgcccctgcccgtccactctgaaatgctcggcggtaccgggcagctggagtccactgtcagcgacgaggcggttttggctgctgcccgccggctgcggatcatccccggcatcgcttcgaggacccggaccggtgggtccgctaccgccatcaccgacttgctgcgagtggcacgagccggtaatcagcaagccaaggagctgctggcggagcgggcccgcgtgctcggtggggcggtcgcgctgctgcgtgacttactcaatcccgacgaagtggtggtgggtggccaggcgtttaccgaatatcccgaggcgatggagcaggtggaggcggcgtttacggcagggtcggtgctggcgccgcgtgacatccgcgtgaccgttttcggcaaccgggtgcaggaggccggggcaggcatcgtgtccctaagcgggctctatgccgatccattgggtgccttgcggcgatcgggcgcgctggatgcccggctgcaggacaccgccccggaggcgctcgcg

SEQ ID NO: 26403 - DNA, 1107 bp, Mycobacterium bovis
atgaaacggagcggtgtcggttcgctctttgccggtgcgcatattgccgaggcggtcccgttggcgccgctgaccactttgcgtgtgggcccgatcgcccgacgtgtcatcacttgcaccagcgccgaacaggtggtggctgcgctgcggcacctggattcggcggccaagaccggagctgaccgcccgctggtgtttgctggtggctccaatttggtgatcgccgagaacctgaccgacctgaccgtggtgcggttggccaatagcggcatcaccatcgacggtaacttggtgcgggccgaggccggtgcggtcttcgatgacgtggtggttagggccatcgaacagggtctgggcggactggaatgcctgtctggcatcccaggatcggccggggcgacacccgtgcagaacgtgggggcgtatggcgcggaggtgtctgacaccatcactcgggttcggcttttggatcggtgcacgggtgaggtgcgttgggtatccgcgcgcgacctgcgcttcggctatcgcacgagcgtgctcaaacacgctgatgggcttgcggtgcccaccgtggtcttggaggtggagtttgcgctggatccgtcgggccgcagcgcaccgctgcgctacggcgagctgatcgccgcgctgaatgcgaccagcggcgagcgcgccgacccgcaagcggtccgcgaagcggtgctggccctgcgggcacgcaagggcatggtgctggacccgaccgaccatgacacctggagcgtgggatcgttcttcacaaacccggtggtcacccaggatgtttacgaacggctggccggtgacgcggccaccagaaaggacggtccggtcccgcactatcccgcgcccgacggcgtcaagctggccgccggctggctggtggaacgggccggcttcggcaagggctatccggatgccggcgccgccccatgccggctttccaccaaacatgcgctggcgctgacaaatcgtggcggggccaccgccgaagatgtggtgacgctggcgcgcgccgtgcgcgatggggtccatgatgtgtttggtatcacactaaaacccgaacccgtgctgatcggctgcatgttg

SEQ ID NO: 26404 - DNA, 672 bp, Mycobacterium bovis
gtgctcggccaaccgactcgggcgcagttggccgcgctggtagaccacaccctgctcaagcctgagaccacccgtgccgatgtggccgcgctggtcgccgaagccgccgaactcggcgtctacgcggtctgcgtgtcgccgtcgatggtgccagttgcggtccaagccggtggtgtgcgggttgcggcggtgacgggcttcccgtcgggcaagcacgtgtcctcggtcaaggcgcatgaggcggctgcggccctggcatccggcgccagtgagatcgacatggtcatcgacatcggggctgcgctgtgcggtgacatcgacgcagtgcgctccgacatcgaggcggtgcgtgccgctgcggccggggctgtgctcaaggtgatcgtggagtcggcggtgctgttgggacagtcaaacgcgcacacgttggtggatgcgtgtcgtgccgccgaggatgccggtgccgacttcgtcaaaacctcgactgggtgtcatccggccggcggggccacggtgcgtgccgtcgagctgatggccgagacggtcggccctcggctaggggtcaaagccagcggtgggatccgcaccgccgccgacgcggtcgcgatgctcaacgccggtgccaccaggttgggcctgtccggcacccgggcggtgctcgatgggctcagc

SEQ ID NO: 26405 - DNA, 714 bp, Mycobacterium bovis
atgaaccagtcaagtgtctttcagccgccggatcggcagcgggtggatgagcggatcgcgacgacgatcgccgacgccatcctcgacggcgtcttcccgccgggctcgaccctgccgcccgagcgagacctggcagagcggctcggtgtcaaccgcacctcgctacgccagggtctggcgcgactgcaacagatgggcctgatcgaggtgcggcacggcagcggcagtgtggtccgtgaccccgaggggctcacccatcccgcggtggtcgaggcgctggtgcgcaaactgggccccgacttcctcgtcgagttgctggagatccgcgcggcgttaggcccgttgattggccgcctggcggccgcccggagcacgcccgaggatgccgaggcgttgtgtgcggcgctggaagtggtgcaacaggcggacacggccgcggcgcggcaggcagccgatcttgcctacttccgggtgctcatccacagcactcgcaaccgcgcattggggttgctctaccgctgggtggagcacgccttcggcggccgcgagcatgcgctcaccggggcctacgacgacgcggacccagtgttgaccgacctgcgggcgatcaacggggcggtgctggccggtgacccggcggccgctgccgcgaccgtcgaggcgtatctgaacgccagtgcgctgcgcatggtcaagtcctaccgcgaccgcgct

SEQ ID NO: 26406 - DNA, 690 bp, Mycobacterium bovis
gtggcgctgatgaccagtgtgttgattgtggaggacgaggagtcgctggccgatccgctggcgtttctgctgcgcaaggagggctttgaggccacggtggtgaccgatggtccggcagctctcgccgagttcgaccgggccggcgccgacatcgtcctgctcgatctgatgctgcctgggatgtcgggtaccgatgtatgcaagcagttgcgcgctcggtccagcgttccggtgatcatggtgaccgcccgggatagcgagatcgacaaggtggtcggcctggagctgggcgctgacgactacgtgaccaagccctattcggcacgcgagttgatcgcacgcatccgcgcggtgctgcgccgtggcggcgacgacgactcggagatgagcgatggcgtgctggagtccgggccggttcgcatggatgtggagcgccatgtcgtctcggtgaacggtgacaccatcacgctgccgctcaaggagttcgacctgctggaatacctgatgcgcaacagcgggcgggtgttgactcgcggacaactgatcgaccgggtctggggtgcggactacgtgggcgacaccaagacgctcgacgtccatgtcaagcggctgcgctccaagatcgaagccgacccggctaacccggttcacttggtgacggtgcgcgggctgggctacaaactcgagggc

SEQ ID NO: 26407 - DNA, 1230 bp, Mycobacterium bovis
gtgactgtgttctcggcgctgttgctggccggggttttgtccgcgctggcactggccgtcggtggtgctgttggaatgcggctgacgtcgcgggtcgtcgaacagcgccaacgggtggccacggagtggtcgggaatcacggtttcgcagatgttgcaatgcattgtcacgctgatgccgctgggcgccgcggtggtggacacccatcgcgacgttgtctacctcaacgaacgggccaaagagctaggtctggtgcgcgaccgccagctcgatgatcaggcctggcgggccgcccggcaggcgctgggtggtgaagacgtcgagttcgacctgtcgccgcgcaagcggtcggccacgggtcgatccgggctatcagtgcatgggcatgcccggttgctgagcgaggaagaccgccggttcgccgtggtgttcgtgcacgaccagtcggattatgcgcggatggaggcggctaggcgtgacttcgtggccaacgtcagtcacgagctcaagacgcccgtcggtgccatggctctactcgccgaggcgctgctggcgtcggccgacgactccgaaaccgttcggcggttcgccgagaaggtgctcattgaggccaaccggctcggtgacatggtcgccgagttgatcgagctatcccggctacagggcgccgagcggctacccaatatgaccgacgtcgacgtcgatacgattgtgtcggaagcgatttcacgccataaggtggcggccgacaacgccgacatcgaagtccgcaccgacgcgcccagcaatctgcgggtgctgggcgaccaaactctgctggttaccgcactggcaaacctggtttccaatgcgattgcctattcgccgcgcgggtcgctggtgtcgatcagccgtcgccgtcgcggtgccaacatcgagatcgccgtcaccgaccggggcatcggcatcgcgccggaagaccaggagcgggtcttcgaacggttcttccggggggacaaggcgcgctcgcgtgccaccggaggcagcggactcgggttggccatcgtcaaacacgtcgcggctaatcacgacggcaccatccgcgtgtggagcaaaccgggaaccgggtcaacgttcaccttggctcttccggcgttgatcgaggcctatcacgacgacgagcgacccgagcaggcgcgagagcccgaactgcggtcaaacaggtcacaacgagaggaagagctgagccga

SEQ ID NO: 26408 - DNA, 981 bp, Mycobacterium bovis
atgagttcctatccgcggcagcgaccgcgccggctccgctccaccgtcgcgatgcgccgtctggttgcgcaaacctcgttggagccaaggcatttggtgctgccgatgttcgttgccgacggcattgacgagccgcggccgattacctccatgccgggcgtggtacagcacacccgggattcgctacgtagggccgcggcagccgcggtggccgccggcgtgggtgggctgatgcttttcggcgtgccgcgcgaccaggacaaggacggtgtcggttcggcgggcatcgaccccgacgggatcctcaacgtcgcccttcgcgatctggccaaggacctgggtgaggccacggtgttgatggccgacacctgtctggacgagttcaccgaccacgggcactgcggtgtgctcgatgaccggggccgggtcgataacgacgccaccgtggcccgctatgtggaactggctgtggcgcaagcggaatcgggcgcccacgtggtcggacccagtgggatgatggatggccaggtagccgcgatccgggacggtttggacgccgccggctacatcgatgtggtgatcttggcctacgccgcgaagtttgcttcggcgttctacggcccgttccgcgaggcggtgagctctagcctgtccggggatcggcgcacctaccagcaggagccgggcaacgccgccgaggcgctgcgtgagatcgagctcgatctcgacggaggcgccgacattgtgatggtcaaacccgcgatgggctacctcgatgtggtggcggccgcggcggacgtctcgccggtcccggtggccgcctatcaggtctcgggagagtacgcgatgattcgtgcggcggcggccaataattggatcgatgagcgtgccgcggtgctagagtcgctgaccggtatccggcgtgccggcgccgacatcgtgctcacctactgggcggtagacgcggcgggctggcttacg

SEQ ID NO: 26409 - DNA, 1653 bp, Mycobacterium bovis
gtgggctccggtccgggcgaccccggcttgcttacgacacgggctgccgcggtgctggccaacgccgcgctggtgttcaccgatcccgacgtaccggagccggtggtggcgctgatcggcacggatctgccccccgtgtccggcccggcgcccgccgagccggttgccgggaacggcgatgcggccggcggaggaagtgcgcaggaacacggccgggccgcgtccgcggtagtctccggtggtcctgacatccgcccggcgctgggcgatcccgccgatgtggccaagacgctgaccgccgaggcccgttcgggtgtcgacgtggtgcggctggtggcgggcgatccgctcacggtggatgcggtaatcagcgaggtgaacgccgtcgcacgcacccacctgcacatcgaaatcgtgcccggcctggccgccagcagcgcggtcccgacctatgccgggttgccgctgggttcgtcgcacaccgtcgccgacgtgcgtatcgaccccgaaaacaccgactgggacgcgctggctgccgcacccgggccgctgatcctgcaggccaccgcatcgcatctagccgaatcggcccgcagcctgatcgatcaccagctggccgagtccactccgtgcgtggtgaccgcacacggcaccacctgtcagcagcgttcggtcgagaccacacttcagggattgaccgacccggccgtcctgggcgctaccgaccccgcgtgctccgcaaacgggagggactcccaggccggaccgctgatagtgaccatcggcaagacggtgaccagtcgggcaaagctgaactggtgggagagccgcgccctctacggctggacggtgttggtgccgcgcaccaaggaccaggccggcgagatgagcgagcggctcacgtcgtacggcgcgctgccggtggaggtgccgaccatcgccgtcgagccgccgcgcagccccgcgcagatggagcgcgccgtcaagggcctggtcgatggccgattccagtggatcgtgttcacctccaccaacgcggtgcgtgcggtgtgggagaagttcggcgagttcggtctggatgcccgcgcgttctccggggtgaagatcgcctgtgtcggcgagtcgacggccgaccgggtgcgcgccttcggaatcagtcccgagctggtgccctccggggagcagtcctcgcttggcttgctagacgacttcccgccctacgacagcgttttcgacccggtgaaccgggttttgctgccgcgcgccgacatcgccaccgaaacgctggccgagggactgcgagagcgtggctgggagatcgaggacgtcaccgcctaccggaccgtgcgggccgcgccgccgccggccactacccgggaaatgatcaagacgggcgggtttgacgcggtatgtttcacctccagctcgacggtgcgaaacctggtcggcatcgccggcaagccgcacgcgcggacgatcatcgcctgcatagggccaaagaccgccgagaccgcagccgagttcggcttgcgggtcgatgtccagccggacaccgccgccatcggcccgctggtcgatgcgctggccgagcatgccgcccggttgcgcgctgagggtgcgctgcccccgccgcgcaagaagagccgcaggcgc

SEQ ID NO: 26410 - DNA, 936 bp, Mycobacterium bovis
ttggcgcacgtgatccggataggtacccggggcagcttgctggccaccactcaggccgccactgtcagagacgccctcatcgctggtggccactccgcggagttggtgaccatcagcaccgagggtgaccgatccatggcgccgatcgccagtctcggggttggcgtcttcaccacggcgttgcgcgaggcgatggaggcaggcctcgtcgatgcggcggtgcattcgtacaaggatttgccgactgccgccgatccaaggttcacggttgcggcgataccgccgcgcaatgacccccgcgacgcggtggtagcccgtgacgggctgacgctgggggaattgccggtcggatcgttggtgggcacatcctcgccgcggcgggccgcacagcttagagcattgggtctcggtttggaaatccgccccctacgaggcaacctagataccaggttgaacaaggtaagtagcggcgatcttgacgccatcgtggtggcccgggctggtctggcgcggctgggccgcctcgatgacgtgaccgagacgttagagccggtgcagatgttgcccgcgccggctcagggcgcgctcgcggtcgaatgccgcgccggcgacagccggttggtggcagtgctggcggagttggatgacgccgacacgcgtgcggcggtcaccgccgagcgagccctgcttgccgacctggaggcaggttgctccgcaccggtgggagcgatcgcagaagtggtcgagtccatcgatgaggacggccgtgtcttcgaggagctgtcgctgcgcgggtgcgtggcggcgctggacggatccgacgtgatccgcgcgtccggcatcggcagttgcggtcgggcacgggagctggggctctcggtcgccgcggagctgttcgagctgggcgcccgggagctgatgtggggagtgcggcat

SEQ ID NO: 26411 - DNA, 1404 bp, Mycobacterium bovis
gtgagcgtgctgctcttcggggtgtcgcatcgtagcgcgccggtcgtcgtccttgaacaactcagtatcgacgaatccgatcaagtcaagatcatcgaccgagtgctggcttcgccgctggtgaccgaggcgatggtgctgtcgacttgcaaccgcgtcgaggtctacgccgtagtggacgcgttccatggcggcctgtcggtgatcgggcaggtgcttgccgaacactccggtatgtcgatgggggagctgaccaagtacgcatatgtccgctacagcgaggcagcagttgagcacctgttcgcggttgccagcggcctggactcggcggtgatcggcgagcagcaggtgcttggtcaggtgcgccgcgcctatgccgtcgccgaatccaaccgcacggtcggccgcgtgctgcacgaattggcccagcgggcgctgtcggtgggcaagcgagtgcactccgaaaccgccattgacgctgccggtgcctccgtggtgtcggtcgccctgggaatggccgagcgcaaattgggctcgttggcgggcacgaccgcggtggtgatcggcgccggggcgatgggcgcgctgtcggcggtacatctgacccgtgccggcgtcgggcacattcaggtgctcaaccggtcgttgtcccgggcgcagcggttggcccgaaggatccgcgaatctggcgtgccggccgaggcgctagcgctcgaccgcctggctaatgtcctggccgatgccgacgtggtggtcagctgtactggggcggtgcgtccggtggtgtcgctggccgatgtgcatcatgcgctggccgccgcccgccgtgacgaggccacccgtccgttggtgatatgcgacttgggcatgccgcgtgacgtcgatcctgcggtggccagattaccgtgtgtgtgggtcgtggacgtggatagcgtgcaacatgaaccctcggcacatgccgcggctgccgacgttgaggccgcccgccacatcgtcgccgccgaagttgccagctatctggtggggcagcggatggccgaggtcaccccaaccgtgacggcgttgcgccagcgagccgccgaagtggtcgaagcggaattgctgcgcctggacaaccggctgcccggcctgcagagtgtccagcgcgaggaggtggcccgcaccgtacggcgagtcgtggacaagctgttgcacgcgcctaccgtgcggatcaagcagctcgccagtgcgcccggcggtgacagctacgccgaggcgctgcgcgaactcttcgagcttgaccagaccgccgtcgatgccgtcgccactgcaggtgaattaccggtggtgccaagcggattcgacgctgaaagtcgccgcggtggaggcgacatgcaaagcagcccgaagcgatcgccgagtaac

SEQ ID NO: 26412 - DNA, 969 bp, Mycobacterium bovis
atggatcgacagagtgctgtagcgcagctgcgtgcggctgcggagcagttcgctcgggtccatctcgacgcctgcgaccgttggagcgtggggctctccggcggcccggactcgttggcgctcaccgctgtagccgcacggctgtggcccaccaccgcactgatcgtggaccacggtctgcagcccggctcggccacggtcgcggaaacagctcgcatacaagcgatttcgctgggatgtgtggacgcgcgggtgctttgcgttcaagtgggcgcggccggcggccgggaggcggcggcgcgcagcgcccgctactcggcattggaggagcaccgcgatggcccggtgctgttggcccatacgctcgatgatcaggccgagacagtgttgttggggcttggccgtggttcgggggcccggtcgatcgccggcatgcgtccgtacgatccgccctggtgccggccgctgctgggggtgcgccgcagcgtgacacatgcggcctgccgggagctgggcctgaccgcctggcaggatccgcacaacaccgaccgccgcttcacccgaacccgattgcgcaccgaagtgctgccactgctggaggacgtgctgggcggaggtgtggccgaagcgctggctcgcaccgcgacagcgttgcgcgaggacactgacctcatcgacacgatcgctgcgcaggcgctgcccggagccgctgttgctggctcacggggacaggagttgagtaccagcgccttgaccgcgctgccggatgcggtgcggcgccgggtgattcggggctggctgctggccggcggcgcgaccggactgaccgacaggcagatccgcggagtggaccggctggtcaccgcgtggcgcggtcagggcggggtagcggttgggtccacgttgcgcggtcagcgactggtcgccgggcggcgcgacggcgtacttgtgttgcggcgcgagcccgtt

SEQ ID NO: 26413 - DNA, 1446 bp, Mycobacterium bovis
ttgctggcccaggggcgcgatccctatcccgtcgcggtgccgcgcactcacacgttggccgaggttcgcgccgcccaccctgacttgccgatcgataccgcgaccgaagacatcgtcggcgtcgcgggccgagtgatctttgcgcgcaactcgggaaagctatgctttgcgacacttcaggacggcgatggtacccagctgcaagtgatgatcagcctcgacaaggtcggccaggctgctctcgacgcatggaaagccgatgtcgacctgggcgacatcgtctacgtgcatggcgcggtgatcagttcgcgccgcggcgagctgtccgtcctggcggattgctggcggatcgccgccaagtcgctgcggccgcttcccgtcgcgcacaaagagatgagtgaagagtcgcgggttcgtcagcgctatgttgacctcatagttcgaccggaagcgcgcgcggtggctcgactacggatcgccgtcgtccgcgcgatccggacggcgcttcaacgtcgtgggttcctggaagtcgagacgcccgtcttgcagacgttagccggtggtgcggcggcccgtccgttcgccactcattccaatgccctagacatcgatctgtacctgcggatcgcgccggaactgttcctcaagcgctgcatcgtgggtggtttcgacaaggtcttcgaacttaatcgagtgttccgaaacgaaggagccgattccacgcattctccggaattctccatgctggagacctaccagacctacggaacctatgacgattcggcagtcgtcacccgggagcttattcaagaggtggccgatgaggcgatcggaaccagacaactgccgttgcccgacggcagtgtctatgacatcgacggagaatgggcgactatacaaatgtacccgtcgctgtctgtggcgctcggtgaagagatcacaccgcagacgacggtcgatcgcttacgtgggatcgccgatagccttggcctggagaaagacccagcgattcatgacaaccgtggcttcggccacggcaaactcatcgaggaactctgggagcgcacagtgggcaagagcttgagcgcacccacatttgtcaaggattttccggttcagacaacgcctttgacccgtcagcaccgcagtatccccggcgtaaccgagaagtgggacctctatctgcgcggaatcgaacttgccaccggctactcggaattaagcgacccggtagtccagcgggagagattcgccgaccaggcccgtgccgcggccgctggcgatgacgaagcgatggtgcttgacgaggattttctggccgctctggagtacggcatgccaccgtgcaccggaaccggaatgggtatcgatcggttgttgatgtctttgactgggttgtcaattagggagacagttttgttcccgattgttcgaccacactccaac

SEQ ID NO: 26414 - DNA, 513 bp, Mycobacterium bovis
atgaaccagaccaatgatcgccagcaagcggtgatcgatgcactggtgggtgccggcctggaccgcaaggacatccgcaccaccagggtcaccgtggcaccgcagtacagcaatccggagccggccggaaccgccaccatcaccgggtatcgggcagacaacgacatcgaggtgaagatccacccgaccgacgccgcgtcgcggctgctggccctcgtcgtcagcaccggcggtgacgccacccggatcagctcggtcagctactcgattggcgacgactcgcagctggtgaaggatgcccgggcgcgcgccttccaagacgccaagaaccgtgcggaccagtacgcacaactgtcggggctgcggctaggcaaggtgatctcgatctccgaggcatctggcgccgcgcccacgcacgaggcgccggcgccgccgcgcggcctatccgcggtgccgctggaacccggccagcagacggtgggcttctcggtcacggtggtctgggaactgacc

SEQ ID NO: 26415 - DNA, 2544 bp, Mycobacterium bovis
atgttcgaacgatttaccgaccgtgcccgcagggtcgtcgtcctggctcaggaagaggccaggatgctcaaccacaactacatcggcaccgagcacattcttttaggcctgatccatgaaggggaaggcgttgccgccaagtcactggagtcgttggggatctcgctggaaggtgtgcgcagtcaggtcgaggagatcatcggccagggccagcaggcgccgtctgggcacattccgtttaccccccgcgccaaaaaggtcctcgagctgagcttgcgtgaagcgctgcagcttggccacaactacatcgggaccgaacacattttgctgggcctcatccgagagggtgaaggcgtggccgcccaggtgctggtcaagctgggcgccgagctgacccgggtgcgccagcaggtgatccagctgctctccggttaccaaggcaaggaggccgccgaagccggcaccggcggccgcgggggagagtccggctctccgtctacgtccttggtgctcgaccagttcggccgcaacctcacggcggcggcgatggaaggcaaactggacccggtcatcggccgcgagaaggaaatcgagcgggtcatgcaggtgctctctcggcgcaccaagaacaacccggtgctgatcggcgagcccggcgtcggcaagaccgcggtcgtcgaaggactggcgcaggccatcgtgcacggcgaggtgcccgagacgctcaaggacaagcagctctacacgctggatctgggatcgctggtggcgggtagccgctaccgcggtgacttcgaggaacgcctcaagaaggtgctcaaggagatcaacacccgcggtgacatcatcctgtttatcgacgagctgcacaccttggtcggtgctggagccgccgagggcgcgatcgacgccgcctcgatcctgaaaccgaagctcgctcgcggtgaactgcaaacgatcggcgccaccacgctcgacgaataccgcaagtacatcgagaaggacgccgcgctggagcgccgcttccagccggtgcaggtgggtgagccgacggtggagcacaccatcgagatcctcaagggcctgcgggaccggtacgaggcgcaccaccgggtgtcgatcaccgatgcggcgatggtggccgccgcgaccctggccgaccgctacatcaacgaccggttcctgcccgacaaggcgatcgacctgatcgacgaggcgggtgctcggatgcggattcgtcgcatgaccgcaccgccagacctacgcgagttcgatgagaagatcgccgaggctcgtcgggagaaggaatcggctatcgacgcccaggacttcgagaaggccgccagcctgcgcgaccgggagaagacactggtcgcacagcgtgctgagcgcgaaaagcagtggcgttcaggcgatcttgacgtggtcgcggaggtcgacgacgagcagatcgccgaggtgctgggcaactggaccggtatcccggtgttcaagctcaccgaggccgagaccacccggctgttgcggatggaagaagagctgcacaagcggatcatcgggcaagaggacgccgtcaaggccgtttccaaggccatccggcgtacccgggccgggctgaaagaccccaagcgcccgtcgggctcgttcatcttcgccggcccgtccggtgtcggtaagaccgaactgtccaaggcgctggccaacttcttgttcggtgacgacgacgcgcttattcagattgacatgggtgaattccacgaccggttcaccgcgtcgcggctattcggcgcgccgcccggatacgtcggctacgaggagggcggccaactcaccgagaaggtgcggcgcaagccgttctcggtggtgctgttcgacgagatcgagaaggcgcatcaggagatctacaacagcctgctgcaggtgctcgaggatggccggctcaccgacgggcagggccgcacggtggacttcaagaacaccgtgctgatctttacgtccaatctgggcacctccgacatctctaagccggtcggtctgggcttttccaagggcggcggtgagaacgactacgagcggatgaaacagaaggtcaacgacgagctgaagaaacacttccgcccggagttcctcaaccgcatcgacgacatcatcgtcttccaccagctgacccgcgaggagatcatccggatggtcgacctgatgatcagccgggtcgccggccagctcaagagcaaggacatggcgctggtgctgaccgatgcggccaaggcgctgctggccaagcgtggcttcgacccggtgctgggggcccgcccgttgcggcgcaccatccagcgtgagatcgaagatcagctctcggagaagatcctcttcgaggaggtcgggccgggtcaggtggtcaccgtcgacgtggacaactgggacggtgaaggtcccggcgaggacgcggtgttcaccttcaccggtacccgcaagccgccggccgagccggatctggccaaggctggagcgcacagcgcgggcggcccggagccggccgcgcgg

SEQ ID NO: 26416 - DNA, 633 bp, Mycobacterium bovis
gtgccgcatccatgggacaccggcgatcacgaacggaattggcagggctacttcatccccgctatgtccgtcttgaggaaccgggtcggcgctcgaacgcatgccgaactgcgtgatgccgagaacgacctcgttgaggcccgggtgatcgaactccgcgaggatcccaatctgctgggcgaccgcacagatctcgcatacctgcgggcgattcaccgccagctgttccaggacatttacgtctgggcgggagatctgcggacagtcggcatcgagaaggaggacgagtctttctgcgcgccgggcggcatcagtcggcccatggagcatgtggctgcggagatctaccagctcgaccggctcagagcggtcggcgaaggtgatctcgctggccaggtcgcataccggtacgactacgtgaactatgcccacccgttccgcgagggcaacggccgctcgacccgcgagttcttcgatctcctgttgtccgaacgcggttctggcctcgactgggggaagaccgacctggaagagttgcacggcgcttgtcacgtggcgcgcgccaactctgatctcacgggcctggtcgcgatgttcaaggggatcctcgacgccgagcccacttacgacttc

SEQ ID NO: 26417 - DNA, 1789 bp, Mycobacterium bovis
gtcgttcttttacttcagcgacgacacccgcggctacaagcccgttgatacctcggtggcgataacacagatcaacggcgacaacgtcaagagcgcacagatcgacgatcgcgagcaacagctgcggctgatcctgaagaagggtaacaacgagaccgacgggtccgagaaggtcatcaccaagtaccccaccgggtacgccgtcgacctgttcaacgcgctcagcgccaaaaacgcgaaggtcagcacggtcgtcaaccagggcagcatcctgggcgagctgctggtctacgtgctgccgctgctgttgctggtggggctgttcgtgatgttctcccgcatgcaaggcggcgcccggatgggcttcgggttcggcaagtcacgcgccaagcaactgagcaaggacatgcccaagaccaccttcgccgacgtcgcaggtgtcgacgaggcggtcgaggagctctacgagatcaaggacttcctgcagaaccccagcaggtaccaagcgctgggcgccaagatccccaaaggcgtgctgctctacgggccgccgggaaccggtaagacgttgctggctcgtgcggtggccggcgaagccggagtgccgttcttcaccatctccggctccgacttcgtcgaaatgttcgtcggcgtcggcgcatcccgtgtcagagacctgttcgagcaggccaagcagaacagcccgtgcatcatcttcgtcgacgagatcgacgccgtcggccgacaaagaggcgccgggctgggcggcggtcacgacgagcgtgagcagaccctcaaccagttgctagtcgaaatggacggttttggcgatcgcgccggcgtcatcctgatcgcggccaccaaccggcccgacatcctggacccggcgctgttgcggccgggccgcttcgaccgccagatcccggtatccaaccccgatctggcgggtcggcgggcggtgctgcgcgtgcactccaagggcaagccgatggccgcggacgccgacctcgacggactggccaagcggaccgtcggcatgaccggagccgacctggccaacgtcatcaacgaggcggcgctgctgaccgcccgggagaacggcaccgtcatcaccggtcccgccctcgaggaagcggtggaccgggtgatcggcggcccgcgccgcaaaggccggatcatcagcgagcaggagaagaagatcaccgcctatcacgagggcgggcacaccctggccgcttgggcgatgcccgatatcgagccgatttataaggtgacgatcctggcgcgcgggcgtaccggcgggcacgcggtggcggtgccggaagaagacaagggcctgcggacccgctcggaaatgatcgcgcaactggtgttcgcgatgggtgggcgcgccgccgaagaactggtgtttcgtgagccgaccaccggcgcggtgtccgacatcgagcaggccaccaagatagcgcgctcaatggtcaccgaatttggaatgagctccaagctgggcgcggtcaaatacggctccgaacacggcgacccgttcctcggacgtaccatgggcacccagccggactactcccacgaggtcgcccgcgagatcgacgaagaggtccgcaagcttatcgaggcggcgcataccgaagcgtgggaaatcctgaccgaataccgcgacgtgctggacactttggccggcgagctgctggaaaaggagaccctgcaccgacccgagctggaaagcatcttcgctgacgtcgaaaagcggccgcggctcaccatgttcgacgacttc

SEQ ID NO: 26418 - DNA, 840 bp, Mycobacterium bovis
gtgagtccggcgcccgtgcaggtgatgggggttctaaacgtcacggacgactctttctcggacggcgggtgttatctcgatctcgacgatgcggtgaagcacggtctggcgatggcagccgcaggtgcgggcatcgtcgacgtcggtggtgagtcgagccggcccggtgccactcgggttgacccggcggtggagacgtctcgtgtcatacccgtcgtcaaagagcttgcagcacaaggcatcaccgtcagcatcgataccatgcgcgcggatgtcgctcgggcggcgttgcagaacggtgcccagatggtcaacgacgtgtcgggtgggcgggccgatccggcgatggggccgctgttggccgaggccgatgtgccgtgggtgttgatgcactggcgggcggtatcggccgataccccgcatgtgcctgtgcgctacggcaacgtggtggccgaggtccgtgccgacctgctggccagcgtcgccgacgcggtggccgcaggcgtcgacccggcaaggctggtgctcgatcccgggcttggattcgccaagacggcgcaacataattgggcgatcttgcatgcccttccggaactggtcgcgaccggaatcccagtgctggtgggtgcttcgcgcaagcgcttcctcggtgcgttgttggccgggcccgacggcgtgatgcggccaaccgatgggcgtgacaccgcgacggcggtgatttccgcgctggccgcactgcacggggcctggggtgtgcgggtgcatgatgtgcgggcctcggtcgatgccatcaaggtggtcgaagcgtggatgggagcggaaaggatagaacgcgatggc

SEQ ID NO: 26419 - DNA, 564 bp, Mycobacterium bovis
atgacgcgggtagtgctctcggttggctccaacctgggtgaccgcctggcacgattgcggtcggtcgccgacggtctcggcgatgcgttgattgcggcttccccgatatatgaggccgacccctggggtggggtggagcaggggcagttcctcaatgcggtgctgatcgccgacgatcctacctgcgaaccgcgggagtggctgcggcgggcgcaggagttcgagcgcgctgcgggcagggtgcgtggccagcgctggggtccacgaaatctcgacgtcgacctgatcgcctgctaccagacctcggccaccgaggctctggtcgaagtgaccgcgcgggagaaccacctcacgctgccgcacccactggcgcatctgcgggcctttgtgttgatcccgtggattgccgtcgacccaacggcgcagctgacggttgccgggtgcccgcggcccgtcacgcgactgctggccgagctggagcccgccgaccgcgacagtgtgcggttgtttaggccgtcgttcgatctgaatagcagacaccccgtcagtcgggcaccggaaagc

SEQ ID NO: 26420 - DNA, 1333 bp, Mycobacterium bovis
cgtggtcgtcggcgcggccgtgctggcgtttgtcgccgttgtggtggcggccgcagcgctggtcactactggtggtcaccgggctggcgtgcgcgcacctgtgcctccaccgcggccacccacagtcaaggcgggagtggtccctgtggcggacaccgctgcgacaccgagtgccgctggcgtgaccgcggcgcttgcggtggtggcggtcgatcctgatctgggcaagttagcaggtcggatcaccgatgccctgaccggacaagaactttggcagcggctagacgacgtgcccttggtgccggcttcgaccaacaaaatcctgacggcggcggcggctctgctgacactggaccgacaggcccggatcagcacgcgggtggtggccggcggccagaacccccagggacctgtcgtgttggtgggcgcgggcgatccgacgctgtcggcagcgccgcccggtcaggacacctggtatcacggcgcggctcgcatcggtgacctcgtcgaacaaattcgccgcagcggtgtgacgcccaccgccgtgcaggtggacgcttcggcgtttagcggtccgacgatggcgccgggttgggatccggccgatatcgacaacggtgacatcgcgccgatcgaagcggcgatgatcgacgccgggcgtatccagccgaccaccgtcaattcgagacggtcccgcaccccggcgctggatgccggtcgggagttggccaaagcccttggcctggaccccgcggcggtgacgatcgcatcggctccggccggcgcgcggcagctggccgtggtgcagtcggcgccgttgatccagcgactgtctcagatgatgaacgcctccgacaatgtgatggccgagtgcatcggccgcgaggtagcggtcgcgatcaaccggccgcagagctttagtggcgcggtcgacgcggtgaccagccgattgaacaccgcacacatcgacaccgccggcgctgcgctggtggattctagtggattgtcgctcgacaaccgcctgaccgctcggacgctcgatgcaacgatgcaggccgcggctggacccgaccagcccgcgttgcggccgctgctggatctgctaccgatcgccggtggcagtggcacgctgggcgagcgcttcctcgacgcggccaccgaccagggtccggccgggtggttgcgggccaagaccggctcgctgaccgcgatcaactcgctagtcggggtgctcaccgaccgtagcggccgagtgctcaccttcgcgttcatctccaacgaagccggtcccaacggtcgcaacgcgatggacgctctggccactaagttgtgg

SEQ ID NO: 26421 - DNA, 2985 bp, Mycobacterium bovis
gtgggtaatctgtttgcagccggtttgcgcaggcccgccctagagtgcgagattgtcagttgcccacaggcgagggaacgccggcgtaccggaattcacctgggattcggcagtcggccgcgtcctctacctaccggggcggtctcgataggggccgggataagagatggagcgtgggcgcagttggctgacccgaaaacgaagggccgtggcagcggcggcaatggcagcggccggcgactggtcatcgtcgagtcgcccaccaaggcgcgcaagctggcctcctacctgggctctggctacatcgtcgagtcctcccgggggcacatccgtgacttgccgcgggccgcgtcggatgtacccgcaaagtacaagtcgcagccgtgggcgcggctcggggtcaacgtcgacgccgacttcgaaccgctctacatcatcagcccggagaaacggagcaccgtcagcgagctcaggggcctgctcaaagacgtggacgagctgtatctggccacggatggggaccgtgagggcgaagctattgcctggcatctgctggaaaccctcaaaccgcgcataccggtaaagcggatggtcttccacgagatcaccgaaccggcgatccgcgccgccgccgagcacccccgcgacctagacatcgacctggtcgacgcgcaggagacccggcgcatcctggaccggctgtacggctacgaagtcagcccagtgctgtggaagaaggtcgcccccaagttgtcggcgggccgggtgcagtcggtggccacccgcatcatcgtggcgcgcgaacgcgaccgcatggcgttccgcagcgcggcctactgggacatccttgccaagctggatgccagcgtgtccgacccggacgccgcgccgcccaccttcagcgcccggctgacggccgtggctggccggcgggtggccactggccgcgatttcgactcgctgggcacgctgcgcaaaggcgacgaagtcattgtgctcgacgaggggagcgcgaccgcgttggccgcgggcctggatggcacgcagctgaccgtggcctcggccgaggagaagccctacgcccggcgcccgtacccgccgttcatgacctccacgctgcagcaagaggccagccgcaagctgcggttctccgccgagcggacgatgagcatcgcccagcggctgtacgaaaacggctacatcacctatatgcgtaccgactccaccacgctgtcggagtcggcgatcaacgccgcacgtacccaggcgcgccagctctacggcgacgagtacgtcgcgccggcgccgcgccaatacacccgcaaggtgaagaacgcccaggaagcgcacgaggctatccggcccgccggtgaaacgtttgccaccccggacgcggtgcgtcgcgaactcgacggtcccaacattgatgatttccggctctatgagctgatttggcaacgcaccgtagcctcgcagatggccgatgcgcggggcatgacgctgagcctgcggatcactggcatgtcggggcaccaggaggtggtgttctccgcgaccggacgcaccttgacgttcccgggcttcctcaaggcctacgtggagaccgtggacgagctggtcggcggcgaggctgacgatgccgagcggcgactgccccatctgaccccgggtcaacggttggacatcgtcgagttgaccccagacggccatgccaccaacccgccggcccgctacaccgaggcgtcgctggtcaaagcgctcgaggagctgggcatcggccgcccgtcgacctactcgtcgatcatcaagaccatccaggatcgcggctacgtgcacaagaagggcagtgcactggtgccgtcatgggtggcgttcgcggtaaccggtctgctcgagcagcatttcggtcggctcgtcgactacgacttcaccgcggcgatggaagacgagctcgacgagatcgccgccggcaacgagcgccgcaccaactggctcaacaacttctactttggtggcgatcacggtgtgcccgattcggtagcccgatcgggtggcctcaagaagcttgtcgggatcaatctcgagggcatcgacgcacgagaagtaaactctatcaagctttttgacgacacccacggacgccccatatatgttcgggtgggcaagaacggtccctacctggaacgtttggtggccggcgacaccggtgagcccacgccgcagcgggccaacctcagcgactcgattaccccggacgagctgactctacaggtggccgaagagctctttgccacaccgcaacagggacggactttgggcttggacccagaaaccggccacgagatcgtggccagggaaggccggtttgggccgtatgtgaccgagatcctgccggagcctgcggctgatgcggccgcggccgctcagggagtcaagaaacgccagaaggccgccgggcccaaaccgcgcaccggttcgttgctgcggagcatggacctacagacggtcaccctcgaagacgcgctgaggctgctgtcactgccgcgcgtggtcggagtggaccccgcctcgggtgaggagatcaccgcgcagaacgggcgctacggaccgtatctaaagcgcggcaacgattctcgatcactggtcaccgaagaccagatattcaccatcacgctcgacgaagccctgaagatctacgcagagccgaaacgtcgtggccggcaaagcgcttcggctccgccgctgcgcgagctgggaacagatccggcgtcgggcaagccaatggtcatcaaggacggccgattcgggccgtacgtcaccgacggtgagaccaatgccagcctgcgtaagggcgacgacgtggcttccataaccgacgagcgcgccgccgagctgttggccgatcgccgagcccggggtccggcaaaacggccagccaggaaagctgcccggaaggtgccggcgaagaaggcagccaagcgcgac

SEQ ID NO: 26422 - DNA, 846 bp, Mycobacterium bovis
gtgaccaccgcccataacggatccgctccgcgttttcaacgtacccgctctggctacgacccggtcgcagtcaatcattacatcgccgaactcgtgctgcgtcagcaggcgcagcactgtgagattgaaacgctcaaggcagaaatagccagtctgaaggacgaaaacgctgccctgaaggacacctcgccgtcagcacaggcggtgaccgatcggatggcgaaaatgcttcgactcgctgtcgacgaggtcttccagatgcagtcggaggcacgggccgaggccgcaacattagtttctgcggctagggatgaggcggaagcggtccgaacgcagaagcgagaaatgctggcggatatgaacgcccggcaaagagcgctggagtccgagcatgccgacgtgatgcgccgcgctcgtgaagaggctgaacagcttgtggcgcaggcaaccgccgaggtggagcggatgcgtgtcatcgatgccagacgccgtgagaaagccgagcaggaacttgatgccgaaatcatcaggcttcgcaccgatgcccaatttcagatcgacgatcagctgcaggccacacagcaggagtgtgagaagcggcttggcgaagccaaaatcgaggccgatcgacggctgcatgttgccgacgagcagattgagcacggcctcagcgaggctcggcgaacgttggaagagatcagccagcggcgagtcggcatcctcgaacaactagcgcgtattcacgcacagctcgagaatattccagcgctcctggaatcggctcgacatagcgagacggagccactgcagtccataaacggcgccgtcgctgagctacgggccatt

SEQ ID NO: 26423 - DNA, 621 bp, Mycobacterium bovis
gtggcggcgccggacaacagccgcagacggcccgggcgacccgccggcagctctgacactagggagcgaatcctgtccagtgcccgagaactctttgcgcacaacggcattgacagaacatcgatccgagccgtggccgccaaggccggtgttgatgccgcactagtgcatcactacttcggcaccaaacagcagcttttcgccgccgcgatccacattccgatcgacccgatggtcatcatcggtccgattcgcgaggcgcctgtcgaggaactcggttacaagctgccgtccttgttgctgccgatttgggattccgaactgggtgccgggttgatcgcgacgctgagatccttgatctcaggctccgacgtgggcctggcgcgctccttccttgaggaagtggtcaccgtggagcttgggtcccgcgtcgacaacccgccgggaaccggcaagatccgtacccagttcgtcgcgtcgcaactgatgggtgtggtcatggcgcgctacatcgtcagaatcgaaccgtttgcttcgttgccggccgaacagatcgtgcaaaccatcgcgcccaacctgcagcgctacctcactggggagctgccggacgacctcgcgcca

SEQ ID NO: 26424 - DNA, 819 bp, Mycobacterium bovis
ttgaaaccgactgtgccggcgctcgtcgcgtgtgacgtcgacggaaccctgctcgatgacggagaaaccgtcaccaaacgcactcgcgacgcggtgcatgccgcggtagacgccggcacgcacttcatcctggccaccggccggccgccgcgctgggtgcgacccatcgtcgatgccctcggcttcgcgccgatggcggtgtgcgccaacggcgccgtcatctacgaccccgggaccgatcgggtgacgtcggtgcgcaccctgcccgtcgacgccctggcaacgttggccgaagttgcgacccgcgtcataccgggtgcgggactggcggtcgagcggatcggcgagcgcgcacacgacacggcgaccccccagttcgtcagctcgccgggctacgagcatgcgtggctgaatccggacaacaccgaagtgtcgatcgaccacctgctcagcgcgccggcgatcaaactgctgatccgtaaagccggtgctgccagtgccgacatggccgccgaactggctaagcatgtcggtttcgagggcgatatcacctactcgaccaataacgggctggtggagatcgtgccgctcggtatcagcaaggccaccggtgtcgacgagattgcccggccgcttggaatttccgacgcggaggtggtggcgttcggcgacatgcccaacgacgtgccgatgctgctgcgggccggtttgggtgtggcgatgggtaacgcgcatcccgacgcgctggccgtcgccgacgaggtcactgcacccaatagcgaggacggcgtcgcgcgggtgctggagcgctggtggtcc

SEQ ID NO: 26425 - DNA, 1065 bp, Mycobacterium bovis
gtggagtgggagttcgcgctcgttgactcgcagacccgcgatctgagcaatgaagccaccgcggttatcgccgaaatcggcgaaaacccgcgggtccacaaggaattgctgcgcaacaccgtagagattgtcagcggtatctgcgaatgtaccgccgaggcaatgcaggatctgcgcgataccctgggccccgcccgtcagatcgtgcgcgaccgcgggatggagctgttctgcgcgggtacccaccccttcgcgcggtggtcggcccagaagctcaccgacgcgccgcggtacgcggagctgatcaaacgcacccagtggtggggccggcagatgctgatctggggtgtacacgtgcatgtcgggattcgctcggcgcacaaagtgatgccgatcatgacgtcgctgctcaactactacccgcatctgttggcgctctcggcctcatcaccctggtggggtggcgaagacaccgggtatgccagcaaccgggcgatgatgttccagcagttgcccaccgccgggctgccgtttcactttcagaggtgggcggagttcgaaggtttcgtgtacgaccagaagaagaccggcatcatcgaccatatggacgaaatccgttgggatataagaccctcaccccatctgggcaccctggaggtgcggatctgcgatggcgtgtccaacctacgagagctcggcgcgctggtcgcgctgacgcattgcctgatcgtcgatctggaccgccgcttggacgccggcgaaacgctaccgaccatgcctccctggcacgtccaggagaacaagtggcgtgccgcccgctacggcctggacgcggtgatcatcttggacgccgacagcaacgaacggctggttaccgatgacctcgcggatgtgctgacccggctggagccggtcgccaagtcgctgaactgcgccgacgagcttgccgcggtctccgatatctaccgcgatggcgcctcctaccagcggcagctgcgagtggcgcagcagcatgacggcgatttgcgcgcggtagttgacgcgctggttgccgagctggtgatt

SEQ ID NO: 26426 - DNA, 1197 bp, Mycobacterium bovis
ttgcgtctgctcacgcaaggtggacccgctagcctgacccaggtgagccgggtcctgttggtaactaacgactttccaccccgacgcgggggcatccagtcctatctgggggagttcgtcggtcggctggtcggctcccgagcgcatgcgatgacagtgtatgcaccgcagtggaaaggcgccgacgccttcgacgacgcagcccgtgctgccggttaccgggtggtgcgccatcccagcacggtgatgctgccgggtccaacggtcgatgtccggatgcgccggctgatcgccgagcacgacatcgaaaccgtctggttcggtgcggccgcaccgctggccctgctggccccgcgtgcccggctggctggagctagccgggtgttggccagcacgcacggccacgaagtgggctggtcgatgcttccggtcgctcgatcggtgctacgccgcatcggcgacggcaccgacgtggtgactttcgtcagcagctacacgcggtcccggtttgcttctgcgttcgggcccgcggcttcgttggaatacctaccgccgggagtggacaccgaccggttccgccccgatccggccgcacgcgccgagttgcggaagcgctatcggctaggcgagcggcccacggtagtgtgtctgtcgcggttggtgccgcgcaaaggccaggacaccctggtcacggcgctcccgtcgatccggcgtcgcgttgatggagccgcgttggtgattgtcggcggcggtccatatctagagacgttgcgcaagctggctcacgactgtggggtggccgaccacgtgacgttcaccggcggcgtggcaaccgacgaacttcccgcccaccacgcactggccgacgtgttcgccatgccatgccgcacccgcggcgccgggatggacgtcgagggcttgggcatcgtgttcctcgaagcctccgccgccggcgtgccggtaatcgccggcaattctggcggagcgccggaaacggtgcagcacaacaagactgggctagtggtcgacggtaggtcggtggaccgggtggccgacgccgtggccgagttgctgatcgatcgggatcgggccgtcgcgatgggcgccgccggccgagaatgggtcacggcgcagtggcgttgggacacgctggccgccaagctagcagattttctgcgcggcgacgatgcggcccgt

SEQ ID NO: 26427 - DNA, 828 bp, Mycobacterium bovis
gtggacatgacatgggccgacgaggtgctcgccggacatccctttgtggttgctcaccgtggtgcgtcggcggctcggccggagcatacccttgccgcctacgacctggcgctcaaagagggcgccgacggcgtggaatgtgatgtgcggttgacccgggacgggcatctggtctgtgtgcatgaccgccgcctggaccgaacctcgacgggagccggcttggtcagcacgatgacgctggcccagctacgcgagctggagtacggcgcgtggcacgacagctggcgccccgacggttcgcacggcgacaccagtctgctgaccctggacgcgcttgtttcgctggttttggactggcaccggccggtgaagatcttcgtcgagaccaagcatcccgtccgatacggctcgctggtggaaaacaagctgctggcgctgctacaccggttcggtattgccgcacccgcctccgcagatcgatcccgtgcggtggtgatgtcgttttcggccgccgcggtctggcggatccggcgggctgcaccgctgctgccgacggtgttgctcggcaagaccccccgatacctgaccagcagtgcggccacggcggtcggggcaaccgccgtgggaccctcactgcctgcgttaaaggaatatccgcaactcgttgaccgctcggcagctcagggccgggcggtgtactgctggaacgtcgatgagtacgaggacatcgacttttgccgggaggtcggggtggcctggattggtactcaccaccccggccgcaccaaggcctggctggaagacgggcgggcgaacgggaccactcgc

SEQ ID NO: 26428 - DNA, 966 bp, Mycobacterium bovis
atgaccggcaagcgcgttgagcgggtgcacgcaatcaattggaaccggttgctcgatgctaaagatttgcaggtctgggaacgtttgaccggtaacttttggttgccggaaaagattccgctctccaacgacctggcatcttggcaaacgttgagttccaccgagcagcagacgacgatccgggtgttcaccggcttgaccctgctcgacaccgcgcaggcgacggtgggagcagtggccatgatcgacgacgcggtcaccccccacgaagaggcggtcctgaccaacatggcgttcatggagtcagtgcacgccaagagctacagctcgatcttctcgaccctgtgctcgaccaagcagatcgacgatgccttcgactggtcggaacagaacccttacctgcagcgaaaagcgcagatcatcgtcgactactaccgcggtgacgacgcgctcaagcgcaaagcatcgtcggtaatgctggagtccttcctgttctactccggcttctacctgcccatgtactggtcgtcgcggggtaagctcaccaacaccgccgatctgatccggctgatcatccgagatgaagccgtccacggctactacatcggctacaaatgtcaacgaggtttggccgacctgaccgacgccgagcgggccgaccaccgcgaatacacctgcgagctgctgcacacgctctacgcgaacgagatcgactatgcgcacgacttgtacgacgagttgggctggaccgacgacgttttgccctacatgcgttacaacgccaacaaggcgctagccaacctgggataccagcctgcattcgatcgtgacacctgccaggtgaacccggccgtgcgcgcagctctcgaccccggtgcaggggagaaccacgactttttctccggctccggaagctcatacgtaatgggcacccaccaacccaccaccgacaccgactgggacttc

SEQ ID NO: 26429 - DNA, 909 bp, Mycobacterium bovis
atggtggatccgcagcttgacggtccacagctggccgcattggctgccgtggtcgaactgggcagcttcgatgcggccgcggagcgcctacatgtcaccccctcggctgtcagtcagcgcatcaagtcgttggagcagcaggtcggccaggtgctggtggtcagggaaaagccatgtcgggcgacgaccgcaggtatcccgctgttgcggttggccgcgcaaacagcgttgctcgagtccgaggcgctcgctgaaatgggtggcaacgcgtcgctgaaacgcacgcggatcaccattgcggtaaacgccgattccatggcgacatggttttcggccgtgttcgacggtctcggcgacgtcctgctcgacgttcggatcgaggaccaggaccattccgcgcggctgctacgggagggtgtggcgatgggcgcggtgaccaccgagcggaacccggtgccgggctgccgggtgcacccgctgggtgaaatgcgctacctaccagtggccagcaggccattcgtccagcgccatctatccgacgggttcactgccgccgcggcggctaaagctccgtcactggcgtggaatcgtgacgatgggctgcaggacatgttggtgcgtaaggcctttcgtcgcgccatcaccagaccgacgcactttgtcccgaccacagagggcttcaccgccgcagcgcgcgccgggctgggatggggcatgttccccgagaagctggcagcatctccgcttgccgatggatcgttcgtacgggtctgcgacatacacctcgacgtccctctctattggcaatgctggaaactggacagtccgatcatcgcgcgaattaccgacacggtgagggcggcggcaagcggtctgtaccggggccagcaacgccgccgccgaccgggt

SEQ ID NO: 26430 - DNA, 4818 bp, Mycobacterium bovis
atggggtcggtgcacgacgtcatcgaggcgttccggaaggctccgtcgaacgcggagcgcgggaccaagttcgagcagttgatggtgcgctatttcgagctggacccgacgatggcccagcagtacgacgcggtgtggcggtggatcgactggccggagcggcggggcaggaccgacaccggaatcgacctggtcgcccgcgaacgtgacaccggcaactacaccgcgatccagtgcaagttctacgagccgacgcacacactggccaagggggacatcgactcgtttttcaccgcgtcgggcaagacgggcttcaccaaccgggtgatcatctccacgacggatcggtggggccgcaatgccgaggacgcgctggccgatcagttggtcccggtgcagcgcatcggcatggccgagatcgccgaatcgccgatcgactgggacatcgcctggccggccggcgacctgcaggtgaacctgaccccggccaaacgccacgagctgcggccgcaccagcagcaggcgatcgacgcggtgttccgcgggttcgcggtgggcaacgatcgcggcaagctgatcatggcctgcggcaccggcaagacgttcaccgcgctcaagatcgccgagcgcatcgccgccgacaacggcggcagcgcgcggattctgttgctggtgccctcgatttcgctgttgagccagacgctgcgggagtggaccgcacagagtgagctggatgtgcgggcgttcgcggtgtgctcggacaccaaggtgtcgcgctcggccgaggactaccacgtccacgatgtgccgatcccggtcaccaccgacgcgcgggtattgctgcacgaaatggcgcaccgcaggtgcgcccagggcctgaccgtggtgttttgcacctaccagtcgctgcccacggtggccaaggcccaacggctgggggtcgacgagttcgacttggtgatgtgcgacgaggcccaccgcaccaccggcgtgacgctggcgggggacgatgagtcgaacgtcgtgcgggtgcacgacggtcagtatctgaaggcggcccggcggctgtatatgaccgccacgccaaggattttcaccgagagcatcaaggacagggccgaccagcactccgccgagttggtgtcgatggacgacgagctgacgttcgggccggagtttcaccggctgtcgttcggcgaggcggtggagcgcgggctgctcaccgactacaaggtgatggtgctcaccgtcgatcagggcgtgatcgcgccccggttgcagcaggaactctccggggtttccggcgagctgatgctcgacgacgcctccaagatcgtcggctgctggaatggcctggccaagcggtccggtaccggcattgtcgccggtgagccgccgatgcgtcgggcggtggcgttcgccaaggacatcaagacgtccaagcaggttgccgagctgttcccgaaagtggttgaggcataccgcgaattggttgacgacggcccgggcctggcgtgttcggtgcgccacgtggacgggacgttcaacgcgctggtccgcaacgaacagctggcctggctcaaaggcgtggtcgccgaggatgaatgccgcatcctgtccaacgcccgctgcctctccgaaggggtcgacgtgcccgcgctggacgcggtgctgttcctgaatccgcgcaattccatcgtcgacgtggtgcagtcggtcggtcgggtgatgcgcaagtcgcccggcaaggactacgggtacgtcatcttgccggtggcggtgcccgagggtgtcgagccgtctgccgcgttggccgacaacaaacggttcaaggtggtgtggcaggtcctcaacgcgttgcggtcgcacgacgagcgcttcgacgcgatggtgaacagcattgcgctgaacgtgaagccgacgaagaccggtgaaggcagcgacaagctgttgggcggtcacatcgggccgacctccgacgaggcgggacccgccgtcgcggagcagttggcgatgttctcgttgtcgcagtggcaggaagcgatctacgcgcgcatcgtcgacaaggttggcacccggacctattgggagcagtgggccgccgatgtcgccgacatcgccgcgacgctgaccacccgtatccacgccctgctcggcggcgccgacgctacggcggcggcggcgttcgagcagttcctggccgggctgcgcgataacctcaatgactcgatcacccccgatgacgcgatcagcatgctctcgcagcacctgatcaccaagccggtgttcgacgcgctgttcgccgggcatgacttcgcgtcgcacaacccggtgtcgcgggccatgcagaagatggtcgacaccgtcgggggtgccggcctggaggccgaaaccgctcggttggaaggcttttacgaatcggtgcgacggcgcgccggcgaggtcaccagcgccgagggcaagcagcaggtgatcgccgagctgtacgagaagttcttccgcatcggcttcaagaagcaggccgaggcgctggggatcgtgtacacgccggtcgaggtcgtggacttcattgtgcgggcggctgatttcgtgtcgcgcaagcatttcgggcgcgggctgaccgacgagggcgtgcatattctggacggcttcgccgggacgggcacattcattacccggctgctgcagtccgacctgatcacggccgccgacctcacccgaaagtactcgcaagagctgcacgccaacgagatcatgctgctggcgtactacatcgccgcggtgaacatcgagtcgacctaccatgctttggcgggcaagaccgccgacgccgacgcctatgagccgttccccgggatggcgctggccgacacgttccagatttccgaagccggggactcgatggacgcgatcatgttcccgtacaacaacgctcggatcttgcgacagctggcgacgccgatcagcgtgatcatcgggaatccgccgtactcggtggggcagagcagcgcgaacgacctgaacgccaacgtgaagtatccgacgttggacgggcggattgagcagacgtacgcgaagcggtcgacggcgcagctgaagaacagcctgtacgactcgtatattcgcgcgttccggtgggcgaccgaccgcattggtgacaacggtgttgtcggattcgtctccaatggtgggtacatagacggcaacacggcagacggcatgcggttgtcgctcgccgacgactacgcggcggtatatgtgtacaacctgcgggggaaccagcgcacagctggggaactctcacgccaggaaggcggcaaggtctttggcggggggagtcgcaacacggtggcgatcttccttggcatcaaggatccgaagcacagcgggccatgcgatgtcctttaccgcgacatcggcgattacctgagtcgcgaggagaagttgcggatcgtcggcgacggctacctcgacacggtggaatggcagacagtcacacccaacttgcacggtgactgggtcaaccaacgcgacgacgcgttcagcgcgtggccggttatcggcgacaagaaggctgctcttgacgtgacacgtgtcttcgcgaactattccgcgggcttgaagaccagccgggatgcgtggtgttacaacttttcacgtggtgcgctcgaggccaacatcggacgcacgatcgacttctacaactcggaggtcgaccggatcaacgagatccgcggaagggacgccaagaccccgccggttgacgccctcattaccgtggactcggccaagttcagctgggaccgcatcaacaagcggcaagtggcacaaggcattcgcatcgaattcgctcccgcgggaatgcggctcggcacgtaccgaccatttacgaaagagcacgcctacctcgaccccaaccagcagctcaacaactgtacctaccagcttccgtcgatgtttccgacgccggagcacgggaatgtcggttactacgtggttggcatgggctcagacaagcccttctcgtgtctgatgctaaacgctatccccgatctcgcattctggggctcaagcaacggtcaattcttcccgcgctggacctacgagaagaccgaaccacgtgacggcgaactcgatttcgagtccaccaccaacgccgaagtagacgaccacggctaccgccgcgtcgacaacatcaccggcgtcatcctcaagctctaccgcgacacgatcggcgaccaagtcaccaaagacgacatcttctactacgtctacggcctgctgcatgaccccgcctaccgcacaaaatacgccgctgacctcaagaagatgctcccgcacatcccaacaccggagacccgcgaacgcttcgaccagctcgccagcgccggccggaaactagccgacttacatgtcggctacgagtcggtcaagccgtatccccttgatgtgcaactcaaaccgggcgcagatccggaggaccgcgagacctggcgcgtcgaaaagatgaaatggaagtccaagcaagaccactcaacgatcatctacaactcgcgtgtcaccatcgccggcattcccgacgaggccgagcgatacctgctcggctcccgctccgcgctgggctggatcatcgaccgctaccgcgtcaccaccgacaaagcgtccggaatcgtcaacgaccccaacgactggtgcgacgagcacgcgaaccctacctacatcgtcgacctgatcaagaaggtgaccaccgtcagcgtcgagaccatgaagatcgtggacagcattgtggcacttgcatcagcgggttcggattcaacg

SEQ ID NO: 26431 - DNA, 2661 bp, Mycobacterium bovis
gtggtgctgctgctggagagcgatccatatcacgggctgtccgacggcgaggccgcccaacgactagaacgcttcgggcccaacaccttggcggtggtaacgcgcgctagcttgctggcccgcatcctgcggcagtttcatcacccgctgatctacgttctgctcgttgccgggacgatcaccgccggtcttaaggaattcgttgacgccgcagtgatcttcggtgtggtggtgatcaatgcgatcgtgggtttcattcaagaatccaaggcagaggccgcactgcagggcctgcgctccatggtgcacacccacgccaaggtggtgcgcgagggtcacgagcacacaatgccatccgaagagctggttcccggtgaccttgtgctgttagcggccggtgacaaggttcccgccgatttgcggctggtgcgacagaccggattgagcgtgaacgagtcagcacttaccggcgagtcgacgccggttcacaaggacgaggtggcgttgccggagggcacaccggtcgctgatcgtcgcaatatcgcgtattccggcacattggtaaccgcgggccatggcgccgggatcgtcgtcgcgaccggcgccgaaaccgaactcggtgagattcatcggctcgttggggccgccgaggttgtcgccacaccgctgaccgcgaagctggcgtggttcagcaagtttctgaccatcgccatcctgggtctggcagcgctcacgttcggcgtgggtttgctgcgccggcaagatgccgtcgaaacgttcaccgctgcgatcgcgctggcggtcggggcaattcccgaaggtctgcccaccgccgtgaccatcaccttggccatcggcatggcccggatggccaagcgccgcgcggtcattcgacgtctacccgcggtggaaacgctgggcagcaccacggtcatctgcgccgacaagaccggaacgctgaccgagaatcagatgacggtccagtcgatctggacaccccacggtgagatccgggcgaccggaacgggctatgcacccgacgtcctcctgtgcgacaccgacgacgcgccggttccggtgaatgccaatgcggcccttcgctggtcgctgctggccggtgcctgcagcaacgacgccgcactggttcgcgacggcacacgctggcagatcgtcggcgatcccaccgagggcgcgatgctcgtcgtggccgccaaggccggcttcaacccggagcggctggcgacaactctgccgcaagtggcagccataccgttcagttccgagcggcaatacatggccaccctgcatcgcgacgggacggatcatgtggtgctggccaagggtgctgtggagcgcatgctcgacctgtgcggcaccgagatgggcgccgacggcgcattgcggccgctggaccgcgccaccgtgttgcgtgccaccgaaatgttgacttcccgggggttgcgggtgctggcaaccgggatgggtgccggcgccggcactcccgacgacttcgacgaaaacgtgataccgggttcgctggcgctgaccggcctgcaagcgatgagcgatccaccacgagcggccgcggcatcggcggtggcggcctgccacagtgccggcattgcggtaaaaatgattaccggtgaccacgcgggcaccgccacggcgatcgcaaccgaggtggggttgctcgacaacactgaaccggcggcaggctcggtcctgacgggtgccgagctggccgcgctgagcgcagaccagtacccggaggccgtggatacagccagcgtgtttgccagggtctctcccgagcagaagctgcggttggtgcaagcattgcaggccagggggcacgtcgtcgcgatgaccggcgacggcgtcaacgacgccccggccttgcgtcaggccaacattggcgtcgcgatgggccgcggtggcaccgaggtcgccaaggatgccgccgacatggtgttgaccgacgacgacttcgccaccatcgaagccgcggtcgaggaaggccgcggcgtattcgacaatctgaccaagttcatcacctggacgctgcccaccaacctcggtgagggcctagtgatcttggccgccatcgctgttggcgtcgccttgccgattctgcccacccaaattctgtggatcaacatgaccacagcgatcgcgctcggactcatgctcgcgttcgagcccaaggaggccggaatcatgacccggccaccgcgcgaccccgaccaaccgctgctgaccggctggcttgtcaggcggactcttctggtttccaccttgctcgtcgccagcgcgtggtggctgtttgcatgggagctcgacaatggcgcgggcctgcatgaggcgcgcacggcggcgctgaacctgttcgtcgtcgtcgaggcgttctatctgttcagctgccggtcgctgacccgatcggcctggcggctcggcatgttcgccaaccgctggatcatcctcggcgtcagtgcgcaggccatcgcgcaattcgcgatcacatatctacccgcgatgaatatggtgttcgacaccgcgccaatcgatatcggggtgtgggtgcgcatattcgctgtcgcgaccgcaatcacgattgtggtggccaccgacacgctgctgccgagaatacgggcgcaaccgcca

SEQ ID NO: 26432 - DNA, 1260 bp, Mycobacterium bovis
ttggatgcggtggtgatcgggcttgggtccatgatcggtgccggaatctttgccgccctggccccggccgcgtacgcggccggttctgggttgttgctcgggttggcagtggccgcggtggtggcctactgcaatgcgatctcgtcggcgcggctggccgcgcgctacccggcctcggggggcacctatgtgtatggccggatgcggctgggcgacttctggggatacctggcgggctggggctttgtggtcggcaagacggcatcgtgtgcggcgatggcgttgacggtcggcttctatgtgtggcccgcgcaagcgcacgcggtggccgtcgccgtggtggtggcactgaccgcggtgaactacgccgggatacagaagtccgcctggctcacccggtcgatcgtcgccgtggtgttggtggtcttgaccgcagtcgtggtcgccgcctatggctccggcgctgcggacccggcgcgactcgatatcggtgtagatgcacacgtctgggggatgctgcaggcggccggcctgctgtttttcgcgttcgccggctatgcccgcatcgccacgctgggggaggaggtccgcgacccggcccgcacgatcccacgcgccatcccgctggcgctgggcatcaccctggcggtgtatgccctggtcgccgtggccgtgatcgctgtgttgggtccgcagcggctcgcgcgggccgccgccccgttgtcggaggccatgagggtcgcgggggtgaactggctgattcccgtcgtgcagataggggccgcggtggccgcattgggctcgctactggccttgattctcggggtctcccgcaccaccttggcgatggcacgcgaccggcacctaccgcgctggctggccgccgtgcaccctaggttcaaggtgccctttcgtgccgaactggtggttggcgcggtggtggcggcgctggcggcgacagcggatatccgtggtgcgatcggcttttcgtccttcggtgtgctggtctactacgcgatcgccaacgcctccgccttgactctggggctcgacgagggccggccccgccgcctgattccgctggtgggactgatcggctgcgtagtcctggcgttcgcgctgccactctcctcggtggccgccggggccgcggtgctcggtgtcggtgtggcggcatacggtgtgcgccgcatcatcactcgtcgagcacgacagactgattctggtgatacccaacgaagtggtcatccgtccgcaacc

SEQ ID NO: 26433 - DNA, 3123 bp, Mycobacterium bovis
gtgaccgataacgcatatccaaagctggccggcggggcacccgacctcccggcactcgaactcgaggtcctcgactactggtcccgtgacgacaccttccgggccagcattgctcgccgcgatggcgcccccgagtatgtgttctatgacgggccgccgtttgccaacggtctgccgcattatgggcacctgctcaccggctacgtcaaagacatcgtgccgcgatatcgcactatgcgcggttacaaggtggagcgtcgcttcggctgggacactcacgggctgcccgccgaactcgaagtcgagcgccagcttggcatcactgacaaatcccagatcgaggccatgggtatcgccgccttcaacgatgcctgccgcgcatccgtgttgcgctacaccgacgagtggcaggcgtatgtaactcggcaagctcgctgggtcgacttcgacaacgattacaagacgctcgatctggcttacatggagtcggtgatttgggccttcaaacagttgtgggacaagggcctggcctacgagggctaccgggtgctgccgtactgctggcgcgacgaaactccgctgtcgaatcacgaactgcggatggacgacgacgtctaccaaagccgccaagatcccgcggtaacggtgggcttcaaggtggtgggtggccaaccagacaacgggctagacggtgcctacttgctggtgtggacgacgactccgtggaccctgccgtcgaacctcgcagttgcggtaagcccggacatcacctacgtacaggtccaggcgggcgatcgccgtttcgtactggccgaggcacggctggccgcttacgcccgcgaactcggtgaagagcccgtggtgctcggcacctatcgcggcgccgaactgctgggcacccgctacctgccgccgtttgcctatttcatggactggcccaacgcttttcaggtgctagcaggcgactttgtaacgaccgacgatggcaccggcatcgtgcatatggcaccggcctatggtgaggacgacatggtggtcgcggaggcggtcggtatcgcgccggtgactccggtcgactccaagggacgcttcgacgtcaccgttgccgattaccaagggcagcatgtctttgacgccaacgcgcagatcgtccgggacctgaagacccaaagcggcccggctgcggtgaatggcccagtgttgattcgtcacgaaacctacgagcacccttacccacactgctggcgatgccgtaacccgctgatctaccggtcggtgtcgtcgtggttcgtcagggtgacggacttccgagaccgcatggtggagctaaaccagcagatcacgtggtatcccgaacacgtcaaggacggccagttcggcaagtggctgcagggcgcccgcgattggtcgatctcccggaatcgctactggggtaccccgattccggtatggaagtccgacgacccggcctacccgcgcatcgatgtctacggcagcctcgacgagctggagcgcgacttcggcgtacgcccggccaatttgcaccggccctacatcgacgagctcacccgtcccaacccagacgatccgactggccgtagcacgatgcgacgcattcccgatgtgctcgacgtgtggttcgactcgggatccatgccgtatgcccaggtgcactacccgttcgagaacctggattggttccagggacactaccccggcgacttcatcgtcgagtacatcgggcagacccgtggctggttttacacactgcatgtgttggcgaccgcgctctttgaccggccggcattcaaaacctgtgtggcgcatgggattgtccttggtttcgatggccagaagatgagcaagtcgctgcgcaactatccagacgtaacagaggtgttcgatcgcgacggctccgacgccatgcggtggttcctgatggcatcgccgattctgcgcggcggcaacctgatcgtcactgagcaaggaattcgcgacggtgtgcgacaagtcctgctgcccctgtggaacacctacagcttcctggcgctgtatgcaccgaaagtcggtacctggcgcgtcgattcggtgcacgtgctggatcgctatatcctggccaagctggcggtgctgcgcgacgacctcagcgagtcgatggaagtttacgatattcccggtgcctgtgaacatttgcgtcagttcactgaggcgttgactaattggtatgtgcgacggtcgcgttcgcggttctgggcagaagacgccgatgccatcgacacgctacacaccgtgttggaggtgaccacgaggctggccgccccgctgcttccgctgatcaccgagataatctggcgtggtctgacacgcgagcgatcggtgcacctgacggactggccagcgcccgacctgctgccgtcggatgccgacctggtcgccgcgatggaccaggtccgcgacgtgtgctcggcggcatcctcgctgcgcaaggccaagaagctacgggtgcgcctgccgctaccgaaactcattgtggcagttgagaatccgcaacttctgaggccgttcgtcgacctcattggcgacgagcttaacgtgaagcaggtcgaactgaccgatgccatcgacacctatggccgattcgagctcacggtcaacgcccgggtagccggaccacggctgggcaaagatgtgcaggccgccatcaaggcggtcaaggccggcgacggcgtcataaacccggacggcaccttgttggcgggccccgcggtgctgacggccgacgagtacaactcccggctggtggccgccgacccggagtccaccgcggcgttgcccgacggcgccgggctggtcgttctggatggcaccgtcactgccgaactcgaagccgagggctgggccaaagatcgcatccgcgaactgcaagagctgcgtaagtcgaccgggctggacgtttccgaccgcatccgggtggtgatgtcggtgcctgcggaacgcgaagactgggcgcgcacccatcgcgacctcattgccggagaaatcttggctaccgacttcgaattcgccgacctcgccgatggtgtggccatcggcgacggcgtgcgggtaagcatcgaaaagacc

SEQ ID NO: 26434 - DNA, 3507 bp, Mycobacterium bovis
agcggttcatctgcggggtcctccttcgtgcacctgcacaaccacaccgagtattcgatgctggacggtgccgcgaagatcacgcccatgctcgccgaggtggagcggctggggatgcccgcggtggggatgaccgaccacggaaacatgttcggtgccagcgagttctacaactccgcgaccaaggccgggatcaagccgatcatcggcgtggaggcatacatcgcgccgggctcgcggttcgacacccggcgcatcctgtggggtgaccccagccaaaaggccgacgacgtctccggcagcggctcctacacgcacctgacgatgatggccgagaacgccaccggtctgcgcaacctgttcaagctgtcctcgcatgcttccttcgagggccagctgagcaagtggtcgcgcatggacgccgagctcatcgccgaacacgccgagggcatcatcatcaccaccggatgcccgtcgggggaggtgcagacccgcctgcggctcggccaggatcgggaggcgctcgaagccgcggcgaagtggcgggagatcgtcggaccggacaactacttccttgagctgatggaccacgggctgaccatcgaacgccgggtccgtgacggtctgctcgagatcggacgcgcgctcaacattccgcctcttgccaccaatgactgccactacgtgacccgcgacgccgcccacaaccatgaggctttgttgtgtgtgcagaccggcaagaccctctcggatccgaatcgcttcaagttcgacggtgacggctactacctgaagtcggccgccgagatgcgccagatctgggacgacgaagtgccgggcgcgtgtgactccaccttgttgatcgccgaacgggtgcagtcctacgccgacgtgtggacaccgcgcgaccggatgcccgtgtttccggtgcccgatgggcatgaccaggcgtcctggctgcgtcacgaggtggacgccgggcttcgccggcgatttccggccggtccgccggacgggtaccgcgagcgcgccgcctacgagatcgacgtcatctgctccaaaggtttcccatcgtactttctgatcgtcgccgacctgatcagctacgcgcggtcggcgggcataagggtgggtcccggccgcggctcggccgccggctcgctggtcgcctacgcgctgggcatcaccgacatcgacccgattccacacggtctgctgttcgagcggttcctcaaccccgagcgcacctcgatgcccgacatcgatatcgacttcgacgaccggcgccgcggtgagatggtgcgctacgcagccgacaagtggggccacgaccgggtcgcgcaggtcatcaccttcggcaccatcaaaaccaaagcggcgctgaaggattcggcgcgaatccactacgggcagcccgggttcgccatcgccgaccggatcaccaaggcgttgccgccggcgatcatggccaaagacatcccgctgtctgggatcaccgatcccagccacgaacggtacaaggaggccgccgaggtccgcggcctgatcgaaaccgacccggacgtacgcaccatctaccagaccgcacgcgggttggaaggcctgatccgcaacgcgggtgtgcacgcctgcgcggtgatcatgagcagcgagccgctgactgaggccatcccgttgtggaagcggccgcaggacggggccatcatcaccggctgggattacccggcgtgcgaggccatcggtctgctgaaaatggacttcctgggcctgcggaacctgacgatcatcggcgacgcgatcgacaacgtcagggccaacaggggtatcgacctcgacctggaatccgtgccgctggacgacaaggccacctatgagctgctgggccgcggcgacaccctgggcgtgttccagctcgacggcgggcccatgcgcgacctgctgcgccgcatgcagccgaccgggttcgaagacgtcgtcgccgttatcgcgctgtaccggcccggcccgatgggcatgaacgcacacaacgactatgccgaccgcaagaacaaccggcaggccatcaaacctattcacccggaactcgaagaaccgctgcgcgagatcctcgccgagacctacggcctcatcgtctatcaagagcagatcatgcgcatcgcgcagaaggtggcgagctactcgttggcccgcgccgacattctacgcaaggccatgggcaagaagaaacgcgaggtgctggagaaggagttcgagggcttctccgatggcatgcaggccaacgggttctctccggcggccatcaaggcgctgtgggacaccatcctgccgttcgctgactacgcgttcaacaagtcacatgccgccggctacggcatggtgtcctactggacggcctacctcaaggccaactatcccgccgagtacatggccggtctgttgacgtcggtcggcgacgataaagacaaggccgcggtttatctggccgactgccgcaagctcggcatcaccgtgctcccgcccgacgtcaacgaatctggcttgaacttcgcatcggtcggccaagacatccgctacgggctgggcgcggtgcgcaacgttggcgctaatgtcgtgggctcgttgctccaaacccgcaacgacaagggcaagttcaccgacttttcggactacctgaacaagatcgacatctcggcgtgcaacaagaaggtgaccgaatcgctgatcaaggcgggtgcgttcgactcgctggggcatgcccgcaagggtcttttcctggtgcacagcgatgcggtggactcggtgctgggcaccaagaaggccgaggcactggggcagttcgatctcttcggcagcaatgatgatgggaccggcaccgcagatcccgtgttcaccatcaaggtgcccgatgatgagtgggaggacaaacacaaactcgccctagagcgcgagatgctgggactgtacgtctcggggcatcccctcaacggtgtggcacacttgctggctgcccaggtcgacaccgcgatcccagcgatcctcgacggcgatgtccccaacgatgcccaagtgcgggtgggcggcatcctggcgtcggtgaaccggagggtcaacaaaaacggaatgccatgggcttcagcgcaattggaggatctcacgggcggcatcgaggtgatgttcttcccgcacacctactccagctatggtgccgacatcgtcgacgatgcagtcgtgctggtcaacgccaaggtggcggtccgtgacgaccgcatcgcattgatcgccaatgacctcacagtgcccgacttttccaacgccgaggtggagcggccgctggcggtcagcttgcccacccggcagtgcacctttgacaaggtgagtgcgctcaaacaggtgttggcgcgccaccccggcacctcgcaggtgcatctgcggctcatcagcggagaccggatcaccacgctggcacttgatcagtcgttgcgggtgacgccgtcgccggcgttgatg

SEQ ID NO: 26435 - DNA, 1317 bp, Mycobacterium bovis
atggctgcggcgactggcgggttgacgcccgagcagatcatcgcggtcgatggcgcccatctgtggcacccttacagctccatcggcagggaagccgtgtcgccggtggtggccgtcgccgcccacggagcgtggttgacgctgattcgcgacggccagccgatcgaggtgctcgacgcgatgagctcctggtggaccgcgatccacgggcacggccaccccgctctggaccaggcgttaaccacccagttgcgggtgatgaaccacgtcatgttcggggggctgactcacgagccggcggcccggctggcgaagctgctggtcgacatcaccccggcgggtctcgacacggtgttcttcagcgactccggctcggtgtcggtggaagtcgcggccaagatggcgctgcagtactggcgcggccgcggcctgcccggcaagcgacggctcatgacctggcgcggcggctatcacggcgacaccttcctggctatgagcatctgcgacccgcacggcggcatgcactcgctgtggaccgacgtcctggccgcccaagtgttcgcgccacaagagccacgggactacgatcccgcctacagcgcggcgttcgaggcgcagctggcgcagcacgccggcgagctggccgcggtggtcgggagccggtcgtgcagggtgcgggcggtatgcgttttcacgacccgcgctatctgcacgaccctgcgggacatctgccgccgttacgaggtgctgctgatcttcgatgagatcgccaccggcttcggccgcaccggcgcgttgttcgccgccgaccacgccggggtgagcccggacatcatgtgtgtcggcaaggcgctcaccggcggctacctcagcttggccgccaccttgtgcaccgccgacgtcgcgcacaccatcagcgccggtgcggccggggcgctgatgcacggccccaccttcatggccaatccgctggcctgtgcggtctcggtggccagtgtggagctgctgctcggccaggactggcgcacgcgcatcaccgaactggccgccgggctgaccgccggcctggataccgcccgggcgctgcccgccgtcaccgatgtgcgggtgtgcggcgcgatcggcgtcatcgaatgcgaccgaccggtcgacctggccgtcgcgactcccgcggcgctggatcgaggcgtgtggctgcgcccgtttcgcaacctggtctacgccatgccgccctatatctgcacaccggccgagatcacgcagatcacctcggcgatggtcgaggtcgcacggctcgtaggctcactgccatgaaag

SEQ ID NO: 26436 - DNA, 786 bp, Mycobacterium bovis
atggtggcgatgctgttttacgtcgacacactgcccgacaccggtgcggtggcggtcgtagacggcgacgaaggatttcacgccgccaccgtgcggcggatccgtcccggcgagcagttggtgcttggtgacggtgtcggtcgcctggcccgctgtgtggtggagcaggccggacgtggcgggctgcgggcccgggtgcttaggcgctggagcgtcccgcccgtgcggccaccggtgaccgtggtgcaggcgctgcccaaatccgaacgctccgaattggcaatcgagctggccaccgaagccggagccgacgcgttcctggcatggcaggcggcgcgctgcgtggcgaactgggacggggcgcgtgtcgacaagggtttgcgtcggtggcgagcggtggtccgctcggcggcccggcaatctcgtcgggcgcgcatcccgccggtcgacggcgtgttgtcgacgccaatgcttgtacagcgtgtccgagaagaggtggccgccggcgcggcggtgctggtcctgcacgaggaggcgaccgagcggattgtggatatcgctgcggcgcaagctggttcgttgatgctcgtggttggacccgagggtgggatcgcaccggacgagcttgccgcgctgaccgatgccggcgccgtcgcggtccggctgggcccgacggtgctgcggacatcgaccgcggccgcggtggcattgggtgctgtcggtgtgctcacatctcgttgggatgcatcagcgagcgactgtgaatactgcgacgtgacacgccgg

SEQ ID NO: 26437 - DNA, 666 bp, Mycobacterium bovis
atggacggcaatggccgctgggccacccaacgtgggctggcccgcaccgaaggtcacaagatgggcgaggcggtggtgatcgacatcgcttgcggtgctatcgaacttgggatcaagtggctcagcctctacgccttttccacggagaactggaagcgttcgcccgaggaagtccgcttcctgatgggcttcaaccgcgacgtggtgcgacggcgccgagacaccctaaagaagctaggggtccggatccggtgggtgggttcacgaccacggctgtggcgtagcgtcatcaatgagttggcggtcgcggaggagatgaccaaaagcaacgacgtcatcaccatcaactattgcgtcaactacggcggacgcaccgaaatcaccgaagccacccgcgaaatcgctcgtgaggtcgccgcgggcaggctcaacccggagcggatcaccgaatccacgatcgcccgccacctgcagcgacccgacattcccgacgttgacctcttcctgcggacctcgggtgagcagcgctccagcaacttcatgctgtggcaggcggcctacgctgaatacatattccaggacaagctctggcccgactatgaccgccgcgacttgtgggcggcctgcgaggaatacgcgtcgcgcactcggcggttcgggagcgcc

SEQ ID NO: 26438 - DNA, 1452 bp, Mycobacterium bovis
atgactgatgttttgcgcgtagtcgtgtcgggctgcgcgcgtctgcccgatccctcgaagggagtgcaccaccccgtggcgcccgtcatcgacaccgtggtcaacctagccaaacggcgaggcttcgtctatccgtcgggcgagatctacggcggcacaaagtcggcgtgggactatggtccgctaggggttgagctcaaagagaacatcaagcgccagtggtggcgatcggtggtgactggccgcgacgacgttgtcggaatcgattcgtcgatcatcctgccgcgtgaggtgtgggtggcttccggtcacgtcgatgtctttcatgacccgctggtcgagtcgctgatcacacataagcgctaccgggccgaccatctcatcgaggcctacgaagccaaacacgggcatccgccgcctaacgggttggccgacattcgcgacccggaaaccggcgaacccggccagtggacgcagccacgcgagttcaacatgatgctcaagacctacctcggacccatcgagaccgaggaggggctgcactatctgcgcccggaaaccgcgcagggcatcttcgtgaactttgccaacgtggtgacaactgctcgtaagaagccgccattcggtatcggacagatcggcaagagctttcgcaacgagatcactccgggcaacttcatcttccggacccgcgagttcgagcagatggagatggagttcttcgtcgagccggcgactgccaaggaatggcatcagtactggatcgacaaccggctgcagtggtatatcgacctgggtattcgtcgggagaacctgcggttgtgggagcaccccaaagacaagttgtcacattactccgaccgcaccgtcgacatcgagtacaagttcggcttcatgggcaatccatggggtgaactggaaggtgtggccaaccgaaccgattttgacctatcgacgcatgcgcggcattccggcgtcgacctgtctttctacgaccagatcaacgatgttcggtacacgccgtacgtcatcgagccggcagctggcttgacccggtcattcatggcgtttttgatcgacgcgtacaccgaggacgaggccccgaataccaagggtgggatggataagcgcacggtgctgcgattggacccgcggctggcgccggtcaaggcggcggtgttgccgctgtcccggcacgcggacctgagcccgaaggcccgggacctgggcgccgaattacggaaatgctggaacatcgatttcgatgatgccggcgctatcgggcggcgttaccggcgccaggacgaggtcggtaccccgttctgtgtgacggttgacttcgactcgctgcaggacaatgccgtcaccgtgcgggagcgtgacgccatgacgcaggaccgggttgcgatgagcagcgtggccgactatctcgcggtgcggctcaagggcagc

SEQ ID NO: 26439 - DNA, 1305 bp, Mycobacterium bovis
ttgaccgggtactaccagctgctcggctcgatcgtattgatcggtttgggtgggttgttcgccgcgattgacgccgccatcagcaccgtgtctccggcccgggtggatgagctagtacgcgaccagcggccgggcgcggggtcgctgcgtaaggtgatggccgaccggccgcggtacgtcaacctggtcgtgttgctgcggaccagctgtgagatcaccgcgaccgcgctgctggtggttttcatccgataccacttcagcatggtgtgggggttgtatcttgccgcgggcatcatggttttggccagctttgtcgtcgtgggagtggggccacgcacccttgggcgccagaacgcatattccatctcgttggccacggcccttccgctgcggctgatctcgtggttgttgatgccgatcagccgcttgctggtgttgctgggcaacgcactgacccccgggcgcggctttcgcaacgggccgtttgcatccgagatcgagctgcgcgaagttgtcgacctagcccagcagcggggcgtggttgctgccgacgagcgccggatgatcgagtcggtcttcgagctgggtgacaccccagcccgcgaggtgatggtgccgcgcaccgagatgatctggatcgaaagcgacaagacagccggtcaagcaatgaccctggcggtacgcagcggacattcccgaatcccggtgatcggcgagaacgtcgacgacatcgtcggcgtggtgtacctgaaagaccttgtcgagcagacgttctgctcgacgaacggcggccgcgaaacgaccgtcgcgcgggtgatgcggccagctgtgttcgtgccggactccaagccgctggacgcattgctgcgggaaatgcagcgcgaccgtaaccacatggccctgctggtcgacgagtacggcgcgatagccggcctcgtcagcatcgaagacgtgctggaggagatcgtcggcgagattgccgacgagtacgaccaggccgagacggcgccggtggaagacttgggcgacaagcgtttccgggtatcggcgcgcctgcccatcgaagacgtcggcgagctgtacggcgtggagttcgacgacgaccttgacgtcgacacggtgggcgggctgctggccctagaactgggccgggtgccgctgcccggcgctgaggtgatatcgcatggcctgcggctgcatgccgagggtggcaccgatcatcggggacgggtacgaatcggcaccgtgttgctgagtccggccgaacccgacggcgccgatgatgaggaggccgatcaccctggc

SEQ ID NO: 26440 - DNA, 927 bp, Mycobacterium bovis
gtgttcacgttcggcgaggaaaccggcatgaccgaattccattctggctttgtgtgtttggtcggccggccgaacaccggcaagtccacgctgaccaatgcgctggtcggggcgaaagtggcaatcacgtcgacgcgcccgcagaccaccaggcacgctattcgtgggatcgtgcatagcgacgacttccagatcatcctcgtcgacactcccggtctgcaccggccgcgcactctgctgggcaagcggctcaacgacttggtccgcgaaacctacgcggcggtcgacgtcatcgggctatgcatccccgccgacgaggcgatcggtccgggagaccggtggattgtcgagcagcttcgttcgaccggccctgccaatacgacactggtggtcatcgtcaccaagattgacaaggtgccgaaagaaaaagtggtcgcccagctggtagcggtcagcgaactcgtcacgaatgcggccgagattgtcccggtttcggcgatgaccggcgaccgggtagacctgttgatcgacgtactggccgcggcattgccggccggccccgcgtattaccccgacggtgagttgactgacgaacccgaggaggttctgatggccgagctcatccgcgaggcggcccttcagggcgtgcgcgatgagctgccccattcgctggcggtggtgattgacgaggtcagtccacgtgaggggcgtgacgacctgatcgacgtacacgccgcgctgtacgtcgagcgagatagtcagaagggcatcgtcatcggcaagggtggtgcccggctgcgggaggtgggtaccgcggcccgtagccagatcgaaaacctgctgggcaccaaggtctatctcgacttgcgggtcaaggtcgccaagaactggcagcgcgaccccaaacagcttggccgactggggttt

SEQ ID NO: 26441 - DNA, 5361 bp, Mycobacterium bovis
gtgtcgattccatgctggcactggacttgcgtaaccgactcaaacgatcaatcggcgcgacggtgtcgctggccacgctcatgggcgacatcaccggtgatggacttgtcgcgaaactcgaagatgccgacgagcgctcacacaccgcacagaaagtggacatttcgcgtgactaataccgccgacatcggcgcccgcctcgacgaggcccgattggagctgctgcgtcgcaggctcgccgaccgcggcctgtcctcggctgcgcaggacattggcccgcacactgacgatcggctctccgacggccaggcccggatgtggttcgtgcagatggccgaccccagcggtgcgttactcaacatctgtgtgtcctaccgcatcaccggtgacatcgatctggccaggttgcgcgacgcagtcaacgccgtcgcccgtcgccatcggatactgcgtaccacctaccctgtcggcgacgacggagtcgcccagccgaccgtgcacgcggatcttcgccccggctggacacaatacgacctgacggacctgtcccaacgcgcccagcggctgcgcctggaggtgttggctcagcgcgaattctgcgctcccttcgagctttcccgcgacgcgccattgcgaatcacggtggtgcgcacggctgccgacgaacacgtgctgctgttggtggcccaccacatcgcctgggatgatggttcgtggcgggtgttcttcaccgatctcacccaggcgtactcgcgagctgacctaggggccgatctggggccagaacaccgtccgtcggccgcatccggacccgacactaccgaggccgacctcaactattggcgcgcgatcatggccgatccgccagagccgctggaacttcccggcccagccggaacgtgtgtgccgaccagttggcgtgccgcgcgcgccacgttgcggctgcccgccgacaccgctgcgcgggtggccacgatggcgaagaacaccggttgcactccctacatggtgctgctggccgcgttcggtgccctggtgcatcgctacacccacagtgacgacttcctcgtggcggctccggtgctcaaccgtggcgccggaaccgaagatgccatcggctatttcggcaacacggtagcgatgcggctgcgaccgcaatcggcgatgagtttccgggagttgctgaccgccacccgcgacatcgccagcggggcgttcgcacaccaacggatcaacctcgaccgcgtggtaagggaactgaaccccgatcgccggcacggtgccgagcgcatgacccgggtcagcttcggtttccgggagcccgacggcggcggattcaacccgccaggcatcgagtgcgagcgctacgacctgcgcagcaacatcacgcagctgccgttgggcttcatggtcgaattcgaccgcgcgggtgtgctggtcgaggccgaacacctggtggagatcctggaacccgccctggccaagcagatgcttcgacacttcggtgtgctgctcgacaatgcgctggccgcccccgacaacacgttgtcggggctggcgctgatggatgagcgcgacgccgccaggctgcgcgaggtgtcgcgcggcgagcggttcgatacccctgtcaaaaccctcgtggacctggtgaacgagcagaccacgcggactcccgacgccaccgccgtggtgtatgagggccaacacttcacctaccacgacctcaatgaggcgtcgaaccggttggggcactggctgatcgagcaggggataggcagcgaagaccgggtcgcggtacttcttgacaaatcgccggacctgatcgtcacggccttgggggtggtcaagtccggggcggtgtatgtgcccgtggatcccagctacccgcaagaccggctggatttcatcctcgccgactgcgacgcgaaactggtgctgcgcacgccagtacgtgagctggccggataccgcagcgacgaccccaccgacgccgatcgaatccggccgctacggccagacaacacggcctatctcatctacacgtccggtaccaccggattgcccaaaggtgtcgcggtgccacaccgccccgtcgccgagtacttcgtctggttcaagggcgaatacgacgtcgacgacaccgaccggctactgcaggtcgcctcacccagcttcgacgtctcgatcgccgagatcttcggcacgctggcctgtggcgcgcggatggtgataccacgccccgggggactcaccgacattggatatctcaccgccctgttgcgcgacgagggcatcacggcaatgcatttcgtgccgtccctactcgggctgttcctgtcgctgccgggtgtgagccagtggcggacgttgcagcgggtacccatcggcggggagccgctacccggtgaggtggccgacaagttccacgcgacattcgatgcgctgctgcacaacttctacggtccaaccgaaaccgtgatcaacgccagccggtttaaagtggtgggcccacagggcacccgcatcgtgcccatcggccggcccaagatcaacaccaccatgcacctgctcgacgattcgttgcagccggtgccgaccggtgtgatcggcgagatctatattggagggacgcatgtcgcatacggataccatcgccgcgccgggctgaccgcggagcgattcgttgccgacccgtttaatcccggttcccgcatgtaccggtccggggatctggcgcgccgcaatgctgacggtgacatcgagttcgtgggccgtgccgacgagcaggtcaagattcgcggattccgaatcgaactcggtgacgtagcagcggccatcgcggtcgaccctacggtcgggcaggccgttgtggtggttagcgacctgccgcggctgggcaagagtctggtgggctacgtgacacccgccgcgggcggcgacggacccgccgatgtcggcgtcgatctcgaccgcatccgcgcccgggtggccgcggcactgcctgaatatatgctgcccgcggcctatgttgtgctggatgagattccgatcaccgcgcatggcaaaatcgaccgcgccgcgctgccggaaccgcagatcgcgtcggacaccgagttccgcgcgccgcagaccgccaccgagcggcgccttgcccaactgttcggtgagctgctcggccgcgaccgagtgggtgctgacgactcgttcttcgacctcggcggtcactcgctgctggcaaccaaactcgttgcggccgtgcgcaacgcgttcggcgtcgatgtcggtgtgcgggagatcttcgaattcgccacggtgaccgcgttggccggacacatcgatacgttggattcggattcggcgaggccgcggctgacccgggtggatcatgacgggccagtgcgattgtcgtcgtctcaaatgcgtagctggttcaactatcgcttcgacgggcccaacgccgtcaacaacattcccttcgccgcggcattgcatgggccctgcgacaccaacgcgttcgcggcggccatcaccgatgtggtggcacgccacgagatcctgcgcaccgtctaccgcgagatcggcggcgtgccacaccagatcatccagccgcccgccgaggtgccggtgcggtgcgccgccgggtccgacgccgcgtggctgcgagccgaactgaacaacgagcgaggttacgttttcgacctggaaaccgactggccgatccgggcggcgctgctgagcacgccggagcagaccgtgttgtcgctggtggtgcatcacatcgccggcgaccactggtcggctggggtgttgttcaccgatctgctgaccgcataccgggcccgcagcaccggacaacggccgtcgtgggcaccgctgccggtgcagtacgccgactacagcgtgtggcagtcggcgctactcgacgacggtgcgggcatcgtcggtccgcaacgcgactactggatccgccagctggggggcctggcaggcgaaaccggtctgcgcccggacttcccgcgcccggccctgctcagcggtgccggtgacgcggtcgaatttcgtctcggcgccgcgatccgcgacaaattggctgccgtgagccgagacctcggtgtcaccgagttcatgctgctacaggccgccgtcgcggtggtgttacacaaggccggcggcggggtagacgtccccatcggcgccccggtggccggtcgcagcgaggccaacctggaccagctcatcgggttcttcatcaacatcgtggtgttgcgcaacgacctgcgcgggaaccccacgctgcgcgaggtgctgcagcgcaccaggcagatggcgctggcagcgtatgcacatcaggacctgccgttcgaccaggtggtggaggcggtcaacccccagcggtcgctgtcccgcaatccgttgttcgacattgttgtgcacgttcgcgaacaaatgccgcaagaccacgtcatcgacaccgggcccgacggtgacaccacgttgcgcgtgctggagccgacattcgatgccgcgcaagccgatctatcggtcaacttcttcgcctgcggcgacgagtaccgcggccacgtcatctaccgcaccgagttgtatgagcgcgccaccgcacaacgcttcgccgactggctagtccgtgtcgtcgaggcgttcgccgaccgtccggaccaaccgctgcgcgaggtcgagatggtcagcgcgcaagccagacggcgcattttggaccggtccaatgcgggcgccggaacggcccgggtgtacctgcttgacgacgcacttaagcccgttccggtaggcgtggtgggtgacgtttattacggtggcggtcccgccgtcggtgcccggttggcccggccatcggagaccgcgacccgattcgttgccgatccgttcgccgcgcaaccgggttctcggctctaccgcaacggcgagcgcggagtgtggaaggccgacggccaactggagctgctggccgaaatcgaacggctgccaacggcgcaggcggcaccggtgccggccgagcccgccgacaccgaaaccgagcgcgcgctggctgccatcctcgccgacgtgctcgaggtgggggaggtcggacgctacgacgacttcttcaacctcggcggcgacagcatcctcgcgactcaggtggctgcccgggctcgagatggcgggataccgctgaccgcgcggatggttttcgagcatcccgttttgtgtgagctcgccgccgcggtcgacgccaagcctcacgtcgaggccgagccggacgacaagcatcacgcgccgatgagcacatcagggctttccccagacgaactgtcggccctgaccgcgtcatgggaccagtggccg

SEQ ID NO: 26442 - DNA, 2073 bp, Mycobacterium bovis
atgaccgacgacgagcgattctcactgttggtcggcctgaccggggccagcgatctgtggccggtgcgcgatgaacgcatcccacagggcgtgccgatgtgtgccgggtatgtgccggggattccccggctcggggtcccggccttgttgatgagcgatgccggtctgggcgtcaccaaccctggctaccgccccggtgacaccgctacggcgctgcccgccggccttgccctagcggccagctttaacccggtgctggcccggtcctcgggcaaagcgatcggccgggaggcgcgcagtcgcgggttcaacgtgcaactggccggcgcaatcaatctggcgcgcgacccgcgtaacggccgcaacttcgagtacctttccgaggacccgttgttgagtgccacgatggccgcggagtcgatcatcgggattcagcagcagggtgtcattgcgacgacgaaacacttctcgctgaactgcaacgaaaccaatcggcactggctggacgcggtcatcgatcccgacgcgcaccgcgagtcggacttgttggcgttcgagatcgtcatcgagcggtcgcagcccggcgccgtgatggcggcgtacaacaaggtcaacggagattacgctgccggcaacgaccacttgctcaacgacgtgctgaaaggtgcttggggataccgcggttgggtgatgtcggattggggcggaacacccagctgggagtgcgcgctggccggcctggaccaagagtgcggtgcgcagatcgatgcagtgctgtggcagtcggaagcattcaccgaccgcctgcgtgccgcctacgccgacggcaatctacccaaggggcgcctgtcggacatggtacggcggatcctgcggtcgatgtttgccgtcggaatcgaccgatggaaaccagcgccggcgccggacatgaacgcgcacaacgagattgccgcacagatggcgcggcaaggaatcgtgctgctgcaaaaccgagggctgctgccgctcgctcccgaatcggccgggcgtattgccgtcatcggcggctatgcacacctcggtgtgccagccggttacggttcgagcgccgtcaccccgccggggggctatgcgggcgtgataccgatcggtgggtctggcttggcagccgggttgcgtaatctctacctgctgccgtcaagcccgctgagtgagttgcgaaagcggttgcccaacgcgcagttcgagttcgatcctggcatcaacccggcggaggcggtgctggctgcgcggcgagcagacatcgcgatcgtgttcgcgatccgtgccgaaggagagggcttcgacagcgccgatctgtcgctgccatggggtcaggatgcgctgatcgccgcagtcgcgtccgccaacgcgaataccgttgtggtgcttgagacgggcaacccggtgaccatgccctggcgcgactcggtgaacgccatcatgcaggcctggtatccgggccaggcgggtggccaggccgttgcggagattgtgaccgggcaggtgaatccttcgggccggctgccgatcaccttcccggtcgatctcggtcagacgccacgctcgcaaccgcgcgagctcggtgccccgtgggggacatcgaccacgatccactacaccgagggcgccgatgttggttaccgctggtttgccagcacaaatcagaccccgatgttcgcgttcggtcacggcttgtcctataccagtttcgagtatcgtgacctggtggtgacgggcggccacaccgtgcacgccagtttcagcgttaccaacacgggcgaccgcagcggggcggatgtcccgcagctgtatatgatcgcagctcccggcgaatcgcggttgcggttgctgggattcgagcgggtcgagctcgaacccggccagactcggcgggtaaggatcgaggcggacccgcgactgctcgcccgctacgacggcgaggccagaagctggcgcatcgagccgggcggttacacggtggcggtgggcgcttcggcggtagcgctgaagctggcagccaaggtcaagctggccggccgtgggttcgggcgg

SEQ ID NO: 26443 - DNA, 837 bp, Mycobacterium bovis
atgactaccacccggactgaacggaatttcgcgggcatcggcgatgtgcgcatcgtctacgacgtctggacgccggacaccgcgccgcaagcggtggtcgtgctggcccatggtctgggcgagcatgcccgccgctacgaccatgtcgcgcagcggctcggcgcggccggcctggtcacctatgcgcttgaccaccgcgggcatggccgctcgggtggcaaacgggtgctagtgagagacatctccgagtacaccgctgacttcgacaccctcgttgggatcgccacccgggaatatcccgggtgcaagcgcatcgtgctcgggcacagcatgggcggcggcattgtgttcgcttacggtgtcgaacgtccagacaactacgacctgatggtgctttcggcgccggcggtggcggcacaggacctggtgagcccggtagtggcggttgccgccaagcttctgggcgtcgtggtgcccggcctgccggtgcaggaactggattttactgccatctctcgcgaccctgaggtggtccaggcttacaacaccgacccactcgtgcaccacggacgggttccggccgggattggccgcgcgctgctgcaggtgggcgagaccatgccgcggcgagcaccggcattgaccgcgccgctgctagtgctgcacggcaccgatgaccggctgatccccatcgagggcagccgtcgcctggtcgaatgtgtgggatcggccgacgtgcagctgaaggagtatcccgggctgtaccacgaggtgttcaacgagccggagcgcaaccaggtgctcgacgatgtggtcgcctggctcaccgagcggttg

SEQ ID NO: 26444 - DNA, 797 bp, Mycobacterium bovis
ttgataaagcatgatgttgtctgggtcacactatggcctgagcggcccaacaacaagcccccgccaagcccccggcaagtccccggcaatcccggcccgaccctgaaagtcctggcaagccacgtgaacgcacctctatcggcgaagccgcggagccagcttcccctgcgccgggcacagttgtccgacgaggtcgcgggccacctgcgggccgccatcatgtcgggcgccctgcgctctggaacgttcatccgtctggacgagacggcagccgagctcggagtcagcgtcacgccggtgcgggaggcgctgctgaaactgcgcggtgaggggatggtcgggctggagccacatcgcggccacgtggtgctgccgttgacccgccaagacatcgacgacattttctggctgcaggccaccattgcccaagaacttgccacatcggccaccgctcacatcaccgacgttgagatcgacgagctggaccgcatcaacaatgcgctggccggtgctatcgggtccggtgatgccaaaaccatcgcgtcgatcgagttcgcgttccaccgcgtcttcaacaaagcgagccgccggatcaagttggcctggttcctgcttaatgccgcgcgctatatgccggcgcaggtgttcgcggccgacccgcgatggggcgcggacgcggtgaacagtcatcggcagctgatcgccgcgctgcgccgccgcgacacagccgccgtaatcgagcacaccgtctggcagttcaccgatggggcacgcaggctgacggaggccctggctga

SEQ ID NO: 26445 - DNA, 1098 bp, Mycobacterium bovis
atgacagatccgcagacgcagagcaccagggtcggggtggttgccgagtcggggcccgacgaacgacgggtcgcgctggttcccaaggcggtcgcgtcgctggtgaaccgtggtgtggcggtcgtggtcgaggccggtgcgggcgagcgcgcgctgcttcccgatgagctctacaccgctgtcggtgccagcatcggggatgcttgggccgccgacgtcgttgtcaaggtcgcgccgccgacggcggcggaggtcggccggttgcgcggtgggcagacactgatcggctttctagcgccccgtaatgctgacaactcgatcggcgcgctgacccaggccggggtgcaggcgttcgcgctcgaggccatcccgcgcatctcgcgggcgcaggtgatggacgcgctgtcgtcgcaagccaacgtgtctgggtataaggctgtgctgctcgcggcctcggaatcgacccggttctttccgatgctgacgacggcggccggaacggtgaagccggccacggtgctggtgctcggcgtcggcgtggccggcctgcaggcgctggcgacggccaaacggctaggcgcgcgcaccacgggctacgatgtgcgtcccgaggtggccgaccaggtccgatcggtgggcgctcaatggcttgatttgggcatctcagcgtccggtgagggcggttacgcccgcgaactgaccgacgacgagcgcgcccagcagcaaaaggcattggaagaagcgatcagtggcttcgacgtggtgatcaccaccgcgctggtgccgggccgcccggcgccaacgttggtgaccgccgctgcagtggaagcgatgaagcctggcagcgtggtggtggatctcgccggcgagacgggcggcaactgcgaattgaccgagcccggccggacagtcgtcaagcacgacgtcaccattgccgcaccgctgaacctgccggccacgatgcccgagcacgccagcgagctctacagcaagaacatcaccgcgctactcgacttgttgatcaaagacggcaggctggccccggacttcgacgacgaggtgattgcccagtcgtgtgtcacccgcgggaaggactcc

SEQ ID NO: 26446 - DNA, 1186 bp, Mycobacterium bovis
gccactacgacgcgaccgtggacgccacggatcgccacgcaactgtccgtgctggcttgcgcggcctttatctatgtcaccgccgaaatcctgccagtgggcgcgctgtcggcgatagcgcggaacttgcgcgtcagcgtggtcctagttgggaccttgctgtcctggtatgcccttgtcgcggccgtgacaacggttccgctggtgcgttggaccgcacactggccgcgccgccgggccctggtggtcagcctggtctgcctgaccgtctcgcaactcgtctcggcgctggcgcccaacttcgcggtgctggccgccgggcgggtgctctgcgcggtcacccatggcctgctgtgggcggtcatcgcgccgatcgccacccggctggtgccgcccagtcacgccgggcgcgccacgacgtcgatctacatcggaaccagtctggcgctggtcgtcggtagcccactcacggctgccatgagcctgatgtggggttggcggctggcggcggtgtgcgtgaccggcgcggcggccgcggtcgccctggccgcccggctggcgttgccggagatggtgctgcgcgccgaccagctcgagcacgttggccgacgggctcgtcaccaccgtaatcctcgcctggtcaaggtcagtgtgctcacgatgatcgcggtaaccggccatttcgtgtcctacacctacatcgtggtgatcatccgcgacgtcgtcggtgtacgtgggccgaatctggcctggctgctcgccgcctatggggtcgccggcctggtgtccgtgcccctggtggcgcggccgttggaccgttggcccaagggcgccgtcatcgtcggtatgaccggactgacggcggcgttcaccttgctgaccgcgctggcattcggtgaacgccacaccgcggcgacggcactgctgggcaccggtgcgattgtgctgtggggagccttggccactgccgtgtcaccgatgctgcaatcggcggcgatgcgtagcggcggcgacgaccccgacggggcctcaggtttgtatgtgacggcgtttcagatcggcatcatggccggcgctctgctgggtgggctgctctacgagcgcagcttggcgatgatgctgaccgcgtcggcgggtttgatgggtgttgcgttgttcgggatgacggttagccagcacttgttcg

SEQ ID NO: 26447 - DNA, 288 bp, Mycobacterium bovis
atgacagcagcacacggctacacgcagcaaaaggacaactacgccaagcggttgcgtcgcgtcgaggggcaagtgcgcggcatcgcgcgaatgatcgaggaagacaagtactgcattgacgttctgacccagatcagcgccgtcaccagtgcgttgcggtcggtggcgctgaacctgctggacgagcacctgagccactgcgtcacccgtgccgtggccgagggcggtcctggggctgacggcaagctggcagaggcctcggcagcaatcgcgcgcctggttcgttcc

SEQ ID NO: 26448 - DNA, 1725 bp, Mycobacterium bovis
atgccgcaaaccaccgacgaagccgcttccgtctcgacggtcgccgacatcaagccccgcagtcgagacgtcaccgacggcctggagaaggccgctgcccggggcatgttgagggcggtgggcatggacgacgaagacttcgcgaagccacagatcggggtcgcgtcgtcgtggaacgaaatcacgccgtgcaatctctcattggaccggctggccaacgcggtcaaggagggggtgttttcggccggcggctatccgcttgagttcggcacgatctcggtttcggacggcatctccatgggtcatgaggggatgcacttctcgctggtttcccgtgaggtgatcgccgacagcgtcgaagtcgtgatgcaggccgaacgactcgacggttcggtgctgctggccggatgcgacaaatcgctgcccggaatgctgatggccgccgcacgactggatctggcggcggtgttcctctacgcgggctctattttgcccggccgggccaagctctccgacggtagcgaacgagacgtcaccatcattgacgccttcgaggcggtcggagcgtgctctcgcggtttgatgagtcgcgccgacgtcgatgccatcgagcgggcaatctgccccggcgaaggggcatgcggcggcatgtacaccgctaacaccatggccagcgccgccgaggcgctcggcatgtcgttgccgggcagcgcggcaccgccggcgaccgaccgccggcgcgacgggttcgcgcgtcgcagcggtcaggccgtcgtcgagctgctgcgccgcggcatcaccgcccgcgacatcctcaccaaggaggcgttcgagaacgccatcgcggtggtaatggcgttcggcggctcgaccaacgcggtgctgcatctgctggccatcgcccacgaggccaacgtcgcactatcgcttcaggacttcagccggatcgggtcgggggtgccgcatttggccgatgtcaagccgttcggccgccatgtgatgtccgacgtcgatcacatcggcggtgtgccggtggttatgaaggcgctgctggacgccggtctgctacacggcgactgcctgacggttaccggtcacaccatggccgagaatctggctgccatcaccccgccggatccagatggcaaggtgctacgtgcgttggcaaacccgatccacccgagcggtggcatcaccatcctgcacggatcgctggcacccgaaggtgcggtggtcaagaccgccggattcgattccgacgtattcgaaggcaccgcaagagttttcgacggcgagcgcgctgcgctggacgcccttgaggatggcaccattaccgtgggcgacgccgtggtaatccggtacgaaggacccaagggcggccccgggatgcgcgaaatgctcgccatcacaggcgcgatcaaaggcgcaggactcggtaaagatgttctactgctgaccgacggccggttctccggtggaaccaccggcctgtgcgttggccacatcgcaccggaggcggtcgacggcggaccgatcgcacttctgcgcaacggcgaccggatccggctcgacgtggccggccgcgttctcgatgtgttggccgatccggccgaattcgcgtcccgacaacaggatttcagtcctccaccgccgcgctacactactggcgtactgtccaagtacgtcaagctggtcagctctgccgcggtcggcgcggtctgcggc

SEQ ID NO: 26449 - DNA, 1191 bp, Mycobacterium bovis
atgggtgcttccggcctggtctggaccctcaccatcgtcctgatcgccggcttgatgttggtcgactacgtcctccacgtacgcaagacccatgtaccgacgttacgtcaggccgtcatccagtcggcgaccttcgtggggatagcgatcctgttcggcatcgcagtggtggtgttcggcggctcagagctggcggtcgaatatttcgcctgctacctgaccgacgaagccctgtcggtcgacaacctgttcgtatttctggtcatcatcagcagcttcggggtgcctcgtctcgcgcaacaaaaggtgctgttgttcggtatcgcgtttgcgctcgtcacgcgcaccggattcatcttcgtcggcgccgcgctcatcgagaacttcaactcggccttttacctgttcggcctggtcctactggtcatggcgggcaacctcgccagacccaccgggctagaaagccgcgacgccgaaacgctcaagaggtccgtcattatccggctagccgaccgcttcttgcggacctcacaggactacaacggagaccggttgttcacggtctcgaacaacaagcgaatgatgaccccgttgttgctggtcatgatcgccgtgggtggcactgacatactatttgcgttcgattcgattccagcacttttcggcctgacccaaaacgtctatctggtgttcgccgccaccgcgttctcgctgttgggcctgcgccagctgtacttcttgatcgacggcctgctggatcggctagtctatctgtcttacgggttggccgtgattcttggcttcatcggcgtcaaactgatgctggaagcattgcacgacaacaagattccgttcatcaacggcggcaagccggtcccgaccgtggaggtgagcaccacccagtcgttgacggtgatcatcatcgtcctgctgatcacgaccgcggcgtcgttctggtcggcgcgcggacgggcgcagaacgccatggcgagggcccggcggtatgcaaccgcatacctcgacctgcactatgagaccgagtcggccgaacgcgacaagatctttaccgcactgctggccgctgaacgccagatcaacactctcccaacgaaataccgcatgcagcccggacaggacgacgacctgatgacgctgctgtgcagggcccatgccgcgcgcgacgcgcacatg

SEQ ID NO: 26450 - DNA, 138 bp, Mycobacterium bovis
gtgaccaagggcaaaaggaccttccagccgaacaaccggcggcgagctcgtgttcacggtttccgcttacggatgcgtacccgcgccgggaggtcaattgtgtccagccggcgacgcaagggtcggcgcacgctcagt

SEQ ID NO: 26451 - DNA, 927 bp, Mycobacterium bovis
atgagcgccgggcagctgcgccggcatgagatcggcaaggtcaccgcgctgaccaatcccctgtcaggccatggcgccgccgtaaaggctgcacacggcgcgatcgcccggctgaagcatcggggggtggacgtcgtcgagatcgtcggcggggacgcccacgacgcacgccatctgctcgccgcggcagtcgcaaaaggcactgacgcggtgatggtgaccggcggtgacggagtcgtctccaacgcgctacaggtcttggcgggcaccgacattccgttaggaatcattccggccggcactggtaacgaccacgcacgcgaattcgggcttcccacaaagaatcccaaggcagccgcagatatcgttgttgacggctggacggaaaccattgacctgggccggattcaagacgacaacggtatcgaaaagtggttcggtaccgtggcggctaccggattcgactccctggtcaacgatcgcgccaaccgaatgcgctggccacacgggcggatgcgctattacatcgcgatgctcgccgaactgtcgcggctgcggccgttgccgttccggctggtgctcgacggcaccgaagagatcgtcgccgacctcacacttgccgacttcggcaatacccgcagctacggcggcggattattgatctgccccaacgccgaccactcggacggcctgctcgacatcaccatggcccagtcggattcccgtaccaagttgctccgcctgttccccaccattttcaaaggcgcccatgtcgagcttgacgaggtgagcaccacacgagccaagacagtccacgtcgagtgccccggtatcaacgtctatgccgacggcgacttcgcctgcccgttaccagccgagatctccgcggtgccggccgcccttcaggttcttcgcccccgccacgga

SEQ ID NO: 26452 - DNA, 2250 bp, Mycobacterium bovis
atgacaaccaagacacccgtgatcggcagcttcgccggcgttccgctgcatagcgagcgtgccgcgcaatcgcccacagaggccgcggtgcacacgcatgtcgccgccgccgcggcggcgcacgggtacacgcccgaacagttggtgtggcacacgccggaaggcattgacgtcacaccggtatacatcgccgccgaccgggccgccgccgaagccgagggctacccgctgcacagcttcccgggcgagcccccctttgtgcgcggcccctatccgacgatgtatgtgaaccagccgtggaccatccgccagtacgccgggttttccaccgccgcggattccaatgcgttttaccgacgcaacctggccgccggccagaaggggctgtcggtggccttcgatctggccacccaccgcggctacgactccgaccatccccgcgtgcagggcgatgtcggaatggccggtgtggcaatcgattccattctcgacatgcgacagctgttcgacggcatcgacctgtcgaccgtgagcgtgtcgatgacgatgaacggtgcggtgctgccgatcctggcgctgtatgtggttgccgccgaggagcagggcgtggcgccggagcagctggccggcaccatccagaacgacatcctcaaagagttcatggtccgcaacacctacatctatccgccgaagccgtcgatgcggatcatctccgacatcttcgcctacaccagcgccaagatgcccaagttcaactccatctccatttccggctatcacatccaagaagccggtgccacggcggatttggagctggcctacaccctggccgacggcgtcgactacatcagggcgggcctgaacgccggcctggacatcgacagcttcgcgccccggctatcgttcttctggggcatcgggatgaatttctttatggaggtcgccaaactgcgggccggccggttgctgtggagcgagctggtcgcacagttcgcgcccaagagcgccaaatccctttcgctgcgtacacattcgcaaacatcggggtggtcactgaccgcccaggatgtgttcaacaacgtggcgcgcacatgcatcgaggcgatggccgccacccaggggcacacccagtcgctgcacaccaacgccctggacgaggcgctggcgctgcccaccgatttttcggcccgcatcgcgcgcaacacccagctggtgttgcagcaggagtcgggcaccacgcggccgatcgacccgtgggggggctcctactatgtggagtggctgacccatcggctcgcgcggcgagcccgggcgcacatcgccgaggtcgctgaacatggcggcatggcgcaggccatcagcgacggcatccccaagctgcgcatcgaggaggcggccgcgcgcacccaggcccgcatcgactccggtcagcaaccggtggtcggggtgaacaaataccaggtgcccgaggaccacgagatcgaggtgctcaaggtcgaaaacagccgggtgcgcgccgagcagctggccaaactgcagcggctgcgggcaggccgggacgagccggcggtacgggccgcgctggccgagctgacccgcgccgccgccgagcaaggacgcgccggagcagacgggctgggcaataatctgctggccctggccatcgacgccgcccgggcccaggccaccgtgggcgagatctccgaagcgctggagaaggtgtacggacggcaccgggccgagatccgtaccatttccggggtctaccgcgacgaagttggaaaggcccccaacatcgcagccgcaaccgagctagtggagaagttcgccgaggccgacggccgccggcccaggattctgatcgccaagatgggccaggacggccacgaccgcgggcagaaggtgatcgcgaccgcgttcgccgacatcgggttcgacgtcgacgtggggtcgctgttttccacccccgaggaggtggcgcgtcaggccgccgacaacgacgtgcacgtgatcggggtgtcctcgctggccgccggccatctgacgctggtgccggcgctgcgcgacgcgttggcgcaggtgggcaggcccgacatcatgatcgtggtcggtggtgtcatcccgccgggcgacttcgacgagctgtacgccgccggggccaccgccattttcccgccggggacggtgattgccgacgcggcgattgacctgctgcacaggctggccgagcggctggggtacacgctggat

SEQ ID NO: 26453 - DNA, 768 bp, Mycobacterium bovis
ttgaaccatccagacctggccggcaaggtcgcgatcgttactggggcgggcgccggaatcggtctggcggttgcccggcgactcgccgacgagggctgccatgtgctgtgcgcggacatcgatggtgatgccgcggatgccgcggccaccaaaatcggttgtggcgcagcggcctgccgggttgacgtcagcgacgaacaacagatcatcgccatggtcgacgcctgtgttgccgcgttcggcggggtggacaagttggtcgccaacgccggtgtcgttcatctggcttcgctcatcgacaccaccgtcgaggacttcgatcgggtcatcgcgatcaatctccgcggcgcctggctgtgcaccaagcatgcggcaccgcggatgatcgagcgcggcgggggagccattgtcaacctgtcgtcgttagcgggccaggtagcggtgggcggcaccggcgcatacggcatgtcgaaggccggcatcatccagctcagccgcatcaccgccgccgaactgcgctcgtcgggcatccgctccaacacgctgctgcccgcattcgtcgacaccccgatgcagcagaccgccatggcaatgttcgacggggccctgggcgcggggggtgcgcgctcgatgattgcccggctgcagggccgcatggccgcaccggaggagatggccggcatcgtggtgttcctgctgtccgacgatgcgtcgatgatcaccggcaccacccagatcgccgacggcgggacgattgccgcgctgtgg

SEQ ID NO: 26454 - DNA, 1287 bp, Mycobacterium bovis
ttgcactccgacgtgcccagctacggcaacctcggacgtttgggcggtcgccatgagtacggtgtcctagtggcaatgaccagctcggcggaactggaccgggttcgttgggcgcaccagttgcgctcctaccgaattgcttcggtattgcggatcggtgtcgtggggctcatggtcgccgcgatggtcgttggaaccagccggtccgaatggccacagcaaatcgtgttgatcggcgtctacgcggtcgctgcattgtgggctctgctgttagcgtattcggcgtcccggcgattcttcgctttgcgacgctttcgcagtatgggccggttggagccatttgctttcaccgccgtcgacgttttgatattgacgggctttcagctgctgtccaccgacgggatctatccgctgctgatcatgatcctgctgccggtcctggtgggccttgacgtgtcgacgcgacgggcggcggtggtgctggcctgtacgctagtcggattcgcagtcgcggtgctgggagaccccgtgatgctgcgcgcgattggatggcccgagacaatatttcggttcgcgctctatgcgttcctgtgcgccacggccttgatggtggttcgcatcgaggagcggcatacccgttcggttgccggcctgagtgcgttgcgggaggaactgcttgcccagacgatgacggcctcggaggtgctgcagcggcggattgcggaagccattcacgatggaccgctgcaagacgtgctggccgcgcgtcaggagctcatcgagttggatgccgtaacccccggcgacgagcgcgtcggacgcgcgttggccggactgcagagcgcgtcggagcggctgcggcaggccaccttcgagctgcatccggcagtgcttgagcaagttgggttggggccggcggtaaaacagttggcggcctctaccgctcagcgttcgggtatcaagatctccaccgatattgattacccaatacgtagtgggatcgaccccatcgttttcggtgtggttcgcgaactgctgtccaacgtcgtgcggcattccggagctaccaccgcctcggtcaggctcggaatcaccgacgaaaaatgcgttttggatgtggccgacgatggcgtgggggtcaccggtgacactatggcgcgccgcctgggtgagggacacatcggtctggcttcgcatcgggctcgggtggatgccgccggcggagttttggttttcctggccacccccagggggacccatgtctgcgtggaactaccactgaaacgg

SEQ ID NO: 26455 - DNA, 2073 bp, Mycobacterium bovis
gtgagctccccagacgccgatcagaccgctcccgaggtgttgcggcagtggcaggcactggccgaggaggtgcgtgagcaccagttccgttattacgtgcgggacgcgccgatcatcagcgacgcggaattcgacgagctgctgcgccgtctggaagccctcgaggagcagcatcccgagctgcgcacgcccgattcgccgacccagctggtcggcggtgccggcttcgccacggatttcgagcccgtcgaccatctcgaacgaatgctcagcctcgacaacgcgttcaccgccgacgaactcgccgcctgggccggccgcatccatgccgaggtcggagacgccgcacattacctgtgtgagctcaagatcgacggcgtcgcgctgtctttggtctaccgcgagggacggctgacccgggcctccacccgcggcgacgggcgcaccggcgaggacgtcaccctgaacgcccggaccatcgccgacgttcccgaacggctcacccccggcgacgactacccggtgcccgaggtcctcgaggtccgcggcgaggtcttcttccggctggacgacttccaggcgctcaacgccagcctcgtcgaggagggcaaggcgccgttcgccaacccccgcaacagcgcggcgggatcgctgcgccagaaagacccggcggtcaccgcgcgccgccggctgcggatgatctgccacgggctgggccacgtggagggctttcgcccggccaccctgcatcaggcatacctggcgttgcgggcatggggactgccggtttccgaacacaccaccctggcaaccgacctggccggtgtgcgcgagcgcatcgactactggggcgagcaccgccacgaggtggaccacgaaatcgacggcgtggtggtcaaagtcgacgaggtggcgttgcagcgcaggctgggttccacgtcgcgggcgccgcgctgggccatcgcctacaagtacccgcccgaggaagcgcagaccaagctgctcgacatccgggtgaacgtcggccgcaccgggcggatcacgccgtttgcgttcatgacgccggtgaaggtggccgggtcgacggtgggacaggccaccctgcacaacgcctcggagatcaagcgcaagggcgtgctgatcggcgacaccgtggtgatccgcaaggccggcgacgtgatccccgaggtgctgggacccgtcgtcgaactgcgcgatggctccgaacgcgaattcatcatgcccaccacctgcccggagtgcggttcgccgttggcgccggagaaggaaggcgacgccgacatccgttgccccaacgcccgcggctgcccggggcaactgcgggagcgggttttccacgtcgccagccgcaacggcctagacatcgaggtgctcggttacgaggcgggtgtggcgctcttgcaggcgaaggtgatcgccgacgagggcgagctgttcgcgctgaccgagcgggacttgctgcgcaccgacctgttccgaaccaaggcaggcgaactgtcggccaacggcaaacggctgctggtcaacctcgacaaggccaaggcggcaccgctgtggcgggtgctggtggcgctgtccatccgccatgtcgggccgacggcggcccgcgccctggccaccgagttcggcagccttgacgccatcgccgcggcgtccaccgaccagctggccgccgtcgagggggtggggccgaccattgccgccgcggtcaccgagtggttcgccgtcgactggcaccgcgagatcgtcgacaagtggcgggccgccggggtgcgaatggtcgacgagcgtgacgagagtgtgccacgcacgctggccgggctgaccatcgtggtcaccggctcgctgaccggtttctcccgcgacgacgccaaggaggcgatcgtggcccgcggcggcaaggccgccggctcggtgtcgaagaagaccaactatgtcgtcgccggagactcgccgggatccaaatacgacaaggcggtggagttgggggtgccgattctggacgaggatgggttccggagactgctggccgacggacccgcgtcacgaacg

SEQ ID NO: 26456 - DNA, 3465 bp, Mycobacterium bovis
atggcattcgcgacgctgatcagccggatcaccggctttgcccggatcgtgctgctggccgcgatcttaggtgcggcgctggccagctcgttctcggtggccaaccagctgccgaacctggtcgccgcactcgtgctggaggccaccttcaccgccatcttcgtaccggtgctggcccgcgccgagcaggacgacccggacggcggcgcggcgttcgtgcgccgtttggtcacgttggcaaccaccctgctgctgggcgccaccacgctgtcggtgctggccgcgccactgcttgtgcggttgatgctgggcacaaacccacaggttaacgagccgctgaccacggcgttcgcttacctgctgctaccgcaagtcctcgtctacggcctctcgtcggtattcatggcgatcctgaacacccgcaatgtgttcgggccgccggcctgggcgcccgtcgtcaacaatgtcgtcgccatcgcgaccctagcggtgtatctggcggtccccggcgagctttcagtcgatccggttcggatgggcaacgccaagctgctggtgctcggcatcggcaccaccgcaggcgtgtttgcacagaccgcggtgctgctggtggccatccggcgcgagcacatcagcctgcgccccctgtggggaatcgatcagcggctcaagcgctttggcgcgatggccgccgcgatggtgctctatgtgctgatcagccagctcggcctggtggtcggtaaccggatcgccagcacggcagcggcttccggccccgcgatctacaactacacctggctagtgctgatgttgccattcggcatgatcggcgtgacggtgctgaccgtggtgatgccgcggctgagccgcaatgccgcggccgacgataccccggccgtgctcgccgacctgtcgctagccaccaggctgaccatgatcacgctgatcccaacggtggcgttcatgacggtcggcggtccggcgatcggtagcgcgctttttgcatacggcaacttcggcgacgttgatgccgggtacctgggggcggcgatcgcattgtcggcgttcacgttgatcccctatgcgttagtgctggtgcagctacgcgtgttctacgcccgcgagcaggcgtggacaccaatcacgatcatcgtggtcatcaccggcgtcaagatcctcggctcgctgctggcgccgcatattaccggtgatccccagctggtcgcggcctatctcgggctggctaacggactcggatttctcgccggcacgatcgtcggctactacatactgcgtcgggccctgcggcccgacggcggccagctgatcggcgtcggcgaggcgcgaaccgccctggtgaccgtcgccgcgtcgttgcttgccggactgctggcacacgtggccgatcggttactagggctaagcgagctgacggcccacgcgggcagcgtcggttcgctgctgcggctgtcggtgctggctctcatcatgctgccaattctggctgcggtcaccctctgcgcacgggtgcccgaggcgcgggcggcgctggatgccgtgcgagcccgaatcaggagccggcgcttgaagaccgggcctcagacccagaatgtcttggatcaatcgtctcgccccggaccggtcacgtaccctgagcggaggcgtttggccccgccgcgggggaaaagtgtggtccacgagccgatccggcgcaggcctccggagcaggtagccagagccgggagagcgaaaggaccggaggtgatcgaccgcccatcggagaacgcctcgtttggtgccgcgtcgggtgccgagctgccgcggcccgtcgccgacgagcttcagctcgacgcgccagccggccgtgaccccggccccgtttcccggccgcacccatccgacctgcaaaacggcgatctgcccgccgatgcggcccgtgggccgattgcgttcgacgcgctccgcgaaccggaccgagaatcgtcggcccccccagatgatgtgcagctggttcccggcgcccgcatcgctaacggccgctaccgcctgctgatcttccacgggggtgtaccacccctgcagttctggcaggcgcttgacacagcgctggaccgccaggtggcgctgaccttcgtcgacccgcagggcgtcctgcccgacgacgtcctccaggagaccttgtcccgtacgttgcggctcagccggatcgacaagcccggtgtcgcccgagtgcttgacgtcgtgcacacccgggccggtggtctggtagtcgcggagtggatccgcggcggttcgttacaggaagtcgccgacacctcaccgtcgccggttggcgccatccgggcgatgcagtccctggccgcggccgcagatgctgcccaccgcgccggtgttgcgctgtcgatcgaccatcccagccgggtgcgcgtgagcatcgacggcgacgtcgtgctggcctacccggcgaccatgccggacgccaacccgcaagacgacatccgcggcatcggcgcctccctgtacgccctgctggtcaaccggtggccgctgccggaggccggcgtgcgcagcgggttggcacccgccgagcgcgacaccgctggccagcccatcgaacccgccgacatcgaccgtgacatccccttccagatttccgcggtggcggcccggtcggttcaaggagacggcgggatacgcagcgcgtcaacgctgttgaatctaatgcagcaggcgaccgcggtggccgatcgcaccgaggtgctgggaccgatcgacgaagcaccggtctccgcggccccgcgcacatccgcgcccaacagcgaaacctacacccgccgccgtcgcaacctgctgatcggcatcggcgcgggtgctgccgtcctcatggtggccctgctggtcttggcttcggtgttgagccggatattcggcgatgtcagcggcggcctcaacaaggacgaactgggcctcaacgcacccaccgcgtcgacctcggcggccagttcggcgccgcccggcagcgtcgtcaaacccaccaaggtcacggtcttctcccccgacggcggcgccgacaaccccggggaggctgatttggccatcgacggcaatccggccacttcctggaagaccgacatctataccgaccccgtcccgttccctagcttcaagaacggagtcggtttgatgttgcagctgccccaggccacggtggtcggcaccgtcgccatcgacgtggccagcaccggcaccaaggtggagatccgctcggcatccacgccgacgccggcaacgctggaggataccgccgtgttgacttcggccaccgcgctgcggcccggccacaacaccatctcggtcgaggcggccgcgcccacctcgaatctgctggtgtggatctctaccttgggaaccaccgacggaaagagtcaagccgacatctcggagatcacgatttacgccgcgtcc

SEQ ID NO: 26457 - DNA, 2070 bp, Mycobacterium bovis
ttggctgactcctcggcgatctacctcgccgcaccagaatcgcagacgggtaagtcgacgattgcactggggcttttgcaccgactgaccgcgatggtcgccaaagtcggtgtgttccggccgattacgcggctctctgcggagcgggactacatcctggaactactgctcgcgcacaccagtgcgggcctgccctatgagcggtgtgttggcgtgacctaccagcagctgcatgctgaccgcgacgacgcgatcgccgaaattgtcgattcgtatcacgcaatggccgacgagtgtgacgcggtggtggtcgtcggcagtgactacaccgacgtcaccagccccaccgagctctcggtcaacgcccggatcgcggtgaacctcggcgcgccagtgttgttgacggttcgggcgaaggaccgcacccccgatcaggtcgccagcgtcgtcgaggtctgcttggccgagctggacacccagcgcgctcataccgcggcggtagtggcgaaccggtgcgagctgtccgcgataccggccgtgaccgacgcgctgcgcaggttcaccccgcctagctatgtagtgcccgaggaaccactgctgtcggcgccgaccgttgccgagttaacgcaggctgtgaacggggcggtggtaagcggtgatgttgcgctgcgcgaacgtgaggtgatgggcgtgctggccgcgggtatgaccgccgaccatgtgttggagcggctgaccgatggcatggcggtgattactcccggcgaccgctcggacgtggtgttggccgtcgctagcgcccatgcggccgaagggtttccgtcattgtcatgcatcgtcctcaatggcgggttccagttgcatccggcgatcgccgccctggtttccggcctgcgattgcggttacctgtcatcgccaccgcgttgggcacctacgacaccgccagcgctgccgcgtcggcccgcgggctggtaacggcgacgtcgcaacgcaagatcgacaccgcgttggagctgatggaccgccacgtggacgtcgccggtctattggcgcagctgaccattcccatccctacggtcactacaccacagatgttcacttatcggctgctgcagcaggcccgttcggacctcatgcgcatcgtccttcccgaaggggacgacgatcgcatcctcaaatcggcgggccgcctgcttcagcgcggcatcgtcgacctgaccatcctgggcgatgaagccaaagtccgtctgcgggcagcggaactcggtgtggacctggacggcgccacggtaatcgagccatgcgcaagcgaactgcacgatcaattcgccgaccagtatgcgcagttgcgtaaggcgaagggaatcaccgtggagcatgcccgcgaaatcatgaacgatgccacatatttcggcaccatgctggtgcacaactgtcatgccgacggcatggtatcgggtgctgctcacaccacggcgcacaccgttcgtccggcgctggagatcatcaagaccgttccgggcatatccaccgtgtccagcattttcctgatgtgtctgccggatcgggtactggcgtacggcgactgcgcgatcatcccgaacccgacggtggagcagctcgctgatatcgccatctgctcggcacgcaccgccgcacagttcggcatcgagccccgggtggccatgctgtcctactccaccggtgactcggggaaaggtgccgacgtcgacaaggtcagagcggcaacggagttggtgcgcgctcgggagccgcagctgccggtcgagggtcccattcaatacgacgccgcagtggaaccgtcggtcgcggccaccaagttgcgcgattcgccggtggccggccgcgcgacggtgctgatcttccccgatctcaataccggcaacaacacctacaaagcggtgcagcgttctgcgggtgcgatcgcgatcggcccggtgctgcagggcttacgcaagccggtgaacgacctatctcggggtgcactggtcgacgacatagtcaacaccgtggccatcacggcgattcaggcgcagggcgtccatgag

SEQ ID NO: 26458 - DNA, 1104 bp, Mycobacterium bovis
gtggaggatcgaaaagatgataggaaaatgagtacgcctacgctgcctgatatggtagctccatccccgagagtgcgagtaaaagaccgttgtcgccggatgatgggggacctacgcctttccgttatcgatcagtgcaatttgcgatgccgttattgtatgcccgaagagcactacacatggttgccgcggcaagatttgctatccgtcaaagaaatcagcgccattgtagatgttttcctttccgttggggtaagtaaagttcgaatcaccggtggcgaaccgctgatccgcccagatttgccggaaatagtgaggacattgagcgcaaaggtcggcgaagattcaggtctgagagacttagcgatcacgacgaacggcgtccttctcgccgaccgcgttgacggcctgaaggctgcgggtatgaaacgcatcactgtcagtcttgatacgttgcaacccgagcgcttcaaggcgataagtcagcgtaatagccacgataaggtcatcgcgggtatcaaggctgtcgcagccgcgggatttacggacacaaaaatagacacaacggtgatgcgtggtgccaatcacgatgagctggctgatctgatcgaattcgctcggactgttaacgcggaagtcaggttcattgagtacatggacgtcggcggcgcaactcactgggcatgggagaaggtctttaccaaagcgaacatgctcgagtcccttgagaaacggtatggacgtattgagcctttgcccaaacatgatacggcgcccgccaatcgatatgcgcttccggacggaactaccttcggaattatcgcgtcgacaacggagccattctgcgcaacctgtgaccgttcacggttgaccgccgatggcttatggctgcattgcttgtacgcaatatcgggtatcaacctaagggagccgctgcgtgcaggcgcgactcacgatgacttggtggaaaccgtgacaaccggatggcggcgacgagcggatcgcggagcagagcagcgtcttgcccaacgcgagcgcggagtgttcctgccattaagcacgttaaaggccgacccgcatctggagatgcacaccaggggcggg

SEQ ID NO: 26459 - DNA, 974 bp, Mycobacterium bovis
atgggcctgtcaatagggatcgtgggggccaccggtcaggtgggtcaggtcatgcgcacgttgctcgacgagcgggatttcccggcgagcgcggtgcggttcttcgcgtcggcccgatcgcagggccgcaagctggccttccgcggccaggagatcgaagtggaagacgccgagacggccgacccgagcgggctggatatcgcgttgttctccgccggctcggccatgtcgaaggtgcaggcgccccgctttgcggcggccggagtcacggtgatcgacaactcgtcggcgtggcgtaaggaccccgacgtgccgttggtggtgtccgaggtgaactttgaacgcgacgcgcaccgccggcccaagggcatcatcgccaacccgaactgcaccaccatggccgcgatgccggtgctcaaggtgctgcacgacgaagcccgactggtgcggttggtggtctcgtcgtatcaggcggtgtccggtagcggcctggccggggtggccgagctggccgagcaggcgcgtgcggtcatcggtggggccgagcagctggtgtatgacggcggcgcgctcgagttcccgccgccgaacacctacgtcgccccgatcgcgttcaacgtggtgccgctggccggatccctggtggacgacggctccggcgagacagacgaggatcaaaagttgcgcttcgagagccgcaagatccttggcatccccgacctgttggtcagcggcacctgtgtgcgggttccggtgttcaccggacactctttgtcgatcaacgccgagttcgcgcagccgctctcgccggagcgggcgcgcgagctgctcgacggtgctacgggcgtgcagctggtcgacgtgccgacgccgctggccgccgccggtgtcgacgaatctctggtcggccggatccggcgcgacccgggggtgcccgacgggcgtggtctggcgctgttcgtgtcgggggataa

SEQ ID NO: 26460 - DNA, 366 bp, Mycobacterium bovis
atgacgaagaagccacgtaaccccgccgactacgtgatcggcgacgatgtcgaggtgtctgacgtcgatctcaagcaagaggaggtctatgtcgatggcgagcggctaacggacgagcgcgtcgagcagatggcttcagagtcgctgcggctggcgcgcgaacgagaagccaacctgattcctggcggcaagtctctgtccggcggctctgcgcactcgccggctgtgcaggtggtcgtttcgaaggctacccacgccaagctcaaggagctggcgcgcagccggaagatgagcgtatctaagctgctgcgtcccgtgctcgacgagttcgtacagcgagaaacgggtcggattctcccacggcgt

SEQ ID NO: 26461 - DNA, 789 bp, Mycobacterium bovis
atgtcggaaaacagccaccacaggctggccacaacctcgttgacgctcccgccgggagcgcggatcgaacgccaccgccatccgtcacaccagatcgtctatccgtccgcaggggcggtctcggtcaccactcacgcgggaacctggattacgccggtaaatcgggcaatctggataccggcgggctgttggcaccaacacaagttccacggccacacgcaatttcacggcgtagcgctggatccgcagcgctatcgcggcggcccggcaaccccgacggtgctcgcggtcaatccgttgatgcgcgaactcatcatcgcgtgttcgcaggccgaccgaaccgacaccgacgagcaccaccggatgttggccgtactgcaggatcaactgccaacaacgagcatccgcgagccactgtgggttccctcaccaaccgatcgccggttgcggcacgcgtgcgcgttgatcgccgacaacctgacccagcccttgacgctgcagcagatcggcggccggatcggtgtcagccagcgcacgctgagccgtctgttcagcgacgagctgggtatgacgttcccgcaatggcgcacccagctgcgcctgcaacatgcgctcgtgttgctcgccgagcgccacgacgtcacgtccgtggcgtccgaatgcggttgggccacaccaagcgcgttcattgacacctaccgacaagccttcggacacactcccggccaagccgctaagccaatggcggcgacccgcctcacccggctccgccgcgctcgcgatcgccgc

SEQ ID NO: 26462 - DNA, 1326 bp, Mycobacterium bovis
atgagtgatccagcaagaggggcggaagccgaggatgcctacggttttcccgccgggctgtggcgctggctgcagcggcatccaccgccggcgttgcaccggctcacccggtttcgcagcccgttgcgtggtccgtggttgacgtcggtgttcggcctggtgctattggtggcgttgcctttcgtcatcatcaccgggctactttcttatatcgcctatgcgccgcagctgggccaggccatccccggtgacgtcggctggctgcgactccccgctttcacctggcccacccgtccgtcctggctgtaccggttgacccaggggctgcatgtggggctggggctggtgatcattcccgtggtgctggccaagttgtggtcggtgataccgcggctgtttgtgtggccgccggcgcgctcgattgcccaggtgctcgaacggttgtcggtgctgatgctggtcggtgggatcctgttccagatcgtcaccggcgtgctcaacattcagtatgactacatcttcgggttcagcttctacaccggccactattttggggcttgggtcttcattgcgggtttcctgttgcatatcgtggtcaagatcccccacatggtcaccgggttgcgatcgataccgatgcgagaagtgttgggtaccaacgtggctgacacccgggcgcagccgtgcgatccggacgggctggtgtcggtcaatccgggcgaggccacgctaagcagacgcggtgccctgggattggtcggtgccggggtgctgctgatcggggtgctgacggttgggcaaaccctgggcgggttcacccgcaaggccgccctgctgctgccccggggccgtgtcgtgagcccgggcgacttcccggtcaacaagaccgccgccgccgccgggatcaccgcggaggccattggccccgactggcggctggtgctgcgtggcgggcctgcggaagtagtgctggatcgcgccacgctggccggcctgccgcaacgcaccgcccggctgccgctggcctgcgtcgaagggtggtcggccgtgcgcacctggagcggcgtgccgctggccgagctggcgctgctggcgggcgtgccggcggcgcgctcggcacgggttacatcgctgcagcgcggcggggcgttcggcgaggcgaagctggcggcaaaccagatcgccgaccccgatgcgctgctggcgttgcgggtcgacggggcggatctgtcgctgaatcatggctacccggcccgcatcatcgttcccgcactgcccggtgtgcacaacacgaaatgggtcgctggcatcgaattccacaagagg

SEQ ID NO: 26463 - DNA, 2313 bp, Mycobacterium bovis
atgcccactggcttgggctatgactttctgcgccctgtcgaggactcggggatcaacgacctgaagcactattacttcatggcggatttggccgatgggcaaccgctaggccgggcaaacctctatagcgtctgtttcgacctggccaccaccgaccgcaagctcactccggcctggcgaacgaccatcaaacggtggtttccggggtttatgaccttccgtttccttgagtgcgggttgctcaccatggtgagcaacccgctggcgttgcggtccgacaccgacttggagcgggtattgcctgtgctggccggccagatggaccagttggcgcatgacgacgggtcggatttcttgatgatccgggacgtggacccggaacactaccagcgataccttgacatcctgcgcccgttgggctttcggcctgcgctgggcttttcccgggtagacacgaccatcagctggtcgagcgtggaagaggcactgggctgcctgtctcacaaaaggcgcctgccgttgaagacgtcgctggagtttcgtgagcggttcggtatcgaggtcgaggaactcgacgagtatgccgagcatgcgccggtattggcccggctttggcgcaacgtcaagacggaggcaaaggattaccagcgcgaggacctgaaccctgagttcttcgcggcgtgttctcggcatctgcatggacgtagcagactgtggttgttccgctaccagggcacgccaattgccttctttttgaacgtttggggtgcggatgagaactacatactgcttgagtggggcatcgatcgtgattttgaacattataggaaggcgaatctgtaccgggcggcgctgatgctcagcctaaaagatgcgatcagccgagataaacggcgaatggaaatgggtattacgaactatttcacaaaacttcgcattccgggtgcccgagtcataccgaccatctatttcctgcgtcacagcacggatccggtgcatacggcaacgttagcgcgaatgatgatgcacaatattcaacggccaacgctacccgacgatatgtcggaggaattctgtcgctgggaagagcgaatacgtctggaccaggacgggctacccgaacacgatatctttcgcaagatcgatcgtcagcacaaatacacggggctcaaactcggcggagtctacggtttttatccccgattcaccggaccgcagcgatccacggtcaaggccgcggagctgggcgagatcgtgttgctgggcacgaactcgtatctgggcctggccacccatccagaggtggtggaggcctcggcggaggccacgcgacggtacggcaccggctgctcgggttcgccgttgctgaacggcacgttggacttgcacgtctcgcttgagcaggaactagcctgttttttgggcaaacccgccgccgtgttgtgctccaccggatatcagagcaacctggcggcgatcagcgcgctatgcgaatccggggacatgatcatccaagacgcgctgaaccaccgcagcctgttcgacgccgccaggttgtccggggccgacttcaccttgtaccggcacaacgacatggaccacctggcgcgggtgctacgccgcaccgaggggcgccgccggatcatcgtcgtggacgcggtgttcagcatggaaggcaccgtcgccgacctggccaccatcgccgagcttgccgaccggcacggctgccgggtctatgtggacgagtcccatgcgctgggcgtgctcggccccgacgggcgaggagcttcggccgcgttgggtgtcttggcgcgcatggacgtggtgatgggcacgttcagcaaatcctttgcctccgtcggcgggttcatcgccggagatcggcccgtcgtggactacatccggcacaacggttcaggtcatgtgttttccgccagcctgccgccggccgccgcggctgccacccacgcggctctgcgcgtcagtcggcgtgaacccgaccggcgggcgcgggtgctggccgcggccgagtacatggccaccggcctggcacggcagggctatcaggccgagtatcacggaaccgcgatcgtgccggtgatcctgggcaacccgaccgtggcgcatgcgggctatctgcggctgatgcgctccggggtgtatgtgaacccggtggcccccccagccgtgccggaggagcgttcgggattccgcaccagctacctagccgaccaccgacaatccgacctcgaccgggccttgcacgtgtttgccggccttgccgaggacctgaccccgcaaggagccgcgcta

SEQ ID NO: 26464 - DNA, 978 bp, Mycobacterium bovis
gctagcaacggctgtcccgtcgtgggtcatatgaaatacccagtcgagggcggcggaaaccaggactggtggcccaaccggctcaatctgaaggtactgcaccaaaacccggccgtcgctgacccgatgggtgcggcgttcgactatgccgcggaggtcgcgaccatcgacgttgacgccctgacgcgggacatcgaggaagtgatgaccacctcgcagccgtggtggcccgccgactacggccactacgggccgctgtttatccggatggcgtggcacgctgccggcacctaccgcatccacgacggccgcggcggcgccgggggcggcatgcagcggttcgcgccgcttaacagctggcccgacaacgccagcttggacaaggcgcgccggctgctgtggccggtcaagaagaagtacggcaagaagctctcatgggcggacctgattgttttcgccggcaactgcgcgctggaatcgatgggcttcaagacgttcgggttcggcttcggccgggtcgaccagtgggagcccgatgaggtctattggggcaaggaagccacttggctcggcgatgagcgttacagcggtaagcgggatctggagaacccgctggccgcggtgcagatggggctgatctacgtgaacccggaggggccgaacggcaacccggaccccatggccgcggcggtcgacattcgcgagacgtttcggcgcatggccatgaacgacgtcgaaacagcggcgctgatcgtcggcggtcacactttcggtaagacccatggcgccggcccggccgatctggtcggccccgaacccgaggctgctccgctggagcagatgggcttgggctggaagagctcgtatggcaccggaaccggtaaggacgcgatcaccagcggcatcgaggtcgtatggacgaacaccccgacgaaatgggacaacagtttcctcgagatcctgtacggctacgagtgg

SEQ ID NO: 26465 - DNA, 1008 bp, Mycobacterium bovis
atgagcacccctaccgggtcccgccggatcttctccggcgtgcagcccacgtctgactcgcttcacctcggtaatgccttgggcgccgtcgcccaatgggttggcttgcaggatgaccacgatgcgttcttctgcgtggtcgacctgcatgcgatcaccatccctcaggatcccgaggcactgcggcgccggaccctgattaccgccgcgcaatacctggcgttgggaatcgatcccggccgcgccaccatcttcgtgcaaagtcaggtgccggctcacacccagctggcgtgggtgctgggttgtttcaccggctttggccaggcgtcgcggatgacccagttcaaagacaagtcggcgcgtcagggcagcgaggccaccaccgtcggcctgttcacctacccggtactgcaggccgcggacgtgttggcctacgacaccgagctggtgcccgtcggggaggatcagcggcagcacctcgagctggcccgcgacgtcgcgcaacggttcaacagccgattccccggcaccctggtggttcccgacgtgctcatccccaagatgaccgccaaaatctacgatctacaagacccgacgtcaaagatgagcaaatcggcgggcaccgatgccggtttgatcaacctgctcgacgatccggcattgtccgccaagaagattcgctccgccgtgaccgacagcgaacgtgacatccgctatgacccggacgtcaagccaggggtgtctaacctgttgaacatccagtcggcggtcaccgggaccgacatcgacgttctcgtcgacggctatgccggacacggctacggcgatttgaagaaagacaccgccgaggccgtcgtcgaattcgtcaacccgatccaagccagagttgacgaattgaccgcagatcccgcggagctggaggccgtgctcgccgccggggcgcagcgcgcccacgatgtggccagcaaaacggttcagcgagtctacgatcggctcgggttccttcta

SEQ ID NO: 26466 - DNA, 1398 bp, Mycobacterium bovis
atgagtcgcgggcggataccgaggctgggcgctgccgtactggtggcgttgacgaccgcggcggcggcgtgcggggccgatagccaggggctggtggtcagcttctacacaccggccaccgacggcgcgacgttcaccgcaattgcccaacgctgcaaccaacagttcggcggccggttcaccattgcgcaggtcagcttgcccaggtcccccaatgagcaacggttacagctggcccgacggttgaccggtaacgaccgcaccctggacgtcatggcgctggatgtggtgtggacggcggagttcgccgaagcggggtgggcgctgccgctgtcggacgacccagcggggctggccgagaacgacgccgtcgccgataccctgccaggcccgcttgcgacggccggctggaaccacaagctgtacgcggcacccgtcaccactaatactcaattgctttggtaccgaccagatttggtaaatagcccgccaacggattggaatgccatgatcgctgaggcggcccggctgcacgcggcgggcgagcctagctggatcgcggtacaggccaatcagggcgagggcttagtggtgtggttcaacacgctgctggtgagcgctggtggatcggtgctctccgaggacggtcggcacgtcaccttgaccgatactcccgcacaccgagcggctacggtcagcgcgctacagatcctcaaatcggtggctaccacgcccggcgccgacccctcgatcacccgcaccgaagagggcagcgcgcggttggccttcgaacagggcaaggccgcgctcgaggtcaattggccgttcgtgtttgcgtccatgctcgagaacgcggtgaagggtggtgtgcccttcttaccgcttaaccggattccgcagttggccggcagcatcaacgacatcgggacgttcacgcccagcgacgagcagttccgcatcgcgtatgacgccagccagcaggtgttcggtttcgcgccctatccggctgtagcgcccggccagccagccaaggtgacgatcggcgggttgaacctggcggtggccaagacgacccgccatcgagcggaggcattcgaagcggtgcgttgtctgcgtgaccagcacaatcagaggtacgtctcgctcgaggggggtctgcccgcggtgcgggcgtcgctgtactccgatccgcaattccaggcgaagtatccgatgcacgccattattcggcagcaactcaccgatgccgcggtgcggccggcgacgccggtgtaccaggcgttgtccatccggctcgcggcggtgctgagcccgatcaccgagatcgacccggagtccacggccgacgaacttgccgcgcaggcgcagaaagccatcgacggcatgggcctgctcccg

SEQ ID NO: 26467 - DNA, 2370 bp, Mycobacterium bovis
atgacgcagacccccgatcgggaaaaggcgctcgagctggcagtggcccagatcgagaagagttacggcaaaggttcggtgatgcgcctcggcgacgaggcgcgtcagccgatttcggtcattccgaccggatccatcgcactagacgtggccctgggcattggcggcctgccgcgtggccgggtgatagagatatacggcccggagtcgtcgggtaagaccaccgtggcgctgcacgcggtggccaacgctcaggccgccggtggtgttgcggcgttcatcgacgccgagcacgcgctggatccggactatgccaagaagctcggtgtcgacaccgattcgctgctggtcagccagccggacaccggggaacaggcactcgagatcgccgacatgctgatccgctcgggtgcgcttgacatcgtggtgatcgactcggtggcggcgctggtgccgcgcgcggagctcgaaggcgagatgggcgacagccacgtcgggctgcaggcccggctgatgagccaggcgctgcggaaaatgaccggcgcgctgaataattcgggcaccacggcgatcttcatcaaccagctccgcgacaagatcggagtgatgttcgggtcgcccgagacgacaacgggcggaaaggcgttgaagttctacgcgtcggtgcgcatggacgtgcggcgagtcgagacgctcaaggacggtaccaacgcggtcggcaaccgcacccgggtcaaggtcgtcaagaacaagtgcctcgcagagggcactcggatcttcgatccggtcaccggtacaacgcatcgcatcgaggatgttgtcgatgggcgcaagcctattcatgtcgtggctgctgccaaggacggaacgctgcatgcgcggcccgtggtgtcctggttcgaccagggaacgcgggatgtgatcgggttgcggatcgccggtggcgccatcgtgtgggcgacacccgatcacaaggtgctgacagagtacggctggcgtgccgccggggaactccgcaagggagacagggtggcgcaaccgcgacgcttcgatggattcggtgacagtgcgccgattccggcggatcatgcccggctgcttggctacctgatcggagatggcagggatggttgggtggggggcaagactccgatcaacttcatcaatgttcagcgggcgctcattgacgacgtgacgcgaatcgctgcgacgctcggttgcgcggcccatccgcaggggcgtatctcactcgcgatcgctcatcgacccggtgagcgcaacggtgtggcagacctttgtcagcaggccggtatctacggcaagctcgcgtgggagaagacgattccgaattggttcttcgagccggacatcgcggccgacattgtcggcaatctgctcttcggcctgttcgaaagcgacgggtgggtgagccgggaacagaccggggcacttcgggtcggttacacgacgacctctgaacaactcgcgcatcagattcattggctgctgctgcggttcggtgtcgggagcaccgttcgagattacgatccgacccagaagcggccgagcatcgtcaacggtcgacggatccagagcaaacgtcaagtgttcgaggtccggatctcgggtatggataacgtcacggcattcgcggagtcagttcccatgtgggggccgcgcggtgccgcgcttatccaggcgattccagaagccacgcaggggcggcgtcgtggatcgcaagcgacatatctggctgcagagatgaccgatgccgtgctgaattatctggacgagcgcggcgtgaccgcgcaggaggccgcggccatgatcggtgtagcttccggggacccccgcggtggaatgaagcaggtcttaggtgccagccgccttcgtcgggatcgcgtgcaggcgctcgcggatgccctggatgacaaattcctgcacgacatgctggcggaagaactccgctattccgtgatccgagaagtgctgccaacgcggcgggcacgaacgttcgacctcgaggtcgaggaactgcacaccctcgtcgccgaaggggttgtcgtgcacaactgttcgccccccttcaagcaggccgagttcgacatcctctacggcaagggaatcagcagggagggctcgctgatcgacatgggtgtggatcagggcctcatccgcaagtcgggtgcctggttcacctacgagggcgagcagctcggccagggcaaggagaatgcccgcaacttcttggtggagaacgccgacgtggctgacgagatcgagaagaagatcaaggaaaagcttggcattggtgccgtggtgaccgatgatccctcaaatgacggtgtcctgcccgcccccgtcgacttc

SEQ ID NO: 26468 - DNA, 357 bp, Mycobacterium bovis
atgcccaagtcgctgccggtgattgacatctccgctcccgtgtgctgcgccccggtggcggcggggccgatgagcgacggcgacgccttggcggtggcgctgcggctgaaggccctggccgacccggcacgagtcaagatcatgtcctacctgttcagctcgccggccggcgagcaggtcagcggccaactagcggcggcgctcagcctcagcgatggcaccgtcagccaccacttggcccagctgcgcaaggccggcctggtcatttccgatcgccggggcatgcacgtcttccatcgggtacatcctgaagccctgcaagcgctgtgtaccgtgctcaacccgaactgctgcgcc

SEQ ID NO: 26469 - DNA, 852 bp, Mycobacterium bovis
gtggacgccgacgaccggctgggcgaactgctcgaacagttgaaccaatccggccttcgtcccgatgcgatcgtcttcaccggcgatttggccgataagggcgaaccggcggcataccgcaagctccgaggcctggtcgagccgttcgcggcgcagttgggcgccgagctcgtctgggtgatgggtaaccacgacgaccgggccgaactacgcaaattcttgctggacgaagcgccatcgatggcgccgctagaccgggtgtgcatgatcgacggtctgcgcatcatcgtgttggatacctcggtacccggacatcatcacggcgaaatccgcgcgtcccaattgggttggcttgctgaagagttggccacgccagcgccggacggcaccattttggcgttgcatcatccgccgattccgagtgttttggatatggccgtcacggtggagctgcgcgaccaggctgcgcttgggcgagtgctgcggggcactgacgttcgcgccattttggccgggcacctgcactactcgacgaatgccaccttcgtcgggatcccagtgtcggttgcctcggcgacttgctacacccaggacctgaccgtcgctgctggaggaacgcgtggcagagacggcgcccaaggttgcaacctggtgcacgtctatccggacaccgtcgtgcattcggtgattccgctgggcggcggagaaacggtcggcacctttgtctcacccgggcaggcgcgacgcaaaatcgccgagagcggcattttcatcgaaccgtcgcgtcgcgattcgctattcaagcaccctccgatggtgctgacgtcctcggcaccgcgaagtcccgtcgac

SEQ ID NO: 26470 - DNA, 1263 bp, Mycobacterium bovis
atgatcctcgatgagctcagctggcgcgggttgatcgcgcagtcgaccgacctcgacacgttggccgccgaagcacagcgcgggccgatgacggtgtacgccggcttcgatcccaccgcgcctagcctgcatgccggacatttggtgccgctgctgacgttgcggcgctttcagcgcgccggtcatcgccccatcgtgctggccggcggggccaccggcatgatcggtgatccacgtgacgtcggcgagcgcagtctcaacgaggccgacaccgtcgccgaatggaccgaacggatccgtgggcagctggagcgcttcgtcgacttcgacgactcaccaatgggcgcgatcgtcgagaacaacctggaatggaccggctcactatcggctatcgagtttctacgtgatatcggcaagcacttctcggtcaacgtgatgctggcccgcgacaccatccggcggcgtctggcgggggaggggatctcttacaccgaattcagctacctgttgctgcaggccaacgactacgtcgaattgcaccggcgccacggctgcacgctgcagatcggtggtgcagatcagtggggcaacatcattgccggcgtccggttggtgcgccagaagctcggtgccaccgtgcatgcgcttaccgtccccttggtgaccgctgccgacggcaccaagttcggcaaatcaaccggcggcgggagcctgtggttggatccccaaatgaccagcccctatgcctggtaccagtacttcgtgaacaccgcggacgcggatgtgatccgctacctacggtggttcaccttcttgtcggccgacgagttggccgagctggaacaggcgacagcgcaacgcccgcaacaacgggccgcccagcgccggctcgccagcgagctcaccgtcttggtgcatggcgaggcggcgaccgcagccgtcgagcatgccagccgggccctcttcggtcggggcgagttggcccgtctggacgaggcgacactggctgctgcgttgcgggaaaccacggtcgccgaactcaaaccgggcagtcccgacggaatcgtcgacttattggtggccagcggcctgtcggccagcaagggcgcggcgcggcgcacgatccacgagggtggggtgtcggtcaacaacattcgggttgataacgaggaatgggtgccgcaaagttcggacttcttgcacggccgctggttagtgctacgtcgtggaaagcggagtatcgccggggtggaacggattggc

SEQ ID NO: 26471 - DNA, 1218 bp, Mycobacterium bovis
atgacgatagtgagcgaaaagggtcggctgtttaccagtgagtcggtgacagagggacatcccgacaagatctgtgacgccatcagcgactcggttctggacgcgcttctagcggcggacccgcgctcacgtgtcgcggtcgagacgctggtgaccaccgggcaggtgcacgtggtgggtgaggtggccacctcggctaaggaggcgtttgccgacatcaccaacacggtccgcgcacggatcctcgagatcggctacgactcgtcggacaagggtttcgacggggcgacctgcggggtgaacatcggcatcggcgcacagtcacccgacatcgcccagggggtcgacaccgcccacgaggcccgggtcgagggcgcggccgatccgctggactcccagggcgccggtgaccagggcctgatgttcggctacgcgatcaatgccaccccggaactgatgccactgcccatcgcgctggcccaccgactgtcgcggcggctgaccgaggtccgcaagaacggggtgctgccctacctgcgtccggatggcaagacgcaggtcactatcgcctacgaggacaacgttccggtgcggctggataccgtggtcatctccacccagcacgcggccgatatcgacctggagaagacgcttgatcccgacatccgggaaaaggtgctcaacaccgtgctcgacgacctggcccacgaaaccctggacgcgtcgacggtgcgggtgctggtgaacccgaccggcaagttcgtgctcggcgggccgatgggcgatgccgggctcaccggccgcaagatcatcgtcgacacctacggcggctgggcccgccacggcggcggcgccttctccggcaaggatccgtccaaggtggaccggtcggcggcgtacgcgatgcgctgggtggccaagaatgtcgtcgccgccgggttggctgaacgggtcgaggtgcaggtggcctacgccatcggtaaagcggcacccgtcggcctgttcgtcgagacgttcggtaccgagacggaagacccggtcaagatcgagaaggccatcggcgaggtattcgacctgcgccccggtgccatcatccgcgacctgaacctgttgcgcccgatctatgcgccgaccgccgcctacgggcacttcggccgcaccgacgtcgaattaccgtgggagcagctcgacaaggtcgacgacctcaagcgcgccatc

SEQ ID NO: 26472 - DNA, 501 bp, Mycobacterium bovis
atgctgatagccggcggggtaaacgccgcgatgctgctggttgccgcgctgaacatgcggggccgtggggacaccgcctcgatcgaaggcgcctaccacgccgtccacgacaccttgggggcgacgatcgcggtgctcttcgcggtcgggttgctggcgtccggcttggcgtcgtcgtcggtgggtgcttacgccggcgcgatgatcatgcaggggctgctgcactggagcgttcccatgctggtgcgccgcctaatcacgctgggccccgcgttggcgatacttacgctgggcttcgaccccacccgcacattggtgctctcacaggtggtgctgtcgttcggtattccgtttgcggtacttccactggtcaaactcaccggcagccccgcggtgatgggcggcgacaccaaccatcgcgccacgacttgggttggctgggtggtcgcggtgatggttagtctgctcaacgtgatgctgatctatctcacggtgaccggc

SEQ ID NO: 26473 - DNA, 1869 bp, Mycobacterium bovis
atgtgcaacgacaccgcgacgccgcagcttgaggagctcgtcaccaccgtagccaaccagctcatgacagtcgacgctgccacgtcagccgaagtcagtcagcgcgttttggcctatctagtggaacagctgggcgtagatgtcagctttttgcgtcataacgatcgcgacaggcgcgcgacgaggctggtggccgaatggccacctcgcctcaacataccggaccccgatccgctcaggctgatctacttcgctgatgccgacccggtgtttgcgctatgcgaacacgccaaagagcctctcgtgttccggcccgagccggccaccgaggactatcaacgcctcatcgaagaagcccgcggggttccggtaacgtcggctgccgccgtgccgctggtatctggcgagatcaccactggactgctggggttcatcaagttcggtgatcggaaatggcacgaggccgagcttaacgccctcatgaccatcgctacactcttcgcccaggtgcaggctcgcgtcgccgccgaggcgcggcttcgctatctggccgaccatgacgatctgaccggactgcataaccgtcgcgcgttgctgcagcacctggaccaaagactggcccccggacaacctggcccggtcgcggcgctatttctcgacttggaccgcctcaaggccatcaacgactacctgggccacgccgccggtgaccagttcatccatgtgttcgcccaacggatcggtgacgcactcgttggcgagagcctgatcgcccgactcggcggcgacgaattcgtcctcatacccgcatctccaatgagtgccgatgccgctcaaccgctcgccgaacgtcttcgcgaccagctcaaggaccacgtcgctatcggcggtgaggtgctcacccgcaccgtcagtatcggtgtcgcctcagggactcccggacagcacacaccgtcggacctcctgcgccgagccgaccaagccgctctggcagccaaacacgccggcggagatagcgtcgcgattttcaccgcggacatgtcggtcagcggcgaactgcgcaacgatattgaactacaccttcgacgtggtatcgaatccgacgcccttcgcctggtctacctacccgaggtcgacctacggaccggcgacattgtcgggaccgaggcattggtccggtggcagcaccccacccgtgggctgctggcaccgggctgcttcatccctgtggccgaatccatcaaccttgcaggcgaattggatagatgggtgctgcggagggcctgcaatgaattctccgagtggcagtcagccggtttgggccacgacgcgctgctgcgtatcaacgtctcagctggacagctggtgacgggcgggtttgttgacttcgtcgcagacacgatcggccagcacggtctggacgcctcgtccgtgtgtttggaaatcaccgaaaacgttgtggtgcaagacctacataccgccagagccaccctggctcgactcaaagaagtcggcgttcacatcgctatcgacgatttcggcaccggctatagcgccatatcactgttgcagacgctaccgatcgacacgctcaagatcgacaaaacattcgtgcggcaactcggaaccaacactagcgatctggtcattgtgcgcggcatcatgacactcgccgaaggcttccaactcgatgtagtagccgaaggcgtcgagaccgaggctgccgccagaattctattggatcagcgctgttaccgtgcgcaaggcttcttgttctcccggcctgtccccggggaggccatgcggcacatgttgtccgcacgacgactaccgccgacctgcatacctgcaactgacccggcgttatct

SEQ ID NO: 26474 - DNA, 483 bp, Mycobacterium bovis
gtgagcgacgaaggcgacgttgccgacgaggccgtagccgacggcgccgagaatgcggacagccgcgggagcggtggccggacggccctggtgacaaagccggtggtgcggccgcaacgtcccaccggcaagcggtcgcggtcgcgtgcggcaggagccgacgcagacgtcgacgtcgaagagccgtcgaccgcggcttcggaagctaccggggtcgccaaggacgattcgaccaccaaggccgtgtcgaaggctgccagggcaaaaaaggccagtaaaccgaaggcccggtcggttaacccgatcgcattcgtctacaactacctcaagcaggtcgttgccgagatgcggaaggtaatctggccgaaccgcaaacaaatgcttacctacacgtcggtggtgctggcgtttctggccttcatggtggcgctggtcgccggtgctgacttgggcctgaccaagctggtgatgttggtgttcggc

SEQ ID NO: 26475 - DNA, 714 bp, Mycobacterium bovis
gtgactaccttcgacggtgacacgtccgcgggtgaggcggtcgatctaacagaggccaacgccttccaggatgcagcggccccggctgaagaggtcgatccggccgccgcgctcaaagcggagctgcgcagcaagcccggcgactggtacgtcgttcactcctacgcagggtacgagaacaaggtcaaggccaacctggaaacccgggtgcagaaccttgatgtcggcgactacatcttccaggtggaggtgcccaccgaagaggtcaccgagatcaaaaacggccaacgcaagcaggtcaaccgtaaggtgctgcccggctacattctggtgcggatggacttgaccgacgactcctgggccgcggtgcgtaacacgccgggggtcacggggttcgttggggcaacatctcgcccgtcagcgctcgccctcgacgacgtggtgaagtttctgcttccgcgggggtcgacgaggaaggctgccaagggtgcggccagcacggctgccgccgccgaggcgggcgggctagagcgtccggtcgtcgaggtcgactacgaggtgggcgaatcggtaaccgtcatggacgggccgtttgccacattgccggccacgatcagcgaggtcaacgccgaacagcagaaactcaaggtgctggtctccatcttcggccgcgaaacaccggtggagctgacctttggccaagtctccaagatc

SEQ ID NO: 26476 - DNA, 426 bp, Mycobacterium bovis
atggccccgaagaagaaggtcgccgggttgatcaagctgcagatcgtggcgggccaggccaaccctgccccgccagtgggccccgcgctcggtcagcacggcgtcaacatcatggagttctgcaaggcgtacaacgccgcgacggagaaccagcgcggcaacgtcatcccggtggagatcaccgtttatgaagaccgtagcttcactttcacgctgaagacgccgcccgccgccaagctgctgcttaaggccgctggtgtggcgaagggttcggcggagccgcacaagaccaaggtcgccaaagtcacctgggatcaagtccgcgaaatcgccgagaccaagaagacggacctcaacgccaacgacgtcgacgctgcggccaagatcatcgccggtaccgctcggtcgatgggcatcaccgtcgaa

SEQ ID NO: 26477 - DNA, 683 bp, Mycobacterium bovis
atgagcaagaccagcaaggcatatcgcgccgccgccgcgaaggtggaccgcaccaacctctacaccccgctgcaggcggccaagcttgccaaagagacctcgtcgaccaagcaggacgcgaccgtcgaggtggcgatccggcttggcgtcgacccgcgtaaggcagaccagatggttcgcggcacggtcaacctgccacacggcactggtaagactgcccgcgtcgcggtattcgcggttggtgaaaaggccgatgctgccgttgccgcgggggcggatgttgtcgggagtgacgatctgatcgagaggattcagggcggctggctggaattcgatgccgcgatcgcggcaccggatcagatggccaaagtcggtcgcatcgctcgggtgctgggtccgcgcggcctgatgcccaacccgaaaaccggcaccgtcaccgccgacgtcgccaaggccgtcgcggacatcaagggcggcaagatcaacttccgggttgacaagcaggccaacctgcacttcgtcatcgggaaagcgtcgttcgacgagaagttgttggcggagaactacggcgcggcgatcgacgaggtgctgcggctcaagccgtcctcgtcgaagggccgctacctgaagaagatcaccgtgtcgacgacgacgggccccggcattccggtcgacccattcat

SEQ ID NO: 26478 - DNA, 777 bp, Mycobacterium bovis
atgaccgggttcaccgagattgccgcggtggggccactgctggtggcggtgggggtatgtctgctggctggtctggtgtcgttcgcctcaccatgtgtggtgccgctggtgcccggctacctgtcgtatctggcggccgtcgttggggtggacgagcagctgccggccggcgtcgtcaaacccccggtggctgcccgctggcgggtcgccggatcggcggcgctgttcgtggcggggttcacgacggtgttcgtgctgggcaccgtcgccgtcttgggcatgaccaccacgctgatcacgaatcagctgctgctgcagcgggtcggaggcgtgctgatcgtcgtcatgggcctggtgttcgtggggttcatcggagccctgcagcgccaggcgaggttcacgccgcgccagttgacgagcgtagcgggggcgccggtgcttggcgcggtgttcgcgctcggctggacaccgtgcctggggccgacgctgaccggggtgatcaccgttgcctcggccaccgagggtgccagcgtggcgcgtgggatcgtgctggtgattgcctattgcctggggctggggattccgttcgtgcttttggcgttcggttcggcgtgggcggtggcgggcctgggctggctgcgccggcacaccagggccatccagatcttcggcggggcgctgctgatcgcggtcggtgccgcgctggtcaccggggtgtggaacgacgtcgtgtcgtggctgcgcgacgccttcgtttccgacgtgaggttgccgatt

SEQ ID NO: 26479 - DNA, 972 bp, Mycobacterium bovis
ttgaacacgctgcacgtcaacgtcggcctggcccgctactccgactgggcgttcacctcggccgtggtggcgctggtggtcgcgctgctgctgctggcgttcgagttcgcccaggttcgcggtcgcggactcgcgccgctggccgtgccggccggatcggtggccaccgatagcgctacccctgggatcgtggcggaccaacggcaccggccgttcgacgaacgcgtcgggcggggcgggctggccgtcgcctatctgggcatcgggctactgctggcgtgcgtcgtgctgcgcggcctggccacccagcgggtgccgtggggcaacatgtacgagttcatcaacctgacctgcttgtccgggctcatcgccggcgcggtcgtgctgcgccgtgcgcgataccggccgctgtgggtcttcctgctggtcccggtgctgatcctgctcaccgtgtccggacgctggctctacgccaatgccgccccggtgatgccggcactgcagtcctactggctgcccattcatgtgtcggtggtcagcctcggttctggggtattcctggtcgccggtgtcgccagcatcctgttccttgtgcgcacatcgcggctgggtgagccaaccggtgaaggcgcgctggcgggtatggtgcggcggctccccgatgcccaaaccctggacggaatcgcctaccggaccacgatcttcgccttccccgttttcggcttcggggtgatattcggtgccatctgggccgaggaagcctggggccgctactggggctgggaccccaaggagacggtgtccttcgtcgcgtgggtggtgtacgcggcgtacctgcacgcgcggtcaacggcgggttggcgggaccgcaaggccgcctggatcaatgtcgccggcttcgtggccatggtcttcaatctgttcttcgttaacctggtgaccgtcggcctgcactcgtatgcgggcgtgggc

SEQ ID NO: 26480 - DNA, 1302 bp, Mycobacterium bovis
atgatcgctatcggcggcgtcatcggtgctggcttgttcgtcgggtctggtgtggttatccgtgcgaccggtccggcggcattcctgacctatgcgctgtgcggcgcactgatcgttctggtgatgcgcatgctgggcgagatggccgccgccaatccgtcgactggagcgttcgccgactacgcggcaaaagccctgggcggctgggcgggattctcggttggctggctgtactggtacttctgggtaatcgtcgtggggttcgaggcggttgccggcgggaaggttctaacctactggatcgatgcgccgctgtggttggcgtcgctgtgtctgatgatgatgatgaccgcgacgaacttggtctcggtgtcatccttcggtgagttcgagttctggttcgccggagtcaaggttgccaccatcgtcggcttcctggtccttggcaccgctttcgccttcgggctgctgccgggccatggcatggatttcagcaacctcagcgcgcacggtggcttctttcccgacggggtaggtgccgtcttcgctgccatcgtggtcgcgatcttctccatgactggcacggaagtagtcaccatcgccgcggctgaagcgccggaccctcaacgagcggtccaacgcgcgatgagcacggtggtggcacgcatcgtgatcttcttcgtcggctcggtcttcctgctcacggtgatcctgccgtggaactcgttggagcttggcgcctccccgtacgttgccgcgctgcggcacatgggtattgggggtgctgatcagatcatgaatgccgtcgtgcttaccgcggtgctgtcctgcttgaactcgggcctgtataccgcgtcgcggatgctgttcgtgctcgccgcccggcaggaggcgccggcccagctggtcaaagtcaaccggcgtggagtccccaccttcgcgatcatgggatcgtccgtggtgggattcctgtgcgtgatcatggcatgggtctcacccgcaacggtattcgttttcctgctcaactcgtcgggcgctgtgattttgttcgtctacctgcttatcgcgctgtcgcagatcgtgttgcgtcgccagacatctggccaaaatctgggggtacggatgtggcttttcccggggctgtcgatcgtcacggtgaccggaattgtcgccgtgctggcgcggatggcgttcgactacgccgcgcgcagccagctctggctcagcctgctgtcctgggcagtggtcgttgggtgttatttggtcaccacattggtgcgacgtccccttaatcggccttgg

SEQ ID NO: 26481 - DNA, 1041 bp, Mycobacterium bovis
atgaacatcgacatggctgctctgcatgccatcgaggtggaccggggtatctcggtcaatgaactgctcgaaacgatcaagtccgcgctgttgactgcctaccggcacacccaaggtcaccagaccgatgcgcgcatcgagatcgaccggaaaaccggtgtcgttcgggtgatcgcccgtgagaccgatgaggctggcaatctcatcagcgagtgggacgacactccagagggcttcggccggatcgccgccacgacggcacgccaagtgatgttgcagcgattccgcgacgccgagaacgagcgcacctacggcgagttctccacccgcgagggcgagatcgttgcgggagtgatccagcgcgatagccgggccaacgcccgcggtctggtcgtcgtccggattggcaccgagaccaaggcttccgagggtgtgatcccggccgctgagcaggtaccgggggagagctatgaacatggcaaccggctgcgctgctacgtagttggtgtaacccgaggtgcccgcgagccgctgattacgctgtcgcgcacgcaccccaatctggtgcgcaagctgttctcgctggaagtccccgagatcgccgacggatcggtggagatcgtcgcggtggcccgggaggccggccaccgctccaagatcgctgtgcggtccaacgttgccggcttgaacgccaagggtgcttgcatcggtccgatggggcaacgggtccgcaacgtgatgagcgagctgtccggggagaagatcgacatcatcgactatgacgacgatccggcgcgttttgtcgccaacgcgttgtcgccggccaaggtggtgtcggtgtcggtgatcgaccagaccgcccgggccgcccgcgtggtggtgcccgatttccaattgtcgctggcaatcggaaaggaagggcagaacgcccggctggctgcccggctcaccgggtggcgtatcgatattcgcggcgatgcgccgccgcccccgcccggtcagcccgaacccggagtcagccgcggtatggcgcacgaccgc

SEQ ID NO: 26482 - DNA, 1215 bp, Mycobacterium bovis
gtgaccgagaacccctatctggtcgggttacggctggctggcaagaaggtcgtcgtggttggcgggggcacggtcgcccagcgccggttacccctgctgatcgccagtggcgcggacgtgcacgtgatcgcccccagcgtcacccccgccgtcgaggcgatggaccagatcaccttgtcggtgcgtgactaccgcgacggcgaccttgacggcgcctggtatgcgatcgcggccaccgatgacgcgcgggtgaacgtggctgtcgtcgccgaggcggagcgccgacggatcttttgcgtccgggccgatatcgcggtggaggggacggcggtgaccccggcgtcattcagctatgcgggcctgtcggtgggggtgctcgccggtggtgagcaccgccgttcggcggcgatccgctcggcaatccgggaggcgttgcagcagggcgtcatcactgcgcagagttccgacgtcctcagcggcggagtggcgttggtcggcggcggtcccggcgatcccgaactgatcacggttcgcggtcgccggctgcttgcccaggccgatgtcgtggtcgccgaccggctcgccccgcccgaactgctggccgagctgccgccgcacgtagaagtcatcgacgcggccaagatcccttacggccgggccatggcccaggacgcgatcaacgctgtcctgatcgaacgggccagatccggcaactttgtggtccgtctcaaagggggcgaccccttcgtgttcgcccggggctatgaagaagtgctggcatgtgcccacgccggaatcccggtcaccgtggtgccaggtgtgacgagtgccatagccgtgcccgctatggcgggcgttccagtcactcaccgggccatgacccacgaattcgtggtggtcagtggccatcttgcgcccggtcatcccgaatcgttagtgaattgggatgcattggctgcattgacgggcaccatcgttttgctgatggcggtcgaacgcatcgagcttttcgttgacgttctgctaaagggtggccgaactgcggatacgccggtactggtggttcaacacggaacgaccgccgctcaacagacgttgcgggccacccttgccgacacgccggagaaggtccgcgcggcggggatccgacctcccgcgatcatcgtgatcggggctgtagtcggcctgagcggcgttcggggtttaaacaattct

SEQ ID NO: 26483 - DNA, 1734 bp, Mycobacterium bovis
atgtccgagttgttcttgcgcaccctgcgcgacgatcccgccgacgccgaagtggccagccacaaactgctgatccgggccggctacatccggcccgtcgcgcccgggctgtacagctggttaccgctcggcctgcgagtgctgcgcaacatagaacgggtcatccgcgacgagatgaacgccatcggtggacaggagatcctatttcctgccctgctgccgcgggcaccgtacgagacgaccaaccggtggacccaatacggcgacagcgtgtttcggctcaaggaccgccgcggcaacgactacctgctgggccccacccacgaagagctgttcaccctgaccgtgaagggcgagtacagctcctacaaggacttcccgctcacgctgtaccaaatccagaccaagtaccgcgacgaggcgcggccgcgggccggcatcctgcgcgctcgggagttcgtcatgaaggactcctactcctttgacatcgacgccgccgggctgaaggcggcctaccgcgctcaccgggaggcctaccagcgcatatttgaccgacttcaggtgcgctatgtcatcgtttcggcagtgtccggggcgatgggcggcagtgcgtccgaagagttcttggctgagagtccgtccggggaggacgcatttgtccggtgcctcgagtcgggttatacggccaacgtcgaggcggttgtcaccgcccgcccggacaccctgcccatcgatgggctgcccgaggcggtggtccacgacaccggcgacaccccaaccatcgccagcctggtggcctgggccaacgaggccgatctcggccgcacggtgaccgccgcggacaccctgaagaacgtcttaatcaaagtccgacagccgggaggggacaccgaactgctggcaatcggcgtgcccggcgaccgtgaggtcgatgacaaaaggttgggcgcagcgctggaaccggctgactacgcgttgctcgacgacgatgatttcgccaagcacccgttcctggttaagggttatatcgggccaaaggcgttgcgggagaacaatgtccgctatctcgtcgacccgcggatagtcgacggcaccagctggatcaccggggcggaccaacccggccgccatgttgtcggtttggtggccggccgcgacttcaccgcagacggcaccattgaggccgccgaggtgcgcgaaggcgatccatctcccgacggcgccggtccgctggtcatggcgcgcggtatcgaaattgggcacatcttccagctggggagcaaatacaccgacgccttcaccgccgacgtgctcggcgaggatggcaagcctgtgcggttgaccatgggttcctacggcatcggtgtgtctcggttggttgccgtcgttgccgagcagcaccacgacgagctgggccttcgctggccgtcgacggtcgcgccgttcgatgttcacctggtgatcgcgaacaaggacgcgcaggctcgcgccggggcgaccgcgctggccgccgatctggatcggctgggggttgaggtgttgctggacgaccgccaggcatcgcccggcgtcaagttcaaagatgccgagctgttgggtatgccctggatcgttgtcgtggggcgcggctgggcggacggcgtggtcgagctgcgcgaccggttcagcggtcagactcgcgagctggttgccggcgcctcgctggccaccgatatcgcagcggccgtcaccggg

SEQ ID NO: 26484 - DNA, 252 bp, Mycobacterium bovis
atgatcaccgctgcgctcaccatctatacgacatcatggtgtggctattgccttcgactcaaaacagcgctcacggccaaccgaatcgcttacgacgaggtcgacatcgaacacaaccgtgcggccgcggagttcgtcggctcggtcaatggcggcaacagaactgttcccacggtgaagttcgccgacgggtcgacgctgactaacccgagcgcggacgaggtcaaagcgaagctggtaaagatcgcgggt

SEQ ID NO: 26485 - DNA, 1410 bp, Mycobacterium bovis
atgaccgcgacccgactgcctgacgggttcgccgtccaggttgaccgtcgcgtgcgagtgcttggcgacggctcggccctgctcggtggctcaccgacccggttgctgcggctggctcccgccgcacgaggcctgctctgtgacggccgccttaaggtccgcgacgaggtcagcgcggagctggcccgcatcctgctggacgccacggtggcgcatccacggccgccgagtgggccgtcacatcgtgacgtcaccgtcgttataccagtacggaacaacgcatctggtctgcggcgtctggtgacctcgttacgcggattacgcgtcatcgtggtcgacgacggttcggcgtgcccggtcgagtcggacgactttgtcggcgcacattgcgacatcgaagtactccaccacccccacagcaaggggccggccgcggctcgcaacaccgggctagcggcctgcaccaccgacttcgtggcgttcctggattccgacgtgacgccgcggcggggatggttggaatccttactcggccacttctgcgatcccaccgtcgcactcgtcgcacctcgcatcgtcagcttggtggaaggcgagaacccggtagctcgctatgaggccctgcactcgtcgttggaccttggtcagcgcgaagcgccggtgttaccgcatagcacagtctcttacgtgccgagcgccgccatcgtttgccggagttcagccatccgcgacgtcggcggcttcgacgagaccatgcactccggggaagatgtcgacttgtgctggcggctcatcgaggctggtgctcggctgcgctacgagccaattgcgctggtcgcccatgaccatcggacccaattgcgggactggatcgcgcgcaaggcgttttacggcggttcggcggctccgctagctgtgcggcacccggacaagaccgcgccgctggtgatttcgggcggggcgctgatggcgtggatcctcatgtcgatcggcacaggccttggtcgactggcgtcgttggtgatcgcggtgctgactggtcgccggatcgccagggccatgcgctgcgccgagacgtcgttcttggatgtgcttgccgtcgccacccgcgggttgtgggcggccgcgctgcagctggcgtcggccatctgccggcactattggccactggcattgctcgcggccatcctgtcgcgccgctgtaggcgggtggtgttgattgcggcggtagtggacggtgtggtggattggcttcgccgcagggagggcgccgacgatgatgctgaaccgattgggccgctgacctacctagtgctgaagcgcgtggacgacttggcttatggcgctggcctgtggtacggggtggtgcgcgaacgtaacatcggcgcgctcaagccgcagattcgtacc

SEQ ID NO: 26486 - DNA, 1860 bp, Mycobacterium bovis
gtgtattgggtcggcaaagcctggacgatcagtgccatctgtgtgctcgcgatattggttctgctcaggtatttgacgccctggggccggcagttctggcggatcacccgcgcatacttcgttggccccaacagcgttcgcgtgtggctgatgctcggcgtgttgttgctttcggtagtgctggcagtgcgcctgaatgtgctattcagctaccaaggcaacgacatgtacacggccttgcagaaggccttcgagggcatcgcctctggcgatggcacggtcaaacgctcaggcgcgcgaggattttggatgtcgatcggggttttcagcgtgatggccgtgctgcacgtgacccgggtcatggccgacatctacttgacgcagcgcttcatcatcgcctggagggtctggctaacccaccacctcacacaagactggctcgacggcagggcctactaccgagacctgttcatcgacgaaacgatcgacaaccccgaccagcgcattcagcaagacgtcgatatcttcaccgccggggcaggcggcactccgaatgctccctccaacgggacggccagcacgctgcttttcggggccgtgcagtcgatcatttcggtgatttctttcacagcgatcctgtggaatctctcgggcaccctgaatatcttcggcgtgtccatcccgcgcgcaatgttctggaccgtgctggtctatgtgttcgtggccacggtcatctcgttcatcatcgggcggcccctgatctggctcagcttccgcaatgaaaagctcaatgccgctttccgttacgcgctggttcggctacgcgacgccgccgaggcggtgggtttctaccgcggcgagcgggtggaaggtacccagctacagcggcggttcacgccggtgatcgacaattaccgtcgctacgttcggcgcagcatcgcattcaatggatggaatctgtcggtgagccagacaattgttccgttgccgtgggtcatccaggcgcctcgattattcgccgggcagatcgacttcggcgatgtcgggcagacggcgacttccttcggcaacattcacgactcgttgtcgttcttccgcaacaactacgacgcgtttgcgtccttccgcgcagcaatcatccgattgcatgggctggtcgacgccaacgagaaaggccgcgccctgcccgcggtcctgacccgaccgagcgacgacgagtccgtcgagctcaacgacatcgaggtgcgtacgcctgccggcgatcggttgatcgacccgctcgatgtgcggctggaccgcggaggctcgctggtgatcaccgggcgttctggggccggcaagaccacgctgctgcgcagtctggcggaactgtggccctacgcatcggggaccctgcaccggccgggcggcgagaacgagacgatgttcttgtcgcagttgccgtatgtgccgctggggacgctgcgtgacgtggtgtgctaccccaactctgcggccgccatccccgacgccaccctgcgggacacgctgaccaaggtggcgctggccccactgtgtgaccggctggacgaggaacgcgactgggccaaggtgctctcccccggtgagcagcaacgtgttgcctttgctcgcatcctgctcaccaaacccaaggcggtcttcctcgacgaaagtacctcggcgctggacaccgggctggagtttgcgctctaccaattgctgcgcagcgagctgccggactgcatcgtggtcagcgtcagccatcgccccgccctcgagcggctgcacgaaaaccagctcgaactactcggtggcggccaatggcggctggccccagtcgaggcggcgcccgccgaagtg

SEQ ID NO: 26487 - DNA, 1107 bp, Mycobacterium bovis
atggagatcggaatattcctcatgccggcccatccaccggagcgcaccctctacgacgccacccggtgggatctggacgtcatcgagctggccgatcaactcggctacgtggaggcctgggtcggcgaacacttcaccgtgccgtgggagccgatctgcgcccccgatctgctgttggcgcaggcgctgctgcgcacccaacagatcaagctcgccccgggtgcgcacttgttgccctaccatcatccggtcgagttggcccaccgggtggcctatttcgaccacctcgcccagggtcggttcatgctcggcgtgggcgccagcggcatcccgggtgactgggcgctgtatgacgtggacggcaagaacggcgagcatcgcgaaatgacccgggaagcgctggagatcatgctgcgcatctggaccgaggacgagccctgggagcatcgcggaaagtactggaacgccaacggaatcgcgccgatgttcgagggtctgatgaggcgccacatcaagccgtaccagaagccccacccgcccatcggcgtcaccgggttcagcgccggctcggagaccctcaagctcgccggcgaacggggttacatccccatgagtctggacctcaacaccgaatacgtcgccacccactgggacgcggtggaggaaggcgcgctgcgcagcgggcgaaccccggatcgccgcgattggcggctggtgcgggaggtgctggtggccgagaccgatgagcaggcgttccggtatgccgtggacggcacgatgggacgcgccatgcgtgagtatgtgctgccgacgtttcggatgttcggcatgaccaagttctacaaacacaatccgtcggtgcccgacgacgaggtgacaccggagtatctcgccgagaacaccttcgtggtcggctcggtgcagaccgtggtcgacaagctcgaggccacctacgaccaggtcggcgggttcggccacctgctgatcctcgggttcgactacagcgataacccgggcccgtggaaggagtcgttgcggctgctggcccacgaggtcatgcccagactcaacgcccgcctcgccaccaagcccgccaccgcggtggtg

SEQ ID NO: 26488 - DNA, 372 bp, Mycobacterium bovis
atgccaaccatccagcagctggtccgcaagggtcgtcgggacaagatcagtaaggtcaagaccgcggctctgaagggcagcccgcagcgtcgtggtgtatgcacccgcgtgtacaccaccactccgaagaagccgaactcggcgcttcggaaggttgcccgcgtgaagttgacgagtcaggtcgaggtcacggcgtacattcccggcgagggccacaacctgcaggagcactcgatggtgctggtgcgcggcggccgggtgaaggacctgcctggtgtgcgctacaagatcatccgcggttcgctggatacgcagggtgtcaagaaccgcaaacaggcacgcagccgttacggcgctaagaaggagaagggc

SEQ ID NO: 26489 - DNA, 468 bp, Mycobacterium bovis
atgccacgcaaggggcccgcgcccaagcgtccgttggtcaacgacccggtctacggatcgcagttggtcacccagttggtgaacaaggttctgttgaaggggaaaaaatcgctggccgagcgcattgtttatggtgcgcttgagcaagctcgcgacaagaccggcaccgatccggtgatcaccctcaagcgggctctcgacaatgtcaaacccgccctggaggtgcgcagccgtcgcgtcggcggcgcgacctatcaggtgcctgtcgaggtgcgccccgaccggtcgaccacgctggcgctgcgctggctcgtcggctactcgcggcaacgccgtgagaagacgatgatcgagcgcctggcaaatgagatcctggatgccagcaatggccttggggcctccgtcaagcggcgtgaggacacccacaagatggccgaggcgaaccgagcctttgcgcattatcgctgg

SEQ ID NO: 26490 - DNA, 2103 bp, Mycobacterium bovis
gtggcacagaaggacgtgctgaccgacctgagtagggtccgcaacttcggcatcatggcgcacatcgatgccggcaagaccacaaccaccgagcgcatcctgtactacaccggtatcaactacaagattggtgaggtgcacgacggcgcagccaccatggactggatggaacaggaacaggagcgcggcatcaccatcacctctgcggccacgaccacgttctggaaagacaaccagctcaatatcatcgacacgccagggcatgtggatttcaccgtcgaggtggagcgcaatctgcgcgtgctcgacggcgcggtcgcggttttcgacggcaaagagggtgtcgaaccgcagtccgaacaggtgtggcggcaggccgacaaatacgatgtcccccgaatctgcttcgtcaacaagatggacaagatcggtgcggacttctacttctcggttcgcacgatgggggagcggcttggggccaacgccgtgcccattcagcttcccgtcggtgcagaggccgacttcgaaggcgtcgtcgacctggtggagatgaacgccaaggtgtggcgcggcgagacgaaactcggcgaaacctacgacaccgtggaaataccggccgacctggccgagcaggctgaggagtaccggaccaagctgctcgaggtggtcgccgagtccgacgagcacctgttggagaagtacctgggcggtgaggagctcaccgtcgacgagatcaagggcgcgatccgcaagctgacaatcgccagcgagatctacccggtgctgtgcggcagcgcgttcaagaacaagggcgtgcagccgatgctggatgccgtcgtcgactacctgccgtcgccgctggacgttccgccggcgatcgggcacgcgcccgccaaggaggacgaggaggtggtgcgcaaggcgaccaccgacgagccctttgcggccctggcgttcaagatcgctactcacccgttcttcggcaagctcacctacatccgggtgtactcgggcaccgtcgagtcgggtagccaggtcatcaatgccaccaagggcaagaaagaacggctgggcaagctgttccagatgcactccaacaaggagaacccggtcgatagggctagtgccggtcacatctacgcggtgatcggtctcaaggacaccaccaccggtgacaccttgagcgacccgaaccagcagatcgtgctggagtcgatgaccttccccgacccggtgatcgaggtggccatcgagccgaagaccaagagcgaccaagagaagctgagtctgtcgatccagaagctcgccgaagaggatccgaccttcaaggtgcacctggattccgagaccggccagaccgtcatcggcggcatgggcgagctgcatctggacatcctggtggaccgcatgcgccgggaattcaaggtcgaggccaacgtcggcaagcctcaggttgcctacaaggagaccatcaagcggctcgtgcagaacgtcgagtacacccacaagaagcagacgggtggctcgggccagttcgccaaggtcatcatcaacctcgagccgttcaccggtgaagagggcgcgacctacgagttcgagagcaaagtcaccggcgggcgtatcccgcgggagtacatcccgtcggtggatgccggcgcacaggaccccatccagtacggcgtgctggccggctatccgctggtgaacctaaaggtcacgctgctcgacggcgcctaccacgaggttgactcctcggaaatggcgttcaagatcgcgggctcgcaggtgctcaaaaaggctgccgcacttgcgcagccggtgatcctggaaccgatcatggcggtcgaggtgaccacacccgaggactacatgggtgacgtgatcggcgacctgaactcccgccgtggccagatccaggccatggaggagcgggctggtgcgcgcgttgttagggcgcacgtgccgctgtcggagatgttcggctacgtcggtgaccttcggtccaagactcaaggccgggcaaactactccatggtgttcgactcgtactccgaagtgccggcgaacgtgtcgaaggaaatcatcgcgaaggcgacgggcgag

SEQ ID NO: 26491 - DNA, 1188 bp, Mycobacterium bovis
gtggcgaaggcgaagttccagcggaccaagccccacgtcaacatcgggaccatcggtcacgttgaccacggcaagaccaccctgaccgcggctatcaccaaggtcctgcacgacaaattccccgatctgaacgagacgaaggcattcgaccagatcgacaacgcccccgaggagcgtcagcgcggtatcaccatcaacatcgcgcacgtggagtaccagaccgacaagcggcactacgcacacgtcgacgcccctggccacgccgactacatcaagaacatgatcaccggcgccgcgcagatggacggtgcgatcctggtggtcgccgccaccgacggcccgatgccccagacccgcgagcacgttctgctggcgcgtcaagtgggtgtgccctacatcctggtagcgctgaacaaggccgacgcagtggacgacgaggagctgctcgaactcgtcgagatggaggtccgcgagctgctggctgcccaggaattcgacgaggacgccccggttgtgcgggtctcggcgctcaaggcgctcgagggtgacgcgaagtgggttgcctctgtcgaggaactgatgaacgcggtcgacgagtcgattccggacccggtccgcgagaccgacaagccgttcctgatgccggtcgaggacgtcttcaccattaccggccgcggaaccgtggtcaccggacgtgtggagcgcggcgtgatcaacgtgaacgaggaagttgagatcgtcggcattcgcccatcgaccaccaagaccaccgtcaccggtgtggagatgttccgcaagctgctcgaccagggccaggcgggcgacaacgttggtttgctgctgcggggcgtcaagcgcgaggacgtcgagcgtggccaggttgtcaccaagcccggcaccaccacgccgcacaccgagttcgaaggccaggtctacatcctgtccaaggacgagggcggccggcacacgccgttcttcaacaactaccgtccgcagttctacttccgcaccaccgacgtgaccggtgtggtgacactgccggagggcaccgagatggtgatgcccggtgacaacaccaacatctcggtgaagttgatccagcccgtcgccatggacgaaggtctgcgtttcgcgatccgcgagggtggccgcaccgtgggcgccggccgggtcaccaagatcatcaag

SEQ ID NO: 26492 - DNA, 3702 bp, Mycobacterium bovis
atgaccgcaccggggcctgcctgctcagataccccgatcgcggggcttgtcgaattggcgctgagcgcgccgacattccaacagctcatgcagcgcgccgggggtcgacccgacgaattgacgctcatcgcgccggccagcgcgcggctgttggtcgccagtgcgctggctcggcaggggccattgctggtggtcaccgccaccgggcgggaagccgacgacctggccgccgaactgcgtggtgtgttcggggatgcggtggcgttgttgccgtcctgggagacactgccgcacgaacggctctcacccggtgttgacaccgtcggcactcgcctgatggcgctgcgccggctggcccaccccgacgatgcccagctgggcccaccgctgggggtagtggtgacctcggtgcgctcgctgctgcagcccatgacgccgcagctgggcatgatggagcccctcacgctgaccgttggcgacgaatcccccttcgacggcgtggtggcgcggctggtcgagctggcatatacccgggtggatatggtcggccggcgcggcgagttcgctgtgcgcggcgggattctggacatctttgccccgacggccgaacatccggtgcgggtcgagttctggggcgacgagatcaccgagatgcggatgttctcggtagccgaccagcgctcgattccggagatcgacattcacacactggttgccttcgcctgccgtgaactgctgctgagcgaggacgtgcgggcgcgggccgcccaactggccgcacggcatcccgcggccgagagcaccgtcaccggcagtgcttccgacatgctggcgaagctcgccgagggcatcgcggtcgacggcatggaggcggtgttgccggtgctctggtccgacgggcacgcgttgctgaccgatcagctgcccgacggcacgccggtgttggtgtgcgacccggaaaaggtgcgcacccgcgccgcggatctgatcaggactggccgtgaattcctggaagcctcgtggtcggtcgcggcgctgggaactgcagaaaatcaagcccccgtcgacgtcgaacaactgggtgggtcggggttcgtcgaactggaccaggtgcgggccgcggcggcccgaacgggtcatccgtggtggacgttgagccaattgtccgacgagtcggcgatcgagttggacgttcgggccgcgccgtcggcgcgcgggcaccagcgtgacatcgacgaaatcttcgcgatgctacgtgcccacatcgcgaccggcgggtacgccgcgctggtcgcgccgggcaccggaaccgcacaccgcgtggtggaacggctgtccgagtccgacacccccgcggggatgctcgatcccggccaggcgcccaagccgggagtcgtcggggtgctccagggcccgctgcgtgacggcgtcatcattcccggcgccaacctggtcgtcatcaccgagaccgatttgaccggcagccgggtcagcgccgccgagggcaagcggctggcggccaagcggcgcaacatcgtcgacccgctggcgctgacggccggtgacctggtggtgcacgatcagcacggcatcggccggttcgtggagatggtcgagcgcacggtcgggggcgcccgccgggagtatctggtgctggagtatgcctcggccaagaggggtggcggggcgaaaaatactgacaagctctatgtcccgatggattcgctggaccagctgtcgcggtatgtcggcgggcaggcgccggcgctgagccggctgggcggcagcgactgggccaacaccaagaccaaggcgcgccgcgcggtgcgcgagatcgcgggcgagctggtctcgctgtacgccaaacggcaggccagccccgggcatgcgttctcgccggacacgccgtggcaggccgagctggaggacgcgttcggcttcaccgagaccgtggaccagctcaccgccatcgaagaggtcaaggcggacatggaaaagccgatcccgatggaccgggtgatctgcggcgatgtcggctacggcaagaccgagatcgcggtgcgggcggcgttcaaggcggtccaagacggtaaacaggtcgcggtgctggtgcccaccacgctgctggccgaccagcatctgcagacgttcggcgagcgaatgtccggattcccggtgaccatcaagggtctgtcgcggttcaccgacgccgccgagtcccgcgccgtgatcgacggcctggccgacgggtcggtggacatcgtgatcggcacccatcggctgctgcagaccggggtgcgctggaaggatctgggcctggtggtggtcgacgaggagcagcggttcggcgtcgagcacaaggagcacatcaagtcactgcgcacccatgtcgacgtgctgaccatgagcgccaccccgatcccgcgcacgttggagatgagcctggccgggattcgcgagatgtcgaccatcctgacgccgcccgaggagcgctacccggtgctgacctacgtcggaccgcacgacgacaagcagatcgccgcggcgctgcgccgggagctgctgcgcgacgggcaggcgttctacgtgcacaaccgggtcagctcgatcgacgcggccgccgcccgggtgcgtgagctggtgcccgaggcgcgggtggtggtcgcgcacgggcagatgcccgaggacctgttggagaccaccgtgcaacggttctggaaccgcgagcatgacatcctggtttgcaccaccatcgtggagaccggcctggacatctccaacgccaacactttgatcgtcgagcgcgccgataccttcgggctgtcccagctgcaccagctgcgtggccgggtgggccgcagccgggagcgcggctacgcctatttcctctatccaccgcaggtgccgctgaccgagaccgcttacgaccggttggcgacgatcgcgcagaacaatgagctgggcgcgggcatggccgtggcgttgaaggacctagagatccgcggtgccggcaacgtgctcggcatcgagcagtccggacacgtcgccggcgtcggattcgacctgtacgtgcggttggtcggcgaggccctggagacgtaccgggacgcgtaccgggcggccgccgacggccaaaccgtgaggaccgccgaagaacccaaggatgtgcgaatcgacctgcccgttgacgcgcacctgccaccggactacatcgccagtgatcggctgcggctggagggctaccggcggctggcggccgcctcctctgatcgcgaagtggcggccgttgtggacgagctaaccgatcggtatggggccctgccggagccggcccggcggctggcggcggtggcacggctgcggctgctgtgccgtggctccggcatcaccgacgtgacggcggcgtcggcagcgaccgtgcggctgtccccgttgacgctgccggactccgcccaggtgcggctgaagcgaatgtatcccggagcgcactaccgtgccacgacggccaccgtgcaggttcccattccgcgagccggtggcctcggcgcgccgcgaatccgcgacgtcgagctggttcagatggtggccgatttgataaccgcgctcgctgggaaaccgcgccagcatattggtataacgaaccctagcccgccaggcgaagacggccgtggtcgcaacacgacgattaaggagcgacaaccg

SEQ ID NO: 26493 - DNA, 2466 bp, Mycobacterium bovis
gtgaatagcgacgggcgtcaccatcagtcgtccagcggcgccccgcgcgggccggcgaatcccggccagcgtggtcaggttccacccgacgacagactgaccgcgatcctcccgccggtgaccgatgaccgatcggctccgcacgcggactccatcgaggcggtcaaggccgcgctcgacggcgcgccgccgatgcccccgccgcgcgacccgctcgaggaggtcacggccgcgttggccgccccgcccggtaaaccgccgcggggggatcagcttggtggcagacgtcgcccaccggggccgcccgggccccccggttcgtccggacagcctgccggccggctgccccaaccgagggtggacttgccccgggtcggccagatcaactggaaatggatacggcgttcgctgtacctcaccgcggcggtggtgatcctgttgctgatggtcaccttcacgatggcctacctgatcgtcgacgttcccaagccaggtgacatccgtaccaaccaggtctccacgatccttgccagcgacggctcggaaatcgccaaaattgttccgcccgaaggtaatcgggtcgacgtcaacctcagccaggtgccgatgcatgtgcgccaggcggtgattgcggccgaagaccgcaatttctattcgaatccgggattctcgttcaccggcttcgcgcgggcagtcaagaacaacctgttcggcggcgatctgcagggcggatcgacgattacccagcagtacgtcaagaacgcgctggtcggttccgcacagcacgggtggagcggtctgatgcgcaaggcgaaagaattggtcatcgcgacgaagatgtcgggggagtggtctaaagacgatgtgctgcaggcgtatctgaacatcatctacttcggccggggcgcctacggcatttcggcggcgtccaaggcttatttcgacaagcccgtcgagcagctgaccgttgccgaaggggcgttgttggcagcgctgattcggcggccttcgacgctggacccggcggtcgaccccgaaggggcccatgcccgctggaattgggtactcgacggcatggtggaaaccaaggctctctcgccgaatgaccgtgcggcgcaggtgtttcccgagacagtgccgcccgatctggcccgggcggagaatcagaccaaaggacccaacgggctgatcgagcggcaggtgacaagggagttgctcgagctgttcaacatcgacgagcagaccctcaacacccaggggctggtggtcaccaccacgattgatccgcaggcccaacgggcggcggagaaggcggttgcgaaatacctggacgggcaggaccccgacatgcgtgccgccgtggtttccatcgacccgcacaacggggcggtgcgtgcgtactacggtggcgacaatgccaatggctttgacttcgctcaagcgggattgcagactggatcgtcgtttaaggtgtttgctctggtggccgcccttgagcaggggatcggcctgggctaccaggtagacagctctccgttgacggtcgacggcatcaagatcaccaacgtcgagggcgagggttgcgggacgtgcaacatcgccgaggcgctcaaaatgtcgctgaacacctcctactaccggctgatgctcaagctcaacggcggcccacaggctgtggccgatgccgcgcaccaagccggcattgcctccagcttcccgggcgttgcgcacacgctgtccgaagatggcaagggtggaccgcccaacaacgggatcgtgttgggccagtaccaaacccgggtgatcgacatggcatcggcgtatgccacgttggccgcgtccggtatctaccacccgccgcatttcgtacagaaggtggtcagtgccaacggccaggtcctcttcgacgccagcaccgcggacaacaccggcgatcagcgcatccccaaggcggtagccgacaacgtgactgcggcgatggagccgatcgcaggttattcgcgtggccacaacctagcgggtgggcgggattcggcggccaagaccggcactacgcaatttggtgacaccaccgcgaacaaagacgcctggatggtcgggtacacgccgtcgttgtctacggctgtgtgggtgggcaccgtcaagggtgacgagccactggtaaccgcttcgggtgcagcgatttacggctcgggcctgccgtcggacatctggaaggcaaccatggacggcgccttgaagggcacgtcgaacgagactttccccaaaccgaccgaggtcggtggttatgccggtgtgccgccgccgcctccgccgccgccgtcggaggtaccaccttcggagaccgtcatccagcccacggtcgaaattgcgccggggattaccatcccgatcggtcccccgaccaccattaccctggcgccaccgcccccggccccgcccgctgcgactcccacgccgccgccg

SEQ ID NO: 26494 - DNA, 2811 bp, Mycobacterium bovis
atggtcaagcgcctcaagaaggtggccgactatgtcggcactttgtccgacgatgtcgagaaactcaccgacgccgagctgagggcgaaaaccgacgagttcaagcggcggctggccgaccagaaaaacccagaaaccctcgacgacctgttgcccgaggccttcgccgtggcccgcgaggccgcctggcgggtgctggaccagcggccgttcgacgtgcaggtgatgggtgcggccgccctgcacctgggcaacgttgccgagatgaagaccggtgaaggcaagaccctgacctgtgtgttgcccgcttacctcaatgcgctggccggcaacggcgtgcacatcgtcaccgtcaacgactacctggctaaacgcgacagtgagtggatgggccgcgtgcaccgcttcctcgggcttcaggtcggggtgattttggccaccatgacacccgatgaacgccgggtggcctataacgccgacatcacctacggcaccaataacgagtttgggttcgactacctgcgcgacaacatggcgcactcactggatgatctggtgcagcgcgggcaccattacgccattgtcgacgaggtcgattccatcctgatcgacgaggcccgcaccccgctgatcatctccggtcccgccgacggcgcctccaactggtacaccgagttcgcccggttggcgccgctgatggaaaaggacgtccactacgaggtcgatctacgcaaacgcaccgtcggcgtgcacgagaagggtgtggaattcgtcgaagaccagctcggcatcgacaacctgtacgaggccgccaactcgccgttggtcagctatctcaacaacgctctgaaggccaaagagctgttcagccgcgacaaggactacatcgtccgcgatggtgaggtgctcatcgtcgacgagttcaccggccgggtgctgatcggccgccgctacaacgagggcatgcaccaggccatcgaggccaaggagcacgtcgagatcaaggccgagaaccagacgctggccaccatcacgctgcagaactacttccggctctacgacaagctcgccggcatgaccggcaccgcccagacggaggcggccgagctgcacgagatctacaagctgggcgtggtcagcatcccgaccaacatgccgatgatccgtgaagaccagtccgacctgatctacaagaccgaggaggccaagtacatcgcggtggtcgacgacgtcgccgagcgctacgcgaagggacagccggtgctgatcggcaccaccagcgtggagcgctcggagtatctgtcgcggcagttcaccaagcggcgcatcccgcacaatgtgctcaacgccaagtaccacgagcaagaggcgaccatcatcgcggtggcgggccgccgcggcggcgtcaccgtcgccaccaacatggccggtcgcggcaccgacattgtgctgggcggcaacgtcgactttctcaccgatcagcggctgcgcgaacgcggcctggatccggtggagacgcccgaggagtacgaggcggcctggcactccgaactgcccatcgtcaaagaggaagccagcaaggaggccaaggaagtaatcgaggccggcggcctgtacgtgctgggcaccgagcgccacgagtcgcggcggatcgacaaccagttgcgtggccggtccggccgccagggggaccccggggagtcgcgcttctatttgtcgctgggtgacgagctgatgcgccgcttcaatggcgcggccttggagaccttgttgaccaggctgaacctgcccgacgacgtgccgatcgaagccaagatggtcacccgggccatcaagagcgcccagacccaggtcgagcagcagaactttgaggtccgcaagaacgtcctcaaatacgacgaggtgatgaaccagcagcgcaaggtcatctacgccgagcgccggcgcatcctcgaaggcgaaaacctcaaggaccaggcgctggacatggtccgcgatgtcatcaccgcctacgtcgacggcgcgaccggcgaaggctatgccgaagattgggatctggacgcgttgtggacggcactcaaaaccctctatccggtggggatcaccgccgactcgctgacccgcaaggaccacgaattcgagcgcgacgatctcacccgcgaggagttgctggaggcactactcaaggacgccgaacgtgcctatgccgcacgggaagccgaactcgaggaaatcgccggcgagggtgcgatgcgccagctggaacgcaacgtgctgctcaacgtcatagaccgtaagtggcgtgaacacctctacgagatggactacctcaaggagggtatcgggctgcgcgcgatggcgcagcgcgatccgttggtcgagtaccagcgtgagggctacgacatgttcatggccatgctcgacggcatgaaagaggaatcggtcggcttcctgttcaacgtcaccgtggaggcggtccccgccccgccggttgccccggctgccgaacccgcagagcttgccgaattcgccgccgcggccgcagccgccgcgcagcaacgcagcgcggtcgatggtggcgcgcgcgaaagagctccaagtgcattacgcgccaagggtgttgccagcgagtcgcccgctttgacctattccggtcccgcggaggatggctcggctcaggtgcagcgcaacggcggtggagcccacaagacgccggccggagtgccggccggtgctagccggcgcgagcggcgcgaagccgcccgccgacaaggccgcggcgccaagccgccgaaatcggtcaagaagcgt

SEQ ID NO: 26495 - DNA, 375 bp, Mycobacterium bovis
ttgattgcaacaccgggcttatttgcggtgcttcgtgcacgcaaccgcatgaggcggtcagcggattttgaaacaacggtgaagcacgggatgcgtaccgtgcggtctgacatggtcgtttattggtggcgtgggagtggcggtgggccgcgcgtcggactgattatcgccaagtcggtggggtcggccgtggaacgccaccgcgtggcacgtcggctgcggcacgtggctgggtcgatcgtcaaagaactccacccgtccgatcatgtggtgatccgcgcgctgccgagcagccggcatgtctcctcggctcggttggagcagcaactgcgatgcggcttgcggagggctgtcgaactggcaggtagtgatcgg

SEQ ID NO: 26496 - DNA, 1842 bp, Mycobacterium bovis
atgcggtcccgcgacttctggggatcggcagcccgactggtgaaacggctggcgccacaacgccggctgagcatcgcggtgatcacactgggaatcgccggcacgacgatcggcgtcatcgttccacggatcctcggccatgccaccgatttgctgttcaacggcgtgatcgggcgagggctaccggggggaatcaccaaggcacaggccgtcgcttcggctcgggcccgtggtgacaacaccttcgccgacctgctgtccgggatgaacgtggtgccgggccaaggtgtggacttcgccgcggtggagcgaacactggcgctggcgttggcgctgtatctggctgcagcgctgatgatttgggcacaagcccggctgctcaacctcaccgtgcagaaaacgatggtcaggttgcggaccgatgtcgaagacaaggtgcaccggctgccgctgtcctacttcgacggacaacagcgcggtgagctgctgagccgggtcaccaatgacatcgacaacctccagtcgtcgctgtcaatgacgatcagccagctggtgacgtcgattctgaccatggtggcggtgctggccatgatggtgtcgatctcgggcctgctggcgctgatcacactgctgacggtgccgctgtcgctgctggtgacacgcgcgatcacccggcggtcacagcccctattcgtagctcactggaccagcaccgggcgcctcaacgcccatctcgaagagacctacagcgggttcacggtagtcaagacgttcggccaccaagcggccgcacgagaacggttccacgagttgaatgacgacgtctaccaggccggtttcggcgcccagttcctctctggtctcgtgcagccggcgacggcgttcatcggcaacctcggctacgtcgcggtcgcggtggccggtggcctgcaggtagccaccgggcagatcacgctcggcagcatccaggcgttcatccagtacatccgccagttcaacatgccgctgagccagctggccgggatgtacaacgccctgcagtccggggtggccagcgcggagcgggtgttcgacgtgctcgacgagcccgaggagtcgccggagcctgagccggagctgccgaacctaaccggacgggtcgagtttgagcacgtgaactttgcttacctcccgggcacgccggtgatccgcgacctgtcgctggtggccgaaccgggtagcacggtggcgatcgtcggaccgacgggagccggcaagaccacgctggtgaacctgctaatgcggttctacgagatcggttccggacgaatcctgatcgacggggtggatatcgcctcggtaagccggcagtcgctgcgatcgcgaatcggcatggtgttgcaagacacctggctctacgacgggaccatcgcggagaacatcgcctacggacggccggaggccaccacagacgagatagtagaagccgccagggcggcccatgtcgaccggtttgtgaacacactgcctgctggctaccagacacgggtcagcggcgacggcggcagcatcagcgtcggcgagaagcaactcattaccatcgcccgcgcctttcttgcccgcccgcagctgttgatcctggacgaggcgaccagctcggtcgatacccgcaccgagctgctcatccagcgagcgatgcgcgagcttcgccgggatcgtacgagtttcattatcgcccaccgactttcgacgattcgcgatgccgaccacatcctggtggtccagaccggccagatcgtcgaacgcggcaaccacgccgagctgttggcccggcgcggggtctattaccagatgacgcgggcc

SEQ ID NO: 26497 - DNA, 870 bp, Mycobacterium bovis
gccgtcgtcgtcttgctcaacctctcccgagaccagctggaccgggtcggcgagatcaacgtcatcgaacgcacactgcgggccgggctggcccggcaccccgacgctgtcgtggtcgccaactgcgacgacgtgctgatgacctcggccgcctacgacagccccaacgtcgtttgggtggctgccggcggcgcgtggtcaaacgattcggtcagctgcccgcgcagcagcgaggtcatcgttcgcaaggccccctctcaggaagaccactggtactccaccggcgccgacttcaagcggcccgccccgcactggtggttcgacgacgccacgctgtatgggcccgacgggctggcgctgccgatgcggctggcactgccaggctcggtgaatcgcggcaacgccgcccaagccgtggccgccgcagtcgccctcggcgccgatccggctgtggccgtcgccgccgtctgccaggtcgacgaggtcgccggacgctaccggaccgttcgtatcggcgcgcaccaagcccggatcctgctggccaaaaacccggccggctggcaggaagcgctggcgatggtcgacaagcatgcagacggggtggtcatcgcggtcaacgggcgggttcctgacggcgaggacctgtcctggttgtgggacgtgcgcttcgagcacttcgagacgacccgagtggtagccgctggggagcgcggcaccgatttggcggttcgcctcggatatgcaggcgtcgagcacaccctggtgcacgacaccgtggccgccatcgcctcatgcccacccgggcgggtggaggtcgtcgccaactacaccgcgttcctgcagctgcaacgagcattggcgcgtcgtggc

SEQ ID NO: 26498 - DNA, 2301 bp, Mycobacterium bovis
atgcgtgccgtctggatgatggcggccaagggcaccggcggcgcggcgcggtcgatcgggcgagcccgcgacatcgagcccgggcatcgccgcgacggaatcgcgctggtgctgctcggccttgccgtggtagtcgccgcgagctcgtggttcgacgccgcccggccgctcggcgcgtgggtcgacgccttgttgcggacgttcatcgggtcggcagtggtcatgctcccgctggttgccgccgccgtggccgtggtgctgatgcgtacgtcgcccaaccccgattcgcggccgcggctgatcctcggcgccagcctgatcggcttgtcgtttctcggcttgtgccacctgtgggcgggctcacccgaggccccggagtcgcgtttgcgcgccgcggggttcatcggtttcgcgatcggcgggccgctctcggacgggttgaccgcctggatcgccgcgccgctgttattcatcggcgcgctgttcggattgctcctgctggccgggatcacgatccgagaggtgccagatgccatgcgcgccatgttcggcacccggctgttgccacgggaatacgccgacgacttcgaggacttcgcggacttcgatggtgacgacgcggacaccgtcgaagtcgcccgccaggacttctccgacggttactacgacgaggtgcccctgtgctccgacgacgggccaccggcctggccgtcggccgaggttccgcaggatgacactgcgacgataccggaagcctccgccggtcggggctccggaagacgcggccgccgcaaagatacccaagtgctggaccggatcgtcgagggtccctacacgctgccgtcgctggacctgctgatatccggtgatccgcccaagaaacgcagtgcggccaacacccacatggccggcgccatcggtgaggtgctgacccagttcaaggtcgacgcggccgtcacgggctgcacccgcgggcccaccgtcacccgctacgaggtcgaactggggcccggcgtcaaggtcgagaagatcaccgcgctgcagcgcaacatcgcctacgcggtggctaccgagagcgtgcgcatgctggcaccgatccccggcaagtccgccgtcggcatcgaggtacccaacaccgaccgggaaatggtgcggttggccgacgtgctcaccgcacgagagacccgtcgcgaccatcatccgttggtgatcgggctgggcaaggacatcgaaggcgacttcatctcggccaacctggccaagatgccgcacctgctggtggccggctcgacgggctcgggaaagtccagcttcgtcaactccatgctggtgtcgctgttgacccgggccaccccggaagaggtcaggatgatcctgatcgacccgaagatggtggaactgacgccgtatgaaggcattccgcatctgatcacgccgatcatcacccagccgaagaaggccgcggccgcgctggcctggctggtcgacgagatggagcagcgctaccaggacatgcaggcctcccgggtgcgccacatcgacgacttcaacgacaaggtgcgatccggggccatcaccgcgccgctgggcagccagcgcgagtatcggccctacccctacgtggtggccatcgtcgacgagttggccgacctcatgatgaccgcgccgcgtgacgtcgaggacgccatcgtgcggatcacccagaaagcccgcgccgccggcatccacctggtgctggccacccagcgcccgtcggtggacgtggtcaccgggctgatcaagaccaacgtgccgtcgcggctggcgtttgccacctcgtcgctgaccgacagccgggtgatcctggaccaggcgggcgcggaaaagctgatcggcatgggcgacggcctgttcttgccgatgggtgcgagcaaacccctccggctgcagggcgcttacgtctccgacgaagagatccacgccgtcgtcaccgcctgcaaggaacaggccgaacccgaatacaccgagggcgtcaccacggctaaacccaccgcggagcgcaccgacgtcgaccccgacatcggcgacgacatggacgtcttcctgcaggccgtggaactggtggtgtccagccagttcgggtcgacgtcgatgctgcagcgcaagctgcgggtcggcttcgccaaagcgggccgtttgatggacctgatggagacccgcggcatcgtcgggcccagcgaaggctcgaaggcccgtgaggtgctggtcaagcccgacgagttggcgggcacactggccgcgatccggggtgacggcggcgag

SEQ ID NO: 26499 - DNA, 378 bp, Mycobacterium bovis
gtgtccactacccgccgtcgcagacccgcgctgatcgcgttggtgatcatcgcgacctgtggttgcctggccctgggttggtggcagtggaccaggtttcaatcgacctcgggcacctttcaaaatctgggttacgcgttgcagtggccattgtttgcttggttctgcgtctacgcgtaccgcaacttcgttcggtatgaagagacgcccccgcaaccgcccaccggcggcgccgccgccgcgatacctgccggattgctgcccgagcggccgaagccggcgcagcagccacccgacgatcccgtactacgggaatacaacgcctacctagccgagctagccaaggacgatgccaggaagcagaacaggaccaccgca

SEQ ID NO: 26500 - DNA, 3381 bp, Mycobacterium bovis
gtgttttccaaggtgctcgtcgccaatcgcggggagatcgcgatccgggcctttcgtgccgcctacgaactgggcgtcggaaccgtggccgtttatccgtacgaggaccgcaattcgcagcaccgtctcaaggcggacgagtcttaccagatcggcgacatcggtcacccggtgcatgcatacctgtcggtcgacgagatcgtcgcgacggcccgtcgggcgggtgccgacgctatctaccctggctacgggtttctatcggagaatccggatctggctgcggcatgcgcggcggcgggcatcagcttcgtcggtcccagcgccgaagtgcttgagctggctgggaataagtctcgcgccatcgcggcggcccgcgaagccggcttgcccgtgctgatgtcctcggcgccgtcggcctcggtcgacgaactgctgtcggttgcggccggcatgccgtttccgttgttcgtcaaggcagttgccggtggcgggggccggggtatgcgtcgtgtcggcgatatcgcggcgcttccggaggcgatcgaagccgccagccgggaagccgagtcggcgttcggggacccgacggtctatctcgagcaggcagtgatcaatccacgccacatcgaggtgcagattctggcggacaacctcggcgacgtgatccatctctatgagcgtgactgcagtgtgcagcgtcgccatcagaaggtcatcgagctggcgcccgcgccgcacctggacgccgagttgcgttacaagatgtgcgtcgatgcggtcgccttcgcccgccatatcgggtacagctgcgcgggcaccgtcgagttcctgctggacgagcgaggggagtatgtcttcatcgagatgaatccgcgggttcaggtggagcacacggtgaccgaggagattaccgacgtcgacctggtcgccagccagctgcgcattgccgccggggagacgctcgaacaattgggcctgcggcaggaggacatcgcaccgcatggcgccgcactacagtgccggatcaccaccgaggatccggccaacggcttccggccggacacgggccggatcagcgcgttgcgcaccgccggcggtgccggtgtccgcctggacggcagcaccaacctgggcgcagaaatcagcccgtacttcgactccatgctggtcaagctgacctgtcggggccgtgacctccctaccgcagtgagccgtgcgcgccgggcgatcgcggagttccggatccgcggggtatcgacgaatattccgttcctgcaagcggtcctggatgacccggacttccgagcgggccgggtcaccacgtccttcattgatgagcggccgcagctgctgaccgcgcgcgcctcggccgaccgcggcaccaagatccttaacttcctggccgatgtcaccgtcaacaacccgtatggctcgcgtccgtcaacgatctacccggacgacaagctgcccgatcttgatctgcgggccgcaccaccggccgggtccaagcagcgactagtcaagttggggccggaaggatttgctcgttggctgcgggagtcggccgcggtcggggtcaccgataccacattccgggatgctcaccagtcgttactggctacccgagtacgcaccagcggactgtcgcgggtggcaccgtatctcgcgcggaccatgccgcagctgttgtccgtggagtgttggggcggtgcgacttacgatgtggcgctgcgctttctcaaggaggatccctgggaacggctggccacactgcgtgcagcaatgcccaatatctgcttgcagatgctattgcggggccgcaataccgtgggctacacgccgtacccggaaatcgtgacgtcggcgtttgtgcaagaagcaacagccaccggtatcgacatctttcgtatcttcgacgcgctcaacaacatcgagtcgatgcgtccggcgatcgacgcagtacgcgaaacaggttctgcgatagcagaagtcgcgatgtgctacacgggcgaccttaccgatccgggtgaacagctgtacacgctggactactacctgaaactggctgagcagatcgtggacgccggcgcccatgtgctggcgatcaaggatatggctggactgttgcgcccgccggccgctcaaaggttggtcagcgccctgcgcagtcgcttcgacctgcccgttcacctgcacacccacgacacaccgggtggccagctcgccagctatgtggccgcttggcacgccggggccgatgccgtcgacggcgccgccgcgccgctggcgggaacgaccagccagcccgcgctgagctcgatcgttgctgccgctgcccacaccgagtacgacaccggcctgtcgctttcggcggtgtgcgccctggagccgtactgggaggcgttacgaaaagtgtatgcgccgttcgagtctgggttgccggggccgacggggcgggtttatcaccacgagattccgggcggccaactgtctaatctgcgccagcaagcaattgctcttggtctgggagatcgattcgaagagatcgaagaggcctacgcgggcgccgaccgagtgttgggcaggctggttaaggtcacgccaacgtccaaggtggtcggcgatctggcgctggcactggtcggcgccggtgtcagtgcagacgaattcgcctccgatccagcgcgatttggcatcccggaatcggtactcggatttctgcggggcgagctgggtgatccgcccggcgggtggcccgaaccgctgcgcactgcggcgctggccggtcgcggggcggccaggcccactgcgcaattggcggcggacgacgagattgccctatcgtcggtcggagccaagcgtcaggccaccctgaacaggctgttatttcccagtccaacaaaggaattcaatgagcaccgggaagcctacggcgacacgtcgcaattgtcggccaaccagttcttctatggtctgcgccaaggtgaagagcatcgggtgaagctggagcgtggggtggagctgttgatcgggctggaggccatttccgaacccgacgaacgcggcatgcgaacggtgatgtgcatcctcaacgggcagctgcggccggtgctagtgcgcgaccgcagcattgccagtgccgttccggccgccgagaaggccgaccgcggcaatcccggacacatcgccgcgccatttgccggagtcgtcacggtcggggtgtgcgtcggcgagcgggtcggcgccggccaaaccatcgccaccatcgaggcgatgaagatggaagccccgatcaccgccccggttgccggcaccgtggagcgggtggcggtgtcggacaccgcccaggtggagggcggagacctgttggtggtggtgagc

SEQ ID NO: 26501 - DNA, 1392 bp, Mycobacterium bovis
gtgacccactatgacgtcgtcgttctcggagccggtcccggcgggtatgtcgcggcgattcgcgccgcacagctcggcctgagcactgcaatcgtcgaacccaagtactggggcggagtatgcctcaatgtcggctgtatcccatccaaggcgctgttgcgcaacgccgaactggtccacatcttcaccaaggacgccaaagcatttggcatcagcggcgaggtgaccttcgactacggcatcgcctatgaccgcagccgaaaggtagccgagggcagggtggccggtgtgcacttcctgatgaagaagaacaagatcaccgagatccacgggtacggcacatttgccgacgccaacacgttgttggttgatctcaacgacggcggtacagaatcggtcacgttcgacaacgccatcatcgcgaccggcagtagcacccggctggttcccggcacctcactgtcggccaacgtagtcacctacgaggaacagatcctgtcccgagagctgccgaaatcgatcattattgccggagctggtgccattggcatggagttcggctacgtgctgaagaactacggcgttgacgtgaccatcgtggaattccttccgcgggcgctgcccaacgaggacgccgatgtgtccaaggagatcgagaagcagttcaaaaagctgggtgtcacgatcctgaccgccacgaaggtcgagtccatcgccgatggcgggtcgcaggtcaccgtgaccgtcaccaaggacggcgtggcgcaagagcttaaggcggaaaaggtgttgcaggccatcggatttgcgcccaacgtcgaagggtacgggctggacaaggcaggcgtcgcgctgaccgaccgcaaggctatcggtgtcgacgactacatgcgtaccaacgtgggccacatctacgctatcggcgatgtcaatggattactgcagctggcgcacgtcgccgaggcacaaggcgtggtagccgccgaaaccattgccggtgcagagactttgacgctgggcgaccatcggatgttgccgcgcgcgacgttctgtcagccaaacgttgccagcttcgggctcaccgagcagcaagcccgcaacgaaggttacgacgtggtggtggccaagttcccgttcacggccaacgccaaggcgcacggcgtgggtgaccccagtgggttcgtcaagctggtggccgacgccaagcacggcgagctactgggtgggcacctggtcggccacgacgtggccgagctgctgccggagctcacgctggcgcagaggtgggacctgaccgccagcgagctggctcgcaacgtccacacccacccaacgatgtctgaggcgctgcaggagtgcttccacggcctggttggccacatgatcaatttc

SEQ ID NO: 26502 - DNA, 6129 bp, Mycobacterium bovis
tccacgtcgacatcgcgaccactagccaagtcgccgcactcaacagcctcgacgtcgggcactgtgcgcaggtatgcggccgcgccctgccagaccgctgcgggataccaaggcacggccaaggactcgagccaccaccttggcattgacatcgggcgtgtcgatcacatgcaggacggcgtagtcggcgtgctcgcggtcggcctgggccagacccgcacgcactgacgcgctcagcccctgctgccagtccggcgcggtaatcgcggtgacaccggccggtgccgacacctcgacagcacccagcaccaaaaaacgtcgttacaaccaccgtcgcgcaacgccccgaccgcggtgtccagccacccgtcaaccagcactttcggcttgccataccaccggcccgcacccgcggccagcaagactcccacgaccgtcgacggcaacaacgccattctccgattatgcgggccgttgcagaagcgcgtcactgcagtaaattgcgggacctcgcgcgtaacctactcccgatatctcagatttccggggagtagcgcgtgcggctatcgctcattgcacggggtatggcggccctgctggcggctaccgcgctagttgccggctgcaacaccaccatcgacggcaggccggtcgcttcgccagggtcgggacctaccgagccgacttttccgacgcctaggccaactaccgcgccgccggggaccaccgccccgacgctaccgacgacaccggtcagcccgaccgcgccggccggcgccattccgctcccgcctgactccaacggttacgtcttcatcgaaaccaagtccggaatgacgcgttgccagatcaatagggacagcgttggctgcgaggcaccgttcaccaactcccccttgcgagatggtgagcacgccaacggcatccacatcaccgccggcggctccgtgcagtgggtgttgggcaatctgggcgccatccccaccgtcagcatcgactaccgaacctatgaagcgcagggctggaccatcgacgccaccaccgatggcacccgcttcacgaacaaccgcacgggccatggcatgttcgtcagcatcgagaaggtcgacacattctgagcgcatgcccttatgacccttgtgccccgagctgccgtcgctgccccttgggctcgaaaacatgttccacccggtggctgatcaccgttgcgttggcgccaccagtcacgcccaccactgtgacacccgagggcctgacgcgtcagcggcgagcagagaactccgccaccatcgcctcggcgctgcgcaccgccgcgcgacaggccctggtagtgaacggatcgttgagtggatgcgccgcacggcgacgccagtgttgcgctgcggccagcgcggcgcgcggggcctcgcgagaattcgcgggatccaggcccagccgagcggcggcactggtgcccgacccgccgatgatgcggcgcagcgacgcgatttcgtcgtcgttcaatgtcgttgcccgcgaaggcaaaaggcttagcattcggagttcttcgaaggcgtgggtgtcggctagcaacgggtcgatgtcggcaatgacgtacggggtcgccggcaccggatgcgtctgcacgaatcggcgcaaggagaccaaggcggtatgcgccttaagcatgtcggagcgctgcgcgaactgctggtctatcacattgcgcagcgccaccagcccgctgcgctccagcagttcggcggccagcccggtcgaatcggtcacgccggccgccagcacggcaatcgacatccggatgccgaacatgccgaaccgctcgagcaattgcgcacggatgcccgcgtccaccggtagcggactgtcccggcgcacaaaacggtccacgctcagcagggccctattgagctcggtgcgctcggcaccggccagcttgcgcagcgcgatgaactcggtctggcgcagtgtgcgcgcggtcagcgcaagaagtccggataccggcaccaccgcctggcaaatgcccatctggttcagttcgcgggtgaaccgcttggccacgtcgttggccgagagcatcgcgtcgatgcggcccgcgccgatctcatccgcgcgagacgccaccccgatgatgcccagggctcccaccgacccgccgaccagcccaccgatctgtttgagcagcgcgacgtcagcggcgttcagggtgcgcaacaggaacaccaccgcatccacccgaggcaccccgtcggcggggaccagcagccgcaacgtgcgctcggaggcatcgcatgccaacgacgacgttcccggggtgtcaacaatggtggcgtcgatgagttcctcggctggccactcgacttccaggtcgatcagctcggccgggttgatcctgcgcaggtcgaaactcagcccgccccgacgggtgatcggcacgttggcgcgtcgaccgccgcgatggttggcggtgacccgcggtgtcggaccgtgccggaaccaggtcacaatccgggtggcctcggtggcatcggtcggagcgatgtcgtcgccgacaagggcgttgacgagagtggattttccggccttgagtgtgccagccaacgcgatgcgcagcggttcggctaggcgcgcaccgatgcggtccagctggcaaaaaacgtcgccacgctgacgataggccggcgcaccccggtaggcctggatggttgcgtgcagaatcgcgcggacccggtcgctggtgctcacgctcgtcccaagctcgcccggggcgtcaaggttggctccaagccggcaaggttgtcgttgacctggctcaggatacccaattgccgctgaagttcccgaattcgattgtcccgctcggtttccgccacctgcgccgccgcgatggtcgcctgcagggactcggtgagcgaccgggtgatctcttcggcgatctcgcggtagtggtcgcgcagcagacgctggatcatcttgagccgatcccgtgattgtttgctgacgacgaacgaaatgtcgtcgacgaagcgccgcacattggccttggcctcgctgcgcacccgcagcaaccggttttgtttgtcctctttatatgccatccggccgaggatcaacccggcccccaccgatagcgggttgaacaacccaagtccgaccaccgacgacagcatgccaatcatgaccacgccgccataggaaccccgcatgccgataatcattttctggccccggcgcagcggtttcgattccatccggcccagcgctttgagccggccgaagtcggtgcccatgacgtgggggctcagctctgctgacaggaccgagtccaaccccgcgtcggcaaaggagcgagcgacgtcgtcggccaacgcttcggaacgctggtatgcccacacgaagttgtcgccgaccgctgtggcgatcgcattctcgacgtcgttgccaatctcggcccaatgcgcagtcgggtcacaggagtcgatctggcgctcggcgtcttcggtgacggtgcggaagcgggttcgtaggtcgtggtccacgtcagcagtcaggtcgttgaacccgtcgcccagcacctgctgccacagcgctgtctgttgcaccgcctgctgggcttcccgtttgcgccgctccaaatccgaagcaagtcggtcacggaggttcgggtcgttgaccaccgatagttcggaacctagagacaccgccaattgctctgttgccgaacgtatttcgccgagtaccccagcacgcactcgctccgtcgcgcgggaaagcacctgctcgctgagaaacttgacgatcgccggaaagttggactcttcgttgagctctttgtcgttaagcgtgaccgcgtggctgcgcaacagtgatgagactgcgatgatcggcatcggaacccgggcccgctgcagatgtgctgcattggcattgacgatctcccgccagcgcggatacaggtcggtcttggtggccacgaccgccccgaccggacagatctggtgggcctgccgcacgaaccacatctcgggttcggtgaattcctggctggtgtcgctgaccaccaagacggcatcggcctcgggtagcagccccagcgtcgccgacaggtggggctgtccgaggccgcccacacccggagtatcgataaacgccagcccgccccgcagcagcgggctgggcgcgccgacctcgacccgcaacacctcgcggccaccggcgtgcggagcccgacgcacatcggtgctgatgtcatcgacgggaatgtcaaccgctgcggttgtcccgtcgggcccggcggccagcacaagccgggccgacggttgggcgctgtagcttacgacggtgatcaccacggtggcctcgtcatcgcctactcgcgccgcgggcaggttgagcaacgaactgagcaattgactcttgccctgtttgagcagcccggcgatcaccacacggacctgcgggtcggtgatccgctggcgagcccgcgtcaaccgctgtactagatcaccacgctcgttcagtttggcgatggcgatagtgtgatcgatcagttcgacgatcacaccgacccgacgtgggtcatcgggctgggtcaccgtgtcgccccactttctcgctcgtttacgcctcagatcacggtatgcgcacaaaccggcggggaccatgaacgtccccaccggttcgtgaaatcggctcgcgaatcagaacccgggtagtccgaaaaggccgtacgacggcagttcgatgggcgccggcggcgtgtgcgtcaccggcggctcgtgaccgacgtcaaacaccgaatggctcggcggcttatcgtggaccggcggctcgaccggcgtgtgctgcggttgggtaaccgccggcgtgtgctcggccgccgtggtcatcggctgggcccgcgccggaacttgcggtgccggcgcatcggtcactggcgggttcatgccgccatagccgccggtaccgccgtggatcagggggccactgggcaggaccaagccatgctcgacgggcgtgacaccggcgttgaccgtgtcgacactgcccagtgcggctccctcgtggcccaggatgtcgccgtgtgccccgccgaccccggccgcggttgccccgccgaccccgccaaccactccagcagccgcctcggtcttggccaccacgccagccgcgcccagggccgccggctgaggagtcgggtgcccgaccgctccgaagcccaacccggcgccgccagcggcgccggcctgaccacccacaccgacaccggctaacgggcccgacagatgaggcatagcagcgccgttcaaggcagcgccttcactggcgatcaaccccgcctggccgcttgcgttggaagccaacactgcgttgctgctgaccccggtcaggccgctgacattgccgacgccgccgagcccaccaccggctgagacaccgatctggctagcgatgcccgcctggccgccgacaccagcgccgacaccagcgccaacggcaccctggccggcaactccgatctggccattgccgcctaggcgaccgccgacgccggcaccgatagccccggccgcgctcccaccgatcacaccgccggcctgaccacccagacccaggccaaccccgccgccaaagcccataccggcctgagcacccagacccgtcccaatacctaacccagcaccaacctgagcgccgacctcggcctcaatcacggcagtaaaacccagaccgacctgggcagccaagccgacctgaccgccgaaaccaccgcttgacgcggcgagagccaggccaccctgacccaggaacccagcacccagtccgctagccaggcccgcaccgacatcggtcgtgatgacgcttgccacccccgcgcccgcgtcaccggcgaagccgacattggcgacgtcctgcgcaaagccatgccgagcggcgacggcctgccgcaatccgctcatggggtcgccggcacccagattcagacccggcaccacattggccgccaccgatgagatttggtgcggcgcgatatcgatcagcccggcactggtcatggcccgtcccggagcggcaacgaacgaccgggcggcgtcttcgctgcggaacaggctcaggatgtaatcgataagc

SEQ ID NO: 26503 - DNA, 1770 bp, Mycobacterium bovis
ttgatctgccaacaccgatacgacgtggtgatcgtcggcgcgggcggtgccgggatgcgcgccgcggtcgaggcgggtccgcgggtgcgtaccgcggtactgaccaagctgtatcccacccgcagccacaccggcgcggcccagggcggcatgtgcgccgcgctggccaacgtcgaggacgacaactgggagtggcacacgttcgacaccgtcaagggcggcgactatctcgccgaccaggacgccgtggagatcatgtgcaaggaagccatcgacgcggtgctcgacctggagaagatggggatgccgttcaaccgcacccccgagggccgcatcgaccagcgccgcttcggcgggcacacccgcgaccacggcaaggccccggtgcgccgggcctgctacgcggccgatcgcaccggccacatgattctgcagacgctgtatcagaactgcgtcaagcacgacgtcgagttcttcaacgaattttacgcgctggatttggctttgactcaaacgccgtcgggcccggtggccaccggggtgatcgcctacgagctagcgaccggtgacatccatgtctttcacgccaaggccgtcgtgatcgcgaccggcggctcgggccgcatgtataagaccacgtccaacgcacacaccctgaccggcgacggcatcggcatcgtgttccgcaagggacttcccttggaggacatggagtttcaccagtttcaccctaccggcctggccggtctgggcatcttaatctccgaagcggtgcgcggcgaaggcggccggctgctcaacggggaaggtgagcgtttcatggagcgctacgccccgacgatcgtcgacctagcgccccgcgacatcgtcgcccgctcgatggtgctggaagtgctggagggacgcggcgccggaccgctcaaggactacgtctacatcgacgtccgccacctgggcgaggaagtgctcgaggccaagctgcccgacatcaccgagttcgcccgcacctacctgggcgtggatccggtcaccgagctggtgccggtctacccgacgtgccactacctgatgggcggcatcccgaccacagtcaccgggcaggtgctgcgggacaacaccagcgttgtcccgggcctgtatgcggccggcgagtgcgcgtgcgtgtcggtgcatggcgccaaccggctgggcaccaactcgctgttggatatcaacgtcttcggtcgtcgggccggcatcgccgccgccagttatgcgcagggtcacgactttgtcgacatgccgcccaacccggaggccatggtggtgggctgggtcagcgacatcctgtccgaacacggaaacgagcgggtcgccgacattcgcggggcgctgcagcagtcgatggacaacaacgccgcggtgttccgcaccgaggagaccctgaagcaggcgctcaccgacatccacgcgctcaaggagcgctactcccgaatcacggtgcacgacaaggggaaacgcttcaacaccgacctgctggaagccatcgagctgggatttttactggagctggccgaggtcacggtggtcggcgctttgaatcgcaaggagtcccgcggcggtcacgcccgcgaggactatcccaaccgcgacgacgtcaactacatgcgacacaccatggcctacaaggaaattggggccgataaggagggccccgagctgcgcagcgatgtccgccttgatttcaaacccgtcgtgcagacccgttacgaacccaaggaacggaagtac

SEQ ID NO: 26504 - DNA, 207 bp, Mycobacterium bovis
cttgccgacatctttgaatttgggagcatgtccgaggtccacctggcccgcgacctccggttgcacagcgacgttgcggtcaaggtgctgcgcgctgatctagcccgcgatcccagttttcaccttcgcttccggcgtgaggcgcaaaacgccgcggcattgaaccaccctgcaatcgtcgcggtctacgacaccggtgaagccgac

SEQ ID NO: 26505 - DNA, 477 bp, Mycobacterium bovis
atggtggggctgatctgggctcaagcgacatcgggtgtcatcggccgcggcggcgacatcccctggcgcttgcccgaggaccaggcgcatttccgggagatcaccatggggcacacgatcgtgatgggccggcgcacatgggattcgctgccggctaaagtccggccgctgcccggccggcgaaatgtcgtactgagccgccaagctgactttatggccagcggggctgaggttgtcggttcactcgaggaggcgctgaccagcccggagacgtgggtgatcggaggcggacaagtctatgcgctggcgctgccgtacgcgaccagatgtgaggttaccgaggtcgacatcggcctgccgcgcgaagccggtgacgcgctggcccccgtgctggacgagacatggcggggcgagacgggggagtggcgcttcagccggtccgggttgcggtaccggttgtacagctaccaccgctca

SEQ ID NO: 26506 - DNA, 1218 bp, Mycobacterium bovis
atgccgagtccgcgccgcgaagacggcgatgcgctgcgctgtggcgaccgcagtgcggccgtcaccgagatccgggctgcgctgaccgcgttagggatgctggatcatcaggaagaagacctgacgacgggccgtaacgtcgcccttgagttgttcgacgcgcagctcgaccaggcggtccgtgccttccaacagcatcgcggcctgctggtggacggcatcgtcggtgaggccacctaccgcgcgttgaaagaagcctcctaccggctcggggcccgcacgctgtaccaccaattcggcgccccgctctacggggacgacgtcgctacactgcaggcccggctgcaggatcttggtttctacaccgggctggtcgacggtcatttcgggttgcagacccacaatgcgttgatgtcctatcagcgtgagtacggacttgccgcagacggtatctgcggcccagaaacgttgcgctccttgtactttctaagttcgcgagtcagcggtggctcgccacatgcgattcgcgaagaagagctggtccgcagctcggggccgaagctgtctggcaaacggatcatcattgatcccggtcgcggcggcgtggaccacggacttatcgcgcaaggtccggctgggcccatcagcgaagcagacttgttgtgggacttggcaagtcggctcgaaggacggatggcagctatcggtatggagacccacctgtcccgtccgaccaaccgtagtccgtccgacgcagagcgtgccgccaccgccaacgccgttggcgcagacctgatgatcagcctgcgctgcgagacccagaccagtctcgcggccaacggcgtggcttcctttcacttcggcaactcgcacggctcggtgtctaccatcggccgcaatcttgccgatttcattcaacgagaagtggtggcgcgcaccggtttacgggattgccgtgtgcatggtcgaacgtgggatctgttgcggctgaccaggatgccgaccgttcaggtcgatatcggctacatcaccaacccccacgatcgtgggatgctggtctcaacgcagacgcgcgatgccatcgccgaaggcattctcgccgcggtcaaacggctgtatctgttaggcaagaacgatcggcccaccggcacattcactttcgccgagttgctggcccacgaactgtctgtcgagcgagcgggtagactcggcggttct

SEQ ID NO: 26507 - DNA, 693 bp, Mycobacterium bovis
atgccatcgccctcatccgccgatcaggtggccgattcacccaggccacggctgccggcggatcatcccggcgtcaacgaattgttcgcgttgctggcctacggcgaagttgccgccttctaccgattgaccgatgaggcgcgcatggccccggatctgcggggaaggatctcgatggcatccatggccgccgccgagatggggcactacgagctgctgcgcaatgcgttggaacgtcgcggcgtcgacgtggtgtcggcgatgtcgaagtacacctcagcgttagaaaactaccaccggctgacgacgccgagcacatggctggaagccctggtgaagacctatgttgccgatgcgttggccgccgatttgtatctggagatcgccgacgggctgcctgacgaggttgctgacgtggtgcgggcggcgttgtcggagaccgggcactctcagttcgtcgtcgccgaagtgcgcgcagcggtgacggccagcggcaaacagcgcagccgactggcgctgtggtcgcgtcgtctgctcggcgaggcgataacgcaggcccagctggtgttggccgaccacgacgagctggtcgacctggtggtgtccggtagtggtggactgagccagcttggtgccttcttcgaccggttgcagcagacccacgaccaacgcatgcgggaactgggtctcagc

SEQ ID NO: 26508 - DNA, 1803 bp, Mycobacterium bovis
atgaacgaggcagaacacagcgtcgagcaccctcccgtgcagggcagtcacgtcgaaggcggtgtggtcgagcatccggatgccaaggacttcggcagcgccgccgccctgcccgccgatccgacctggtttaagcacgccgtcttctacgaggtgctggtccgggcgttcttcgacgccagcgcggacggttccggcgatctgcgtggactcatcgatcgcctcgactacctgcagtggcttggcatcgactgcatctggttgccgccgttctacgactcgccgctgcgcgacggcggttacgacattcgcgacttctacaaggtgctgcccgaattcggcaccgtcgacgatttcgtcgccctggtcgacgccgctcaccggcgaggtatccgcatcatcaccgacctggtgatgaatcacacctcggagtcgcacccctggtttcaggagtcccgccgcgacccagacggaccgtacggtgactattacgtgtggagcgacaccagcgagcgctacaccgacgcccggatcatcttcgtcgacaccgaagagtcgaactggtcattcgatcctgtccgccgacagttctactggcaccgattcttctcccaccaaccggatctgaactacgacaaccccgccgtgcaagaggcgatgatcgacgtcatccgcttttggctcggcttgggcatcgacgggtttcggttggacgcggtgccctatctctttgaacgtgagggcaccaactgcgagaacctgccggaaacacacgcttttctcaagcgagtccgcaaggtggtggacgacgaattccccggccgggtgctgctagccgaagccaatcagtggccgggcgatgtcgtcgaatatttcggtgatcccaacaccggtggcgacgagtgccacatggcctttcacttcccgctgatgccgcgcatcttcatggccgtgcgccgggagtcccgttttccgatctcggagatcatcgcccagaccccaccaatccctgacatggcgcaatgggggatatttctgcgcaaccacgacgagctgacgttagaaatggtcaccgacgaagagcgcgactacatgtacgccgagtacgccaaggatccacggatgaaggcgaatgtcggaatccgtcgtcggcttgcgccgctgctcgacaacgaccgcaaccagatcgagctgttcaccgcgctgctgctgtcgctgcccggctcgccggtcctctactacggcgacgagatcgggatgggcgacgtgatctggttgggtgatcgcgacggcgtgcgcatcccgatgcagtggacaccggaccgcaacgcgggtttctccaccgccaacccgggtcggctgtacctgccgcccagccaggacccggtttacgggtatcaggccgtcaacgtcgaggcgcaacgcgacacctcgacgtcgctgctcaacttcactcgcaccatgctggccgtgcgtcgccgacaccccgcgtttgcggtcggcgcattccaggaattgggcgggtccaacccgtcggtgctggcctacgtgcgtcaggtggccggcgatgacggcgacaccgtgctctgtgtcaacaacctgtcgcgattcccgcagcccatcgaattggacttgcagcaatggaccaactacacgccggtcgagctgaccgggcacgtggagtttccacgcatcggccaggtgccctatctgctgacgctgccaggacacgggttctactggttccagttgaccacacatgaggtgggggcacctcccacttgcgggggagagcggcgccta

SEQ ID NO: 26509 - DNA, 1578 bp, Mycobacterium bovis
atgaaggagctcaaagacacgctctggaaggccgccgacaagctgcgcgggtcgctgtcggccagccaatacaaggacgtgatcctcggcctggtgttccttaagtacgtgtccgacgcgtatgacgaacggcgcgaggcaatccgtgccgagttggcggccgaaggaatggaggagtctcagatagaagacctgatcgacgatcccgagcagtaccagggttacggcgtattcgtggtgccggtgagtgcgcgctggaagttcttggcagagaacacaaaaggcaagccagccgttggtggtgagccggcgaagaacatcggtcagctgatcgacgaggcgatggacgcggtaatgaaggccaatccaacactcggtgggacgctgccgaggctgtataacaaggacaacatcgaccagcgccggctcggtgagctgatcgacctatttaacagtgcgcgcttcagccggcagggcgagcaccgcgcccgggatctgatgggtgaggtctacgaatacttcctcggcaatttcgctcgcgcggaagggaagcggggtggcgagttctttaccccgcccagcgtggtcaaggtgatcgtggaggtgctggagccgtcgagtgggcgggtgtatgacccgtgctgcggttccggaggcatgtttgtgcagaccgagaagttcatctacgaacacgacggcgatccgaaggatgtctcgatctatggccaggaaagcattgaggagacctggcggatggcgaagatgaacctcgccatccacggcatcgacaacaaggggctcggcgcccgatggagtgataccttcgcccgcgaccagcacccggacgtgcagatggactacgtgatggccaatccgccgttcaacatcaaagactgggcccgcaacgaggaagacccacgctggcgcttcggtgttccgcccgccaataacgccaactacgcatggattcagcacatcctgtacaagttggcgccgggaggtcgggcgggcgtggtgatggccaacgggtcgatgtcgtcgaactccaacggcgagggggatattcgcgcgcagatcgtggaggcggatttggtttcctgcatggtcgcgttacccacccagctgttccgcagcaccggaatcccggtgtgcctgtggtttttcgccaaagacaaggcggcaggtaagcaagggtctatcgaccggtgcgggcaggtgctgttcatcgacgctcgtgaactgggcgacctagtggaccgggccgagcgggcgctgaccaacgaggagatcgtccgcatcggggataccttccacgcgtggcgcgggtcgaagtcggctgccgtcaaagggattatgtacgaggatgttccggggttctgtaagtcggcgacgttggcggagatcaaggcgaccgactatgcgctcacgccggggcggtatgtgggtacgcccgcggtcgaggacgacggagagccgatcgacgagaagatggcccggttgtcgaaggcgttgctggaggcgttcgatgagtcggcgcggctggaaagggtcgtgcgggagcaactggggcggcttaga
